United States Patent Application Publication US 2026/0103690 A1 - sequence listing, part 63

SEQ ID NO: 306524 - protein, 419 aa, unidentified
MSFKILKNNCCGLDVHKTWIYACIGIADSHDRVEYKQARFSSFTKGLNELCDWLAKYNCTDICMESTGKYWIPVFNILEKHNLWVTLSHPKYTKPQTGNKTDRKDAKWICDLYMCGMVKPSFIPPADIRQLRDLVRYRFKLTCMITGEKNRAHNCLTVSNLKLDDVFSDIFGKSSRSITEQILQHPGEFFDVTPFVDDRCKTPIEEIQAAVDGAISPEQAVKLRQCLEHIDELEKHKSEIEREIFRLSDKYEVALNLIRTVPGFDKNPLTAIQVLSEIGSDMSVFPTAKNLVSWAGCCPRNDKSDRKIKSTRISRAGTYFKPVLVQIANALIKSKKHPEFTNRYRRIKARRGHKKAIIAICRMILTAIWHILTDLKPYTAKGFLEPRPVSKEKVLTASQALNLLKQRGYVIKDEPIFIS

SEQ ID NO: 306525 - protein, 344 aa, unidentified
MDHFAGLDVSVKETSVCIVDDTGKIIREVKVASEPEALLAVLKNPAYHFKRIGLEAGPLSQWLFSALAEAELPVVCVETRHMQAVLKAQINKTDRNDARGIAQMMRVGLYRPVHVKTLRSQKLRMLLTHRKLLQSKAIAIENDLRGTLRNFGLKVGMVGKVKFEARIKELVENLPDLAALVEPLLIVRRVLREQIIILHRRLLAIVRDDEVCRRLMTTPGVGPVVALTYRATVDVPARFRKSKAVGAVFGLTCSKYQSGEIDRSGRISRCGDEMMRVMLYEAAQSMLRSKKWSWLKAWAMQVARRRGMKKAIVALARRLAVIMHRIWVDGTEFRWTREQAPAAA

SEQ ID NO: 306526 - protein, 356 aa, unidentified
MTIVAHAHPFVIGVDAHARNHAVAVVACPTGEVVDEAQFPATVAGLQRAVSWVARRTGGDLDVLWVIEGVGTYGARLARVANDTGYAVAEAGRMNARANRGVGKSDPLDARRIAQSVLAVDEGMLRRPRADDGVRAAVRVLIASRDHLSAERTSAVNALTALLRVADLRIDARRPLTAAQITAMAAWRARDEDLATAVARREAVRLAKRVIAADREIAANTKQLTHLLNASPARVLLDQPGIGPVTAAVTLAAWSHPGRVRSEAAFASLAGVNPIPASSGNTVRHRINRGGDRRLNRALHMATVTRIRMDPRTRAYVEKRTAEGRTPREIRRCLKRYLARQIYRQLNAAETALNPT

SEQ ID NO: 306527 - protein, 393 aa, unidentified
MACSRLASHRCPACGVTQKRCVHGTKSECPSRATMVAEIRPKRRCARMKVLIGVDPHKASLAVAAIDEASGELLERASFLQEQAGLRSLERWAKRFPERRWAVENAGGLGRHLAGRLSVAGESVVDVPPKLSARVRVLSTGNSRKNDGLDALATALAASRRERLAAVDHETAPEVLRLLSERREDLVAERTRALNRLHGLLGDLVPGGVAGTLSAHRAARILRSIRPRGISSRVRRRLASEILRDVRTLDRKVADLDGRIEDELEASGTTLTEIFGIGPILAARIIGTVGDVTRFPTKSHFASYSGTAPLETSSGEVVRHRLSLAGNRKLNYALHMIAVCQARSDVRGGAYYRKKIEEGKSRKEALRCLKRRISDAVFRSLLADSQASSNSAA

SEQ ID NO: 306528 - protein, 350 aa, unidentified
MTLWAGLDLGQEYSHVCIVNEAGIPVHEARCVTDLACLTEVLSTATLKSLEMIAVEAGSEPHIVRKLRKAGYPLAIFEARKASRFLAIRRNKSDASDARGLADLARLGRYTVSQVRLKSIECQQLRGQLALRRRLVKVRVATELAIKSQLALYGRRLGKQYSASLLAERVSSQVLQLKAEEGVDLAADLEPLVEMATSLRLHVDQLDKRLQKAASENSVCKHLMSVVGVGPICALSFYSAIEDPERFSKPTDVAAYLGLVPRRYQSGEVSYTRGITKTGSTMTRTHLVNAALVFTTYGPDSALKTWAGGLRERTGVRRARVALARKLSVVLLIMWKTGASFEPFPKAAQS

SEQ ID NO: 306529 - protein, 462 aa, unidentified
MTVPRKKGHRKHEAPLPTSLPAIRPLVAGLDVGSSQHWVCGPGREDGKPNVRVFGTTTDQLNELADWLSEQGVESVAMESTSVYWIPIYELLEARGIEVLLVNARQLHNVPGRKTDFSDCQWLQLLHSCGLLRGSFRPVEAITRLRALQRQLANLVAERTRCVQWMQKALDQMNVQVHRAVADLTGVTGMAMVRAIVAGERDPARLAMHRERRCQKSATEIARYLTGTWREEHLFNLASALRLFDALETEIASYDGQLLKEVASLQPPDRQEAPVPPHPNPAKEKAIKARGEQQARTTLWRFAGVDLTRVDGISAGTAQVVLTEVGPNIAAFPSEDHFVSWLRLCPRTPISGGKPLKKRRNGLGANRIAGVLRMAATSLHRSKTALGASFRRIARHKGGAVAVFATARQLARLIYRMLRYGHDYVDIGETAYDRRFQIRRLAALTETAKSLGYTLVPNVAAG

SEQ ID NO: 306530 - protein, 315 aa, unidentified
MVNVPCFIGIDVAKAQLDIAIRPSGERWAVPNDASGVTMLVDRVQALQPTLIVLEATGGLERAATVALATAGLPVVVVNPRQARDCARATGQLAKTDALDARALAHFADVIRPTPRPLPDAQTQELRALLGRRQQLIGMRTAEQNRLAGTSERLTQDIKAHIAWLNTRIATLDDDLETMLRASPLWRENDDLLQSVPGIGPVCARTFLLELPELGTLTRQQIAALVGVAPLNCDSGTLRGRRTIWGGRAHVRTVLYMGTLVATRFNPQIKAFYQRLLAAGKIKKVALTACMHKLLTMLNAMLKHRTSWQAQEVQN

SEQ ID NO: 306531 - protein, 340 aa, unidentified
MTQETLSWFAGVDWGSERHHACLLDAQGNVVGEREFPHSGAGLAELGDWLLSIAGEANAVAVAIEVPHGPVVDSLVDRGFVVHAINPKQLDRLRDRFSVAGAKDDRRDAYVLGDGVRTDRRLFRRLHVADPRLIELRAWSRLAEELKEEQRRLSNRVGQQLWRYYPQMQKLTDDLAAPWFLELWTIAPTPAKARQLRKPTVERLLREHRIRRLDADTVLATLREPAIKVADGVAEAASIHLRSLVARLRVVNRELHEAEGQLDKLCTTIGETEAASRDCLRRQDVLILRSMPGIGRINLAALLCEASGPLGSRDYQALRTLCGAAPVTRRSGKSRIVVMR

SEQ ID NO: 306532 - protein, 427 aa, unidentified
MRVLYDRVAAIDVHKDMVKVAVRVPGKKRGTRTTDVLEYRTFYGVLQAMARELRGRGVTHVVMEASGIYTEPVYYALTELDFTEVLVVNPAHVKALKGHKTDAKDAVRLLDLYECGAVMRGSYIPSPDLKEVRDLVRYRVKTVQARTSEIQRLQKTLESAGIKLDSVVSDITGDSSTAMIKALIDGERRGQVLADLALGRMRTAGKLADLSMALEGRFTGHHALMCRLHLDQIKMFDNAVGGLDAKISPLVARYAAEADLLKTIPGFGDVVTAGWLGAIGPAPHQHFGTAERLASWVTLCPGNYISARKSRSGRTGDGGSYIKPLLVQAAWAAIRVPGRLQARFHRLVRKFGGPKNKGAKKRAITAIAHTLLKIAYAVLKTGQPYREPGADFYTRRESAQARQDYLLRQLQKLNPGCVITITPQEAA

SEQ ID NO: 306533 - protein, 418 aa, unidentified
MKQVTTIGLDLAKAVFQVHGVDASGVVTLRRAVRRRQVLSFFAKLPPCLVGMEACATAHYWAREIAKRGLDVRLIPPAYAKAYVRRNKNDPADAEAICEAVSRPSMRFVAFKSEMQQAAAGIHKVREMLIKQRTMLINTLRGLMAEFGIVVAQGPHHVGELVAILADPADRRIPTPLHEGLLAIVETLRGLERRIEIVEKQIVGWGRGNQTCRHLITIPGYGPILSSAMAAFTVDPAAFGSGRHFSASLGLVPRQDGTGGKVKLGPISKRGNGYLRRLLVNGAMSVLCSKRGKEDPWLVKLLQTKERKVVACALANKMARIGWAVMMRQEDFHGRRHDHPCPDLREHDAVLTAVKTASRAPSAVALGSLEASLDRGCARRHSGTRSGRRNGPLIEQRNGSQNTRHPKVGGTGKRDSHD

SEQ ID NO: 306534 - protein, 389 aa, unidentified
MKIFVGIDIAKLNHFAAAISSDGEIIIEPFKFTNDADGFQLLVSKLESFDKNSLIIGLESTAHYGDNLVRYLVTELYQVCVLNPIKTCQMRKNNVRKTKTDKVDTFVIAKTLMMQDVLRFITFFDLDMMDLKALGRFRQKTIKQRTRLKIQLTTYVDQVFPEIQYFFKSGLHQNAVYALLKEAPSPKEIASMHMTHLANLLKVNSHGHFTKEQAKELRVLAQKSVGANDSAISIQITQTIQQIELLDSQLEKIEAEMTDIMKFNDSVIMTIPGIGYINGGMILGEIGDIHRFSNPNKLLAFAGLDPSVYQSGNFQAKTTRMSKRGSRVLRYALVNAAWNVVRNNATFKAYYDAKRAEGRSHYNALGHCAGKLVRVIWKMLTDEVEFNLE

SEQ ID NO: 306535 - protein, 340 aa, unidentified
MKKVSTIGLDLAKNVFQAHGADASGDVIFRKKLRRAQVLEFFATQPACTVAMEACGGSHFWGREIGNYGHRVRLIPPAYVKPFVKRQKNDAADAEAICEAAQRPTMRFVAVKSEAAQGAAVVFRTRDMLVRQRTQIINALRGHLAEFGLIVAQGPAHVAKLIMAVQDPKQPLPEAARPILCVLVDMLNLLDQRIKLLDIAIARRAKEDEVARRLMSIPGVGPVIATAVAALAPPAETFKRGRDFAAWLGLTPLQHSTGGKQSLGATSKMGERTLRRLLIIGASSVVRWAARKGAPAGSWLASMIARKPAMLVRVALANKMARVIWALMAKGGTYRAPVVA

SEQ ID NO: 306536 - protein, 365 aa, unidentified
MNDRNIFVGIDFHKRYSVISAQDSAGNRLLEARINGNTPDGFKKAFSQLPGKSKVAMEACWNWGKLYDILDGLPGIEEIVLSHPYKTRIIAESQIKTDKIDARKLAELLRGNFISRAYAPSKEVRRLKETLRQRLYWVRLRTCVRNRVHILLDRQIALEMAQRSDLFTGKGMKILKSLRLPDQRQQTLLNQDLECLELLDRHIKEIEKDMTYLCRENEDLRLLCSVPGLGITLAPVIGLEIDDITRFVRSDKLVAYSGLAPSTHSSGGKTYHGKMLWQSNRWLKWAFIEAAWVAIGCDPYFGSLYREYRAQGKGANTAITRVARRMCKIVWQVLNQKRPYEKRSYAMISEFSGALSVKTDGLCTV

SEQ ID NO: 306537 - protein, 403 aa, unidentified
MKTIIGIDWSEKKHCVHAYNETGAQLLRLEVATTADGFRELTCQISQLNPEPANCLVAIETAHNLLVDYLHDQGYTLYILAPSMVRSNRGRQGGSGAKDDDRDAQLLAEILRTDRGQLIPWQPDGPLVRQMRTLLTWVDQLTKSIVRQRNRLRANLLRFYPQALNAFGNLQTQFCLRFLAAFPSPASLEMLGYERFTAFCRQAGYYEYDRYPHIWHALSMEGFQQQHNPLFGQQVAWQAEGLLAMLLHKRRLIAQVQALFQQHPDAFIFASLPGAGDLLAPKLLVIFGDHRQRYPTRSWLPAIAGTAPVTVASGKSRFVKFRRACNHDYRQTAQQFAQSSIRKSAWAATYYYRASDRGLSKSHAYRCLANRWLHIIWSLWQSREAYDEAYHLSQVAKHRRKPD

SEQ ID NO: 306538 - protein, 396 aa, unidentified
MLTSIMVNNSLTGYAGVGKASAASRADTSRRREFDCVLASEAVTEREPRRHCGTSPNSRLSRHRPTRPASSHLQVREKTMSEPVYVGIDVAKETFHIATCPNILKTSLPNTPDGHQQLCRLLREHTITLVVLEATGGYERPIAAELLNASLPVVVVNPRQVRDFAKGMGQWAKTDPIDALVLARFAQIVKPTPKTHSTPQTAELAELVRRRRQLNDLRTQESNRLVMIHHPKVKKSIKKMIKTLDFQINEIDRLIREHIDTDDNFKNKDRILQSTPGVGPQTSAMLIANLPELGKLNRQEIAALAGLAPYDCSSGKYDGRAHIWGGRKDVRSVLYMAAFTASRFNPIIRELAVRLKQKGKAYKVVITACMRKLLIILNTMIRNQTLWSPKIYLKNT

SEQ ID NO: 306539 - protein, 390 aa, unidentified
MQALYPRPDEHAAVRTDLKAIFVSLELSRSTWVITSLSPGGGEKMSKHAVPSGDIPALLARLSQLKEKARARTGQVFPIIVIQEAGLDGFWIHRVLQQEGIESYVVDPASIATSRRRRRAKTDKIDGEALVRALLAYKRGEPRVCAMVKAPAPHEEDRRRTSREREVLTAERVQHVNRIKGLLFAQGIGDYEPLHRNRRERLEELITGDGRPLPECLKAQIRRELDRLELLIEQIKAVEAERDAVLAQAQASPGVSAPAAQLLTLRGIGPEAAATLWTEGLFRTFNNRKQVAAYAGLAPTPWQSGSVHRDQGVSKAGNPRLRTIMIQIAWLWLRHQPQSALALWYRARIKRTGGRLGKTMIIALARKLLVALWKYATAGVLIEGAVLKPA

SEQ ID NO: 306540 - protein, 348 aa, unidentified
MKVKTIGIDLAKDVFGVHGVDARGKALVHRSVTRKHLLGLLAKLEPCLVGMEACGSAHHWAREIEKLGHTVKLMSPQFVKPYRKGNKNDPNDAEAICEAVTRPSMRFVPVKSAAQQDLQALHRVREQLLKSRTALVNQVRGLLGEHGIIAPRGIAHLRRLLSQLLADPEGSGLSGLLGETLVEIAGRLRFIDERIGVYDLRIRRVFSDDERCQRLAKIEGVGPLVATAMVAAVGNAHEFKSGRELSAWLGLVPRQHSSGNRNVLLGISKRGDRYLRTLLIHGARSALCRVERRRDRRSIWASRLKLARGFNVAAVALANKNARIIWALLTRGDNYRPAVPADPGKQAA

SEQ ID NO: 306541 - protein, 351 aa, unidentified
MGQYVKEAVCGEHFVGLDVSLKSVSICVSDSVGGVLWRGDVVNESEVVAATLSRRAPELVRAVLETGSCGIHLYRGLEAAGVPVVCVCARHAKGVLKCKVNKTDANDAEGLAQLARTGWYREVYVKSADAHVIRAHLLARKQITKARRDFENQVRALLRTFGVKVGTVARGRFEDRVRRLLERVPALRLPIDQLLTARRSLLASQDALEAEAKRMAAADERCRTLQTMPGVGPLTALAFVSTLDGPARFAKSSSVGAYLGLTPRGHQSGEAAWAGRISKTGDGVSRTLLYEAANVLMVRVKARPPLRVWALKLADRIGGKKARVALARKMAVILHRMLADGTAYRGTAEAA

SEQ ID NO: 306542 - protein, 346 aa, unidentified
MTNGGIDLGRRMSQICILKQDGEVIEQRIKSERERFAAVFKAHPGARILIEAGTESEWVARSLEELGHEVIVADPNYAPMYGQRHRRVKTDRRDARALAEACRLGAYRPAHRTSEAQRHVRWQIAVRETLVRTRARSIVLIGSLLRQAGLHLPGGGAETFLNRLNALALPEPLHQAIGPMLPALEMLNRQVTTADRALEEQARSDPRVRRLDTAPGIGPVTAATFVATLDRADRFAGSHQLEAYLGLVPREYSSGERQVRGRITKGGNTRLRCLLIEAAWSIVNYPKPETAALRQWTLRIAGRRGMPRAVVALARRLAGILFAMMRDETVYDSSRLTSRSRPARVA

SEQ ID NO: 306543 - protein, 345 aa, unidentified
MEQIIRIGMDTSKHVFQLHGVNAAEVPILRKKLRRKEMVAFFEKLAPTVIAIEACGASHHWARLLQSFGHTVKLIPAQLVKPYVKRGKNDAADAEALCEAMSRPTMRFVPVKTSDQQAALMLVGVRDRLIRNRTQLANTIRGHAAEFGLTAAKGMAHLVPRLDRIQADESLPALARELFALQAKEYLQMQAQIKEIDGKLTAWHRADECSQRLAKIPGVGPIGAVLLRMKTPDPELFRSGRQFAAWIGLTPQDHSTAGKTRLGVITRAGDEGLRSVLVVGATAVIKQAQRSGKASPWLAALLKRKSPKLVAVALANKMARIAWKMMVTGETYMANSAPAVVANVA

SEQ ID NO: 306544 - protein, 327 aa, unidentified
MDESQENVSVVGIDMSKHKFDVALLRAGKLKHKALRNDRGGHAALVTWLQAKGVSTAHVCMESTNIYGESLGEYLHNEGFSVSIVNPARVKGFAQSELIRTKTDKADAALIARFCAAMRPGLWQPDPPEIRALRALVRRLDALVEMRQQEINRQQVANEVLLETLTDHIAYLDESIRTIKKQIQDHIDNHPDLKEKRALLESIPGIGEATIQVILAEFADITRFKRAKCLASFLGVAPREIQSGCSVRGRTRMSKVGRSQLRKAFFMPALVAMRYNPPVIAMKERMLKAGKPKMAIVGAAMRKLVHLIYGVLKSGKPFDPEYTVNRA

SEQ ID NO: 306545 - protein, 422 aa, unidentified
MKNITASKLKQIPERYLIAGVDTHKKKHAVVLRTQDAVIHSRFQVGNSRQGFNELLERTRRCMTKVEARGVMFAIEAGGRYWRPLAYYLDGNGIPFRLISPFTLKRRREGDDVDRRKNDYHDAETAAELLRTGAFTETKLAEGRYAELREAYHAHHRLGEEITQTSNLLGSLLDGVFPEFCQVFRDIDSKTALAVLDAYPLPHIIAGMPPEKFQDAMLESNKGMRLMRKKLVAIHEAARDSIGIRAGSRAVAMEVSMLVERLRLLHAQRERTERLLVEIEESLPESKLLLSVDGIGPITVAGLLGELGPIRNYRKAKQLVKMAGINPVQSESAGKRGGRTPMSKKGRPLLRHCLWEACCGLLRYNASFKAWFERLLERPVYGHPLNKREARGAMCRKLLHLVFALVTNGSSYRREGMVSVTV

SEQ ID NO: 306546 - protein, 432 aa, unidentified
MSSNRLQVGIDFGQKGVHFCLLFPDGRPLETHRAFDNSRTGFADAKQLLLDAITQQGFDGVDISGEATSYYWLPFFLQLEADPDLAMRDLNLFLLNPRWVHWFKKCFAPDDKSDARDPFYIAERTRTHRPTNAWSPQWETLPLRFYTRWRFHLVQDLVREKSYAATLLFLKASAYGRLKPFADLFGVTSRQVLSEAPTLDERAALPIAALAQQLDDLSRHTLPDPLDNAEKLQQVARESFELPAALGEPIQRLLDRTLVHLDHLEAQIQQAETWIASQVEQQPAIAQLATIPGIGPVFSSGIGAEIGSITRFLTGTKWDQHHKRFRPKNLRDAEDAIAKIAGLWWPRGDSGDFEAEERRMAKSGNRYLRYYLIQASNKLRFHIPEYATYYARKYKEVSKHQHKRAMVLTARKSVGLFVGLLHRHEAYRAEPD

SEQ ID NO: 306547 - protein, 339 aa, unidentified
MQVTTVGLDLAKNIFQVHGIDNDGEVIFNRALRRAQVLAFFERLEPCLVCIEACGTSHHWARELIKLGHNVKLIPPAYVKPYVKRGKSDAVDAAAICEAVTRPTMRFVEVKTPEQQAILSVHRTRDLIVRQRTQTINMLRAQLAEFGVVLPQGVYHALKFAKNSLDGEPLNLPQDAQEVVFDLCEQLLFLHAKILRHSRHMTQIAKSEKRVALLRTIPGVGPITASAIVATVGSGKQFNNGREFAAWLGLKPLNRSSGGKERLGHISKMGDQYIRRLLVLGMTSRIRSIRLEPEKFDPWFADILSRKPSRVAAVAMANKTARMIWDVLTQNEPYKVRTI

SEQ ID NO: 306548 - protein, 370 aa, unidentified
MKKNSKNSKSPTRSTKTKLRKTDQVTIGMDLGDKTSRYCVLNAAGEVQLEGSCATTKAGMAQVFGAMPYCRIAIEVGAHSPWVSRTLKRLGHEVIVANARQVKLISQSSRKNDKLDAQMLARLARVDPALLRPIRHRSEEAQKDLMTIRIRAALVESRTGLVNAARGLAKSTGERLAACDADQMEVEKLEQLPADLRETLKLLVEEVESLTEKIKECDRKIEQIARDRYPETKLLRQVSGVGPLIALTYILTIEDKQRFPKSRDVGCYVGLRPKQSESGERQPELRITKEGDVYLRKLLVQGAHCIMAKRAPDTDLKRWGTKLAGRGGKNARKRAIVAVARKLAILLHRLWATGEVYEPLRNSQARAKAA

SEQ ID NO: 306549 - protein, 375 aa, unidentified
MKKTVRFLGLDVHAETIAVAIAEPDGSVRNIGSIANRAEAIRKMVKKLGAVEQLRACYEAGPTGYVLYWQLAELGVACDVIAPTLMPMKAGDRVKTDRRDAERLARSFRSGDLTPVWIPDAGSEALRDLVRAREAAKQDQLRARHRLSKFLLRAGQRPAAGVKPWTQLYMAWVRQLRFEQVAQESTRLDYLHEVEHMGERVARLEQAIAEAVKLASPAIQEVVKGLQALRGIAQISAVTIAAELGNVTRFESARQLMGYSGAVPRENSSGGRTQRGSITKTGNAHLRRIAVEAAWSYRLRPAVGPLLRKRQEGVPEEIKEIAWKAQVRLGKRYARLAAAGKDQRKIVTAVGRELLGFVWAIGVKAEAAAKQKMAA

SEQ ID NO: 306550 - protein, 374 aa, unidentified
MKRILKIGMDVHSKSYTLCAMEPVIGTDDRIFATIEVTADHKNILMFIENLKQKLGMDNEYDIQCGYEAGCLGYSLYNQLTAAGVNCVILAPTTMLTQQGKRVKTDVRDARMIAQCLSYGGYHPVYIPTEEDDSVKEYVRMRDDHKIMLKTVKQQINALCLRHGFHYDGTKWTLKHVAWLRKLELSPLYRETLDEYLASYDEQTAKIERFDRRIEELASQKAYAEKTKELGCLLGIKTHTALSLIVETGDFYRFAKGNIYASYLGLVPGERSSGEHMNRTGITKAGNTHLRKLLIEAAWGICKGAVGHKSKELRARQRGNKAEVIAYADKANARLRSRYYRLIRHGKAKNTAVTAVARELACFVWGMMTDNITA

SEQ ID NO: 306551 - protein, 337 aa, unidentified
MKYSGIDLHSNNSVVTITDEADRIVAEKRLPNDLAKILAMLMPWRSEIVGVVVESTFNWYWLVDGLQTAGFVVHLANTTAIRKYDGLKHSGDETDARYLAHLLRLGILPTGTILPRDQRAVRDLARKRLQLVRCRTQHILAIENITARQEGNRISSNQVKRLSAEAIDQMRLPEEVALAMKTNAAVIATLTEQIDLVEKRLEDRVQTRTEYALLTTVPGIGKTLATTILLETGPIERFATVGKFASYARCVDSQHTSNGKKKGEGNIRNGNKYLSWAFIEAANFAVRFCAEAKRFYERKKAKSNGVLALKALAHKLARACFHMLRDQRPFDVKRCFA

SEQ ID NO: 306552 - protein, 415 aa, unidentified
MKVVFQTCCGVDVHKTFVVATIITTPADGLQPHYQKKRFSTFNSDLNRFADWLLEHNCLDVCMESTGKYWVSVFNILEKRGVRVVVANPKWVKAVKGNKDDTKDSRWIGDLFRIGLVKSSFIPNLDIRILREFTRYRYKLTSMKSSEKNRFQNAFTVCNVALDSVVSDMFGKSATAITDYLTSDGSFDPDHCVSLLQGSLKKKAEKVLESIEGFSFADEQKARIKIIREHYDFVENLIAKVDTCVDEMVAKYDGAINLLCTIPGIDRNSAITIISEIGTDMSQFGSSKRLCCWAGLTPGDNESAGKKKSVRISRAGVYLKPALVQVAHATVKDKTNPYYALKYERIAKRRGKKRAIIAIARMILTAIYSMFCTGEVWNPVDLFKIDMPEHLKEQQLSKAIKQATRFLEKQGLTVA

SEQ ID NO: 306553 - protein, 345 aa, unidentified
MKYKYHIGMDAHSKTCTFVAMSHKGRVVQKAKVATNETELLGFVRSLPSPKALAFEETMLSQWLYVLLKDEVDTLVVCDPKPNKRPGAKTDKIDALELADLLRVGRLSPVFHTNDVRIELRTLVSGYHDLVQEIVRTKNRYSALYRQSAIRISGSKAYTDPELVQKLPTRTQRFVAKPLLQQIELLESHKEVYQKKFVQNMKRFREMRLIKGIPGFGPVFTNQVVGIVVSPWRFATKYKFFSYAMLVKHRQMSDGVAYGERKAYGNIQLKSIFKMATKVVLSSENAFKRKYQQMILEGASQKAASNAVCRSLAATVLGVWKSGKKYDDHYREVMQRKKKGSHNRT

SEQ ID NO: 306554 - protein, 421 aa, unidentified
MKGSVRIVGFDCGEDEHAAVLLDEAGEFERRVDVVNERGQIQESLAELLLAVGPDSQLVVVVESKRSHGRIVADVACELGCELWQVNTVALNHFRDLEGQPRKDDEWDAYLGARMVYLRMGGCRVAIETTEEERILSRLTRIHSRVTEDRKRYVARLRAVLLELAPQMLHSSWEGPQPGSKAMQYLLERWPGFKGLERAQMRSIEKILHRCRYGSKAPHVAKLIREAARGICVAAEERSTLTLELDLLVRQIRLCNESMDQVYAEIADRVERHPMGKKLLEMHGNGPVITGVLVSELFPVARTSTEPKCATYAGVTPLSRKSGKSLDKDRLTQGVNKRVLHALYTASVVAIKNSAVDRAYYHKKLRDYAGHPKPHAAAFIALSRQRHKLLYKLMTTDARYDKEILIASHLERQEQERIATA

SEQ ID NO: 306555 - protein, 343 aa, unidentified
MKLHVVGIDLGKSVFHLVGLDSTGKVVIRKRCSRTQLLAFTANLQVQLIGMEACSGAHFLGRALREQGHEVRLMPAQYVKPYVQTNKSDYLDAEAIAEAVQRPRMRFVPIKTEEQLDLQALHRVRERWVMRRTAVVNQIRSLLLERGLTLPKGRSYVDRQLPRILEDGELRLSGSFRVLLAQLKLELEQLTARIEEMDRVIQKTAKENEDCQRLTEIPGIGPVTATALIAAVGNASAFQKGRNLAAWMGIVPGEYSTGGKQKLLGISKRGNKYLRTLFIQGARSVVQQRHKQSPGLSHWLAQLLGRTHQNVVIVALANKLVRMAWAVLCKNERYRAPVLAVTN

SEQ ID NO: 306556 - protein, 385 aa, unidentified
MQRSNISAPIADHNDTIFSSIELSRKEWLATVQSPDRDKLSRYKVAAGDHVGLLELLNRIRERAERRLGRKLAVVSCYEAGFDGFWLHRLLVAAGITNYVFDPASIAVEQRGRRAKSDGIDGEVLLRTLRAYCRGEPRVVRIVRVPSREQEDVRRDTRERQRLIGEQTAHTNRIKSLLRLVGIEPGSPRRSDWFKWLSEQRDWNGQAVPARLVAELKREHARLMLVREQLAALEQPPRAELSPAAAEMAKRRDALLQLKSLGAAFSGTLTNEAFYKDFRNGKQVGSYFGLAPSPWKSGRTDREQGISKAGNPRARQAAIELAWLWLRHQSNSALSKWFLARTLKASKRIKRIAIVAMARKLMVALWRFVTAGLVPDGAVLKPVKA

SEQ ID NO: 306557 - protein, 390 aa, unidentified
MQTVADRLEAPNAIRNDLGAIFISLELSRSTWLITSLTPGGGEKMSKHSVPSGDIYALLARFSEFKQKAVARTGKSFPIIVIQEAGLDGFWIHRVLQNEGIESHVVDPASIATSRRCRRAKTDRIDGEALLRTLLAYKRGEPRVCAMVKAPTPEEEDRRRLCRERKILIAERVKHVNRIKGLLFCQGVSGYKPLRRDRRQRLDELRTGDGRPLPKHLKAQIGRELARLEQLLEQIKAVEAERDALFAAAKAAAPAPGPPAMLLNIKGIGPEFAAILWSEGLFRHFDNRRQVASYAGLAPTPWQSGSVDREQGVSKAGNPRLRTTLIQLAWLWLRNQPQSALALWFKDRVSRNGGRLKKTTIVALARKLLVALWKYVTAGVVIEGAIVKNA

SEQ ID NO: 306558 - protein, 406 aa, unidentified
MKQQQGIVYGGVDTHLDVHVAAVVDGTGRLLGTKSFPTSPLGLRRLERWLSGHGQVAGVGVEGTGTYGLGLQRVLQAAGHDVVEVNRPNRQLRRSKGKSDTVDAEAAARAVLAGHATSTPKSRDGIVECLRVLRLADRSMREQMTRLAGQLDHLTITAPEAIRVDMTGLSALRRARKAAACRPSDSIGDVASATKTAMRTLARQWLGLREERARLREQIQQLTAQSNPALLEMPGVGPDTSAALLIAAGDNPARLRSSAAFAALAGVSPIEASSGKKSGHRINRGGDRTANAALHRIVLVRMSRRHQPTMDYIARRTAEGLSKRDIIRCLKRYVAREVYHALTHPEPTADISALRPRRNTLGIPMRTVAEHFQRPINAIARLERGQVRDAELAARYHAWLDAQGAA

SEQ ID NO: 306559 - protein, 317 aa, unidentified
MEETSTVVAGIDTAKDKLDVAICGRALRLQVANSMRGWKQLRADLAKAGVGRVGIEATGGYERGVVRHLQAAGFVVLVLQPIQVRAFARLHRQRAKNDALDAALIAACAAAIEPHEIGPDQRLAGLADSLTFVEQIEEDLARFKTRLEHIGEPRLRRMVLADIARLKVRRLAQLRLIAKQLRAHPDLAVRLDLVMSVPGIGERTALALIIRMPELGRISREQASALAGLAPFDDDSGKYRGQRHIAGGRGRLRRSLYAAALPAAFRWNKALIGLYRRLTTAGKAHSLALVACARKLLIYANTVVARGAPWREHAVPT

SEQ ID NO: 306560 - protein, 391 aa, unidentified
MFLLGIDIAKLNHVASCIDSSTNEVVFSNFKFKNDFKGFSALLNKIKSFDAKNLIIGLESTSHYGENLINFLFIHDFKVALINPLQTSHLRKANIRDAKNDNLDSLNIAKSLVFAKLNLVSKKNIECFSLKKLTRFRSNLIKQRSKAKIQLTSLLDLLFPELQYLFKSKIHSKAIYSLLKKYPSAEEIAALKDDEISNLLYASSKGHFKKEKSIELKSLAKTTVGIKDTSISLHLIQLIELIELYTKQIKDIEIKITDIVNNLDTTLLSVPGISVIACAIILGETNNFENFSSSKKLLAFAGLDPKIRQSGNFNASSCRMSKKGSPYLRYALIFTAWNIVRHSEKFNKYYSLKRSQGKSHYNALGHVAHKLVRILFTLIKKNISYQEEKLE

SEQ ID NO: 306561 - protein, 369 aa, unidentified
MKTKTLPRRNPTSVVSTATPAGTVPGRFTVGLDLGDVHHYVCILNPAGEIVREGSMVNTRPALSRLMQEYAGATVAMEAGTHSPWISRFLQAQGAQVLVANPRKLHAISRHERKCDQRDAQMLARLARVDPALLYPIQHGSAQAQHDLLGLKLRDALVRTRVNLINAVRFTLKSLGYPVRNRSSESFHKTVLAQVPAECVAVVQPLIVVLEQVSQQIKGMERELVERGRRDYPVTQRLQQIAGVGPLTALCFVLRIGEPQRFGRARDVGAYLGLCPRRDQSGGVDKQLRISKCGDGLLRRLLVSAAHYILGPFGPDCALRQYGQRLSGTGSPREKKRAVVAVARKLAVLLLSLWKHGTDYEPRIAATPA

SEQ ID NO: 306562 - protein, 348 aa, unidentified
MAHFVGLDVSVKETSVCVVDDAGKVILEQKVLTEPDAIIALLTSLGVTYGRIGIEAGPLSQWLVNALTAADLPVICVETRHMKALLTAQQINKTDRNDARGIAQMMRVGLFKPVHVKTLVAQEQRMLLTSRKLLQRKLLDVESDLRGTLRNFGLKVGVVSSGRYEARVRELVAGFPRLAAIVEPVLSVRRVMRQQFAVLHKMLLDTVRGDPVCRRLMTAPGVGAVVALTYRATVDQPQRFHHSRAVGAHVGLTPKRYQSGETDYEGGVSKCGDALLRTMLYEAAHVLLTRGAKWSWLKAWGVRVAQRRGMRRAIVAVARRLAVVLHRMWVDGSEFRWSKDSTAVPAVA

SEQ ID NO: 306563 - protein, 344 aa, unidentified
MDHFAGLDVSVKETSICIVDDTGRIVREVKVASEPEVLLKVLGNPAYRFKRIGLEAGPLSQWLFSALAEAGLPVVCVETRHMRAVLKAQINKTDRNDARGIAQMMRVGLYRPVHVKTLRSQKIRMLLTHRKLLQSKAIAIDNDLRGTLRNFGLKVGMVGAVRFEARIRKLVENQSDLAALIEPLLIVRRTLREQVVILHRRLLAIVRDDEVCRRLMTIPGVGPVVSLTYRATVDVPARFRKSKSVGAVFGLTSSKYQSGEVDWSGKISRCGDEMMRVMLYEAAQSMMHSKKWSWLKAWAMQIARRRGMKKAIVALARRLAVIMHRIWVDGTEFRWTREQAAAAA

SEQ ID NO: 306564 - protein, 380 aa, unidentified
MNRMTLQSNDNAAEHVLYMAMELSDKRWKLMFSDGGEKRRHETIEAGRRLELVEAIRKAKAKFRLSPEARVVSCYEAGRDGFWLHRYLVSLGIENQVVDSSSIETNRRERRAKTDRLDGVKLLAMLMRYWAGERGLWSVVRVPNVEDEDARRLHRELESLKKERTRHRNRIGDLLVAQGLRLKPNRGFLQRLETLTLWDGTSLPAELKGALEREYRRLSMVEQQLRALEKTRTQRIAHADSHPLRQVVQLMGLRAIGPNCAWLLVMEFFAWRGFRNRRQLGACAGLTGTPYASGGRKRDQGISKAGNARVRTMMVEIAWLWLRYQPSSTLSRWFRERFAGGGARMRRVGIVALARRLLVALWRYLEGGELPEGAELKAAG

SEQ ID NO: 306565 - protein, 373 aa, unidentified
MQYNTLFVGMDVHKESFTLCCYDMSRDKVSYTQKTDADYTRVLQYLQTVRKAMGGDVQFVCGYEAGCLGYTLYHQLTKSRVQCELLAPSTMMQAGGRKRVKTDRRDAERIAKCLAFHTYSPVHIPTDQDEKVKDYLRMRDDHKLALKKVKQQILAFCLRHGYVFTGTSTHWTESHLKWLRQLEGEGLYNEILSEYLLTYQTLKEKIERMDRRIEELAQEDAYREPVKKLSCFLGIKTHTALATIVEVGDFKRFPTADRFASYLGLVPGERSSGDSQIRLGITKAGNCHVRTLLTEAAQCFSRGRVGYKSRVLKKRQEGNTPEVIAYADRANERLRRKYYQMVLGKNKKANVAKTAVARELACFIWGMMTDHIA

SEQ ID NO: 306566 - protein, 365 aa, unidentified
MWEAPVKIQRTSVGLDVHARSVLGCALDGDTGEVFQRRLCPDHGEIVAWLGDLPGPVAVTYEAGPTGFGLARALTAAGIFCEVAAPSKLIRPAGDRVKTDARDAAHLARLLHLGQITAVTVPPASQEAARDVVRAREDCREDLMTARHRVSKLLLRQGIIYSGGKPWTGRHEVWLRAQRFDNPALQLSYEAAFDAMLACLDRRTRLDDAITAMAAEGEFTPVVHRLGCIRGIATLTAFGLAVEIGDWHRLTGRTIGAYVGLVPSEYSSGETRAQGGVTKTGNGHARRLLVEAAWHHRSPYRPGAELRRRWDLAAPAARARGQSANRRLHTRWVGFDARQKRPVIANVAIARELAGWCWSLAVMPD

SEQ ID NO: 306567 - protein, 350 aa, unidentified
MLKYSFGIDISKNDFHSCLSAIDANQQVKVKASRKFSNNLQGFKEMLIWLTRHRKEVNVPLVVTMEATGVYFESCAMFLFKAGLQVSVVLPNKAKKYMAAIGLKTKNDKIDAFGLARMGAEQSLALWQPMDEFFYTLRSLTRHHQSLQELKTNVSNQLHADEHSIYSNKKVMKQLKKLIGTIEKELLETGREIDKQLYSDPEIAKKVRHITEMKGMGNLTVATILAETNGFALFTSIGQVVSFAGYDVVENQSGKRTGNTKISKKGNSHIRRALHMPAFNVVRYNTGNFKTFFARILSRHGQKMKAYVAVQKKLLVLIYTLWKKNEAFMPQGPESIKNTSGEKELVPSFA

SEQ ID NO: 306568 - protein, 356 aa, unidentified
MKKVQQLDFSDQILYAGIDVHLKSWKVCILTEQFEHSVFSMPPDPKQLSNYLKKHFPNGNYQAAYESGFSGFWAQKQLQSHGVSCIVANAADIPTNDKDRRHKTDRNDCRKIAVALRAIQLRPIFVPDDNALCDRTLIRHRSQIVKDITRVKNRIKSILYFIGIPIPVQFQYNRWSGAFLDWLSRHKDMEGALRTTIDSHLDQLSNLRTQQAQMHKQLREMAKDPKYKNNVRLLMTIPGIGLISAMIWIVELIDIKRFTRFDNLCGYVGLVPGEHSSGEKHYHTGLDNRGNNILRTLLIENTWIAVRKDPALIQAYYRLSKRMSKNKAIIRIARKVLNRIRFVLANQKEYQISIAN

SEQ ID NO: 306569 - protein, 480 aa, unidentified
MTKSIFRRKNQSVVELFDSAPHPNKVACVALDYAKATHTALICDGSGRRLKAAFPVSNSPEGVDFVMDRVEKICRKHVIDPKHVFFGGEACGTFAVNFVHAIEQKGFLVLSVDPGEAKQQRACFQASTDKLDLLGIAKVLLDQHGSTRTTCTNLERLLRNVTRHRGDLVTAKTAVSNRIHSLVDQLFPHFLDEAQSGIPAFSETSLWLMEDRFSPKQVLARQLRTTVAQAKKKGLGKPEECIRKLTIHAESVLQPVPEWVGTLQTALHHEVQLYRSLLNCIVQADRQSALLLARTPAAMLTTIKGIGITLAAGTGSEIGAPATQPSLRQLSSYAGIVPRVKQTGGPDGAARHGTVSRRCNHLLKNAAVQSANHLGQHGPEDLKEDHRRRGANGQHADFGMARRFLRIGMNLMRTGQCYIPAPLRSHPDPDELTAYYLKSWPRLRDIWKKAGALEEAFDPDNPLGHWRECVQELYEIELPL

SEQ ID NO: 306570 - protein, 342 aa, unidentified
MKDTMIGVDLAKRVFQIHGTTMAGEVKFRKKLSREQFRVFMAAQPACLVVFEACGSASYWAREMAALGHEARLIAPQYVRPFVKRQKNDAADAEAIVIAARQPEMRFVAPKTVEQQVRAALFRGRERLVQQRTEDVNALRAVLYEHGHVFPIGMGHLRRMEALLEAETCDLPAMIRMECQDLLEQITEKTSRIAARDKKLKELAAQSDKARRLQTMPGVGPLTSLAIEAFGPEMAQFKTGRDFAAWLGLIPRQHSSGGKERLGRISKAGQADIRRLLIIGAMSRLNWMGQRTIFEGSWLAKMLARKPKLLVAIALANKMARQIWAMMNKNEDYRDPALTTTA

SEQ ID NO: 306571 - protein, 373 aa, unidentified
MEKHSRYVGLDVHAATIAVAVAEPEGEVRSLGIIPNTPEAIRRLVKKLGPAAPLRACYEAGPTGYVLYWQLIQLGVHCDVVAPTLIPIKPGDRVKTDRRDAVKLARSYRSGDLTAVWVPDVAHEALRDLVRAREAAKGDQLRARHRLGKFLLRHGRRRPAKCTAWRGKHRAWLQTVHFDQPAQEATLLDYVTEVDHATDRIVRLERAIDAAAAAAPPAMRAVIGALQALRGVAKLGAVTLVAELGTLTRFARPRQLMGYSGAVAREHSSGPRTRRGGITKTGNAHVRRIIIEAAWAYQHRPSLGSTLRTRQAGLSDAVKAIAWKAQHRLHTRYQRLLGKGKPKPQVVTAVGRELLGFIWAIGVHAEQEHRRAA

SEQ ID NO: 306572 - protein, 355 aa, unidentified
MDSVRYIGLDVHRDTVSAAVLDKEGKLVMQSVLATIAPAILDFLGGIQGTLQVTFEEGTHSAWLYDLLVRRVARLVVCDPRKNALLKSGNKGDLIDARKLAELLRNHSLSPVYHGENSALDMQHRTRSYTTLTEDTTRVMSRLKALFRSQAIHCPGKKLFRLDYRESYLTQLGSEGLRQRAECLYLELEALHPVRLRAKREMVAECRKHPATKWLQSVPFLGKVRTAVLIGWVQTPHRFRTKRQFWAYCGLALETRDSAEYRVVHGQVQRRSKPVLIRGLNWNHNHDLKNLFKSTATMASVRAGIFREFYLGLLSKGMKPEMARLTLARKIAAITLKIWKEGETFNAEHVKPQAA

SEQ ID NO: 306573 - protein, 369 aa, unidentified
MQENTNVATLVDLRKRKNIGRMTIGIDLGDRRSHFCVLNEQAQVIARGFLPTTITAFRREFESLPPSLVAIEAGAHSLWANQVLKVCGHDVLVGNPRKIRLITESDRKSDRVDAESLARLARADRLLLAPIQHRTQEKQVQLSVIRARHVLMRSRTALINCARGLVKPMGLRLPACSPEAFPKRAAATSLPELLLVALGPLLKQVEAVNQAIRDYDRQIEQIAATQYPETCLLKQIKGVGTLISLTYVLTLEDPHRFAKSRDVGAFLGFLPREKQSGERAPRLGISRAGNEYLRTLLVQGAHYILGPLGPDTDLRRWGLQLAARGGGGAKKRAVTAVARKLSVLLHHFWKTGEVYEPIRKTPLAEIPAA

SEQ ID NO: 306574 - protein, 355 aa, unidentified
MKYYAALDVALKLSSLCVLDQAGNIVFEAEVETVPKAIRQALKPYAKKLERLGHETGSLAPWLHKELKAMGLPIICLEAAHARAALSAMRNKTDRNDARGLAHILRTGWYRSVHIKSDESYRLRLLLTARRNIKRKFLDIENTIRHSLKAFGIRLTNISRGCFEAEVRERLKGDPVLIGMVDSLLIVRAALWQQYCKMHKLLITVVGRDEVCRRFTRVPGVGPVAALTFYASVDDPGRFRKSRTVGAHFGLTPKRWQSGSSIDQPGSISKKGDGEVRTALFEAANALLTLTRKASPLKSWGKKIAKKRDHRAACVAVARKPAIISHAMWRDGSEFRSGVPVAKKPLSQRALEARG

SEQ ID NO: 306575 - protein, 343 aa, unidentified
MKHYAGLDVSLKETSICILDQAGKICREIRVASHPEDLLRILQDPAWHLERIGLEAGLLSQWLFNGLAEAGLPVVCIETRHAKAFLKARVNKSDRSDARGIAQMMRVNLFRPVHVKTLTSQKRRVLLTARKLLQEKAIAFENEIRGLLANFGLRVGVVGAVKFEERIRELIADMPDLAEIMAALLDARRRLREHFATLHRKLLELARGDDVCRRLMSIPGVGPVVSLAFVATIDTPARFRRSKAVGPALGLTPVRNQSGDNERIGRISLCGDAMMRTLLFEAAQTMLRQTTRWSWLKAWAMKVAQRRGSGKAVVALARRLAVIMHRMWRDGTQFRWTREVPAR

SEQ ID NO: 306576 - protein, 360 aa, unidentified
MQTQRTELNFEGQNFYVGIDVHLKTWTVSIMSEQLMLKTFTQPAQPDKLLNYLVRNYPGGTYHSVYEAGFSGFWTHYKLKEMGINNIVINPADVPTTQKEHLLKDDPTDSRKLARSLRSGVLRAIYVPEPLTMEDRSLVRTRSALVKDMGRYKSRIKSQLNLYGITYPEEFEKSGTHWSKRFIKWLNGTDFFQSDTGALSLRVKVQEAEQQRQLILDTTRAIRKMSQGEKYASNMKLLTTIPGVGLITAITFLTEIENIERFTNSDHFAGFIGLIPNRHSSGAKESTGEMTFRGHENIKKMLIESSWIAARCDPALTLSYHKYTRRMESNKAIIKIARKLLNRIFYVLTFKKEYVPCVVK

SEQ ID NO: 306577 - protein, 348 aa, unidentified
MQSISAIGLDIAKSVFQVHGVDATGQVVLRRQLKRPFFQKLPLCLVGIEACASSHYWSRELQALGHTVRLMPPTYVKPYVKRQKNDTTDAEAICEAVTRPNMRFVPTKTVEQQSCLMLHRPRHLFIRQQTAVINSIRAYLAELGIVAPVGRRGVEQLLDVVADTADDRLPEVARACLAALGSQLRALKVQILEFDRRIIAWHRSSATSKRLDAIPGVGPALATALVASIADPKTFRSGRDFSAWVGLVPKQNSSGGKDRLGSISKQGDRYLRSLFTAGALAVIRYAKIHGTGHRPWLTGLLARRPTKIAAIALANKLARMAWAMMARNERYKELPLSRRKRDHTGHPA

SEQ ID NO: 306578 - protein, 355 aa, unidentified
MNQITTVGVELAKDVIVVCAADPAGRTVFFKQFGFQGFASWAANLPPCTIAMQACSSAHYWARTLSSLGHHAKLLAPDLVKPFRKSQAAKNDRNDAQAILITALQPDMRFVSVKSVEQQSILACHRMREGWKIERTALINRVRGLRAEFGIWLGRSPQNLARSLPRLIQDEQLPARVQGLLVQAQGHLQQLEALMEQGERDICEHARHSEAAQRLCALNGIGPITASALVVSVGDARDFRNGRQMAAWTGLVPKQSSSGGKDRLGKITKRGDTYLRGLLTQGARSALNAALTRAPDKRSRLEHWIVALRHRVGYHKSLVAIANKHARICWAMLARHESYAPQDGAAPHRHRRLSR

SEQ ID NO: 306579 - protein, 436 aa, unidentified
MRGCRCSMIMGFPKPIEHFNLQRKKVITMNTLYVGIDVSSKSNVVYLMLPNGDKHSNFSVANSHEGSTLLVKKIYSALTSHSLDTVLIGLEATSVYGDNLVYFLREDATLAPFNRKIHVLNPKQVKKFHDTYNDLPKNDYVDSFVIADCLRFGRINKEVYMGEYRYKALQNLTRARFFAVQNLVKEKQRFMNVLFKKYSTMTQEKVFSDAFSTTALAVYDEFESAEALANMDLHELTDFIIEKGKNRFPDPDAVAKAIQKAARSSYRLPKTVNDSVNQVLSISITSMKALESQIKEFDKAIKALMELLPNVLISIPGIGPVYSAGIMAEIGDINRFDNQASLAKYAGLAWKQHQSGGFEAEVTRLIPSGNRFLKYYLCEAAFSLVRCDKKYSDFYHLKYKEVNRCQHKRALALTARKFVRLVFRLLKDNRLYCPAK

SEQ ID NO: 306580 - protein, 354 aa, unidentified
MPRQSKDTVAILGIDIGKNTFHLVGLNKRGAIVLRQKLSRRQLEARLANLPPCLIGMEACVGAHHLSRRLKAFGHDARLMPAKYVKAFLKGNKNDYRDAEAIAEAVQRPTMRFVATKTAEQLDLQALHRVRSRLVSERTAIANEIRAFLLDRGIAVAQGLHRLRVALPDILATRTDLLAPRLLHILEDLIGDWRRLDERIHAVSLEIQLLAQDDPACERLMTVPGIGPIISSATVAAIGTGDAFSKGRDFGAWLGLVPKQISTGDRTILGKISKRGNRYLRTLFVQAARVVLLRPATWERHGLQPWIAAAAQRLHHNVLAIALANKLARIAWSVLHHGRNFEVRKISEPTSQPA

SEQ ID NO: 306581 - protein, 424 aa, unidentified
MLGVGIDWAEEFHLVALGKPGEGVIDIRRVEHTPAAVQALLAHIATLEPDPAEVRVVIETRHGLLVERLTDAGFTILPVNPDLIARRRGPARKKDDAEDARLACLLALDRYTTLRPLLPHGQLAGELRAIARDDERAARDQRRLANRLRQDLIATFPAALAIAGDDLGAPTILKLLERWPTAQTLGGAARHELLAFAQAAHHGWPDRLADRVQAALATDHFTPRDYLVRAKADTIRLAATQLLAITAQRRVWERRMGELLLGAPRYGRAKQPRADPDQLGQAFPGGKVYLSFPGLGDRLAARIAGEIGDHPEQYGSPNALQCYAGKAPVTRRSGKSELVVACRLACNRYLAAAVQQWAFCSLRESGWAREFYDTQRARGKTHHAALRALGNRWLEVLWHCLRKGVLYDEATHVANRNRALGKAA

SEQ ID NO: 306582 - protein, 365 aa, unidentified
MRKSIMYVGMDQHKESIEIATADEGRDGEVRRYGRIDGELDSLDRLVRKLVATGKELRFVYEAGPCGYHLYRHLKARGLECKVVAPSLIPKKSSDRVKTDRRDAVNLARLERAGELTAVYVPQVKDEAMRDLSRAREDAKRAETRARQQLLALLLRHGLKYSGKTAWSQPHLRWLARIKLPQPAQQIAFQEYVEAISEAAARVERLTTQIRMLLPQWRMAPMVEALQALRGVSLVTSVITVAEIGDLTRFTNPRQLMAYLGLVPSEHSSGPHRRLGAITKAGNSHLRRVLVESAWAYRLPARVTPIIRRRQEQLPKAVCEIAWRAQLRLCARYRRLTLKQVVVTAIARELVAFMWAIAVTVQSHQ

SEQ ID NO: 306583 - protein, 422 aa, unidentified
MQTLLSQKFTAYVGIDWADTKHDVCLQVAGETRRHFSAIDHTPQSIDRWAKSLFERYGAPIAIALELNKGPLVAALQKYEFFCLFPINPSTLAKHRKAFVGSGAKDDPTDAQWALELLLTYPQRFVQLMPQSPAMRILASLTEHRRALVDERVKVSNRLICTLKQYYPVALELFSNHDTVVFCDFLMRWPTLEHIKRSRQSTFLKFFNEHNARHPQLNQTRWEIITKAMPLTQDPGVIRPSQLYATALASQLKGLICTLKEFDREIEETANSLADYPIFKALPGAGQHLAPRLMVAFGEQRDRFSDANALQRYVGIAPVTQRSGKKKVVYWRYRCSTFLRQSFVEWAAHSITQSTWAEAYYRQQRAKGCSYQATLRALAFKWIRIVYRCWKTGTVYDEKSYLQALARRGSTLVEAPMEVVTG

SEQ ID NO: 306584 - protein, 415 aa, unidentified
MKNWTELNHFAGFDWAADHHDVVIVDRAGNIVEQLRFTHDASGWELFRNQVKAFPELVVAIETSSGAAVEKLLESGCTVYPVNPKSAKAYRQRKAPSGAKSDLLDAWSLAEALRGDGQQWKALVLQDPLIQELRMLCRDEVALIEQRTALVLQLRQALAEYYPAALEAFDDWTAESSWNFIQAFPTSQALTKAGRRRWEKFLHTHGLYRPQTYEKRLSIFSKAQEFCGAGAVTRAKSRLALALVATLITVEKQLREYRAAIQQLFEQHPDKDLFGSLPGTGPKLAPRLLSELGSDRSVFESPQSLQCLAGTAPVTFQSGQIFKVYLRRCCNKNLRQSIHLWANLSRSEVPWAQQYYQAHRDKGQSHACALRCLGQRWLKILWKMWQTGTAYDADLHARNQQKHGSWLLTLNATRA

SEQ ID NO: 306585 - protein, 416 aa, unidentified
MSHKIAGIDVHKKVLMVVVIDAIAPEEMPERRRFVTMPSDLRRLASWLRERDVQEAVMESTAQYWRSVWLELEPHMLLHLAQAFSNRAPRGRKHDFRDAERLVRRLIADELILSFVPSGEQRTCRNLTRSKTQLTRDRVRLQSQIECLLEEMRIKLSSVVSDLLGASGLRILRALAKGETDPRELAALRDDRLKCTEAQLVDALTGSSQPMHREMLALQLEHLELIDSQMEKLSRMIAQAIKPHQEAVMRLAEVPGFGVDSAQQVISEVGAEAGTFSSAAELTSWVGVCPGKDESAGENHNSRSAKGNRYLRRVLNQAAHAAVRKKGSHFQTVFRRLLPRLGYQSAIWAIAHRLCRVVWKILHEGVSFVEQGNQPDPAKRKRRAKDLARALRRLGYEVTITPMNPTIQNGMQVLGS

SEQ ID NO: 306586 - protein, 439 aa, unidentified
MTVKIERYVGLDVHKSYGMVGAVDSAQQVVLTPRKVEMGSLESWVQKHLTPSDAVVLEVSVNAWEIYDNLQGIVGRVSVVHPQHVKLIGASLVKTDKRDTLALARLLAAHVLPEIWVPPQPVRDLRELVSHRERLMSARTAAKNRLQDLLHRHKLIAPSGDLYGEKNRAWWDELALPRGEQLRMRHLFETIARVSEQIEETDRELAQLSVSPSWRPSATLLIQLPGIGMLNAMTILSAIGDIQRFATAKKLVGYAGLGAKVHASGKTKRGGSLTKQGRTELRRTMVEAAWTAVGFSSVWKQRYATLSARIGKMKAITAIARKLLIVVWHVLTHHTADRQANSAAVYRSLLTWASRYRLATSLGLSRQAFIQQAFALLNLSGPDNRPTSATTLSCCLNTTSLDSLLYFVFFPLLRRSWFFSRCLLTPFLGLTPFPNSPGD

SEQ ID NO: 306587 - protein, 408 aa, unidentified
MDKLFVGIDVGSRDNAVYIMLPNGDKHSSFEVQNNLGGAQVLSKRVLSVLTEKSLVAVTIGIEATSVYGDSLMCFLREDGALGRFERTLFILNPKQVSKFKESYSDLPKNDPVDAFVVADSLRFGRIGSPIQMDDYRYIALQKLTRARFYAVQNLVREKQRFMNLIFMKCSGLAQEKVFSDNYGAAALAVFEEFETPDDIVNADIEELTAFIAKKGKNHFPHPDEIAKAVQAAAKASYRIPLRVNQSVNQVLHISISSIRAMQAQVKALDKEIACQFEGIPNTLTSIPGIGKVFSAGIIAEVGDVNRFSKGQSGLAKYAGLVWKENKSGMFEGQNTRLIKSGNRFLKYYLCEAAMSLVRCDTEYRRFYDLKYKEVNKYQHKRALALTARKLVRLVFRLLKDNRLYIPA

SEQ ID NO: 306588 - protein, 373 aa, unidentified
MKKRSSSQPSQKRTMKAKRTQESVTIGVDWGDRSSRYCMLSGDGEILREGQVPTTKAGMTATFGSWGRVRIAIEVGTHSPWVSRLLAGLGHEVIVANPRQVKLITESTRKDDRLDAQTLARLARIDPQLLRPIQHRSEKAQTALMVIRVRAALIAVRTSLVNTARGLAKAMGERLPKCDADQMGVLKAESVPAKLRQLLEPLLKEVESLTEKIKNSDREIEQIAREDYPETELLQQVGGVGPLIALSFVLTVDDKNRFQKSRDIGCYVGLRPRRSDSGQRQPQLRITKEGDPYLRTMLVQGAHYILSRRGPDTDLKRWGLRLAERGGKRGKKKAIVAVARKLGILLHRLWVTGEVYEPLRNQNLRELQKKVAA

SEQ ID NO: 306589 - protein, 313 aa, unidentified
MAQILPTVGIDVSKDWLDVAVRPSKVEFRVSNDAAGWAELCRRLKSIEPRAIGVEASGGYERGLTHALLAADLPVRMVNAWKLRQFAKAAGLLAKNDRVDAHAIAWFVAAMPSREVRHDPAREHLAELVRARRQLVDAKQAFANQLEHMRDALLRRQMARRIRQLEADETALDQRIVQAIAAEPTFAVRQELVCSMRGVGPVFSSTLVALLPELGSVTNRQIAALVGVVPYDFDSGKMHGLRCIFGGRADVRRVLFMAAQAAAIWNPDLKAFKQRLRAAGKKPKVAIVAVMRKLIVTLNAMVRSGTKWQAKTT

SEQ ID NO: 306590 - protein, 343 aa, unidentified
MKSYVGLDVSLKQTSICVVDERGSVVREGVVISDPEAIAAFVRLNAPGAARIGLETGPTTTWLWTELKRLDLPVICIDARHAKAVLKMQINKSDRNDAAGIARIMQTGWFKEVRVKDIDSHLVKALLVSRALLVKIKRDLENQIRGLLKNLGLVIGRGKFNVFAVRTEELIEDRPELVAVIRPLLAARKAIEEQVHNLDRRVLKLARHDMQVRRFMTVPGVGPVTALCFTATIDDPTRFKRSRSVGAYVGLTTRRHASGEVDWSGRISKCGDAMLRMYLFEAAGVLLTRVPKWSALKAWGMRLAKRNGLRKAKVAVARKLAVILHRMWIDGTEFNWSKKEASA

SEQ ID NO: 306591 - protein, 266 aa, unidentified
MVHITTITAGIDTSKAKLDIAIHGQSEVCPVENNLLGWQKLAVRMREAEVQRIGIEATGGYERGVTRHLEAQGFTVTVLQPLQVKAFARLHLKRAKNDQLDAILIAACTHFQDASSKMAPDARFDELSDHLTYIEQIEEVMVRLQTRMEHITDKRRRSAVKADLARLDTRRGSELLLLTKNLRLHVDLSRRLDLVLSVRGIGLCTALAIVVRMHELGQVSREQAAALAGLAPFVRQSGQHQGETHIGGGRERLRRSLYAAALAGAF

SEQ ID NO: 306592 - protein, 342 aa, unidentified
MTITIGIDPHKASHTAVAIDDSECVLDEHRLRACSDQADQLRAWAAPFPDRLWAIESARGLGYLLAQQLVAAGESVVDVPAVLSTRTRLLGSGRAQKNDPNDARSVAIAALRNRGLARVDLDDHAQVLKLLAKRHRDLAQSRAETASRLHALLMELQPGGMAKRMNVTRANDIIDAISIDTAIVEHRVGVARELVADLVHIETQMKASKARLRRAVAAASTSLTDIRGIGVVTAAMIIGHVGNIDRFATAAHFASYNGTAPIEASSGDRRRHRLNSRGNRQLNFAIHVAAVTQLRYPGPGRDYYDRKRAEGKSTKEAIRALKRQISNAVYRALVTDARRRQA

SEQ ID NO: 306593 - protein, 344 aa, unidentified
MANSSKPEVQVFAGIDVSARELSVAVRCGTEDREAVTTFRNNAAGHKALLAYLLRGNGRARVCLEASGNYSLDLALTLQAHRQVEVSVVNPRRARRFAESLGERSKTDPVDAGVLCEYAARMPWVAWQPPSSLALRLRAITRAIEALGVMHTQEKNREHALATSQALPVMVIQEMRRHQRYLEHRMERLRREALRLIARDRELDRRFRLMLTVPGIGETSALQILGELVVLSNTLDARQWVAFSGIDPSQFTSGTSVQKRPRISRGGSRHLRRALYMPALVALRREPHLRAFYQRLLSRGKARLQAVVAVMRKLLHALFAMFRSNQSYDGSKLCHIELTKKLAV

SEQ ID NO: 306594 - protein, 452 aa, unidentified
MRKKRSPRNRKKNKRVLEQINHNAAGADMGSDAVWICVGEHLTEEPVRVFGTTTAQLRASAEWMRSLGVDTVALEATGVYWVAAYEIYEEYGLRPILINSRAIRSFNGLKKSDFIDCQWIQLLHTFGILQGSARPESAMIELRGYMRQRKTLTEQCSEQIQRMQKALTLMNVRLDQAVTDITGVTGMSILRAILEGERDPAKLAKLRDPGCAKTESQIAEALTGHWREEQLFVLEQTIQLWDFCQDLMRKCDQKIEALVTTLPVRTSAESNKSRAKRRKNQVSFDGRSLLHQRLGVDLTRIKGLEVLTILTVISECGVDLSRFPTDKHYVSWLGLAPGTKKSGHRVLSSRSRRTTNRAATALRLAAQSLLKSHSELGAFGRALRARIGAEKAITAVAAKLARRIYLSLQTGRVYEDRGEPYHDQQHHDRHLASLHKRARRLGLQLVPLQSCT

SEQ ID NO: 306595 - protein, 344 aa, unidentified
MEISTIGLDLAKNVFQVHGIDADGNVVVRRTLRRAQLLAFFASLPPCLVGMEACGTEHHWARELIKLGHNVRQMPAAYVKPYVKRGKTDAADAEAICEAVTRPTMRFVPVKSPEQQAALSMHRARDLLVKQRTQLVNMVRALLAEFGINIPQGVRLALEMARKIVDGEAPPVPREAAKIAGRLSQQALDTHAQLREIDLDLLAWQRTNDTARRLMSIPGIGPIGATALAASVTDANQFRSGREFAAWLGLTPRQHSSGGKERLGRISKMGDKYLRTLLVVGMTSLIKGVKRKPETADPRLVALLARKPVRVATVAMANHTARVAWAIMARGETYRAGHQPRLAA

SEQ ID NO: 306596 - protein, 313 aa, unidentified
MKKTICGVDVSKAKLDVCIEPGHRFASFDNDAAGIAELAKFCRENAAELVVMEASGGYERRAFVELWGHGISCALTNPRSVRRYAEAMGVLEKTDRIDASVIARFADAKNLAPTPLPSQAQQRLKALVARLRQVTGDLIVQKQRRSSMIDNAEMQASIDEIIALLKRQSRSLEGEIASMIDDDPLWAKLAGTWREMKGVAGRTVARLHAELPEIGTLSNKAIAKLAGLAPIADDSGKRKGKRSTRGGREGVRTILFLVAAGVARHDENLRNFRDRLVKAGKEKMVIRIALARKLLVVLNAKAREARAEYALAT

SEQ ID NO: 306597 - protein, 427 aa, unidentified
MNGNEVIRYKQFCQFKAGIRSSRDCLIVGIDVAKERHHAFFGTAAGCTLLRRLIFDNNQAGFNQLITRASQLQIEHGLKKVVYGLEPTGNYHKPLSNWLLEQDQMLVLVSSKSISDNRQTLDGRWDKNDIKDSANVADLIAQGKCQFFEMPDTRLVELRNLLSLLRRLKKAEHSVRMQIRNGLVCKYFPELDRHWGSCLTENLAIVRWCLDPHKITAMGYKEFVRRVTRRDRGIRQQRRLERIYEAAAVSVGCPMDDAANFEAHLLVERLEEISARIGQTESEIKDLCKSFSSYRRLLSIPGFGPYVSSIVLARIGDPNRFIGRRQVIRLGGLDLNANRSGKRSNTAVPVISKRGNSELRYALYQAAQIATYHSDRFRALFVRSLEGRENERGIKTKMRVKIAAKMLVIAWTLMKNDTDFDPLLIKA

SEQ ID NO: 306598 - protein, 391 aa, unidentified
MILAGIDVAKDKHDCFIMNSDGEILVKAFTFSNNLEGFNFLYEKIRSVTKPKDKIKVGLEATGHYSYNLLGFLLNKGLPTFVINPLHTNLFRKSLTLRKTKTDKVDSRTIAMMLMSDVALKPYTDTSYHNEELKSLSRYRFTKVQERSKLKTSVSRLVQILFPELEKIVCTIHTSSVYHLLEEYPGASYIASVHLTKLTNLLMEASHGRYNRNTAIKFREAARNSIGSILPAKSLELKHTIKLIRELTVEIDEIDAEIKKMMDSIASPITTIPGIGYSMGAMIISEIGDFSRFSSPDKILAYAGLSPSTYQSGQLNNCYSHMEKRGSRYLRYALFTVAQKVCIWDNTFAEYLSKKRAEGKHYYVAISHAVKKLVRVIFHLERTGQAYLKAA

SEQ ID NO: 306599 - protein, 365 aa, unidentified
MKQVYGCDGHKTYSVFVAMDEAGQRGPAVRVEHDRAQFHRFLKILPSGSPIALESIGSWYWMVEEMEQAGHVPFLTHRRKAKLMMGMINKSDKLDAGGLAQLLHNGTLPKVWIPPGELRDQRELPRMRMAMARVRTMLKNRIHADLAKYAIYIEEVSDIFGVRGRALVEQHLAVLPPYTRQAVQTQLALLDQVEEQIRLTEKRIKAVIKETAAMQLLMTLPGFGPILSIVVALEVGDVNRFARPEKLASYGGTVPRLEQSGKRRVHGPVRPDVNRYLKWALIEAANMVVLNQRSWPDRHVVRLYRRIRERRGHAKAVVAVARHLAEATYWVLKKGEPYREPTQHQLLSSTRKEARASHESLRLVH

SEQ ID NO: 306600 - protein, 325 aa, unidentified
MKITTIGIDLAKNVFQLHGINAQGKTVLEKQLRRDAMLMFFVNLPPCRVGMEACGGAHYWARKLRSFGHDVKLMAPQFVKPYVKTNKNDEADAEAICEAVTRPNMRFVPVKTEEQQSVLSLHRVRERFVKERTAQANAIRGLLSEFGIVIAQGIRQIAVRLPEILEEADNGLPASFRRLIQRLGEHLQELDRQATELEKEIQDWHRGNADSRRLSQVPGIGPITASALVASIGDAKSFSSGRQLAAWLGLVPRQHSSGGKPVLLGISKRGDTYLRSLLVHGARAVVRYVKDKSGRTEDWLHGLLSRRNTNVAIVALANKNESPRV

SEQ ID NO: 306601 - protein, 279 aa, unidentified
MYYTGIDLHKFTSYLTTVDSSGNIIKQQNIKNTDYNFVQYFSDLGTENLTTVESTMTWYWLDDLLNSLKIPLVLAHAKYVKAIAYAKVKTDKVDSHTLAQLLRMDYIPEAYKISIQNRTLRDALRARLKIVQRHTSVTNSMYLLLAKFNFDNPSQLFGISKYQYQQLANLESLLNDQILDLEKQLYPILIPNQDIQRLLWIPGIGKLNAFNIVLEVDDINRFESINNFYSYCRLSPSARNSAGKAIQRSSKDGNKYLKVVFSDAAVHAIQYYPVIRKIQ

SEQ ID NO: 306602 - protein, 352 aa, unidentified
MEKNNKLDFGGQHIYVGMDVHKKSWSVSIHTEQFEHKTFTQPPEVEKLTYYLERTFPGATYHTVYEAGFSGFWLHDKLREKGIDCMVVNPADVPTKDKERAGKTDRVDCRKLARGLRNGEIKGIYVPPRVKVEDRTLVRTRQSMVRKQTRCKNQITSILFFYGIVIPEEGRWSRRFINWIESIRMERASGDFALKAHLEELKHLRQIIANLNKAILSLSRAEEYMADVLLLKSVPGISTLTAMILLTELADLSRFSSLDKLASYAGVVPDIRSSGETEYVAGITFRRNAALRALLIESSWIAVRKDPALIMVFNKLSVRMKKTKAIVHIARKLLNRIRFVLKNRQEYIPAVV

SEQ ID NO: 306603 - protein, 382 aa, unidentified
MQTIDTVNPTILLAIELSASTWLVAARVPGWEKPHLHRIDGGDTAALLALISSLQARAARGLDATIGVVCCFEAGRDGFWLHRLLTAHGVVCHVLEPTSILVNRRARRAKTDRLDAEGMLRVLAAYLRGDHQACSMVRVPTPEEEDAKRTHREREKLVQERLRIENRIEALLFTQGIRKRPSLSSWERDLAVLRTGDGREIPRHLRAELDRLRRRLVMTLELIREVEAERDQAAKTKPQDQAYHKIAALSRIRGIGENFAAVLTREVFYRSFDNRRQIASYVGITPMPYQSGGMDRDRRISRAGNPRARTTMIQLAWLWLRYQPGSELAEWFRERVGPLAGRTRRIAIVAMARKLLIALWRYAETGVIPAGAEIRAETTVAA

SEQ ID NO: 306604 - protein, 342 aa, unidentified
MYYIGLDVHKKTISYCVKDVSGQVHQEGKVGATRWELDDWMKTLPQPWTVAMEATIFTGWIYDHLLPHAQQVKVAHPLMLRAIAAAKKKNDRIDAGKIADCLRCDFLPECHMASTAIRDRRRTLRYRHLLVRQMVQMKNRISGLLMETGVSHNKQRLHKVGYFRELLTSNEEVNESIRPLLRVSRDSIVRLQKTEYALVSSLQRDPLLAERVKRLRTVPGVGPITALTWALEIGEVSRFPSIRQAISYCGLCGDEKSSADKVTRTPLSKQRNKHIQRVLVEAAKLAPRQDHNLALVYEREKQKGNANRATLAVARKMVAYLLAVDRGQRDFVPFPDSQSAAA

SEQ ID NO: 306605 - protein, 429 aa, unidentified
MNCTQNKKIEQVKETTMIVGIDVGSEKHYFRAFNWRGIELTRKPVAFSNSMEGFNSFYNTIVELMQKRELEEALVGIEPTGHYWFDLGQFMGEKDIKFVMVNPHHVHKTKELDDNSPSKNDRKDPRVIAGLVRDGRYFYSYMPAGVYAELRNASNRRFVLVEEQTRAKNRLQKWIAVYFPEYKGTYTHIDAKGGLLVLKQAPTPEEIVRLGVEGIIKIWKDAKLRGNGHKKAMLILNAAMKSIGLKAGLTEARMEIQDLIEDYELQTKRLERVNDLIKELCQQIRYADKLLEIKGIGITTVAGFIAEVGNITRFDSTKELQKLAGLELVADSSGKHNGKTKISKRGRKRLRYLLFEAAISVVGKNEEFKEIHRYYTTREKNPLKKMQSLIAVACKLIRVFHVILTKGISYDALKMLKDIRHPGEQLKAA

SEQ ID NO: 306606 - protein, 379 aa, unidentified
MDLQGTATPAGGILYGALELSKNSWLLAIQFPDRAQPSLYPIPGGDTQALLAKLMAARNRWAKLKGKAPSIALCYEAGYDAFWLARLLKAHSIECLVIDAASLQVNRRGRRAKTDRIDVAMLLRALIAWWRGERHVFSAVRIPSVEEEDLRRSHRERSRLVHERTAHINRIKGLLFGQGIRGVKVLSRREPLKIDKLLTGEGRPLPPRLANEIARELERLTLVQKQLVDIERELDQAPTPCQATEKKRRQLMLLKGIGPTFSAVMAREVYYRQFDNRRQVAGFLGLATSAFDSGELTRSQGISRAGSGLVRSAMIQASWLWLRHQPKSALALWFEQRTQGQSGRIRRIMIVAVARKLAIALWRYLEQGLVPQGAILAGR

SEQ ID NO: 306607 - protein, 451 aa, unidentified
MTKSKRSHPERDLTPTHPNAAAIDIGSRMHVAAVPPDRDTEPVRTFGTCTGDLQQLADWFARCGVRTVAMESTGVYWIPAYEILEQRGFEVVLVNARDAKHVPGRKTDVSDAQWLRRLHEYGLLRASFRPKGELAALRAYLRQRERLLDYGASHIQHMQKALMQMNVQLHHVVTDMTGATGMSIIRAVVAGERDPAVLATHRDRRCHASEEEISAALAGNWREEHVFALGQALELYDVYHAKVVECDLRIEVVLRRLPDTAARPVGRLPPARHRDKTANAPAFDARAALHGVLGVDLTQIHGLGPSLALKLVGECGTDLSAWPNAKHFTSWLCLAPGNKISGGKVLSTRTRRSGSRAAALLRLAAVTVGRTETALGAFYRRLSARVGKAKAVTATARKIATLFYNTLRHGMDYADPGASYYEERYRARVLANLQRRAKSLGYTLQEAPVPG

SEQ ID NO: 306608 - protein, 362 aa, unidentified
MVQVRSWAGLDVHARSVVAAVADSESGELVVRRLPGATRDVVEFCAALPGPVRVAYEAGPTGFALARALEAANVECVIAAPGKIERPTSDRIKTDRRDAERLVRLLMIGALHPVRVPSPSEEGLRDLVRAREDTRGDLMRARHRLSKLLLRHDVRFDETAGAWTQRHRQWLATLELEHRGAQVTLADYVGAIDALSIRRDALEAAITELLPDSPWAETAARLRCLRGIDTLTAVGLCAEVGNFTRFERAGHMMSFLGLVPSEHSSGQTRRQGQITKSGSGHGRRLLVEAAWHYRRRPSRGTSLARRQAGQDAHVLAISWHAQQRLHRTWQRLDTERGKRRTLVAVAVARELAGFCWAIANAD

SEQ ID NO: 306609 - protein, 376 aa, unidentified
MNSKAFVPRDYDVFAGLDVDKKSISVTFTNHQGFIRSLRLPYSAEHLVNHVRKHFPDQKVAFAYEAGPTGYGLYDGIVAQDYPCLIASPSMIPKAPGQRVKTNRLDSRGISENLRGGQLKSIHVPAVLYRELRHLTQLRDTFVSEMVGMKQRIKSLLLMEGLEFPPAPAGSQWSFMVKAKLRKLPCSSTVRFKLDQLLDSLEFHEKQIVKTTQQIRRFCQNDAELSRCIKYVVSVSGIGQIVASQLVARLGDWRELRNVRQLGAFLGLVPTEHSTGERTDRGSITHSGDPRLRSKLIQAAWSAIRKDGELREFFRAVCQTHARPVASRVAIVAVARKLTVLISVVLMEQRPYVVRKKVHSAPWTQEETVPQGTPRR

SEQ ID NO: 306610 - protein, 367 aa, unidentified
MTSLAHRGFVHLGMDVSKDSISVAVLHPDRDLAVVDKIASDTESVRRLVKRVGQPAGLWACYEAGPTGYDLYRLLTKMGVRCDVVAPSLVPKGRGDKVKTDKRDARRLAGLHRAGELTAIAVPSPAQEAVRDLCRTRGAMVQDLTRARNRLTKFLLRHSLVYRDGSNWTFKFERWLAGLHFEDRALAATFSHYRSAVQLLDGSLASVEADLEGYFDKEPFADAVLRLGAYRGVTHMGGLCLGAEVFDWRRSPGARAFMSFTGLTCSENSTGLSGHRGEITRAGNAHIRGQLCEAAWTYQYCPAIGRTIKARQAGVGPATVSRAWRAQVRLSARFRALAARKNVKSVVAAAVARELAGFCWAEMTAAD

SEQ ID NO: 306611 - protein, 367 aa, unidentified
MHQPTRFLGLDVHADSITVAVAEEGRDEARYVGRYPNDLTRLLKVFDRLGGRGSLRCAYEAGPTGYGLQRALTQAGIDCVVIAPSKTPRGSGDLVKTDRRDALRLAHFLRSGDLVKIHIPDEACEAMRDLLRAREDAKRAQLRARHQLSKFLLRHERRWAKSNWSREHLEWIAKQRFDHPALECVLVETLQAVHDQTARIERYDGRLAELVPATEQAKLIEALQAFRGIQLLTAASIAFELGDLRRFPTPKKLMSYIGATPSEDSSGDRIRRGRITKAGNTCLRRLLVEAAWSYRHRPSEGSRHRKRAENVAPAVRAIAWKAQTRLNGRYKRMLVRGKTKQKTLVAIARELAGFIWAASQEEQLTLS

SEQ ID NO: 306612 - protein, 332 aa, unidentified
MIVIGADTHKASHTVGAVDAATGRVIADLTVRAKRRSFDDVLLWVRGLDEGERVWAIEDCRHVSGALERFLLARGERVVRVPPKLMAGARNSARERGKSDVIDAVAIARAAIREGLDTLAVAQLAGPELDVRLLVDHRERLVGQRTRLINDLRWQLHDMWPEFEIPARALITARWQERVGGRLARAAQSTQVQIARDEVRRIRELTRSIDALERQIAVLVAELAPRLLAERGCGVLTAAKLVGEIAGIQRFASDAKLARLAGAAPIPASSGRTDRHRLDNGGNRQLNCALHRLAVAKGRFDPESADYLARKQAEGKSRREALRSAASAVLYC

SEQ ID NO: 306613 - protein, 359 aa, unidentified
MKKKRLWAGVDLGVETASVCVIDDAGQVLHEGDCPSCAKDVRHALTGFRRTRFANVAFEAGTGTHVARGLRSFGYPVELYETRQLSKFLRARRNKTDAGDARGIAEAGRISVSLVSKVYLKSLDSQALQSRLAIRRHLVRQRVAAVSMLGRQIELFGGRIRSSVRRVDFRAAAEAEIRKIGRITSTDLVEQLRYLADHCERLIAYQRSVDRELQQVAQENDVCRRFMEIPGVGPLCALTFYAAVDDPHRFSRSTDVGSYFGLAPRLHESGLVVKKSRISKMGNRNVRALLVQAASMYVMHCKQDAGLRDWALRLQERLSRTPSRIALARKLAVIMLAIWKSGDHFNPVHRSSIAGGPNC

SEQ ID NO: 306614 - protein, 315 aa, unidentified
MDALVKVVGIDVSKAKLDCWALPAQEAWGIDNDDGGIAALLTQLRTRAPELVVLEATGGYETQAATALAAAGWRVAVVNPRQVRRFAQALNRLAKTDRIDAQVLAEFGRAVNPQVRPLPDAQTQELAALVARRNQLVQMRTQEKNRLPMTLPPLRPRVKEHVAFLDAAIARLEIDLTAKLRSSEVWCERRDLLLDVPGVGPILTCTLLAQLPELGQLNRQRIAALVGIAPFHDDSGKHQGRRTTWGGRREVRTVLYMATLAARIHNPVIRAFYQRLRGNGKTYKVAMVACMRKLLTILNSMIKHGHAWHYEIKIA

SEQ ID NO: 306615 - protein, 343 aa, unidentified
MESIYYIGLDVHKKSITYCIKDVTGGVVCQGMVKAERRALQQWLVDLPGSWVGAMEATMFTGWIYDFLKPYALELKVAHPAMLKAITAAKKKNDRADAEKLADLLRVNLLPECIMMSEELRELRRILRYRNMIVRTASKMKHKISGLLMEVGAVYDKRKLHGKRYFGQLLERVEDVPDSVKDLLKLSRSNLELFVAIQKKLLKVLREDSLISKRVELLQSISGVGEIMALTWVLEIGDPGRFSNSRQAISYCGLCSAQRESAGKEHRGPISKQRNKYLQSMLIEAANIAPQWNPQLAMLKEKELTRGNRNRATLAVARKLVKYMLAVDRRGEPFIAEKESLVA

SEQ ID NO: 306616 - protein, 391 aa, unidentified
MVCVGIDVAKDKHDCCILDSDGTIRADCITIPNNMDGFKQLLQTIRDCTKKSDKIKVGLEATGHYSYNILGFLLDNDLAVYVMNPLHTNLYRKSLSLRKTKTDRVDARTIATMLLSDVDLKSYTDTAYHNEELKSLTRYRFDKVRERAKLKQSVSRLVTILFPELEKLVPSLHIASVYALLSEYPGAKQISEIHLTKLTNLLATASKGRYGKDKAIQIRDAARTSIGSVMPAKFLELKHTIKLIRELTSEIDEIEVSIQKIMDELNPPILSIPGVGIQSAAMILAEIGDFSNFESPDKILAYAGCSPSTYQSGKLTNCYAHMEKRGSRYLRYALYNATKYVCHWNPTFADYLAKKRAEGKHYNVALSHATKKLVRLIFALEKSRETYRLAV

SEQ ID NO: 306617 - protein, 310 aa, unidentified
MEQIFVGIDVAKDRLDVHVLPSGEAFAVARDGEGLAALVARLAAARPSLIVLEATGGFETVVAAALGAARLPLAVVNPRQIRDFARALGRLAKTDALDAEAIALFAERVHPEPRPLPDAAAQALAELVRRRRQIVDMMTAERNRRQRLASKRMRKSVDRLLAALQKELSTLEADLDDAIRGTPAWREAEDLLTSVPGVGDKLARTLIADLPELGQLDRKQIAALVGVAPLNRDSGKMRGKRTTWGGRAKLRAVLYMAALVAAHHNPVLTGFYQRLLAAGKAKKLALTAVMRKLLTILNAILRDKTPWQNA

SEQ ID NO: 306618 - protein, 397 aa, unidentified
MYIVGIDIAKRKHEAAVIDGDGAVIIKPFSFTNNCSGYNRLLAMLTKAKLPLDEVSFAMEATGHYWLALFTRLQKEGFRVQVINPVQTNSIRSFYIRQAKTDPRDALLIAEVIRFGHFSESTLHPENIYELRELCRGRHAIVSMQADVKRKVVALLDQVFPEYETAFTNMFGDTSMAILQACPTPKELSEMPLEELCHLIEVSSHKRFRMAKAQELQALARNSFGFAMAGDVFSTMIRLYAKHLDFLKQQVREMDRKIAEIMDTLDTPITTITGIGPTLGAYILSEIGDISRFSSAAKLAAYAGIDPTMRQSGEYNGVRNRMSKRGSPYLRHAIWLAASSAVLHDPALKLYFQKKRDEGKPYMASVGHACRKMVSIIYAVMRDNKAYTPCIPNEISA

SEQ ID NO: 306619 - protein, 344 aa, unidentified
MSEYAGQQFVGIDLHRRRSVIVRTAESGEVLESVRILNDVESLDRVIGRAGEEPEVVLEATYGWYWAVDALQEAGARVHLAHPLGVKAFEYRRVKNDFRDAADLADLLRMGRLPQAWIAPPATRELRELVRHRAKLVALRSHCKAEVHAVLAKCGVQVVMSDLFGIEGNNLLDRLRLPAAYAARIGSLRRLMDDLDFEIEVFTNAVQGRLRADPGYVAVQQIPGIGPILGAVFIAEIGEVTRFDSAPQLACWAGLTPKHHESDTHVRRGRITKQGSRLVRWAAVESVKRLDTQTRVGALRDRVAERRGGNIGAVAAARQQVEYVFYALRDGHVRALEHPHWEAA

SEQ ID NO: 306620 - protein, 366 aa, unidentified
MDVLVTRCAGLDVHKKSVMAAVRAPGPDGKRLQVVRESPTFTRNLVQLRNWLVSQGVTEVAMEATGVYWQPVWHVLEDMPGVELKLVNAEHVKNVPGRKTDVSDAAWLAQLLECGLLRGSFIPEPAMARLRDLTRYRKKLVEERAREVQRIQKLLETAGIKLDSVATDIVGKSSRRMLEALIAGERDPDALAELALTRMRAKLPALRLALEGRFSEHHALMARLYLDHIDHLSEAIDRLDAQVVSETAPFAQQIDRLCTIPGMGRRVAEVVIAEIGVDMSRFPTAGHLASWAGMCPGNHESAGKRRSGRARRGNDDLRTALCEAAWAASHTKDTYLSAQYRRFVARFGKSNGGETKAIFAVGHTCS

SEQ ID NO: 306621 - protein, 342 aa, unidentified
MKDMMIGVDLAKNVFQVHGALRTGEVQFRKKLTRKQFHAFLARQDPCLVIFEACGSAHYWAREIEALGHEVKLIAPQYARPFVKRQKNDAADAEAIVIAARQPEMRFVQPKSIEQQSRAAVFRGRERLVHQRTADVNALRALLYEHGHVFPAGIRYLDRMTALAEEEASDLPVLIREECKDLLAQIAETTARIAERTAKLKALAARSDRARRLQTMPGVGPLTAVAVEAFGPDMAQFKTGRDFAAWLGLVPRQHSSGGKERLGRMTKAGQADIRRLLIIGAMSRLNWLGQRSIVEGSWLSCMLTRKPKMLVAIALANKMARQIWAMLTKNEDYRDPVLASTA

SEQ ID NO: 306622 - protein, 347 aa, unidentified
MNYYAGIDVSLEQSSVCVRDGDGKIIREAKVASEPQALIAWFAELGLAMSRIGLEAGPLSQWLYAAMKEAGLPVELLETRHVRTAFKTMPVKTDRKDARGIAELMRMGWFRPVHCKSISAQETRAILTTRRLIEKKLRDVEMSLRGVLRGFGLKVGKTTPSNFAERIKELVSGHPALQIIAGSLLAVREVLLREFRGYEKRVRTMARHSEDARLLMSTTGVGAVISLTYVSAIDDPKRFKNSKQVGAHYGMTSKRYQSGATDYTGRISKIGDKSVRTALYQAAHIILTRPVKASALRNWAMQLAKRIGMAKAKVALARKLAVIMHRMLVERKPFDHKMPANQVTAAA

SEQ ID NO: 306623 - protein, 346 aa, unidentified
MKNAKENVLGMDLGDRKHAIHVLDTCGELLEASSIDNNIASIKALSAKYPGIVFIMEAGTHSPWISRFLISLGHKVLVANPRKLKSIYGSDNKTDKRDAEMLARMYRFEPKLLYPIKHNSEKCQRDLAVLKSRNTLVNERTALMNTSRTTLKSLGVALPESITPENITKKLKNELQRKDYKLAKPFMMVLATLNKQIKLLDKQLSALAAKDYPITQKLQEIAGVGPITALCYVLVIEDNQRFRSNRDVGPFLGLVPKRDQSGDSDKQLGITKAGNNMLRRLLVNCSQYILGNYGPPCQLRDSGLKIAGQGSKIAKKKAVIATSRKLAVLMLALWKNEDSHYVPYHA

SEQ ID NO: 306624 - protein, 339 aa, unidentified
MKYTPVGVDIAKHLIQVHFIDEHTGEVIDKQLRRQDFLMFFCNREPCLIGMEACRGSQHWGRELTKLGHKVRLLQAHFVKAFVMGNKNDVMDARAIWMAVQQPGKDIAVKTEEQQSVLVLHRSRRQLVKFRTMQINSLHGTLLEFGKTIHKGRAAMERELPEALERMKERLPPYLITVLENQYNRLNELDSLIEDIEKKLTSVARQNETCKRLLDIPGVGPLIATAAVATMREASAFKSGREFAAYVGLVPKQTGSGGKIRLLEISKRGNAYLRALFIHSARAAALLPKEPGPWITELKKRRPTSVAIVAMANKLARTVWAIAAHGSKYDKNHVSIRSY

SEQ ID NO: 306625 - protein, 349 aa, unidentified
MLYVGLDLSRKRLDWQALVAGGGRVGEGACPPDRDGLAHLVRGFDREYGRGPVLAAIESMTGARFVHDQLELAGWDVRIADAQRAKGLAPLACKTDRIDAWVLAELARRDLVPEIWLPDPEVRGERERARFRLQLVHKRTSLKNRVHAILFQHGLRAPVVDLFGVGGRRFLERCQLPEPWRASVAASLYLIDVLEEQIDAIERELRRLGAEHGYLQLLMSAPGIGWVLGYTIAAEIGKIERFSRPAKLVSYTGLCPRVRQSGEVDRRGALSKHGPPYLRWALIEAAHNAIRVHPPYRALAERQRARLGRQRGGSVAAITIARKLAEASWWMLTRNRPFAPAGARIPLTA

SEQ ID NO: 306626 - protein, 412 aa, unidentified
MSDGTVSWFAGVDWGSERHQVCLLDAAGQVVGERAFRHGGAGLAALCDWLVSVAGEPGRVAVAIEVPHGPVVDALLDRGFAVHAINPKQLERLRDRVSLAGAKDDRRDARVAAGGLRTDPHLFRPVEAGDPAVIALREWSRLAEELQQERVRLSNRIRQQLWRYYPQLLEVSDDVTAEWVLDLWTLAPTPAKAARLREATLARLLQEHRIRRLDAERVLGLLRQPAITVAEGVTEAAVLHLHSLVARLRLANREFHQAERKLDELCTARKEDTAASGGVPRDAAVLSSLPGVGPVILATLLTEAAGPISRRDYAALRTLSGVAPVTKRSGKSCIVTMRYAAQIRLRNAVFHWARVAVLNDPTCGSRYAALRARGHSYGRALRGVGDRLLGVACVLLQRGMLFDPDYGSSAPA

SEQ ID NO: 306627 - protein, 340 aa, unidentified
MAIVAGFDVHRAQITFDALDQGTGEVYRGRIRATPEAVRGWAGRFPGEEIHVAVEACTGWLFVCEALVEAGATPHLAEPVETSALRGKKRRAKTDREDARWLRSLLCEGRLPEAWIPPAHVREWRTRARLRKTLVDERTSWLQRVQATLFHHGVSGAPDKLLSAQGREFLAALELPDSARERVAVSLSMIEALDRQLAPLERELRRLARRQTGCRALMAHYGIGELTAPTILCELGDVTRLSASRKAVRCAGLDIGVHRSDRRSRVGKLARQGSPQLRWALYESAQAACRPTSPDRAEYLALKARGLSHTRASLTIARKLARRCFHTLRALGPDALQPVT

SEQ ID NO: 306628 - protein, 426 aa, unidentified
MEQTEEPVELVERVCALDIGKASVMACVRVPHKDHPGRRRQEIREYATRVPALLELADWLRSQSVQLVAMEATSSYWKPAFYLLEAEGFTCWLLNAKHVKNVPGRPKTDKLDAVWLAKVVERGMCRPSLVHPKPIRHLRDLTRYRRSLIRERTREKQRVEQLLEDAQIKLSSVISDIFGVSGRQMLQALIAGQRDPKALAQLARASMRSKIATLEEALTGHFDDHHGFLCQLMLERIDAATAKIDQVTAEIDRVIGPFAHQVAQLDAITGVGMVAAQELIAEIGVEMGRFPTAAHLASWAKFAPIDHQSAGTKKRGATGRGNPWLAGTLGEIVAAVARTDTFLGERYRRLARRRGKHRAIVAVGNSVLTIVWHLLADPQARYQDLGPDFYWSKVNQRRRERDLVRQLEYLTGKKVVLQPRPEQPAA

SEQ ID NO: 306629 - protein, 403 aa, unidentified
MNAVGIDVSKGKSMVTILRPFGEIVSSPFEIKHTSSDIHSLIKLIHSIEGESRVVMEHTGRYYEALAHQLSAADLFVSAVNPKLVKDFNNDSLRKIKSDKADSVKIARYALDKWQSLEPYSITDELRAQLKVMNRQFHFYVKQKTAMKNNLIGLIDQTYPNANTYFNSPTRSDGSQKWVDFVSTYWHVDCIRKMSLNAFVEHYQNWCKRKKYAFNKSKAEEIYTKTKELVPVFPKNEITKHIIRQAVDQLNSTSVTVETIRTLMNETASKLPEYSIVMQFKGIGPSLGPQLMAEIGDVTRFTHKGALTAFAGVDPGVNESGSYAQKSVPTSKRGSSNLRKTLFQVMDVLIKTMPQDDPVYQFMDRKRTQGKPYYVYMTAGANKFLRIYYGRVKEYLSVLPDPS

SEQ ID NO: 306630 - protein, 395 aa, unidentified
MYKLLVGIDVSKERFSAAGIDSGGKEAFSQAYTMDSKGFEELLKAVRTHCEEDSKVLVARESTGCYHINLFSFLNSQGIGALVVNPLLISNYGKLSLRKTKTDKKDAMTIAKFLLDHHKEISQLSISQDNQDLRDLSRERESLSHLISATKVEIKRVLRTTFPELETIGEIDTGVMLRLIREYPSARLVRAAKLKGIIKLLKEPRRGNKLAYTAEDIYRAAKASIATVSPGKEIILRGKVATLLHLQERLEEITKLLTELCQSTRMEDLNILQSIKGVGPNTAAPLLAEMGSIENFSSHKKLIAFAGLDPSVTESGQYIGASRLSKRGNRHLRRAIYLMTTSVVSWNAWFKAYFQKRKAEGMAPQKALFATAHKLIRVIFAMLSQRTYFKVKEAK

SEQ ID NO: 306631 - protein, 419 aa, unidentified
MKAAFTIAAGIDVHRDTVVVSVRKKSTSIEDDVVETRTFETFRDALVQMTEWFESEGVEVVGLESTGVYWMPVVRVLQERVAKLTVWLVNPLDVKRRAGRKTDRKDSRWLSELVLYGLVAPSYIPSREQSELRKLTRHRTKLVADQTRYQNRILKELESSGVKLASVVTDCMGMTGRAIIDALLVGDPNVDIANLAKGHLRKKIPLIRRAIDGSFTPSTKLVLRQLLDLLDRAAEQMRATDVEIRSLMRSWESDQSLVMTIPALKETSSAAVLAESGTDMSLFPSSKHLAAWAGLAPGSEESAGKAKPAPARKGNKYLRTALVQCAWAAVRMKQGFWPVVFRRLRARLGPKKAIVAIARKMLVALYHILRERTPYRDPETPPTNPKTRERLARRFRDKLQALGFLVQLTPTQSGGETVS

SEQ ID NO: 306632 - protein, 337 aa, unidentified
MEVVRIGLDLAKNLFEVHGVDAYDNAVLRKRLRRDAVAQFFADLPPYIVGLEACSGSHNLACVFADLGHEVRLISPHKSNKNDRNDAEAICEAISRPSMRFVPPKSSEQLEIQADHRIRQRLVSGRTRLVNQIRGLLAEHGVVVARDISRIRRALRQVTDSSDKQLGDLFVELVCDVRDELMELDQRIATYTKRIRHLFQSNDMCHRIGRIEGIGPITATALVAAVGDRTCFKNGRQFAAWLGLVPKQRSSGGKSRLFGISKRGDRYLRTLMIHGARAVLRTACGNGDTRSRCIEKMRYRRHPNVVAVALANMNARVVWAILSGRTVYQPAFSASEH

SEQ ID NO: 306633 - protein, 428 aa, unidentified
MNCTQNEKLNQVTPHTLIVGVDIAKFKHVARAQDDRGKILGKALTFTNTKEGFEAFFAWLEEMQHKHEKSDVLVGMEPTGHYWLNLAYTLKERLVSFGVVNPLHVKRSKELDDNSPTKNDIKDARVIAQLIKDGRFSYPRLPMDQDAEVKAGITIRNQIVGDLQALQGRIHNWLDKYFPEFLTVFKDWSGKMALATLEHIPLPVQLNQTTPERVAEIWSTYGGVQRPSHKRIQRLQEAAGRSVGLTVGLQMAQREIATNIKRYKMLKEELHALEKQLEDLVLTLPGIAEMLTVPGVGMVTVIELYSELGDIKNFENPRQILKYAGLNLRESSSGKHKGQTRITKRGRAKLRALLFRTVMPLVRHNRAFKALHQYYTTRQENPLRKKQSLIVLCGKLVRVLHTVGQKQCPFDEERMIRDIPHLSLALGA

SEQ ID NO: 306634 - protein, 458 aa, unidentified
MAEKTKAGGAATQGFVAVHPRAAGIDVGNESHWVAVPPDSPDGDPVVREFGTFTVDLQAVADWLIECGVSTVALESTGVYWIPLFEVLELRGLKVCLVDTRRLSNVPGRKSDCIDCQWLQQLHTFGLLASAFRPDGQTVVLRSYLRQRAMLIQYASQHIQHMHKALQQMNVKLGNVLSDVTGQTGLAILDAIVAGERDPLKLAELRDRRCKADQATIAKSLQGHWREDHLFELTQALELYRTYLGKIEKCDTEIERCLNQLPDGGDKGVVLPPLPPKKASGKVNAPQFDARGHLYRICGVDLTAIDGIDANTALKVISEIGPDITLWPTSKHFCSWLCLCPGTKKSGGKVISSKTRSGGNRVAAALRMATQSLARSQSAMGAFYRRMKARLGAPQAVTATAHRLARTIYAMLRYGQAYVDAGQEAYEQQFHERQKRHLEKQARRLGYVLTLGIAPQPA

SEQ ID NO: 306635 - protein, 331 aa, unidentified
MNFSTIIGIDVSKLTLDLHVLPTNHDYQTKNDEKGFKEIVKWLAKVGQIDFSATLFSFENTGFYSYKLSLWLQDKGYHFVMLSGLELKRSLGISRGKSDEIDALKIAEYTFLRRDSITQTILPEQDIIRMKRLLSLRNKLIRQRSGFMATLREAKRAFSRKEDPLYYKIQEDLLKKLSIQIERIEKELHQIIENNSTLKEQYHLILSIKGAGPIAAFTFIAITHGFQKFQTWRKFACYAGIAPFPYRSGTSIMGRNKVSHLANKKIKSLLSNMAVSAVQHNTELKLYYNRRLDDGKNKSSTLNIIKNKLVARIFAVIERGTPYVNTAKFAA

SEQ ID NO: 306636 - protein, 439 aa, unidentified
MKRRRDRVCGADVHKDLIVATITGDDVLPIQENFGTTKAELKRFRNWLVANKCEQVAFEATGVYWMPIYDALSKTIDTIVANPLQIKTIPNDKSDSKDSNRIATLCLNGQIKRSRVFTDEDRDLRMMTRARSGYVKTRTQFRNRIHKYLSSSGIKLSSTMDDMFCKSGRYILNGLAEEKPIEEILKGIPSGKIRKKQDLIRAALENALNDTNRMLLIDALEILDNLESKMEKLSLEVLKRVQQKSKDLAIVMSIPGIGFVSASVILSEIGNYRDFQTPDQLAKWCGLNPGENESAGKKKKCGITKRGSKHIRVVLVQAAQTISNMNKTGLSRFFQRLIKKKEHNVVIVAVARKLICLIYHLLINQELYQEDDGRKKRSSQDKSCQAPSFQEEHLTDKVAAIVDAFYHLKESSRKNALMREIADISEIKIGRKRPSKGGG

SEQ ID NO: 306637 - protein, 420 aa, unidentified
MKVVYQTCCGVDVHKSFLVATIIKTTSGVEPSYEKKRFSTFNNSILQFKQWLIEHDCYDICMESTGKYWVPVFNLLEDVINVTIANPKWVKAVKGNKDDSKDSKWIGDLFRLGLVPGSFIPSKDIRILREYTRYRYKLTSCKSSEKNRFQNALTVCNVAIDSVVSDVFGKSATSVIDYLIEQTDNSINHEEISSRLLRSLKKKSDSVIESIEGYQMTDSQKYRMRLVRAHMDYIISTINDIDTMIETLIAPYENAVQLLCTIPGVDRNSAITIISEIGINMAQFSSSKRLCCWAGLTSGNNESAGKKKSVRITRAGVYLKPALVQCAHAAVKSNISPYYKTKYERILKRRGKKRAIIAIARMILTAIYLMLSSGETWNPSDLYKIDMPQPLVEKQKEKAIKQALKLLRSEGIIPPLLEAY

SEQ ID NO: 306638 - protein, 419 aa, unidentified
MTQREDSKIIGTVHPICCGLDVHKESISACVIYVDKDGTDQYDIKVFGTFTDDLMRLRSWLLDHECPVVAMESTGIYWRPVHNVLEDALQVVLVNARDIKNVPGRKTDIGDSKWLAGLLRHGLLRSSFIPHKEVREWRDLTRLRKKYVHTVGDYRKRTHKLFESANIKIDSVVSDLFGVTGRNLMNLLVSDRASLTLADIKRCVRGKLKGKEEELYRSIQGFFSDHHRFLLKRLLNTIDLLEAEISLFDEQIRHLMTDQNALLNRMKKAAGIADVSSREILAELGPDLKEFSTGEALVSWAGLCPGNNESAGKRKSGKSPVRKHHLKTILIEVAWAAIKKKKSYFKDKYYRLKARRGAKKAIVAIAHRILLGIYHVIKNGAEFRDLGEDYLAQRNKSQKISHLRKQAKSLGYNLVPQAI

SEQ ID NO: 306639 - protein, 460 aa, unidentified
MLYAGCDWSDQWLDVAVVDRSGAVVGETRIVYAETPDPVARYREFLAPLARRWRATVTGIEDVNILFARALAASGMEVVHVDPTRAARHRTAQGISKTDRADARLIASMTLAGQARPVVASSPEAEALRVVAHAHRAAVARRTEALHALRAGLMRIWPAAVSAWPASVGGLRSAQARAVLAAASTPRAAARLDCTALVELLSAAGRKRSVQNEAERLRMIFHSPAMLLDPRVEDAEGLRISHLLATLDHAVRRAAALERDLERHYAAHRFHPLVTGVPGIGAVLGAYLLADIGDRPVERFGSGRSLAAYAGVAPVTWASGQTVRVAFRRASSRNLRSTFHLTAFSLVGHSPGAHAYYTMRRSAGDAHATALRKVGRKVVLCLYHCMATGLPYDDGAAFGYDPAADGAPSLPRRLALDEDQILLARAMLAAPGTTVTATARTFGVSTQTIYRHVLGRYRTR

SEQ ID NO: 306640 - protein, 457 aa, unidentified
MPGKKAKSKSDRTLQMVHPNAAAIDVGATLLMAAVRADRTPDPVRSFGTFTTDLHQLVDWFAECGVDTVAMESTSVYWIPIYELLDARGFAVFLVNARDAKHVPGRKTDVSDAQWLQRLHSYGLLRASFRPKGQFTQLRAYVRQRERLLEYAASHIQHMQKALTEMNLQLHHVVADITGATGLRIIRSILSGEHDPKTLACLRDYRCHASIETIEKALTGNYRAEHLFALEQALALYDAYHEKVSACDARIEAVLKDLSIGRGHPADTLTPSRRRTDQVNGLAFDVRSTLFALLGKDITKIAGFGPYLSLKLVAECGDDLAAWPSAKHFTSWLGLAPNNKISGGKVLSARTRRSGSRSAALLRLAAVTVGRTDTALGAFYRRLSARIGKAKAVTATARKIAVLFYNAVRHGMEYLDPGASFYETRYRKRVVDNLHRRAKAFGFVLQPLEPTPDGAVS

SEQ ID NO: 306641 - protein, 429 aa, unidentified
MNYNTQNAKIASITEKTLIIGIDVGSETHYARAFRWRNYEYSKKPFAFSNDEAGFAAFKEWMDDIAEKHGMEVIIPGMEPTGHYWLNLGAYLQEQGMKPVHVNPHHVKKSKELDDNNPSKNDRKDPKTIAGLVNEGRFSYPYIPTGIYAEIRNLSNLRIQTQEEITRIKNRMARWFSIYFPEIKDVYRNPDAVSGLMVIKQAPMPCDIRELGVEGVNKIWRDARLKGAGIKRATTLVTAAEHSIGNTEAPRSSRKEIRNLLEDYEGYKKRMDELMEEIEKTLSEIPYIDKLMKINGIRIKTVSCFIAEVGDIGRFDNPKQVQKLAGYAIVADSSGKHNGESRISHRGRKRLRYALYESAISVIGKNKEFKEIHSYYRTREKNPLKKMQSVIAVACKLIRIFYTILTKGVDYDGQKMLNDIVRPEIQPAA

SEQ ID NO: 306642 - protein, 343 aa, unidentified
METKRYIGIDLHRNCFTACLRLENGREYLKQWRLEEMDRFVAKLRPTDQVAVEVTGNTRLFHDAVAPHVERFVAVNPSQFKVITHSVKKTDPNDARNLALYLSKDLLPEVRMKDKTRAQIASLTQTRDSMVKLRTALKNKVNNICSSHGVNLNKESLASEKGLRAVLEMHFDVLVNLELKIIVDQIRSLNQSIAELEETIGKESHRLEGHKNLARIKGIGQLSGGILLSIIGDIGDFADEGKLAAYFGIVPRVSNSNETEHSGRITKRGTKLGRTTLIQCALIAQRYSPYLKNYYEKMKSRRGTGKAIVALARKFLGIIYRTLKNKWVFEDFPNFVLAEEATA

SEQ ID NO: 306643 - protein, 344 aa, unidentified
MGEVSTIGLDIAKSVFQVHGVDVAGAVVIRKRVSRAKVLEYFGELPPCLVGIEACPSAHHWGRELQALGHTVRLIPPSYVKAYLKRSKNDANDAAAICEAVTRPSMRFVPIKTKEQQTALMLHRTRQLLVRQRTMLSNALRGHLAELGVVSAKGRNGTAELLRIIAGGADSRVSPAVRGILEVLARQYGAIGTEIASIDKSIMALHRGCEASRRLAEIPGIGPVGATALVAEIGDWKTFSSGRSLAAWIGLVPKQHTTGGKDRLGSITKQGNRYLRWLLIVGAMAVIRYARKHGTQKRPWLGRLMERRPTKVAAVALANKIARMAWAIMVRGERYKEPKLLLAA

SEQ ID NO: 306644 - protein, 330 aa, unidentified
MMTKLPKKVIGVDVGAKILTMSFQDSNNQDQVCNIENNQRSILSFLKKISSDDYCLVIEATGNYSSRILHLSLGKRFETSLINCMSVKHFARMKNIIAKTDAEDAKLIRLYGEMFRPENYIPKSTEIEYLDQEIKLLNDLEEEKRRYAVKLKALRFNPYLNPNTEKHYERRLKQLEKEIKEVELRLPQLQDEEFKEVKDLIQSVSGIGEKTSLQLMTATSGFKNFDSAKSLVKYFGLAPRIYQSGKKSYSPGKCRTSKTHIRSLLYVCSWTAMKHNVHCKELYLRLLAKGKPKKLALIAVCNKLLRICFGVVKNRIKYQQDYQKNFKILT

SEQ ID NO: 306645 - protein, 343 aa, unidentified
MQTVTTIGLDIAKSVFQVHGIDAAGNVIVRRKLKRRYVLPFFQKLPPCVVGIEACASSHHWSRELQALGHTVRLMPPAYVKPYIKRQKNDAADAEAICEAVTRPNMRFVATKTPEQQSCLMLHRTRHLFIRQQTSVINAIRAHLAEFGVVAPVGRNGVEQLLDVVADVSDQRLPEIARACLLALGAQLRTLKAQILNFDRQIMACHRSNTTSKRLDEIPGVGPALATALVASVADPKAFRSGRDFSAWIGLVPKQHSSGGRDKLGNISKRGDRYLRSLFTAGALAVIRYAKIHGTQHRPWLSALLARRPTKVAAIALANKIARMAWAMMAKSERYKEPVALAA

SEQ ID NO: 306646 - protein, 408 aa, unidentified
MEVVHPRCAGLDVHQKTVVACARVVEGRTFRQEVQTFATTTAGLLQLSDWLSSQGCTHVVMESTGIYWKPVWYVLEGAFELLLANAGHVRNVPGRKTDVNDAMWLADLLAHGLIQGSFVPPTPIQEARDLTRTRTQLTREIAQHTQRIQKTLEQANIKLTEVLTHVLGVTGRAILEALIAGQTDPDGLVELRRGKLKASRDELRDALDGRVRDHHRFLLRLHLDQIDALQTAVQTVERRLEVVLSPFRSQLDLLTTIPGVSRTTAFILLAEIGADMSNFPSSAHLVSWAGLCPRSDQSAGKHRSTRLRAGDTWLKTALVQSAWAASRKKDSYLRAQYYRLKARRGGKKAVVAVAASMLTAAYYILLRHIPYKDLGPTFPDRQHKEATARRLISRLRNLGLEVEIKSAA

SEQ ID NO: 306647 - protein, 385 aa, unidentified
MAPIRMPEAVIGLDVGKSSHWACVATRDGEVLLSAPVANREDDLDSLFGRFPDALVVVDQSRNIGALALARARAAGMSAAYLPGLAAHGAARLFAGDAKTDERDAMVIAKTALGIPDALLPVGDPGPTIAAARALAAQRNFLTCENTRNKNRLRSILLESCPAFEALVDLSDGPQLRLMASLGGAWSVADAGPRRAAALTRGAARGKIEALVRSTTSSTRPDAAAVAAEDRAVKLLARRISENSAEIEAITAEISNLLEGDDTYRCLLTVPGIGPKTASELAISIDIEDFPSHDRLASYCGLAPRNRQSGTSISSVTASRQGNKRLKNLLIFSCNCLTRTEGRWGDYYTRCRERGMSHGKALKALARKRLKVIYAVMRDRVPYAA

SEQ ID NO: 306648 - protein, 330 aa, unidentified
MNYVGIDIAKLTHFATCISSDGEIRLEPFKFLNDNNGFDFLSSKLNELEDRDIIIGLESTAHYGNNLLRYLVSKNYNVCILNPITTSSLRKQNIRKTKTDKVDALIIAKAIMLSDNLRFVSFNDLDLLELKSLGRFRQKTIKHRTRLKIQLTSYVDQVFPELQYFFKSGLHQKSVYAVLKEAPSPRAIASMKQVESSIEDIMTLCDSPIMTIPGIGFINGGMIIGEIGDIHRFSKPNKLLAFAGLDPSVYQSGNFSAKSTRMSKRGSRVLRYALINAAHNVTKNNKTFKTYYENKISEGRSHYSALGHCAGKLVRVIFKILKDDIPFNLE

SEQ ID NO: 306649 - protein, 341 aa, unidentified
MQITTIGLDIAKNVFQVHGIDAAEKVVVRKQLRRGQVMAFFEALAPCLIGMEACATAHYWARELTKLGHEVRLMPAKDVKAYVKRNKNDAADAEAICEAVRRPTMRFVAVKSAEQQGRLMQHRVRDLLMRQRTQLINALRAHLAELGMAAAQGREGIKELLAIVAQDGDSRLPVDAHASLIVLAAQLQTVQTMIGSIEKRIVSQHRSNEASKRLETIPGIGVIGATTIAAMVPDPKVFRSGRDFAAWIGLVPRQDSTGGKQKLGPISKQGDQYLRRILVVGAHAVLKRARQQPEKYPWLTQLLARRPFKVVAVALANKMARIAWALLAKGGTYRAPQLAAA

SEQ ID NO: 306650 - protein, 343 aa, unidentified
MKITTVGVDLAKKFFQVHGVDERGTPVLRKQLKRSEVLSFFANLTPCLIGMEACCGAHHWARQLQKLGHTVKLMAPQFVKPYVKTNKNDMADAEGICEAVSRPTMRFVPMKNGEQQAVLALHRARQGFVRARTAQANQIRGLLAEYGIIIPRGICQIGKRLRDILEDGENDLPGLFRRLLQRLGEHLKELDRQVSELDSQIQLWHRQHEGSSRLAQIPGIGPITASALVASIGDAKSFENGRQLAAWLGLVPRQHSSGGKTMLLGISKRGDGYLRTLLVHGARSVLRVAKRKSNYEASWLAGLLKRRHPNVVAVALANKNARIVWALLRRDRDYDAGYQASAA

SEQ ID NO: 306651 - protein, 422 aa, unidentified
MNEQAAVGYSVYVGIDWADTKHDVCIQPKDSDEREFAVIQHRPEMIDAWVKELHLRFGGPIAVAVELSKGPIVSALQKYDFIDIFPINPATLAKYREAFQPSKAKDDPTDAELAVDLLLRHPEHFKALKPQSTEMRALTTMVEQRRRLVEERGRITNRLRCALKQYYPQVLEWFEHIDTPLFCAFIKCWPTLTQAKRARTNTLKRFFHEHHMYRKGVFERRRQAINAASPLTLDEAVIVPYRMQVLVLVEQLELMFKAIDLFDEEIAKLATQHPDYALFQPLPGAGPSLTPRLMVAFGEQRERFSSAADVQKLSGIAPVTERSGQKHWVHWRLQCPTFMRQTFVEWAAQTINKSYWAGAYYRQQRDKGSTYQAAVRSLAFKWIRILYRCWQSGVAYDESRYLKALERRGSPLVKRQKMLESA

SEQ ID NO: 306652 - protein, 347 aa, unidentified
MVADSFDVVIGVDTHRDAHSLALVRCRDAVPIAEQELPANRAGYRAALRLGKRAGERRLWALEGTGSYGAGLARFLAERGEQVREVERPAREGSRQRLKSDSLDALRAARAALAGQASASPRAAGRREALRVLLQTREGAVAIRRSGLNQLRALVVSAPEELREGLRGRGRDALVSACARLRPHPRQQAERYATALALRSIARRVERSTREAAELESELRRLVFELCPQLLALEGVGPISAAQVLVAWSHRGRLRSEAAFARLAGAPPIPASSGKTVRHRLDRGGDRRLNRALHTIVLTRRRGDAATIAYIARRVSEGKSERDAVRCLKRYLARQLFRLLEATSTTG

SEQ ID NO: 306653 - protein, 339 aa, unidentified
MNSNVFGIDIAKQVFQIHWVDQETGEIHSDKVKRKDFINYFANQQPSVIGMEACGGAHHWGRLFKKMGHSVKLLPANKVKPFVVGNKNDIGNKNDMVDARAIWTAMQQPGMKFIAVKTEEQQSILSIHRMRELLVKHRTAQINSIRGLLTEFGLVMPKGKKAFKEQLPNCLVKLESKVPSAFMHALQVQIEQLSHLDTDIKRLEMQIQIWFKHNVDCQRISKVPGVGPLTATALIASMGDASVFKSSREFAAWIGMVPRQTGTGGRVHLHGISKRGDIYLRTLLIHGARSVISRSKEKSEWLQSLQARRPNNITTVALANKTARTVWALVAKQTEYQPC

SEQ ID NO: 306654 - protein, 356 aa, unidentified
MKYLKDTKRFVQKKAVFCGIDIHEKHWNLCYFCNGEIVEKLHIPGEYQRLISHTRNFYDTAGSLTFVYEAGFSGFWLYRCLTDSGYGCVITPPNRIPGNSDKVKTDKKDAVKLARYLAGGLLKKVYVPPPSTEADRQLLRLRAGHKKKLTRVKNQINSLLRLHGIRWSSERGSRWTKRFVSWLEEIEFSEPNIRFVLDQYLLEYRFLRDRIAVITKHIRDLSRSKTYGRQFKLLTACKGIGLITAMTFLLELGDVERFPDSISFSSYLGLTPSQHSSGQHVRLGHITREGNAFIRAVLVESAWTVIRHDPFLREKYDRIKARGTNGKKAIVAVARSLAIRLRSCLLRDEPYVVGIC

SEQ ID NO: 306655 - protein, 418 aa, unidentified
MTTVLSADWFIGVDWATDAHAVCVVDATGRVCDRRTVAHSAAALETLIEALVARAAGEPARVAVAIEVPRGALVEVLVERGFAVYAINPKQLDRFRDRFTAAGAKDDRRDAWVLADSLRTDPQAYRAIRLDDPRVIQLREWARLDEDLAAEVTRLTNQLRDVIYRGMPGLLALSPAADDPWLWTLLREAPTPSAQQRLSERRLARLLREHRIRRLTAAQVRAVLQQPPVFTAPGVIDAVAAHLALLLPRVELAARQRREAAQQLQRWLDTLDGPAAGDQREHSDVAIVRSMPGIGTRVAARMLAEASQPLVDRAYHVLRAHMGLAPITKQSGRRRIVVMRYACNRRLRDAAYHWGRTAIQLDAPTRAYYTQLRTRGHGHARALRSVTDRLLRILMTPLERRQLFDPAYAQPVAAPAGA

SEQ ID NO: 306656 - protein, 337 aa, unidentified
MYYIGLDIHKKNTQACVMDESGKVIVNERFSSDIVAMNGFLDRLGTAEARVVMEATGFYKCLYEAIEPRGYDVTLAHPLKLKALTTGRAKTDRNDAEMLAELLRIDAVPSSYVPPKDIRALRDLTRHRSSLIAESTTLKNKMHAELARRGAKPPAEVGAAFSKRFIAWLREMRSMMTDDPLDILEIVREKIKRIDERIREEANKDEDIRLLETIPGVGHAVAMTIKAEVGDIGRFRPPDALASYAGLASAMRRSGERKAHIGGMSKQGNPRLRYMLTEAVHVHVMYRKGSKQTSFYEKKKEEKGSRKATVATAKRLLEVMYQMIVHREESHAHRPDR

SEQ ID NO: 306657 - protein, 382 aa, unidentified
MEILYHCCAGLDVHKKTVVACIRRLGPDKQAEDLIRTFGTMTADLLELADWLAAHAVVHVAMESTGVYWKPVFHLLEDRFQILLVNAQHIKQVPGRKTDVKDCQWIAQLLQLGLLRASFVPPRPIRELRDLTRQRSQLVGERASVSNRIQKVLEDANIKLASVASDVLGVSGRAMIAALIGGETEPDRLADLARRRLRGKIPQLRQALKGRVTEHHRFLLRTLMDHVRHLDDLIERLDQRIEEAMSPFAKAVERLVTIPGVNRRAAEVIVAEIGTDMTKFPSAGHLSSWAGMCSGNHQSAGKRQSGRTTPGDRWLRQVLVQTAWAASHTKKTLLSATYHRWAKRMGKKRALVALGHKILVLIYELLKDQTTYQERLVPDQAA

SEQ ID NO: 306658 - protein, 359 aa, unidentified
MIVVGVDPHKNTHTAVAVTSSIGELVDELTVKARKAGHEQLLQWARALDDERLFALEDCRHVSGALERLLIEHGERVVRVPPKLMAGARKGSRSFGKSDPIDALAVARAALREPQLPAATLAGPALEIKLLLSHREDLVAESTRIHNRLRWHLHDLDPEIEIPPRKLSREIWLERLERRLRRHGPQLRARLCRELVRRAKQLLRQQRSLERELEVLLKEHAAPLLEMPGCGVLTAAKLLAEVAGIERFESDAQLAMLAGVAPLDASSGRQRRHRLNKQGNRQLNLALHRIAVTQARLHPPARDYLARRRAEGKTWREALRCLTRHLARTVFKLLKEISLRSRSDRSLTPDRPLSAIALT

SEQ ID NO: 306659 - protein, 458 aa, unidentified
MTKRKQKLPQEAAPVEVLKQLNLNAAGLDIGAEEIYVCVPVDRDEQPVRAFPTFTADLHALADWLAACRIDTVAMESTGVYWIPVYEILEARGFHVHLVNARQLKNVPGRKTDVLDSQWIQQLHTYGLLRGSFRPPEDICALRALARHRDNLIRYRSSHIQHMQKALQLMNLKLTQVVSDITGVTGMSIIRAIVAGERNPQTLARMRNAGCAKSQEEITKALHGNYKAEHLFVLKQALAQYDFYQQQIEECDAEMEAMYAALPPSEPGDSASPPPKPTQRKPRKNQAHFDLATSLYRMVGVNLAGIDGLDALSAQTIITEIGTDMSRWPTVKHFTSWLCLSPYNDISGGKVLRSRTKKTKNRANMAFRLAAQSLSRSQSALGAFYRRMRAKHGPEKANKATAHRLARIVYHMLKHRDAYVDPGETAYNQQQRDRTIRNLKRRASLLGLQLVPAIATVS

SEQ ID NO: 306660 - protein, 374 aa, unidentified
MSIVMGVDQHRAQITAEWIDLDTGEISRARVSPADRDGVRRFLARFAGKQLEVALEATTGWRFFVEELRAVGAGVHLAEPAQTAALRGRKQRAKTDRADARHHRELLMAGRLPESWIPPDHILDLRARVRLRHTLIEAHSEWQQRIQAVLYHHGCPQRRKLMVGDGPDWLSAQPLPDAAREQVTVARAMIDALERQIAPLDAQLRPYARRQTGCKALINAHYGVGELVAVTVLAELGDCRRFSNSRDAVRYGGMDITVYQSDRHRAPGHLSRQGPPALRWALYEAAQAARRPSSPDREYYLQAAEQLGGNRACLALARKLLKRCYHTLRELGEDALTPPADEPSGSGSARRASSGSPAPTNRPATPQRADPLAA

SEQ ID NO: 306661 - protein, 341 aa, unidentified
MSLIKAVGIDLAKLVFSIHGVDEHSKCKLRKTIKRNNLLAEIAKLPPCIIGMEACSGAHYWAREFTKLGHDVRIMACKFVIPYRQNEKNDANDAEAICEAVTRPKTRFVSIKSEEQQAVLCLHRIRQGAIKDRTARINRLRGLLAEFGIIMPKGRYPAQNAIAGILEDGENNLPFIARELLDDLWQSIKGLNEEILKYDRKLHALANQMKDAKRLMSIPGIGEITATAVVATVNDDKHFDTSRSFAAWIGLVPRQYTTGGVARLGRISKRGEKHIRTSLIHGARAVITNCKNKTDRTSIWVKDLVERRGFKRAIVALAAKNARLIWALLHSEKEYQVDYVK

SEQ ID NO: 306662 - protein, 408 aa, unidentified
MNPLFVGIDVSSKNNVAYLMKPDGSKHSSFSVQNNLGGAKLLSEKIVSALHSMQLNDVVIGLEATSIYGDSLVYALREDGSLGRFQRKIHVLNPKQVRKFKEAYPDLPKNDWVDAFVIADHLRFGRIAKEVYMDDYRYQALRTLTRARFDIIQNLTREKQRFANYLFLKCSGIAQDKDIQNTSATTIALMEHFETVDDLANADLDELTAFISEAGRGRFVDPDATAKAVQAAARGSYRLPKTVNDTVNQAMSVSIASMRALKEQVKVLDKAIEQHLEIIPNTLTSIPGIGKVYSAGIIAEIGDIHRFNAQASVAKFAGLVWHRNQSGDFEAEHSQMIKSGNRYLRYYLLEAANSVRRCDSEFRRYYDLKFKEVNKYQHKRALALTARKLVRLVFRLLKDNRLYIPPEG

SEQ ID NO: 306663 - protein, 450 aa, unidentified
MNSSLVLGIDPGKSFFAATLVHSTGERVWKGRQFDMSRDGFETLRSSLPKGDLTIGVEASGRIDDNLMAWFGQWMSTCRDRQIKLIRVNPGQSVRFGGPNPRRDQTDGSDSDHVAEYTRVYERRLEAFDCDPKAQAGARLVSERQRLAKDLAATKNRIHEQVLVCFPEFTQVFTNPFAKLARAVLRQAPTAQRAARRQGSSLARVKSDRQGRSLGAERAGKLIRLAQRSIASAGEDHDGAALVFLIDQLELLEKRLAHIDQALLAYAQQAQAETENLGPEGVSPARQIGLLDSIPGIAIVAASTLVLGTRGIARFDSGKALAAQWASCPERIETGTSLKKTRLTARGDHKKRAMLYLCAQAACVHDPAFAFHKWRMIQRGLCPQQAVCAAMNRMARVIWALVARNHAYDVTRMLDQIQIHHAALWKEFVRLHQANRALWKKVDSKFKKIA

SEQ ID NO: 306664 - protein, 457 aa, unidentified
MNKKGYLGIDVSKGYADFLLLNNESQILEDGFQLQDNKEGRQMLKGLIVKWQKQGIEELYCGVESTGGYENNWYGYLKSVPKENKVFVCRINPKGVKAVSDASLKRTITDAVSAENIASYLFKFPEKVDYGNNAMAGNEAFKEGRQHSTYIKMLIKQKVQLNNQFEKLLYQHFSEMMVYCRHGVPVWLLTMLTKYPTAKIVVKAGVAKLSAIRNISVDKAMAIINKAKASEQNISTQISHVITATAKEILHKAALIHEEKEYLADIFKDTPEVILISSIPGVGIDSAVAIALEIENVDRFETSKKMASFFGVHPTYKQSGDGMWGNHMSKKGRSDIRGVLYMAALASIRYNPLLKQVYARFRAKGMKHYQAMGVVMHKLLRIIYGILINKNVFCAETDEKNKERSAKKQKENDQKLKEDHKINKQKKHRFQETTTEAPISRRAEQKIKKQVASQTSA

SEQ ID NO: 306665 - protein, 327 aa, unidentified
MNTIGVDVDSINLVCQIRRNGKDFPLATFSNDPAGHRQFIKWATKRRQPARVCMEATGVYSLPFALMLHTVELIEVMVVNPKAIKHFATANLQRGKTDALDAAVILEYLERMPFREWQPPSDEILEIQHITRRIVQLTGDLTRERNRHKAAKRLGALGRVVANDTAVTMRHLERRIQQMEQASLDLIESIPELNEQLSLVTTATGIAKKTGPRILIELAALPDDMSGAQWVAHAGLDPRPYESGVSTNKPRRITKAGNRYLRDALFFPALVASQKDKHVKAFYQHLLSKGKKPMQAIVAIMRKLLLAIWGMLKNQQPWDGNKFYRLT

SEQ ID NO: 306666 - protein, 435 aa, unidentified
MEEVTDEPLYRDRVCGIDIGKAQMVATIRVPSDKDPARRAQETRSFGTTRKEVLALADWLRSWQVPAVVMESTGDYWKGPFYRLEAEDFECVLADAKQVRHLPGRPKRDPADSRWLAACFERGSVTSCFVATPEFRVIRLHTRYRRDLTEERTREKQRAEKLLESAAIKVSSVVTDLHGVTGRDIMDQLIAGERNPKVLAQLARGRARRKIAELEEALEGAEFFTADHAALLAKVLARIDRLTADSGELTEVIERLLAPYEEQPEQAESMPGWGRRAAQDSIAETGVDMTRFRTGAHLSSWAGRTPVDNQSGKRPGRARSKKGNRYLAGITGETAVAAGRTQTREGARYRRLARRRGKAKAQVAVGNTQLKVYHKLLSNPGMRYQDLGPDYYERRAEVSRQISHHVGKLGALGFEVTLCRIPEPEPDATGHTQDA

SEQ ID NO: 306667 - protein, 343 aa, unidentified
MKLFVGLDVSLEKTAICVISEHGKIVREVRAASEPEVLIRWMGDLDGTIAVIGLEAGPLSQWLHRGLTEVGLDVVLMETRQVKGALKAMPIKTDRRDAEGIARLLHLGWFRPVHCKSVSAQEVRAVLNARKAVQQGFIALEMSLRGLLRNFGLKVGSISRGRFEQRIRELAAGNPMLEAATEPMLRARLSLRQELAGLERRVRQLAQEDPACRRMMSMPGVGAVVALTYRSAVDDPGRFTSSKKVGPWVGLTPSRNQSGERDVSGGITKAGDVNLRRALCQAATVMMHRGRSTWVRTWAAQIARRRGSKRAMVALARRIGVILHRMWVEGTDFRSDGPAPKVA

SEQ ID NO: 306668 - protein, 346 aa, unidentified
MKVLIGVDPHKASLAVAAIDEASGELLERASFPQNRAGLRSLERWARRFPERRWAVENAGGLGRYLAGKLSVVGESVVDVPPKLSARVRVLSTGNSRKNDGLDALATALAASRRERLAAVDHETASEVLRLLSERREDLVAERTRALNRLHGLLRDLLPGGVAGTLSAHRAARILRGMRPRGISSRVRRRLASEILRDIRTLDRKIADLNGRIEAELEASGTNLTEIYGVGPILAARIIGTVGDVTRFPTKAHFASYSGTAPLEASSGDVVRHRLSLAGNRKLNYALHMIAVCQARSDVRGGAYYRKKIAEGKSRKEALRCLKRRISDAVFRSLVADSQASSHSAA

SEQ ID NO: 306669 - protein, 343 aa, unidentified
MKHYVGLDVSVKETCVCIVDGTGTVCREIKVPSHPQDLLRVLQDPTWRLERIGLEAGPLSQWLFEGLADAGLPVVCIETRHTKAFLKAQLNKTDRNDARGIAQMMRVHLYRPVHVKTLASQKRRALLTARKLLQDKAIAIENDIRGLLRNFGLKVGIIGAVKFQDRIRELIADRPDLAEIIEPLLAARRALREHFVALHQKLLAVVRNDGVCRRLMTVPGVGPVVALAFVATLDSPARFRTSKAVGPALGLTPVQHQSGETNRVGRISLCGDAMLRTLLVEAAQSMLMRVIKWSWLKAWAMNVARRRGGRRAVIALARRLAVVLHRIWTDGTEFRWTRDAQTA

SEQ ID NO: 306670 - protein, 380 aa, unidentified
MKNVYENVASIGVDVHYRFSKVGMRDAQGRLVRRERLDHTNRQQLRRRLAQWPKGVPIVMEASFGWGWLADEMQAAGLQVMLANCFKLEKMRKARGLAKTNDKDAGLLSELPFEKSQWWRVWLAPPEVRNQREWLRLRMDLVALQTMTKNRISAVFHRHGVFHEFSDLFGAGGRAFLGELCRAGRHAEGQLPDGALAALRSQVRLLGHVRGQLAAVTHRVRGRLARSELAVRLDRIPGFGLVLVHTVMGEVGRIDRFGSHRRLASYSLLAPISQDTGEPRPGAAPVGRHLGFRGNRTLKWAFIEAAHGAVRRGGRWRAMFDRYTDGGRRNRNHGYIKVARALVKVVYVVWSKGVEYSDSPPPRPSRKQRMQSWMSRPGTG

SEQ ID NO: 306671 - protein, 370 aa, unidentified
MNKLFVGIDVGSRINAVYIMLPDGSKHSSFTVQNNLGGAQSLSKRVVAALKEYNISTVILGMEATSVYGDNLACFLREDGALGRFEKRIHVLNPKQVKKFKDAYPDLPKNDAIDAFVIADNLRFGRITAAIYSDDYRYKALQTLTRTRFSVVQNLTREKQRFMNYLFMKCSGLAQEKVFSNTYGSTALALIEEFETPDDIANMDVDQLVEFLVEKGKNRFPNPSEVAKAVQAAARGSYRLPKTVNDSVNQVLSIFISSMRAMQEQIKALDKEIERQFENIPNTLTSIPGIGKVLSAGIIAEIGDINRFPNHAAVAKYAGLAWTQHQSGMFEAQNTRQIKSGNRFLKYYLCEAAFSIVRCDTEYRRFYYLK

SEQ ID NO: 306672 - protein, 409 aa, unidentified
MQQVIERVSGLDVHKKTIAACIRVPGPSGARVQQVQSFGTTAAEVLALSDWLAAHGVTDVALESTGTYWKAIYYVLEERFTCVVVNAAHVKQVPGRKTDVQDCAWLAQLLEHGLLRGSFVPPPPLRDLRDLTRYRKALIQERTRAANRLHGRLEDAGLKLATVATDILGVSGRAMLEALVQGTTDPAILAELARGKLRAKLPALRQALAGRFRSHHGFIVSQILAHLDYLDEAIASLSEQVEGYLAPFAEAVALLDTLPGVARRTAENLLAEIGVDMGQFPSDRHLASWAGLCPGNNESAGKHKSGKTRKGNRWLRATLNEAALAAIRTKNSALAARYRRLMPRRGHNRAVTAVAHALLRLAYQVLATRTPYHDPGPEYFDRRHTARLTRRAVQLLERQGYRVTLAPAA

SEQ ID NO: 306673 - protein, 345 aa, unidentified
MEIRTIGIDLGKTVFHFVGVNARGEVVVRKKGSRTQLLRFTSNLRECLIGMEACGGSHFLGRALREQGHDVRLMPAQYVKPYVKTNKNDYIDAEACAEAVTRPSMRFVPIKTDDQLDLQSLHRVRERWVGRRTAVINQIRGLLLERGITIRKGRHHIEESLPSILEDPDNKLSGALRVLLTQLRLEMQYLHGQVEESDKLIVRIAGELEPCTRLVAIPGIGPITATATIAAIGNGAAFKKGRGFAAWLGVVPGEHSTGGKQKLTGTRRRGNKYLRKLFVQGAHSVLLQRTKQSAGLSTWLAQLTTRKRAQVATVALANKMARMAWAVLYKGEAYRPPSLPQVIAA

SEQ ID NO: 306674 - protein, 422 aa, unidentified
MLAESQDEEQIIARVAAIDIGKAELVCCVRVPAEGNSKKRLQEVSTHSTMSRSLAELANHLVDLRIERVVMEATSDYWKPVFYLLEAHGLEPWLVNARDVRHLPGRPKSDVLDSVWLCKVAERQMLRPSFVPPAPIRRLRDLTRYRIDLVGTRTAEKNRVEKLLEDACIKLSVVASDIFGVSGRQMMAALIGGERNPKVLAQLARASMRKKISELEEAFTGLFDDHHAFLLSRMLARIDGIDADIAAVDEQIEANLAPFAAAAERLDEIPGIGPVAAAIILAEIGVDMTRFPTAGHLCSWAKFSPGINSSAGKTKGNGSTGHGNRYLARVLGEAAVGAGRTDTFLGERHRRLAKRRGKKRAIVAIGRSILVIIWHLLQDPEARFHDLGADHFSSRTNPDARKHNHVRQLEALGYTVTLTPAA

SEQ ID NO: 306675 - protein, 330 aa, unidentified
MKSWNVILGVDVSKLTLDICCADRGQYLKIDNNTKGFGTFKKWCKTNEIDLKATLVVMEHTGGYEYRFIQFCESQYISYCRIPGLEIKQSQGMARGKSDRADAFRISQYGEEKIKKLTPSKPLDKNILILKQLLSFRKRLVREKAGYENTIIDRKHMYLAKRTDTIVHIAQAKMNENKRYIRQIEQEIMDIIRSNEELMQTYRIITSIKGIGNVNAWMTIAYTENFTCFTDARKYAVYVGVVPYEHTSGTSIKGRKRVSHLAHKEIKQELNQAAKTAIVHDPELRAYAERKLKNKAYPLVLNNVKFKLILRVFALVKRGEKFVENYQRAA

SEQ ID NO: 306676 - protein, 399 aa, unidentified
MMIIGIDPHKTSHTATALDPVLNMGVASVRVDAALDGYRRLLRWGRQFDERRWAVENAKGLGSHLAQWLVDQGEEVEDVATTATARVRGLSRGGSRHNDVIDAAAAASVAALVGDSAVVTVEDQTTVFALLEERRANLAAQRVRAVNQLHALLRGLVAGGAPTSLKAATAAEALKRIRPKTLAQRTRKSLSWDLVGDIRVLDAQLAAIAKQMAAALEDYDSSLCDVDGVGPVLAARLIGRTGHRRGSVARMRSPATPGSPPIEVSSGNRVTHRLSRSGDRELKSTLHLSPSPESACPTAPDADTSTARSTKPRHATRRCVASNAGSPATSGVECSPTTNHDTPSRPNSKQPHDKHKGTAGFIEAPRNPGRFTIVKQKAGHMLGCSAAKQLDSKNAHKER

SEQ ID NO: 306677 - protein, 318 aa, unidentified
MSKSTLMSAGIDTGKYKLDAAIDGRPDRLQLNNEQPGHASLAAWLQKHGVERVGIEASGGYERPVVAYLRAQGFNVILFQPKQVRAYAMFRLQRAKNDTIDAALIAACTAAVKTLHAPPDPRFAALAERLTFIEQIEEDIARSKTRREGFQTAELKAEVEAEISRLKKRRTLELKLLAKSLRASADLAKRLDLLVSVPGIGERTALALLIRMPELGTLSREQAAALAGLAPFDDDSGNRKGSRHIEGGRPRLRKSLYAAALPAAFKWNKALVDLYGRLKAAGKPHKLALVACARKLLIFANTVLARGSKWTDNLPARN

SEQ ID NO: 306678 - protein, 339 aa, unidentified
MKVSTLGIDLAKNVFQLHGVGCNGQTVLKKKLTRDKFLPFLMQLEPCLIGMEACASSHHFARVLRQYGHEVKLIPPQYVKPYVKTNKTDAADAEAICEAVARPNMRFVQIKTAEQHAILVLHTERNILIRERTACANSMRAILAEFGIIMPRTLSQLYKKIPEILEEYDNELSPFVRCSVARQLEHLQGVEDQITLIEQELSRWAKTQPACQRVMKVPGVGLMTATYLVASVGNGQQFHSAKQFAAWLGLVPREFSSGGKQRLGRISKRGDRYFRYLLVHGARAVAAVIERHKDNMPWLYRLLNKKAYNVAVVAQANKTARILWSMLVHHTEYRTLSVV

SEQ ID NO: 306679 - protein, 414 aa, unidentified
MPIATCGIDWAQDHHDIAIVDTDGQLLAKRRIPESIAGFTELTAMLAEAGDNPNDPIPVAIETPRGLLVAVLRASGRPVYPINPMSVARYRERTSMSGKKSDHGDAVTLANILRTDADQHRRLPADTELAQSITVLARAHQDATWRRTRASNELRSLLREYFPGFLHTFAERPGAISSPEARAVLAIAPTPAKAARLTKPQIVAALRRAGRHRGLTSLADTIQQHLRTPQLRHPTLVEDAFGVQALAVLATLDAEYDSVDRLGEATAAAFNEHPDHQIITSFVGLADLTGARLLAEIGDDRTRFADARALKAFAGSAPVTKASGRSIRITHRHVKNNRLAAVGFVWAFIAAGCQGPTRAHYLARRDHGDRHPAALRHLYNRMLGQLYHCLQTSQTYDPIKAYGPPPTPPKQAAA

SEQ ID NO: 306680 - protein, 362 aa, unidentified
MRMKTHPQYFISKPRRSSKVGVTIGIDLGDIWSYYCTLSEDGEVVDRGRFRTNPSGVGKRFRDLGPARVAMEAGTHSIWVSEQIRELGHEVIVANVRELRAISHSDRKSDKVDAEKIARYARLDPEILRPIAHRSVAQQETLTLIRARDALVRLRTGAVNSVRGLAKPCGYRLPASSTLTLAKRCVAVLPPGLAQALGPLLQQIVEMTVKIKEYDRAVKQLTETEYPETQALIKVYGVGHLTALTFVLTLGNKERCQRSRDVGCYLGLRPRRSQSGDSDRQLGITKAGNGYLRQLLVECANHVIGPHGKDSALRRWGLSLGVRGGSHARRRAVVAVARKLAVLLHRIWITQEVYVPFYQVAA

SEQ ID NO: 306681 - protein, 344 aa, unidentified
MSKVTIGLDIAKSVFHLVFMNQSGRVLRKKKLRRHQMLSYFSQLEPCIVVMEACGSCHYWCRELTKAGHEVKAIAPQYVVAYRKGNKHDYNDAEAIAEASQREGMRFVPFKSQDQQDIQLMHRIRERMIAQQTALSNQIRGLLSEYGIVYVRGVATLVKELPFTLEEADNGLSMLARRQFQGLLNDLRELREHIKEMDKELKAFSQSQPVCERLMSMTGIGPLIATALYAGIGQGQAFNSGRHLAAWLGVVPKQHTTGDNPRLLGISKRGNTYLRTQIINGARAALRHIGDKTDKVSEWCRACLARMSFNKACVALANKMVRMAWAMLHYQQDYQPGLINKAAA

SEQ ID NO: 306682 - protein, 338 aa, unidentified
MKLYCGIDLHANNSVVSITDEKDDVHYEKRLPNELDVIVTALSPFQANLQGCVVESTYNWYWLVDGLIEAGFPVHLANTAAIPQYSGVKYANDDTDARHLAHLLRLGILPEGYIYPKQERGLRDQLRRRLLLVRQRTMQNLSLQGQIIRYTGRRLSSNQVKQLTDEKLIELLPDRSAALSARVSLALIQTLDQAVDLLERDVQKNAGNRSDYRILNSTPGIGPVLGLTVMLETGDVERFPDAGHYASYARCVKSEKLSNGKHKGQGNRKNGNRYLAWAFMEAAHFATIWDPRIKRYYQRKLAKSHLMVAKKAVANKLARACYHMLKEHTKFDVMRAFG

SEQ ID NO: 306683 - protein, 342 aa, unidentified
MKITTVGLDLAKNVFQVHGIDDHGKVLLKKQLRRHQVSGFFVNLPPCLIGMEACGSAHHWARKLQGLGHTVRLISPQFVKPYVKTNKNDAADAEAICEAVGRPNMRFVPIKSVEQQGALALHRVRQGFVKVRTAQANQIRGLLAEFGVIIPQGIAQLFRKLSEVLEDATNELPDSVRALIQRLLEHLKELDRQAKEIEAQIAAWHGQNELSRKLAEIPGIGLLGASALAATVGNAKSFSSGRQLAAWLGLVPRQSSSGGKNVLLGMSKRGDAYLRTLLIHGARAVIYRARQNPQGSGWLHKLIGRRNANVAAVALANKNARIAWALLARDRQYRADYAAASV

SEQ ID NO: 306684 - protein, 413 aa, unidentified
MPVPEALFYVGIDWATETHAICVLTAAGRIKAQFMIDHTASGFADLLRRLGRLTGNPGDVPIGIERPDGRLVDALLEAGFPVVPVSPNAIKTWRDGEVLSGAKSDAGDATVIAEYLRLRAHHLRPATPYSGQTKALRTVVRTRDDVVEMRVAATNQLSALLDAHWPGAKAIFADVESAISLAFLTRYPTYPSAEHLGEKRLRAFCVKHGYSGRRSAAELLTRLRAAPAGSTDEALTDAVRDAVLAQVAVLTALTAAEKNLDRSVVAHLGEHPDAAIFTSLPRSGQINAAQVLAEWGDSRAAYDHPDAVAALAGVSPVTKASGKYRAVHFRWACNKRLRKAITCFADNSRHASPWAAKVYADAIARGHDHPHAVRVLARAWIRVIYRCWNDGVPYDPNNHGNASKLLEIAAAAA

SEQ ID NO: 306685 - protein, 316 aa, unidentified
MAETFVGIDVAKAKLDVFVNGEAWQVQNDPSGISDLIVRLKGYSPSLIVLESSGGYESLALGELYAAGLPVARVNPGRVREFAKSIGQLAKTDILDARTLARYAELVRPAVARLPDEAEQQLAALVNRRRQLVEMCVAEQNRLGTAPKKLRPGIRTHIDWLKAEIQRIESEMDDFIQQSPLWSEKDALLKSVPGVGDVTARTLLSELPELGELDRKEIAALVGVAPFNHDSGRMRGKRRIRGGRTSVRNVLYMATLTATRCNPIIRTFFNRLVQSGKEKKVALVACMRKLLTILNAILRTHQPWRTPLFSCQALDI

SEQ ID NO: 306686 - protein, 346 aa, unidentified
MKCYAGLDVSLKEISICVIDQNGGIVARGSSPCDPEGVQAWLRNRSLAPERIIHESGQLAIWLQRGLTRLGLPATCIDARMAHKSLSARPNKTDAADAEGLAQLARTGWFTSVHIRSEEADRLRSLVNARERLIRLRKELEGHVRGALKTFGIRMAAVGQGQLRQAFRDQLALAGERDPVVRVLADAFISSHETLCRATADLEAVLKTEARQHPVARRLVTIPGVGPVVALSFVALVDDPARFRRAADVGAFLGLTPSRHLSGEMDWSGRISRCGDSAMRRLLFEAASSLIHRVQRFSPLKSWAVRLAGRRGFRKAAVATGRKLAVLMLTLWKREDDYAWTEGATT

SEQ ID NO: 306687 - protein, 356 aa, unidentified
MTSNIKYVGMDVHKQSISLAVRNAAGKIVMECVIETKANTILQFFDGLRGDVQVTFEEGTWAAWLYDLLKPHVGKLVVCDPRRNALLQDGNQNDRVDARKLSDLLYMNKLTSVYHGDHGLRTLKELVRSYLTITRDQSRVMTRVKAIYRSWAIPCSGKQLYSPRHRAEWLGKINEPGVRLRAEFYYQQLDALRALRQTVRRELLAESKKHKAWKRLCEIPSMGPIRAAELLGFVQTPHRFRTKRQLWTYSGLGVEIHSSADHEVAQGQLRRKKRPVEIRGLNENCNHDLKNLFKGAAVVASIKRGPFAEFYAALVAKGMRPEMARLTLARKIATIVLLVWKKGVSFDASHLKPQTA

SEQ ID NO: 306688 - protein, 402 aa, unidentified
MNAVGIDVSKGKSMVAIMRPFGEIVSAPFEIKHTASDINSLVELINSVEGESRIVMEHTGRYYEVLAHQLSETNLFVSAINPKLIKDFDNDSLRKVKSDKADAVKIARYALDKWQNLKQYSVMDELRNQLKTMNRQFGFYMKHKTAMKNNLIGILDQTYPGVNTYFDSPARSDGSQKWVDFASTYWHVDCVRKMSLNAFIDHYQNWCKRKKYNFSQSKAEEIYGKAKELVPVLPKDDITKLIIKQAVNQLNSASTTIESLRTLMNETASQLPEYPVVMAMKGVGTSLGPQLMAEIGDVSRFTHKGAITAFAGVDPGVNESGSYEQKSVPTSKRGSSDLRKTLFQVMDVLIKTHPQDDPVYQFIDKKRAQGKPYYVYMTAGANKFLRIYYGRVKEYLSSLPES

SEQ ID NO: 306689 - protein, 359 aa, unidentified
MTTMKSPTILAIDLAKAKSLFCWHDVVKGTHQSRQIPSTPKAFHDALLQQPVERVIIEVCDMAGWIKDLCEGLAIPLQIANGNTEGWRWRNVKKKTDKEDALKLISLSLTNQLPTVVLPDRPTRQWKSLILYRQKLIERRTRVKNKIHAILVSEGRAMRGGRQAWSEPSLAAVSKLARPLADCAIDELWRGQLHMELAALDDLDHAVGQLDQRLDALGQADARVIRLETIPGVGPRLSELVVAVIDDPKRFKNVRQVSAYVGLVPRRYQSGAMDRSGRISKAGCAKLRKLLMEIAWGMLVHNAHGRSVFQRISKGQKTRRKQAAVALARRVLGWCWAMLRDGTDWRDPAGGAAPSPVAT

SEQ ID NO: 306690 - protein, 464 aa, unidentified
MKVAKVNQQTRRVKKTRAPSFPIINPNAAGIDIGSAEHWVAVPEDRDEQPVRKFACFTQDLHAMAAWLKQCEVKTVVMESTGVYWIPVFQILETHGFEVKLVNAKQAKNVPGRKTDVLDCQWLQRLHTYGLLSGSFRPDNAICVLRSYWRHRVTLVSYVSSHVQHMQKALTQMNVQLHKVISDITGVTGMSIMRAILNGERNPLKLAQMKNNRIRSTTETIAKALGGDYRQEHLFSLKQAVELYDFYQQQIQACDREVQAYLSQLDGIDIASNPIPPSRRRIQKHKGNQPDFDLRTHLYRISGVDFTQIDGLDVLNVQTILSEVGLNPDVFPTVKNFTSWLAICPNNRITGGRIKSRSTRKAANRATEAFRMAAYALTHSSSALGAFCRRMRARHDSPKAITATAHKIARIFYQMWKYRTPYKDLGADYYEQRYKERVLSGMKKKAKQIGYFITLTPMPQPAVS

SEQ ID NO: 306691 - protein, 326 aa, unidentified
MQGKEASEQETRQKCTAGIDVSKARLDAHVVPQNQTLQVPNTLEGIGRLKRWLMQFKPELIAVEATSKWHRQLCRSLHASGLAIAITDPFRVRHFALAHGILDKTDKLDARVLALFAQVMAPSARPPAPEKLEELKEMVTARDSAVAEQTSLQNQFAAAQSAFLKRQLKRRIAFLAANIKAIERECLNRIHKDEAMAARFAILTSVPGIGTITAITLIAQLSELGTLTHKQIAKLAGLAPLADDSGDREGTRHIRGGRPIVRRMLYFAAITAVRHNFAMKAFYERLTTKNKSAKLVLVAVARKLLLLANTLLAENRSWQPAAPNHA

SEQ ID NO: 306692 - protein, 344 aa, unidentified
MDHFAGLDVSVKETSICIVDDAGKIVREVKVASEPEDLLQILSNPGYHFKRIGLEAGPLSQWLFSALAEAGLPVICVETRHMRAVLKAQINKTDRNDARGMAQMMRAGLYRPVHVKTLRSQKLRMLLTHRKLLQSKAIAIDNDLRGTLRNFGLKVGVVRTVKFEVRIRELVENLPDLAAMVEPLLIVRRTLREQFCVLHRRLLAIVRDDEVCRRLMTTPGVGPVVSLTYRATVDVPARFHKSKSVGAVFGLTCAKYQSGEVEWSGRISRCGDEMMRVMLYEAAQAMMRSKKWSWLKAWAMQIARRRGMKKAIVALARRLAVIMHRIWVDGTEFRWTREQAAAAA

SEQ ID NO: 306693 - protein, 365 aa, unidentified
MTTRLRSTFSSTDPPVRREVVLGVDTHGEVHVAAVISPLGKILGTESFPATAAGYRQLLVWARKRGTVHRAGVEGTGTFGAGLSRYLLAQHVQVFEVNRPDRTARRLLGKSDPLDAQAAARAVLSGRARARAKSGDGPVHSARIYKLAKDSAVKARTQAINQLKAVLVIADPALRERLSSLGNAELFRTCAALGATAGGGDEDAVAQATHMTLRMLAERIEQLTEQINELNQRLTRLVERHAPQLLVPVGIGPDSAATLLITMGNNPERLNTEASFAALCGVSPIEYSSGRRRTRRLNYGGDRQANAALHRIVFTRLRHDPRTQAYYERRTQEGKTRREIIRCLKRYTAREVFNLVRPVSHTPAL

SEQ ID NO: 306694 - protein, 391 aa, unidentified
MIYIGIDVAKDKHDCFITNSDSEVLFKAFTIFNNLDGFNDLYQKIESVMDDVTKVKVGLEATGHYSYNLLGYLIDKGLPTYVINPLHTNLYRKSLSLRQTKTDKVDARTIASMLMSDMNLKSYSDTSYHNEELKSLTRYRFDKVKERAKLKTSVSRLVCILFPELEKLVPTLHMASVYALLSEFPSAKHVATAHLTRLTNLLSESSKGRYGKDTAITFRDSARASIGSNMPAKSLELKHPIKLIQELDSEINEIENEIKIIMDEINSPILSIPGINYRMGAMIIAEIGDFNRFDSPDKILAYAGFSPSTYQSGQLDGAYAHMEKRGSRYLRYALYNATKYVCHWNPTFAAYLAKKRAEGKHYNVAISHAVKKLVRVIYHLEKTKQQYIKAA

SEQ ID NO: 306695 - protein, 406 aa, unidentified
MDILCKRCCGLDVHKRTITGCIITPEGKAIATFGTMTKDLQALVAWIKEKGCTHVAMESTGVYWIPVYNLLETENLEVIIANANHIKNVPGRKTDVSDAEWIADLLRHGLLKGSFIPPREQRELRELTRYRRSLIGEHTREVNRIQKVLEGCNLKLSSVVSRITGTTASLILKALIHGEIDPEVLASFAKGRLVRKKRQLMEALNGFIGPHQQKLLAIQIDHLEYLEKQITALDEEIAERLRPFEDDLTRLDTIPGVGRRNAEDILAEIGPDMDLFPSTQHLSSWAGMAPGNHQSAGKWKSGRTTKGNRYLRATLCESAQAIGRMKPNFLSQQFHRIAARRGRKRAAIAVGHSILVICYHLLKRKTSYVELGASFHDQRKEESIVRQVLKRLESLGYAVSLEKVGA

SEQ ID NO: 306696 - protein, 370 aa, unidentified
MKKLIMYVGLDVHKNSIEVAFADAGRDGEVRSYGKIDGNLTALDKVIRKLEAKGSELHFAYEAGPCGYEIYRHLSSNGYDCIVVAPSMIPRQSGNRIKTDRRDAQMLARLHRAGELTSIYVPALEDEAMRDLTRAREDAKSVEKKAKQRILAFLLRHGYRYSGKTPWSKAHFRWIAILKMPHPAQQIVLQESLDALSECTERVNRLTEQIQRLLPQWRMFPVAQALQTLRGVSLIVASTTIAELGDLTRFASPVELMSYLGLVPSEHSSGEQTKRGSITKTGNGHVRRVLVEAAWAYRLPARVSRALLLRQEGMSQNVCAISWKAQLRLCNRYKRLLERGKAKQLIITAIARELCGFMWAIANEVETPSS

SEQ ID NO: 306697 - protein, 336 aa, unidentified
MSQQYVGIDLHRRRSVIVRTDAAGEVLGEARIENDPLALAAEIAKAGPAPEVAVEATYGWYWVADLLAECGARVHLAHPLAIKAFENRRVKNDRIDATLLAELLRMGRLPEAWIAPVPVRELRELVRYRHKLVDLRSGLKCQVHAVLAKEGVRVPMSDLFGVAGTQLLDRLELGDAYLVRVESLRDLIIALDGEVKMLDRRIHERLGHDPSYRALQQIPGVGPVIAAVFVAELGDVTRFRHAAQVASWAGLTPRHRESDTKIRRGRITKQGSRLVRWAAIEAARAPRSHSWLKRDYHRLAERRGKNIAAVAVARKIVTLAFYALRDGEVRCLTRAA

SEQ ID NO: 306698 - protein, 413 aa, unidentified
MSVTQQGVPARVCAGVDWAKDDHAIAIIDPSGEVLDRFAVTHNAAGLKSLVRRLLKAGVDEVGIERGDGPVVEALIQAEFTVLVIPPGQLKNLRSRYGSAGNKDDRYDAYILADVVRTDRRRLRPLVRDSAATTALRTTVRARRDLVEHRVAAANQLRAHLQIVFPGATSIFAAIDSAISLTFLERFTTQAKADWLSPKRLGAWLSSVSYSGRTDPEILHTRLFAAPQGTTGAEAEIHTVTTLAFVAILRSLNTQIEALAASIGEQLAIHPDAHIVTSLPRSGTVRAARLLAEIGDARGRFPTAESLACLAGVAPSTRQSGKVKAVTFRWGANKELRDAVCDFAGDSRHANPWAADLYAKARARGHDHPHAVRILARAWIHIIWRAWQDNVAYDPTKHGALQALLNNTTEKAA

SEQ ID NO: 306699 - protein, 338 aa, unidentified
MKITTIGLDIAKSIFHLCCVNKMGRLLKKKQLKRKQVLPYLARLEPCLVVMEACGGANYWAREIKALGHEVKLIAPQYVKPYVKGNKNDYNDAEGIAEAAQRANMRFVPIKTVAQQDIQNFHRQRERLKKERTALVNQVRGLLAEYGIVINKGVIAVREGLPDILEDAENDLTTLSRELFAELLEELQRLDQRFGGCEKRMHVINQEHAVCRRLDDILGIGPITASATYAAAGDGKDFVNGRHFSAWIGLVPGQHSTGGKTTLLGISKRGNAYLRTLFIHGARAVLQHSAKKTDRFSLWAQALLERRGYNKACVAVANKMARMAWVIMAKGETYRSAT

SEQ ID NO: 306700 - protein, 351 aa, unidentified
MIARSDAACYVGIDLHKDTLVACTIAAKAREVAYRKIACVTREQVREFLADLPRPSVVAIETFGFYRWLWTEAEPLVDQVVLADARGCRALAGRRIKTDREDAFNVAELLMTGRLPTAWAPPNHIQRLRDLTRHRNGLSRDHAKTLHRVNSIMNRLNRPGPARMDAAGLQRYLIASVERIEADDLMMLWQHQRRLVEVEQDRSAIERRIIDVMRADEFRRLREILESIPGVGLITAATAIAEIGDFSRFPDAKAIGRYAGLTPTGYSSADKHRLGRICKTGSPDLRWALQQAATTAIRCEPALKKVATKISKGSKTRKKAAAVAIARKILALMWTLVRKDEPYKAREPIAA

SEQ ID NO: 306701 - protein, 345 aa, unidentified
MDIGKRDCKACIMSSDGSIAEETKYNNTLHEAEIFAYSIVKKYGKCVAVCESTANLWLKTYQAFEKYNIGVKLANPLKTKAIAEAKIKTDKLDARTLAHLLRSDLVAECHIAPREIREDRSLLRLRINLVQDRTRVMNRVRSLLDKYDVICDYDKIFGVKGIRWLKSLKLSHNDQVLLHEYVMQIEFLNTQIKNIESKIACEASKNESVKILMSMTGIDYFSAMLIASEIGDITRFSAPEKIVSWSGLCPSIHQSGNSLYMGRMKDGNKKVRWILIQAANTAARKDDRLRKFYLRIAKRHGHHVAITHVANKMITIIWHMLVNKKLYNERKQTLYETKLKRIQRT

SEQ ID NO: 306702 - protein, 360 aa, unidentified
MLILAIDLGKAKSLACWYQTDDASHEFRTVPTRPGDFHTLLTDRPVDRVVIEICDAAGWVVDLCRTLAIPIQVADTNREAWRWKNVKNKCDREDALKLARLSAMGEVSPVHVPEKPVREWRSLILYRHKLIDRRTSIRNAIHSILVAQGMAMPGRRSVWSDDSMSKLRVLARPLGDCATIDELWRGHLQMELEQLDELCGRVVELDQKLDALGQADARVRRLRTIPGVGPRLSELVVAMIDDPHRFKSVRQVGAYAGLVPRRYQSGEMDRSGRISKAGCGKLRKLLIEIAWGMLRHNRHGAAVFSRISKGQKTRRKQAAVALGRKVLCWCWAMLRDGTEWHVPMPRSKQLHRREALSPCG

SEQ ID NO: 306703 - protein, 412 aa, unidentified
MKIVYPRCAGIDIHKESMTVCLIVDREDGSAPEYHKRKLATHQEGVRELKNWLEKYQVTDVGMESTGVYWKPVWNALEGKWGLHLCNPQHVRVIPASKTDIRDGTRTAELLAYGKLPESFIPPVWQRELRDLTRLRARFTQEATRTGNRIRKVLEDAQIKLDCVASDTLGMSGRLILNALVEGESDANKLAELVVGKLKKKKKELRQALQGKFQDHHRFQIRLLMEDLKQCEDKIFQLDRRIEKYLEPYEETVRRLDAIPGVDRIGAAVILAEIGPDMSPWEDSGKLASWSCLCPGNNESGGKRLSGRTRKGNRWLRRAFCQMAWASTHKKGSYMKTQYRRLSGRRGKKRGLLAVAHTLLIVVYHLLKDPTLEYRELGEDYFDRRDAEQTKKQLIKRLGKLGYEVTLTPKTE

SEQ ID NO: 306704 - protein, 386 aa, unidentified
MSRPSNILLPAINYDHTLVLSVELSNKSWVLAAQVPGLPRTKAQRTIEPNKNALLAAIDGYRARAAAVGYTVDRVITTYEAGWSGFWLARWLVAQGVEVHVVQPSSVPVDRRLRRAKSDGIDAELLLRTLLAWLRGEPRVCSMVPIPDEADEDARRCVRERTELLSDRVGLTNRIGAVLATLGVNDYNPLLQSRRRRLAELRTGLDEPIPPNALAKIERLLARLELVLAQIAELERERDEVAAADAPDRPGKMIQQLASLRGIGVQSATVLVREAFVRHFPNGKALGSYAGLTSTPYSSGGIDREQGIGKAGNRRLRTVMVELAWLWQRYQPGAVQVVWFRDRVGSTGRRIRKVMVVALARKLLIALWRFVIDGVMPEGAVMKPSI

SEQ ID NO: 306705 - protein, 356 aa, unidentified
MSSIALERNEVIIGVDTHKDEHVGVALDGLGGRIGELKIPATGAGYARLLAWARGLGRVHALGVEGTGSYGAGLTRFLRRQGELVVEVGRPPRKGERRADGKSDPIDAEHAARQVLSGQATAEPKLANGGVEAIRLLKIARDTAVKAHSQALIALKATLVTADDELRSRLEPLSAFQLVKKCSGFQPDALPPSDPRTAMLYVLGSLARRWLQLHEEIKVHTRALEQLTARAAPRLVEAFGIGFDSAAEMLVTAGDNPGRIKSEAALAKLCGVCPIPASSGKTHGRHRLNRGGNRQANAALYRVVIVRMRWHEPTRAYVARRTAEGRSKREIIRCLKRYVAREVYRLLPHPMPETAG

SEQ ID NO: 306706 - protein, 371 aa, unidentified
MDESSKTLYVGLDVHKDSIAVAYAPEDRGAEVVSLGSIGTRQCDVDKLIRKLQSKGATLVFVYEAGPCGYWLYRYLTRKGLSCHVVAPSLIPRKAGDRVKTDRRDAVMLARLMRSGDLTSIYVPGIEDEAIRDLSRGREDAMRDLKATKYRMKAFLLRQDIRYEGRATWNAAHLRWLSEVVCPTRAQQIVFQEYVRAVTEQHERLQRLENELHEEVKGWRLYPVVTAIQALRGVELTGAIILMAELGDLTRFDTPRQLMSYLGLTPSEYSSGERRRQGGITKAGNTHARRALVEGAWAYRYPAKVSRHLQLRLEKLPAEVQAIGWKAQVRLCKRYRQLIARGKHANQVVVAIAREMAAFAWAIARTVPLAP

SEQ ID NO: 306707 - protein, 356 aa, unidentified
MSRETKYIGMDVHKEATVIAVVNGSGKLVMESIVETKASSILQFIHGLRGELHVTWEEGTWAAWLYDLLQPQVAQVLVCDPRRNALLKEGNKSDKVDARKLADLLRTGMLRPVYHGEHGLRTLRELGRTYQTLSQDLNRVMNRIKALYRGWSIPCAGTQVYAPRYREQWLQKIEHAGVRRRAELLYQQLDGLQGLRRTLRPELLAESRKHKAAKLLRQIPCIGPIRAARLIALMQTPHRFRSKRQLWTYSGLGIETRDSAQYRYVDGQLQRAKKPQQIRGLNRNHNHEMKAIFKGAATRASCGVGPLRDFYVALLAKGMKPEMARLTLARKIAAIALTLWKKEEGFDAEQLKPQAA

SEQ ID NO: 306708 - protein, 349 aa, unidentified
MRILAIDLGKFKSVACLFDTETNQSQYETIPTVVFAIEQLLQAMQPNKVVIETCTISGWVHDLCKGHGFEVIVANPSSEAWQWRNVKRKTDKDDALKLAKLEALGQIVPVYMPTPMMRQYRRLVKYRKVLVGRINQVKNSIRSLLDAQGKHLGSRAKAWTIEGMQVLEEWRKPFGECELEELWRGELDVELTLLDKLWQQQDRVEKHLETIAKQEKRVQLLMTIPGVGRRTAEVIVTIIDDPHRFDNGRQVSAYVGLIPEQRQSGQTNRLGAITKRGSRLLRGALVEIAWMLLRFNPWALEVYNRIYAGQKTRKKTAIVAVARKLLVCCWAMLKHNQPWNPPDIQPTNA

SEQ ID NO: 306709 - protein, 338 aa, unidentified
MTLYGGIDLHSNNSYIGIINENKQVLFKQRCANDLTAILSAFEPFKEDLEAVAVESTFNWYWLVDGLMEKGYPVHLANPAAMKEYKGLKHKDDKKSALWIADLLRLKILPEGYIYPKEERPLRDLLRKRLHLVRHRTSHILSIKNIMSRNLGTTMKSDDIKKLGLQEAETFFPDVHLNLAVTASLSTIRHLTGEIRRIEKTILQQARLRDEFKALLTMPGIGTTLALTIMLEGGHISRFPGVGNYASYCRCVESVRRSNDKKTGEGNRKNGNKYLSWAYVEAANIAKRSYPIISRYFTKKAAQTNTTVAIKAISHKLARASYYVMRDHVVFDEKKLFG

SEQ ID NO: 306710 - protein, 415 aa, unidentified
MALKIVYKICCGIDVHKNFVVACIAKTDKQGVTTYERHHFSTYTKGLKQLLKWLLDRNCKDVCMESTGKYWIPVYNVLEHDCSIVLAHPKYVKAIRGKKTDKKDAKWIADLFKHDLVAGSFMPPADIRQLRDLMRYRFKLTCFMSSEKNRLQNCLTVSNIQLASVVSDTFGKSSQRILDKILENPDDTSFDIEPLIHGSMKKKLPELELAIDGFITPEQAGKLKVIKKHFEDLESRKAELEKLILALASPYQQELDLILTAPSFKNKFTAIGIISEIGVNMEAFPSAKHLCSWAGLTPTNNESAGKKKSVRVSKAGCYIKPLLVQCANSVVKSEKHPEIRNRYLRLRKRRGHKKAIIAIARMLLTALYNMLKNKEPYNAELYRKSDVLPVNREITIEQAILMAQFQGYKIKSAAE

SEQ ID NO: 306711 - protein, 388 aa, unidentified
MAQTPVSLPHPVAPDHNNTLVLAIELSNKSWVLAAQVPGLTRVKAKQTIEPTAEALLAALQGYRERAKVAGRHVERVIAIYEAGWSGFWLARLLATHGIETHVVQPSSVLVDRRARRAKSDGIDAELLLRTLLAWLRGEPRVCSMVPIPAEGDEDARRSVRERTELVAERVALVNRIGAVLATMGCGDYDPLLRNRRQRLGELRTALGTSLPVHAHAKINRMLDRLDLVRTQIAELEQDRDAVLEEEVPDKAGEMIQQLAKLRGIGVQSATVLVREAFVRDFANGKALGSYAGLCPTPYSSGGTDREQGISKAGNRRLRTVMIELAWLWQRYQPGSAEVNWFRARVSGTGARMRKVMVVALARKLLIALWRFATQGVIPEGAVMKPAS

SEQ ID NO: 306712 - protein, 329 aa, unidentified
MQKELLYCAIDVSKDRLDVDGAALALPEQLGNDQAAYRQLIKAAKKYSGPVQFVFESTGPYPLGLALALWEAQMALSILNPARVRYFAKAQGKAKTDPLDKQVIGAFAQAFRPAPTPAPDELSRQLTELLQRRDELISSRAAEQNRLGQSRHRLIKEQMGRLMAQLTEQIKQIDRLMHKLVGSSAELQSKVEQLCQIKGVGQLTALTLLITVPELGTLGRNRISRLVGLAPLNDDSGEQKHKRYIQGGRKRPRAALYMAALTASQHNAVLGPFYQRLLKAGKPKKVALTAVMRKLLICLNALLCKWAKQKGSLAAFCSAKASVTQPLNA

SEQ ID NO: 306713 - protein, 450 aa, unidentified
MMEPQEIEDGEYEQILERVAAVDVAKASGMVCTRVPREDQPGKRRTRVWQVDAATSAILELADHLVGEGIEKVTLESTSDYWRIWFYLLESAGLSVQLVRAQDVKQAPGRPKSDKLDAVWLAKLTERGMLRPSFVPPVEIRQLRDYTRLRTDLTRERTRHYCRLEKLLEDALIKVSAVASKLDTLSVRDMLEALIGGERDPQVLAGLARGRMRAKHDRLVQALTGKFDDHHAELAQMLLDQVDALSAQIGKLTTRIEELIAAIPAAQGVDADGTTGPTAGLGARAPVLPAVDRLDEVTGIGREAAQAIVAEVGLHMSVFPTPAHLVSWAKISPRTVQSGARSRAGRTGKGNPYLKGILGEAAAAAGKTDTFLGERYRRLARRRGKLKALVAVARSILVIVWHLLADRTTRYHDLGAGYYTSRIDKNRKTRNHIRQLEALGYTVTLAQAAA

SEQ ID NO: 306714 - protein, 373 aa, unidentified
MNYNTVYVGMDVHKESFTLCAYTIDAEKGSHFQRTEADYKNVLKYLEFLRTVYGNDANFICGYEAGCLGYTLYHQLTEHDVNCVILAPTTMLEQRSKRRIKTDRRDAEIIGKCSRYSIITVLFNIPTATDEETKEFLRMRDDHKLALKKVKQQILAFCLRHNYRYDGNSHWTAAHIKWLKSLNPEALYKEILDEYLLTYTTLSDKVERLDKRIEELASKDEYRESVKKLCCFIGIKTHTALSVLVEVGDFQRFASAQNFASYLGLVPGEDSSGDGQTRLGITKAGNRHVRMLLTEASQCYARGQIGFKSKELKSRQAGNSPQVIAYADKANERLRRRYYKMVLGKSKKHNVAKTAIARELACFMWGMMTEHIA

SEQ ID NO: 306715 - protein, 347 aa, unidentified
MHYVGVDLHKEQSWFYVIDEYGTKFDSKSIPNSPESLKKYFETIPKPFILAVESTYNWYFFVDIAEIYAKKVYLANSYELKAFAKRHKKTDKIDALLIADVLRKGYLPVVTIPDKETRRTRETLNYRMNLVKDRSRNIFRLKNLLDKLGEDSTGNFTTYKQLHEIPQEHLMPDYQKIISGYAEKIENFTREIYLNKTLIKERALNDEDVINLVSIPGLDYFSATLIKTEIMDVSRFASFNRLCAYAGLAPRIHQSANKTIHGPLNINRRKNLRWILLEVVFHFIRTIPKNTEKYSAIKRKKGANTAKVVLARDMLKIIYHILKEKRPFYINKTFTVRPEAASVLLRA

SEQ ID NO: 306716 - protein, 343 aa, unidentified
MDHFAGLDVSVKETSVCIVDGTGKIVREVKVASEPDALLAVLINPSYRFKRIGLEAGPLAQWLYSALAEAGLPVICVETRHMRAVLKAQINKTDRNDARGIAQMMRAGLYRPVHVKTLRSQKLRMLLTHRKLLQSKAIAIENDLRGTLRNFGLKVGMVGMARFETRIKELVENLPDLAVLVEPLLVVRRVLREQLAILHRRLLAIVREDDVCRRLMTIPGVGPVVALTYRVTVDVPARFRNSKAVGAVFGLTCSKYQSGEINRTGAISKCGDEMMRMMLYEAAQVMLTRTNKWSWLKAWAMKIARHRGMKKAIVALARRLAVIMHRIWVDGTEFQWTREVAAA

SEQ ID NO: 306717 - protein, 341 aa, unidentified
MQTTTIGLDIAKNVFQVHGIDAAEKVVVRKQLRRSKVIAFFEAVSPCLVGMEACASAHYWARELRKLGHEVRLMPAKDVKAYIKRNKNDAIDAEASCEAVRRPTMRFVTVKSAEQQGQLMQHRTRDLLMRQRTQVINALRAHLAELGIVAAQGREGLKDLLAIIADEKDERLPVDARASLIVLAAQLQAVHPLIGSIEKRIIAQHRATEASKRLQSIPGIGIIGASAIVSTVTDPTAFRSGRDLAAWIGLVPRQDSTGGKQKLGPISKQGDRYLRRILVVGAHSVLRRAKHNPEKYPWLTQLLARRPFKVVAIALANKMARIAWALLARGGTYRVPALAAA

SEQ ID NO: 306718 - protein, 429 aa, unidentified
MEQIPQPIVKAEPEPEFAALVAIDWADQKHYWSLQVVGQKGLQRGTLDHTPEAVEVWIMELHMRFGGRPLAVALEQRRGALAVMLSKYAHVHLYPVHPTTLAKFREAWYPSRSKSDPSDADLLLEILTTHRSRLRRLDPDTVEMRLLQHLVENRRKLVDERTALSNRLTDLLKLYFPQILGWFSDVASAVVGDLLEQWPSLQDLQQVKPAKLEKFLRDHHCAEIPERLIQIRQSIPATHDHALLDSAPYLVTAWVRQMAVLRESIRQLEKRIAERAAQQQDWHIFQSLPGAGAALAPRLMVALGTQRDRYSSASDLQSFSGIAPVKEASGNTQWVHFRWACPKFLRQTFHEWAACSITQCEWAKAYYEQQKARGKSHHVAVRALAFKWMRILYRCWKDRQPYREEIYLASLAKRRIALVTALARAVQMS

SEQ ID NO: 306719 - protein, 449 aa, unidentified
MQEPEEVPDGDHEQVLARVAAIDVAKASGMVCTRVPHPDVAGRRVTKVWSVSATTNAILELADHLIGLGVERVTVESTSDYWRPFLYLLEASGVPVWLVNATEVKNVPGRPKTDKLDAVWLAKLTERGMLRPSFVPPTEIRVLRDYTRLRADLTTERSRHAQRLEKLLEDSLIKLSTVATDLMGVSGRAMIEALIAGERDPQLLAGLARGRLRVKHAALVEALTGRFDAHHAELARMLLDAYDTADAQIRRLTERIEELIAALPAAQGVDPDGSTGPHAGSGPDAPVLPALARLDEIPGVGAKTAQVILAEIGLDMTRFPTAGHLVSWARLSPRTVQSGPRHRGGKTGKGNPYLKGVLGEATAAAAKTYTFLGARYRRLVKRRGKLKALVAVARSILTIVWHLLADPTARYHDLGADYHTRRIDTQRRTRSHIRQLEALGYKVTLAAAA

SEQ ID NO: 306720 - protein, 395 aa, unidentified
MLSKYGSVSETTRHTVAVGVAAERSEAATPTAVDDRSIALRSGQAETAGEPDRRRPFGSSPNSRLSRTTNSSSYLQGRDTSNMNFRYFIGIDVAKAKLDVAHAPDAVVEQFDNNADGHQELLHKLPKPESCLIVVEATGGYERGVVLKLIDAGHVVSVVNPRQVRDYAKALGILAKTDRIDARVIARFGEHVRPRAVAKTHEKQSELDQLVTRRRQLIASRTAEKNRQAMASSKVVFKSIQRSVDHLNKQIDGIDAEITRLVKSDDEWKGKADILKSAPGVGEVTSTTLIAELPELGSLNRKQISSLVGVVPFNRDSGTMRGRRTIFGGRRTVRSALYMAALTARRRNPIITAFADRLATQGKPPKVILVACMRKLLVILNAMIKTNTPWENKLA

SEQ ID NO: 306721 - protein, 342 aa, unidentified
MRQNKKVIRQSSGIDISMETFDVAIVRLLEDFDIETVSTKKFKNSQKGFESFYQWAEKFKAKDVEINFTMEATGVYYESLAYFLNEKDETVHVVLPNKSKKFAESLGLRTKTDKIDAKMLGQMGVERKLRKWSPISPIFLKLRSYTRERESLIHDRTRAKNQLHALNHSRASEQNTINRLGAKIGFLDEQIEQAEHDIEKLIENDTLLYKKVKNVLTVPGVRLNTLAPIIAETNGFAAIVNIKQLTSYAGYDIRIRESGKWKGKNKISKKGNSHIRAVLFFPACTASIHNKHLKKCHTRIKEAKKIPMVANTAVQRKLLALIFTLWKNDTMYIENYESTKAA

SEQ ID NO: 306722 - protein, 352 aa, unidentified
MYYVGLDIHKKYCISAVMDKEGKMIDRAKIDSNPQALKNYFEKVNEPCHIAMEACYNWGYYMDILGEVADEISLAHPLKTKLIAEARIKTDHIDAKALADLLRTNFLPLSYIPGKETRQVKSYLRYRAALTALSTQIKNKIHALLDQHVFLEKETLAQLSDIFGKQGLELLTKVVLPGDDTEILKSWLGILEHLHKEILRANLWTRNHVKEDSICRILKSIPGIGDTFAILIRYEIDEIDRFASAKKLVGYAGLAPSTFSSGGKTRHGGITKQGNKWLRWAFVEAAQRAPATSPYFSQYYERIKEKAGWDRARIATARKIAEVVFGVMKNEKPYQEFLLRSLPSKGSSRLAA

SEQ ID NO: 306723 - protein, 428 aa, unidentified
MTQTSHDTFAAFVGIDWADAKHDICLQAAGTAKREYFQLDHTPEAIDAWVTTLRTRFNGQPVAICLELTKGPLVSALRKYDFLVLFPINPLMLARYREAFTPSRAKDDPTDAALQLALLLTHRDKLQPLQPQSPTMRALAQLVEHRRRVVGDKVRTTNRLTSTLKNYFPQVLQWFQDKDTRIFCDFLSRWPTLKAAQLARRSTLEAFFRDHHVRVEDVLAKRIHAIKTATPLTTDEGVIAPHPLLVQALTSQLRVTLDAIEAFDHAIAQRAQGHPDFPLFQALPGAGPVFASRLLVAFGEQRERYTSAAALQKYAGVAPVTERSGTKAWGHWRLQCPKFLRQTFVEWAAESIRHSFWAQVYYQQQRDKGNTHQAAVRALAFKWLRILYRCWQERTPYEESVYLQALTRRGSSLLQHLAKASCIAVQKP

SEQ ID NO: 306724 - protein, 428 aa, unidentified
MNPALNNDPKPNDYAAFLAIDWADQQHVWSLQVANQTKKEAGTLEQKPEIIGPWVAKLRERFAGQLIAVAVEQSRGALIHALLSYDFLVIYPLHPMTVARFREAFKASGAKSDPLDTDQILQILTKHLDLLRPLNPDTPETRLLGRLSQDRRKTVDLRTSHIEGLSACLKEYFPQALEAFSNPASRLAADFLEKWPTLEVFQQAKPATLKRFLYKHNVRSPKRIKEVLELAKMAQPLTSDPAIVESGRRLAQMHAQAIQTLNPVIADYDSRIEELFHSHSEFSLFNDLPGAGPAMAPRLLAFFGTDRSRYAKANNVQSFCGIAPVTRSSGATRGIYMRRACPKFARQTFHEFARLSLARSQWARNYVDYYKAKGKKFHAIIRALAFKWIRILFHCWKTRTPYNEEHYLATLKKRGSIFATFHLQKTSQ

SEQ ID NO: 306725 - protein, 438 aa, unidentified
MSNKVIFNLDELFISVGIDVGADFSWMSIALPNQQFVGKPYKILHNSIDSLTTAVSKIKEAEELYSLESRIFLESTGIYHYPLFCYLRDKGFNCSVINPIITKNSTNINIRKVHNDRFDSKKAALVGLKPDLKVSLMPSDLALNCRNLCREYYDLMDNRSAYVNKLQGELRMAFPQYLGIFSKVTINTSLTLLETYTSPSAFLKADKQEIIDIIKSTARFGLTYAQNKYNAIIQAATDANQFGYIIDSNIKRIRLYISFIRKYDEEINSILESLHELVDANEDSDFVKQIHLIETFKGAGFLSAVSIMGEIGDFSAFSKPKQLFAYFGLDPSVKQSGKFEGTKVQMSKRGSAIARRVIHTLTLQSISISRNREAKNPVLREYYLKKCDSKPKLVAMGAVSHKVCNMIFAILRDNKPFKIIAPQEHIQQYNAAKCDIAA

SEQ ID NO: 306726 - protein, 355 aa, unidentified
MNVKKYIGMDVHQETISIAVMTADGKLVMESIVETKASTILQFVQGLHGDLHVTLEEGTWAAWLYDLMKPHVTEVVVCDPRKNALLKEGNKSDKIDARKLADLLRGGYLRLVYHGENGLRTLKELARSYLTISQDLTRVMNRVKALYRGWGIACGGQQVYAPRHRSEWLNKIGEAGVRRRAEFFYQQLDAVRTLRQAVRRDLLAESRKHGATKLLRQIPYIGPIRAALLIALIQTPHRFRTKRQLWTYSGLAIETRDSAQYRYVAGQLQRSKKPQQLRGLNENHNHDMKAIFKSAAAMASRREGPFQDFYLELLTKGMRPAMARLTLARKIAAITLILWKKGAHFDAEQLKPQAA

SEQ ID NO: 306727 - protein, 356 aa, unidentified
MAAGDTAIVVGGVDCHAEVHHAAALDGTGRRLGEQAFPATRPGYERLLAWLRGFGSVTAVGVESTGSYGAGLTRFLLQAGVRVVEINQPHTHLRHRRGKTDAIDAEAAARKVLSGEATAVPKETTGAVEAIRQLRLTRRSAVKARAVSLRQLGDLIVTAPADLRERLSCKTLQGQAAICARFRPDRQRLTDPAQAAKLALRTLARRIAALDAEIAQLDEHLERLVRVVAPRTIALLGIGPQHAGQLLVTAGQNITRLQGEAAFAHLCGVDPIPASSGKTTRHRLNPGGDRAANSALHMIAIVRLRYCARTQKYVTRRIAEGHSKREILRCLKRYIAREVYRTLCADLAHLDVAPAA

SEQ ID NO: 306728 - protein, 312 aa, unidentified
MYYIGIDVSKKDLSVFDGKKDLKFINKEGLKSFKKYLKKKYNLSEIAIIFEPTGIYSFYLKEFCAENSIKAYIINPKQSHNFARALGIRPKNDKIDARTLYKFRKLIGLNDIKVPVIDQQVKTLSGYLVSYQFALKQRISLSNHLESLQDKRLIALIKKDLKRAKKLEDNLFNDILEYVSKNQNLKEDYQRFLTISGVGDKMAIALLTLFKTYQGTNRAQITALAGLDPVRRESGTSVKYREKISKNGKGIYRKIFYLPTICATVHNQKIRVFYQRLLANHKTKKLAIIASMRKLLLIAHAMYRDKTEYIAV

SEQ ID NO: 306729 - protein, 421 aa, unidentified
MPYRMAGIDVHKKKLAVVVADVEDEYQFERRWYGSNPEQLRVLSEWLIEQQVEEVVMESTAQYWKPVWGALERFWKAMCQSREGAGRMSGTLHLAQALSNGGRRGRKTDFRDAERLVKRLVSQELVLSFVPDAEQRLWRTLTRTRYQRTRDKVRLQNQLEALLEEAHIKLSSLVSDLLGASARRMLKALADGETDPAALAALADQRLRATPAQLRDALDACTELNPVYRRLVKMTIEGLQFVEQQISQLDQEIASLLQRHQDAVERLAVVPGLGVDSAQQIIAEVGAKAATFPSAEKLSSWVGACPGKEESAGVNRSRHSPKGNRQMRRTLNQAANAAVKRKGSIFEIVYRRLVPRLGHNKTIGVIAHRLCHLIWIILHNGVRYEERGPAVSKQSQQRHTATMIRKLRMLGYRVEPTGGPA

SEQ ID NO: 306730 - protein, 343 aa, unidentified
MEHSAGLDVSVKETSVCIVDEAGKIVREVKVASEPEALLAVLTNPAYRFKRIGLEAGPLSQWLFSALAEAGLPVICVETRHMRAALKAQINKTDRNDARGIAQMMRAGLYRPVHVKTLRSQKLRMLLTHRKLLQSKAIAIENDLRATLRNFGLKVGVVGTIKFEARIKELVEGLPDLLVLVEPILIVRRTLREQIGVLHRRLLSVVRDDEVCRRLMTVPGVGPVVALTYRATVDVPARFRKSKSVGAVFGLTPARYQSGEVDRTSAISRCGDDMMRAMLYEAAHITLVRSTKWSWLKAWAMQIARRRGLKKAIVALARRLAVIMHRIWLDGTEFRWTRQTAAA

SEQ ID NO: 306731 - protein, 387 aa, unidentified
MNRSNHRVVGLDVHPDSFAGAILEGSDPWQARVKSTSTRVALRLLEKWALRHTRESDCLVLESSANAFAVAERLGRLKRKVLILDSHRAGKVGQSYCATDRVDAIKIARIYLSALSPIVWQPDQKTRERREVFSAYQVVVKEGTRLKQQIKSMLNEHCVRLEKGFRLSHPTAIERLLQRRKWTEAQKMLLEQLHAGLVGARSRRQQLRRYMAREILAEKELLRLTRLCGINLITLYGLIAAIGDINRFANSRKLVAYLGLNPSVCQSGEWEGATALKRHGRGAIRALLIQSAKKLLQVNNPLQKWGLAIALRRGRNKAAVAVARKLCVTVWHVMQGHVIGAIERLDTLHAKLHKLATDLGVPAIKALGYETKEAFVQKKLYLLQSYP

SEQ ID NO: 306732 - protein, 347 aa, unidentified
MKFYTQTHQHYCGIDLHARCLYVCILDQQGNILVHKNINANPQALMKLVTPYLDDLVIGVECMFSWYWVADLCRERQINFILGHALYMKAIHGGKAKNDKIDSHKIAVLMRGGMFPQAYVYPREMRGTRDLMRRRMRLIRQRAELFAHIHNTNSQYNLPPINKDLHHVCHRDGIAERFSDPSVQKSIELDLNLMGFYDQQLSKVEWYIQKHARNCDQHSLILLRTVPGIGKILSLVVLYEIHTIERFPTVQDFASYCRLIKCKKESAGKSYGTSGKKIGNAYLKWAFSEAAVLFLRANPEAQAWLEKTANKHNKARALTILAHKLGRAVYFMLQRKTVFDQERFLNS

SEQ ID NO: 306733 - protein, 351 aa, unidentified
MIAIGIDIHKETSTFYAIGDDGEPLEEFNKRFRRVRSNEKGYEEVTKFLEDKDCEFLMENSTKTHDSYWTLRKFGFERLYVAHSTDLSLITKSDKKNDDNDAAQLATYMRVKQQNIEQFRTCYICTPEDMMKRRLCRVAKQEMMEAAKYKRRVKAEFLMFGIHCPFNVVTKKAHEWMMEHRDPALAALGRAMEDNRLRLRDLETQIKKEFAGHPVYRKLIEIPEFGPVTAGYLASIIVDVGRFRSAKEIASYLGLVPRQRESGETVSHCRITKTGDPGARWLLIQAVFRLVSNEEFDSDLKRFFDQKNGGSIAERISRGLKPECSRKALVAASNKMCKIIFAILSHDGRRW

SEQ ID NO: 306734 - protein, 366 aa, unidentified
MKKTSTVRVNRNLIFKGHKLTIGLDLGDQWSCYCVLDEAGKIILEQKVATTPEAVKQAFAKIPQSLIAMETGTHSPWVSRLLTELGHKVIVAHAQKVQLITKSNRKDDRHDARTLARLARIDAELLGPVRHRSAQAQIHLTVIRARAELVRARTALVNAARGLVKSYGQRLPKCGTRQVSRELGAGLHAELREVLEPLLKEIESLNQRIQEYEVRVEKIAKESYPQVELLKQVKGVGTQIALTYVLTLDDPHRFPKSREVGGFLGLCPGRRDSGESQPQMRISKEGDRYLRTMLVQGAHYILGPFGADSDLRRWGLRLAARGGKNAKKRAVVAVARKLAVLLHRLWLSGEVYEPLRNSQKAMRVAA

SEQ ID NO: 306735 - protein, 403 aa, unidentified
MNNVAGIDVSKGKSMVSVLRPFGKVVEKPFTVHHTGSELRELADYLKSLDGETRVVMEHTGRYYEPVARFLHEEGIFVSAVNPKLIKDYGNNTLRKVKTDKADARKIARYGLDNWVELRQHTPMDTIRMQLKTLNRQQGLYSKTKTMMKNNLIALLDQTYPGVNNLFDSPVREDGSQKWVDFATAFWHVDCVRNMSLAVFAERYRKWCKRHGYNFSQSRVVEIHTEAQDLVAMLPKDALTKTMIRQAIDALNAVSRSLEHLKAEMRTLAAQLPEYPVVMAMHGVGDSLGPQLIAEIGDVTRFTHRNAITAFAGVDPGADQSGMHNAKSTRTSKSGPPALRKALFLVMDCLLKTMPEDDPVYRFMDKKRAEGKPYLVYMTAGANKFLRIYYGKVKEHLASLEEN

SEQ ID NO: 306736 - protein, 345 aa, unidentified
MKIVGCDLHTRYQQIAMLDDETGELMERRLEHASGDAKQFYTQLTGPVRVGIEATGHTRWFERLLAQLGYELWVGDAARIRAAEVRKQKTDTRDAALLLELLLSGRFPRLWRPSAEERDLRQLLWHRQKLVWMRNAVGNQLHALAMGEGLCRKQKLFTKKGRAELQALNLDPWASRRRQELLRMLDQADVSLKDFDEAVGEQAAQRAEAKLLMTHPGVGPVTSLAFVLMVGPVARFQRSKQLVSYLGLNPREHSSGGKQKLGSISKQGNPMLRGLLVEAGHTAARLDAELRQDYQRLRLRRGGSVAKVAIARKLAVRMYWMLRRQVNYTQLVRMQGSSRATLVQQ

SEQ ID NO: 306737 - protein, 322 aa, unidentified
MSGSSVTIGIDVGSAQVEVAALGGELPTALRQMGNDADGHSALADGLARLKPELVLMEATGGYEAALACALQAAGLRVAVVNPRMARDFARAMQRLAKTDRIDAMTLAELAAVLMRRADCERFIRPLSEPEQQDLAALVTRRRQLVAMQLAERQRLRLARGVTRPSIEALLEAIGRELDEIEASMAHHVEQYHAPMAKLLQSVSGIGRVVAATLIAELPELGRLNRRQICALVGVAPYAHDSATSHGRRHIAGGRFEVRRTLYMATLTATRYNAAIRAFYERLVAAGKLKKVALIACMRKLITHLNAMTRDHLNAQHHSTIA

SEQ ID NO: 306738 - protein, 387 aa, unidentified
MIYVGIDIAKQKHFAAAMTADGEVLIPPFGFTNDAEGFKLFLSKIKSFKKENTLIGLESTAHYAENLICHLFDLGYHISVINPIQTSTLRKTNIRKTKTDKVDCLLIIKSMIVNKPRLYSKSDIDSLRLKSLCRFREKIKKAKAKLKIQLVAYVDIIFPELQYFFKSGIHTNTCYQLLKKHSSPDDIAALHLTYLANLLQKASHGHFGKEEAIALKGLAKSSVGTGNTAVSIQITQSIAQIELLEQQLADLDRAIESIMLEMDSVILTIPGIGFLNGAMILGEIGNISRFSNPSKLLAYAGLDPTVNQSGKFNAKSTKMSKRGSKLLRYALINAAWNVSLNNKTFNDYFNLKRSQGNNHYAALGHVAHKLVRIIFKLLKDNVTFNLD

SEQ ID NO: 306739 - protein, 341 aa, unidentified
MKGYYYIGLDVHKKVIAYCVKKADGELVDEGTIKATKEALKEWVHSIKGRWIGAMEATLFTGWIYDFLKPHAFSLKVGHSYMLRAICASKKKNDRIDASKLADMIRCDWFPECHMAPKEIRDLRRVLRYRGLLVREAVRMKNKTSGLLMEVGAEYDKKKLRGRRYFDELLDELDYIPDSVIELLSLTRSNMEIFDANQKRLVDELRNNIVLKDRVERLMSIPGVGEITALTWALEIDDPHRFSTIKKAASYCGLSSAHDESAGKLVRHPLSKQRNKHLQTVLVEAAKLAPRWNPQLALLYEKERERGANKNQATLAVARKLVAYLLFVDKKEEEFELRTAA

SEQ ID NO: 306740 - protein, 310 aa, unidentified
MERIFVGLDVSKDRLDVHVRPTDDSFAVAYDEEGLAMLVSRLGLLQPTLIVLEATGGYEVKVAAVLANAGLPVAVVNPRQIRDFARATGQLAKTDALDARVTARFAETVQPAARPLATEQAQVLGELVARRRQLVEMVGAEMNRRRQVRDRGLQTRITAHVTWLTRAIEELEGDIQRLIRSSPVWRETEDLLTSAPGIGDITAHALIAELPELGQLNRRRIAARVGIAPFNRDSGLWRGRRMIRGGRPAVRRALYMATMVAIRHNPPITDVYRRLTRAGRPKKVAIIAAMRKLVTILNAMLRDQRRWRPA

SEQ ID NO: 306741 - protein, 339 aa, unidentified
MGILYVGIDLGKNVFAVHGVDEHGKAVLVRPSVARAKLHELIATLPACTIGMEACSGAHHWARLFLQHGHTVRLMAPKFVAPYRLSGKQGKNDAADAMAICEAVQRPNMRFVPVKSQDEQARLCVHRVRQGLVEQRTATINRIRGLLSEFGIVLPQRAATVRREATVHLEDLPGWANTAIGDSLSDVHRLDERIAQYDHHVLQMARDDQRSRALMQLSGIGNTTASALVSTIGNAHDFKNGRQLAAWLGLVPGQYSSGGKTRLGSITKAGDRYLRTLLVLGARAVLAAARTKVDRLSRWALALEERRGYWKAVVAIAAKNARMAWAVLAKGENFKLLEA

SEQ ID NO: 306742 - protein, 374 aa, unidentified
MIVIGIDPHKSTHTATALDPATNSDVGSLRIEASITEYQRLIVWAKAWPERTWAIENADGLGHHLALWLLALGEVVLDIPTTATARVRELSRGGRRKNDRIDAAAAASVAALQGDARQVYPETTTDSLALLDERRVNLSRSRTRAVNHLHALLRELMAGGAPTSLTPLSATRAVRGLRPRTGPDRIRVELAKELIADVRRFDEQLTANAAKMTALLDEHGTRLREIDGIGPILAARLLGRTGPANRFASAAAYANYTGTAPVQIASADSSRHRLSRYGDRQLNSAIYIIAMTQIRMPASAGRAFYDKKIAEGKTPRYATRALKRHLAGHLWRLMLADETRTARASSKVAANASLLPQVKMRAKPDSLTHLRVRA

SEQ ID NO: 306743 - protein, 378 aa, unidentified
MSFKILKNNCCGLDVHKTWIFACIGITDSNKRTVYKQARFSSFTKGLQELCHWLAKYDCTDVCMESTGKYWIPVFNILEKNNIWVTLSHPKYTKPQKGNKTDRKDAKWICDLYMCGMVKPSFIPPADIRELRDLVRYRFKLTCMITGEKNRAHNCLTVSNLKLDDVFSDIFGRSSRSITEQILQHPGETFDVAPFVHGRCKTPIEEIQAAVDGAVSKEQAVKLRQCLNHIDELEMHKSEIEREIFRLSDKYEDILTLIRTVPGFDKNPMTAIQVLSEIGGDMSVFPTAKNLVSWAGCCPHNDQSNHKIKSTRISRAGSYFKPVLVQVANALIKSKKHPEFSTRYRRIKARRGHKKAIIAICRMTVSYTHLTLPTTSRV

SEQ ID NO: 306744 - protein, 408 aa, unidentified
MTYTTVGIDVSKATGAVAFSRQNEIIEQFKIDLNRQGFDYLKQRMSPYKQVQVIFEATGVYSKRVEAYMRDNDIRYAVLSPVVGHKRISNYGDDEIFIKTDESDARALAASARESDFENFYHESETQRELRDMNRFYEQLEDESVKARTRTHRITEKVFSTFLDEFTVKGDSKFPWLILSAFPHPDLVLDADVNEVMQTINGLTNKNIGQKQLLNYAKKLYKAASLAYSEVSKESDTVMQVSYWAKRTAEIQDLQNAQINKMHSIVRDYPEYKHFLSLPDVGQNTAVRLIAELGDLRRFSSVRKLNAYVGIGHGKRSSGMITNPEKITHTGNAHARRLIFNVVANMRKAWRSGLGKPNHLMEYDKKRRSENSKLASKINTVATMDRVLRTLFNLVKLNQDYIYEFTQK

SEQ ID NO: 306745 - protein, 341 aa, unidentified
MYYIGLDVHKKTISYCVKDASGQVHREGTIGATRNELDCWVRTLPQPRIMAMEATIFTGWIYDHLLPHAEQLKVAHPLMLRAIAAAKKKNDRIDAGKIADCLRCDFLPECHMASTEIRDRRRTLRYRHLLVRQMVQMKNRISGLLMETGVSHNKQRLHKVGYFGELLSSNEEVHENIRPLLRLSRETIVRCQRTEYALVSSLQRDPLLAERLKRLRTVPGVGPITALTWALEVGDVARFRSVKQAISYCGLCGEEKSSADKVLRTPLSKQRNKHIQRVLVEAAKLAPRQNHELALIHEREKQKGNRNRATLAVARKMVAYLLAVDRREREFVPAEGHGTAA

SEQ ID NO: 306746 - protein, 322 aa, unidentified
MRYIGIDVSKATFVVAYSSDKGGGIRTFNNTTAGIRQFIGTLPKDGSIHCVMEATGNYSALLLYMLNVAGITVSMENPLKVKNFAKAMLSTVKTDKSDARLITLYGEKMNPRPFKVQGEAILRLRQKRTVIRQLTKQITAMSNLRGSLACLPVPDKGATHTVDETIKFLEKKRDRLQAELTDLVEVEFSRQLALLTTIKGIGITLATALIITTGGFTYFQNAKQVSRYLGICPTYEQSGTSVNIKGHINRNGDAYTRGLLYIAAWPASRFNAQCKETYTRLRQNGKSGKLAMIAVANKLIRQAFAVVAHDKEYIDGFVSNRP

SEQ ID NO: 306747 - protein, 417 aa, unidentified
MKCFVGLDVSSTKLDVCIMLNDTSTPVTASLSNDLSGATEIKNHILDLNHTYHFERIVIGMEATSLYSFHPAMFFHEDSQLKELHVEIMVEQPNKIKKYRDAFEENKNDTIDAFYIADYFRIERFSPSFLKEEKYMALQHLTRTRLQIIEKLTRTKQHFIENIYYKCNTLAYQFKKEELSTNLWSSTMMTLITDEMTLDELANMPLQELADWLQQLGKGHFKDSEKLAQTIKAAIRGSYRLSKLQQDSVNVILGLLAREIRNLEKMIKEIDKAIEDMVETIPEYQCLTSIPGVGKVYAAGIIAEIGQIERFKDHPQVAKFAGLNWREKQSGNSNSQHTSLVNRGNRYLRYYLVEAANSVRRYDDEYKDFYKKKYHEVPKHQHKRAIVLTARKFVRLVVVLLRNHQLYTPPRRLMEDK

SEQ ID NO: 306748 - protein, 326 aa, unidentified
MGKTISKLETVTTVGLDLAKNVFQVHAVDAQGRLIVNMKVRRAKLVDFFASLPRCLVGLEACASAHHWAREIAELGHEVRLMPPAYVKAYVRRGKNDKVDAAACCEAVMRPNMRFVALRGVENQAELMRHRGRELLAGQRVSLLNALRGHLGEIGIVAPQGGQHAYRLKRLAESGHDESGEVVIPDCVRAALRPLLNQIDAIDAEIALIDAAIKESVKADETAKRLMTVPGVGPITASAVVATVRNVDAFADGREFAASLGLTPRQHSSGGKDRLGRISKMGDRYLRKLLVVGANAALVHADYADYADYGDTLLRITRITRITGLR

SEQ ID NO: 306749 - protein, 411 aa, unidentified
MNQQIAFEQIVRGGCGMDIHRDTVVATVMGEGVKKETRTYSTYTNALCELQQWLTSLSITHIAMESTGIYWKPVFNILEEHFQILLVNAWHIKNVPGHKTDKKDSVWLTKLLLSGLLKASFIPPREIRDLRDLSRYRKKLTQQATAERNRFEKILQDANFKISAVISDVFGMTGTKLIEALLSGNNNFDELLELCHGRIKNKKEQLKEALVGHLTPHHKFMLKTIRKSLDSVLQKIAFLDAQTLLLSKPYQRELELLQTIPGVNKISSVCLLSEIGADMSQFPTEHHLASWAGLCPSANESAGRIKSTRVTQGNQYLKPVLVECAWSASHVKGCYLRSKYESLIGRRGKKRALIAVGHKILTSAYHILKEKIAYKELGYDYLSKRRKKSQVQSYLDKLKNLGVEVQVTSIA

SEQ ID NO: 306750 - protein, 464 aa, unidentified
MTEKKPWRNRKERKEWGRRLQSEDPGLEVVHAHAAGIDVGNGMHYVAVRPDRDPQPVRRFECFTADLHCLAEWLQRCEVKTVAMQSTGVYWIPIYEILEERGMQVYLVNARHTKNLPGRKSDVQESQWLLKLHTYGLLNNSFQPPSEIRVLRTYWRQRAEHVHGAATCVQRMQKALTQMNVQLANVISDVSGLTGQAIIRSIIAGEHDPRKLAELSDPRIHASREEVAKSLEGHWRPELLFVLQQEVVMYDTYQQRIAECDQQLQKHLASFADTVPLRPTGGEPKRKNSKPAKNAPRFELRSELQRITGVDLTRIDGIDVMVAQTLISEVGLEMSRWKTEAHFSSWLGLCPDNRTSGDKVLARGTRRVVNRAATALRMAAVTLMRSRTYLGAQYRRLRTKLGAPKAITAMAHRLARLVYRMLKYGQHYVDKGAEYYEHRYRRQQIEFLTKKATKLGLQITLAQT

SEQ ID NO: 306751 - protein, 441 aa, unidentified
MAVRKRELAVLFPNAAGIDIGSAKHYVAVPPERCEHPVREFNSFTEDLASMAEWLASCGVDTVVMESTGVYWIPVYELLEARGFTVYLVNARHVKNVSGKKSDVLDCQWLQQLMSFGLLAGAFRPDGQVCALRAVVRQRETLIAGQAKQIQRMQKALTQMNVQLVHVLSDIAGKTGQDIVRAIVAGERDAHKLAQLRNYRVHASEEQIAKSLLGNWREEHLFCLAQALKLFDTHQQLIAEADAKIEAMLAQMQRHAPAGLKPDKNKGRAKHAPRFDVRSALVAWAGVDLTRIGGIDVSTALKVLAELGVDLSKFKTAKHFASWLGLCPGTRITGGKRLSGVTKRIANRVAQALKLAAQGLHRSQCALGAYYRRMAARLGAGKAITATAHKLARLVYAILTKGEEFIQRTQDHYEDQVRTRTIRYLQKKAASLGFNLQPSAV

SEQ ID NO: 306752 - protein, 339 aa, unidentified
MELYAAFDLHGNNNFLAVIDSNGKRIFGKRLLNDRERILEVLRPYQKDLIGIVVESTYNWYWMVDALMEKGYPVHLANPSAIQQYGGLKHTDDEYDSFWLAELLRLGILPEGYIYPQEERPIRDLLRKRGHLVKLRTSLIISLQNIISRNCGIKLNVNEVKALKEDRVHPLLQDNEDLALAGGVSKEAIDFLTRQIRKIERVVEGRIELKGSYGYLLTLPGVGKILALTIMLETGPVSRFAKVGNYVSYCRKVSSRWSSNGKAKGSGNKKNGNRYLAWAFSEAAELARRFYPEPRAYYQRKMQKTNFMVAHSALAHKLARAAYYIMRDQVPFRPEKLFS

SEQ ID NO: 306753 - protein, 349 aa, unidentified
MKNNTAIGIDLAKRVFQVCLVDIQHRRVRTNKELKRSELLDFMRRQPACQVFMEACGGAHYWARQLGAMGHQVQMISPQFVKPFRKGHKTDANDALAIVEAGLRPDMRFVPLKGLDQQDIQSLHRIRDLYVKQRTQLINQTHGLLQEYGIVSGRGQKALRSTLWRALEDGDNELSALMRELLVEQVKELDRLNDAIDTLDKRVQQLSRSLAPCRELMAIEGIGPVVATQLYSALGNGNAFSKGRQVSAWLGLTPRQNSSGGTVTLTGIGRTGQIPLKAALIRGAHAVLQTLGDKQDAKSRWLRALINRSGKNKAAVALANKTVRTAWAVLHRGQPYCRDFNGDLALPQG

SEQ ID NO: 306754 - protein, 337 aa, unidentified
MEQQPRYVGIDFHRRRSVIVHKNAAGEILETVHLDNDPAAFAAELAKAGEHPEVVLEACYGWYWLADLLDELGANLHLAHPLGNAWGNRRVKNDERDAEDLVDLLRLGRLAEAYIAPPPLRELRELVRYRAKLVALRSGLKSQVHSVLAKEGVAVPMTDLFGRAGQDLLDTTELGRCYGIRVSSLRELIMAYSTEIEMLDGEIADFLCGDKGYLAILAIPGVGPVLGAVFVAEIGDVSRFSSPEKLCCWAGLTPRHRESDLHVSRGPITKQGSRILRWAAIEAASRHHGPQAARFEQIAQRRDSRKIARVALARHIVTLAYYGLRDGEIRCLAEKAG

SEQ ID NO: 306755 - protein, 358 aa, unidentified
MPFAGVDAHKRYSRVVVKDEAGSVLCRASLQNDVGSFQSFFGAIGGPTRAVLEAGRDWGVIYDLLEGIGVEPVLANPLKTRAIAEARIKTDTVDATILADLLRADLIPVVHVPSKEVRAQKNLLRQRLWLVQLRTRIKNRVHNILDRNHVGPPPVADLFGKAGRRFMDQLCLPAPDDRLLKAHLELLDLLRSQIAKSEEWIDEALGERPEVATMRTLPGFGKVLAAVVALEIDDVHRFSHPGKLCAYAGLVPTTYASGGKVRHGRLLPGCNRWLRWAFVEAAWVAQRHSAYCHAYFERIKRRKGANCAISALARRLCEIAWHCLTGSRPYEERKMTATTELARSPSKVPGRLGTAQKD

SEQ ID NO: 306756 - protein, 321 aa, unidentified
MPQSNDLSRSLAAFDQDRTLIAVIEMSQSNWLVAGLVPGLERRPLKKLSPDQDALLKLVQRWRNEAAQAGREITRIVIAYEAGRDGFWLARWLRRRGIEAYVIHPSSVAVSREHRRAKTDRLDTELLMRAVLGWLRGEKRHCSMAAIPTIEDEDAKRPSREHEKLVGDRTRLVNRMKAMLARFGIRTFKPTLRKAADRLDDLRTAEGTPLPENTRAELRRDMMRLRMVREQIKEIEQERLRKLTAAPAEKGPPTMVRFIARIIGIGIETADMLVSEILSRGLRDSKAVARYAGLTGAPDESGRRRRGRVSPRRATRACGAA

SEQ ID NO: 306757 - protein, 347 aa, unidentified
MRFYTQSHRYYCGIDLHARWMYLCILDPQGEVLLHRNLRACPEVFLKAVEPYRQDLVVAVECIFSWYWLADLCAQEGIEFILGHALYMKAIHGGKAKNDKIDSQKIAVLLRGGMIPVAYVYPPQMRSTRDLLRRRTYLMRKRAELLVHVQNTNSQYNLPEIGKKIAYRANRSGVAERFSDPAVQTSIAADLSLIDFYDTLLNRLELFITSQAKPQDQHSFYLLRSVPGIGKILALTILYEIHDIARFPRVQEFVSYCRLVKCSRQSAGKNYGFSGKKIGNVHLKWAFSEAAVLFLRHNPEGQKLLARLERKHGKAKALTILAHKLARAVYFILRREKAFDLTQFLAA

SEQ ID NO: 306758 - protein, 376 aa, unidentified
MTDGNRRVVAGVDAHTDEHHAAVLDESGRLLGTAAFATTREGYEQLIAWVAGHGVIDRIGVESTGSFAAGLVRALEERAIVTVEVNQPHAHTRHRRGKSDPIDAELAARAVLSAVASAVPKHTAGIVEAIRQLSVTRDSAVKARSAALNQLENLIITAPDELRAALTQRKTLPGKATLCLKLRPDLTRLREPAQADKLALRSLARRIRDLDLEINELERQLDRLTRSAAPRTTRLLGVGAVHTSRLLITAGQNIDRLRSEAAFARICAAAPIPASSGRTTRHRLDRGGDRQANKTLHMIAVCRLRHCPRTQAYAARRTAEGLSKRDIIRCLKRYIARELYHSLRADLTSVAPPTPPARELTITCGIGPTGISRRRP

SEQ ID NO: 306759 - protein, 354 aa, unidentified
MMIIGCDYHPVFQQIAFVDTDTGELQERRLQHREEAEKFYRDLAVQGVKGRVGMEASGHARWFERLLAELNFELWIGDAAEIGTKRVRKQKTDRQDAQLILRLMVEDRFPRIWVPSWENRDLRQLLWHRHRMVQARTRIMNQLQAVALNEGLRSKKKLWREAGREQLEAFPLAPWASRRRRDLLELLDRLSPTIAELSQVIEQEAEKCPAAQRLRTHPGVGSLTALAFVLIIGSAERFQCGKQIASYLGLVPLEESSVNRRRLGHITKQGNALLRFLLVEAAQVTVRSIPEWRNKYFHLAMRRGRKIAKVAMARRLAVQMFWMLRKGWDYEQAKKFGSHAGQPGNRDGVQQNTE

SEQ ID NO: 306760 - protein, 429 aa, unidentified
MKFKQINGQNQRIERISPTQLVVGIDMAKEIHVAQATNFRGIVLAKRHLTFKNAIEGYEKLQRWMDELQQKHRLKTVIIGMEPTGHYWWSLANWLANKGLNVVLVNPATTKRNKENRDNSPSKSDPKDALVIADVVCRGYYYDYTRQANVFQRLRTIMSDREFWVTHSVRLQNRIIRWLDIRFPEYTSVFKDWTCPRSLATLKHFPSPLELESLSVSEVITGWREQHMQRAGGTTGMEKAAQLIAQAKKSVGDTTAMREAKQDLERLLEEYERIVETLEKIEQEVRALLGEIPMAQQLRSVKGLGPIFIGAILSGAGDLKQYAHGRQLLRKAGLNLAESMSGKRKGQIVLSKRGDAKLRKYMYLATITLVGTNPVFRQLHENNVQVKKMKKQQSIFKLLGKLARILIGIVQGGETFSPEKASPFFTEAA

SEQ ID NO: 306761 - protein, 338 aa, unidentified
MKLYGAIDLHSNNAVCGLIDTQDQVKMRRKTRCELDVVLSAFGPFKEDIVGIAVESTFNWYWLVDGLMDAGYRVHLVNTCAVKQYKGLKHTDDDTDTFWLAHLLRLGILPTGHIYAKETRSLRDLLRKRSQLVHLRTTNILSIHNLYSRNTGARLATNAVKHLTRERLEQRFGDENLVLAIDSNRRIVQALDEQIGVLEQAVLAQAKLDPRYRYLLSVEGVGKILALTIMLETGDIARFEKVGNFTSYCRCVDSTRWSNGKKKGKGNSKNGNKYLSWAFVEATNFAVRYHERAKRYYQRKLAATQRVVAIKALAHKLARASYYVMRDQVPFDPNKIYG

SEQ ID NO: 306762 - protein, 349 aa, unidentified
MIRNAPRDAAVYGVDLGKNVFHVVGLDDRGAVIQRVRFRRDTLLAFFERAARTLVGMEACPGSQWLARKLQAMGHQVRIVPAQFVKPFVKSQKNDTVDAEAIAEAVTRPTMRFTQVRTSEQIDLQALHRIRDQLVSSRTRLINQVRAFCLEYGVAIRQGAGVFRLDLPRVLADETNDISSAMRRMLTELFEDVVGLDRRIAGVTREIEGLAAQDDRARRLMTIPGIGPLGATALLAAVGDGHQFRRARDLAAWLGLVPREHSTGGKTTLLGISKRGNRYVRRLLIHGARSCVTHLDRSRDRLGGWLDALQSRMHVNKVTVALAAKIARTAWVIITKPGALYERRDPAVA

SEQ ID NO: 306763 - protein, 411 aa, unidentified
MDKEKTSVERVIGLDAHPDSFTAAAIRGATPASALVENTYNKLPMDRLVAWAQKHTTDKDLIVLEASGNSFHIVRKLQEVGRRTLVLESCQLGKLKEAHANNDKISAVRIAKAYLAGTAKEVWVPDPKTQERRDWFHAHRKAVKRLVQARNSLLSFLSDNGVRLKKGTCLSKPATGEQQLRNSRQWSARQWQVIEGLLMQLRHAEQQRAHWRSLIAQEVLADEQLLSIVRLCGVRDLIAFALGAFIGDIKRFANPKKLVKYIGLNPAFDDSGNEQWSGGIGGHGRKDLRCLLIQGAQAILRCSQSPLAQWGKKLLGRKGQINLVVAAVARRLTVAVWYLMMGRWTPLEEVDQRLQIKVNKVLTQVGPIQIKASGKSRKQWKEQAFERLKAAKVYILDPNKTFGAKPAVATS

SEQ ID NO: 306764 - protein, 324 aa, unidentified
MVMVLGIDIAKAKFDIVLLRQSGSTTHKIFANTPAGFAQLQAWLQQNKAQRVHACLEATGTLGEALALFLFEAGHIVSVVNPAIIANYAKSQLSRTKTDKTDAHLIARFCSKEQPPAWTPAPVEVRELQALVRRLEALGEMLQMEQNRLAAGVAAPVVKTAIQEHVAYLQEQIKQTKTLVREHIAGHPNLKNQRDLLVSIPGIAETTAAALLAELGDVVSQFSGARQVAAFAGVIPRLRDSGTKKGHVCLSKLGTGRLRRALYFPAMTAVRYNPPIRALSERLSAKGKCKLLIIGAAMRKLLHVVYGVLKSGKPFDPALAAARI

SEQ ID NO: 306765 - protein, 401 aa, unidentified
MDPHLCVGIDVGCRTHRVGIAHPDGSILEEFDISHCDTGFRELFRRIENRRQKLSLPVAVAMEGYNGYARPLDRLVQEKGYRLFNVNNLKLARFKEVFPGAAKTDSIDARKILELFRLKDQLPLAKDAIQEVVGVPAVNEKLKRLSRRRRHLVIEKMRVLNRMQADLQAVCPELLAATNDADNLWFLRLLTFRDDLQQLARLHHSTILQISGVGQKYAKRVREWQAKAKFSGEVEYVGPMIIQDAQRILELRTQIHTLDEVMADLAEQSEIACRLSTIPGFGKTSIAELAGEIGTLERFASEASLALYLGMCPLTRQSGQMCTARAPRQVNTRCKAAMMTTVARHIGCVPQSRAYYDRKRAEGKTHNQAIRSLGRHLVRVIWAMLRDQRDYETRHDIHPAT

SEQ ID NO: 306766 - protein, 420 aa, unidentified
MKAYNVDDFAALIGIDWADKKHDICEHPKNTKQYHYTVIKHKPEALHKWAMELKLRYPDQKIAIVCELKKGPLIYALAKYDHFVLFTVNPSAVANYRKAFTPSGAKNDPTDAFIQVEMIKLHIDKLSVIVPESTSMRALAQLVEYRRSLVQDSVDLSNKITATLKNYYPQALEWFKEKDTFIFCDFISKWPSLSAVKKARKQTLLDFFNRHNSHYETVNNARLLSIKEAVPLTEDEGVIAPNQLLMEVLIAQFKVLLMGIEQLDKAIKQLYKKQQDKAIFDSLPGAGPQLAPRLLVAFGHNRERYTDASQMQKYAGIAPVIESSGKKTWTHWRYSCPTFLRQTFVEWAGFSIRYSFWAKAYYEQQKSKGKPHNSIIRSLAFKWIRIIFSCWKTSTPYDESKYLEALKRRGSPLLKFAITS

SEQ ID NO: 306767 - protein, 340 aa, unidentified
MDTIGLDLHKSETQVCTLTEDGELIEQRIRTSRERFTAIFGGRSPARMLVEASTESEWVARHLEALGHTVIVADPGFAPMYATRSSRVKTDKRDARTLCDALRLGAYRAIHRASDAQRQIRADLAVREALVRTRTRYVALIKAAVRREGLRLPSGAVEGTVEKLERTALPAHVVRELAPLVALVPALNAEIAAADRRLAALAGRSAIVTRLTTVPGIGPITALAFVAALDDVGRFRSAHQVQAYLGLVPSEYSSGDRRVRGRITKRGDVRTRWLLVEAAWRILRSPNPDVAELKAWGEAVGRRRGKGIAVVALARRLAGILYAMWRDETAYRPTTRREAA

SEQ ID NO: 306768 - protein, 392 aa, unidentified
MIFVGIDVAKDKHDCFIISSEGDILADVFTISNSKEGFEYLLQTINTCTGIGGSKIKVGLEATGHYSYNILGFLLDNGLPTYVINPLHTNLYRKSQSLRKTKTDRVDARTIASMLMSDVSLKPYTNIAYHNSELKSLTRYRFDKVKERAALKSSVARLVNILFPELEKLLPTLHTASSYALLSELPSAKHIAETHLTHLTNLLYTASKGRYNRDKAIQIREAARNSIGTYMPAKALELKHTIKLIKEFNNEISEIEVAIQSIMNKINSPITTIPGISLRMGAMIIAEIGDFNNFDSPDKILAFAGLSPSTYQSGQLNNCYAHMEKRGSRYLRYALFNATKFVCNWNPVFADYLAKKRAEGKHYNVAISHAAKKLVRLIFALQKSGQPYISKS

SEQ ID NO: 306769 - protein, 434 aa, unidentified
MEEVTDEPLYRDRVCGIDIGKAGMVATIRVPSDKDPSRRAAETRSFGTTKREVLALADWLRCWQVPAVVMEATGDYWKGPFYRLEAEGLECVLADAKQAKNLPGRPKRDPSDSRWLAACFERGAVTACFVATPEFRIIRLHTRYRRDLTEERTREKQRAEKLLESAALKISAVLTDLHGVTGRDIMDHLIAGDRDPKALAQLARARARRKISQLEEALEGAEFITAEHAALLTVMLERIDRVTEEIARLTEVTGQLLAPYEEQLAQAESMPGWGRRAAQDAVAETGAGMTRFHTGGHLSSWAGKTPLDNQSGKRRGQSKSKKGNRYLAAITGETAAAVSKTQTREGARYRRLARRRGKAKALVATGNTQLKASQLLADPGMRYQDLGADYYERQRDIRRQISHHVGKLGALGFEVTLCRRPEPDPDETGTTQAA

SEQ ID NO: 306770 - protein, 341 aa, unidentified
MRRAVGVDLHKNSFTVCFYESEARHTFKTYRVSRVGLAAFRKQLQVDDELAVESTGNTAFFVRAIASCVQRVRIVNPVQFKVIANSVKKTDSIDALTIARFLSRDMIPEVRMRSTEEAQRSSLIGTRDKFVKLRTALKNKLHNILNANGIVSKPEMFTGEKGLAQVLEVPLDPSYRFEIELLVTEIRHLNEAIKKLEEELKRQGQALPGHQNLTSIKGISDTGATIFLTAIGNIADFKDEKALASYFGIVPRVYQSNQTCHYGRITKRGNKIARTALVQSTLVAIRYSPYLRAFYDQVKARRGSGKAIIATSRKLLGIIYNTLKHNWVFEDFPTFKLATSS

SEQ ID NO: 306771 - protein, 411 aa, unidentified
MDKIYDKCCGIDVHKKLIVACFRYGRKQEVREFGATTRELLELADWLKEGGCEMVAMESTASYWKPLYNILESSDLSAMVVNARHMKAVPGRKTDVKDAEWIADLLQHGLLQPSFIPDKDQRELRELVRYRKSLVGERTRELNRLQKMLEGANIKLSGTVSDINGKSARSILEYLLTGESIDGAKYDEMYEKKVIAHNLKATKEQIIDDLNGVMSPLQRRMMKELLAHLDELNIHIKNLDDEIDNFMKPEEKQASQAIQDVTGIGNTSAQAIISVIGTDMERFPTDKHISSWAGLCPGDNESAQKRKSGKTRKGNSLLRTTLITCAHVAVKNKKSYFHAQFMRISAHRGTKRAYVAVAHSMLIAIYHILKDGVVFKDLGVDYYNQFNKERKINAYLKKLKALGWEAPVVAA

SEQ ID NO: 306772 - protein, 345 aa, unidentified
MKNLFIGIDFSKEKIDVTIITAQGLEELSARMFETFPTTTSGYNKLVRWVEKNSLGMERDTWLFCGENTGDYSKPLCNYLYGKGLDMWLENAKCIKDASGLRRLKSDRADSAMIAEYAMRNHDRAEIYEPLSQSLTELRELFMYRQKLVKYKAGLQVRRGEKKLTMEKSSSKTTISQSGRHMINVLDKEIEKIEKKIQELIKSDEELKQTYELITTVPGIGMQNALCLLIFTNNFKRFSLNPRKIACYYGVAPFGKDSGTSVHSDPHVHYMANKMLKAMLTQAALASINYCPIIKDYYNRLLTRGKNKKLVRNNVKNKLIHIISAMVKNNLPFNPTYINIHKSAA

SEQ ID NO: 306773 - protein, 346 aa, unidentified
MWIIGCDFHPRFQQVAFLNTETGDCGNRRLEHSSGEAEQFYGALRGQVVRVGMEAGGHSRWFERLLAELGHELWTGDPAKICAKRVRKQRNDVMDADHILGLLVEKQGEGFPRVWRPTLAERDIRQLVLHRHRLVQIRTRVKNQLQALAMNQQMCQKQKLWSKAGRAQFEALALPEWAARRRQDNLELLDELNRRTEPLDQAVKLQATQRAEVARLMTHPGVGEVTALAYAMTIGDPRRFRCGKQVASYLGLIPSEDSSGGKQRLGHITKQGNALLRGLLVEAAHVAVRHEAELGRCYRRLAMKKNCSIAAVAVARKLAVRLWLMWIRGLDYGQMSFESGSHAGQA

SEQ ID NO: 306774 - protein, 367 aa, unidentified
MAVLFVGLDVHKATIAVGVAEEGRDGEVRSCGTIESSPVHVNKLMKRLAGNSRSLHFCYEAGPCGYGLYRQILEEGHACTVIAPSTIPSKPGERVKTDRLDAMKLARLLRAGDVTAVWVPDPAHEAMRDLVRSRADAMEHLKASKRQLLSFLLRQGRAYNGLKHWTRTYFTWLAEQKFDHPAHQIVFQDYVNAVLDGRQRHDQLVKMIESMIPQWSMKRLHEALCAMRGIDTISAATILCATGDLRRFPSPGKLSAYFGLVPSEHSSGTRTGRGGITKAGNNEARRILDQCAWCYRFPARVTTWQAQTYSDAEKLVRDVAWRAQVRLCARYRKLIARGKKAPVACMAVARELATFIWEMGQVVPLAS

SEQ ID NO: 306775 - protein, 387 aa, unidentified
MQKPHDNSKASPAAFMQDNTLIAVIELGLSNWLVAGLIPGVSREPLKKLEPNPEDLLKLLHGWRDEAIKAARPITRIAVAYETGRDSFWLARWLRERGIDAHVIHATSVAVSREHRRAKTDRLDTAMLKRGFLGWLRGERGHCTVAIVPTMEEEDAKRPYRERDGLVHEQTRVVNRMKSALIQFGVRNFNPKLRKARAKLETVRTPEGKSLPPNTIAALRRDMERLKIIKEQIKAIEQTRLQQFEQKPEALANRMVYLLVRIYGLGWETADLLVHELLSRTLRDRKAVARYAGLTGSPDESGSKRREKGLSRSGNARVRKIMIELAWRMVKFQPDSALVQWFKQRTENAKRSRKPMIVALARKLIIALWRYANDGVIPEGFRLHSAA

SEQ ID NO: 306776 - protein, 403 aa, unidentified
MSTCYAGLDWASRTHAVCVLDERGTALEHFEVTHDAAGLTELKRRLKHHGCPPVAIERPSGLVVDTLLEAGFTVVPIHPNAVKATRPRYRSHGAKSDASDAYLLADLLRTDGHRFKPLAAQSDEVRALRALVRGRDDLVATRVALANQLRSLLESFWPGAAEIFAEVDSPIALAFVERYPTPEAAARLGPKRIAAFCAQHAYSGRRSPAELLERLHHAPSAACAELEIEAKGELARSLARTLERLVEQIRLLTSRIEHHVASLEDGRLLMSFPRAGRLCAAQLLAELGSVRERFASDEHLAAEAGVAPVTYQSGKSKAVTFRWACNHRLRAALTCLADNSRHANAWAAHLYAQARARGCDHPHAVRILARAWLRVLWRAWIDRKPYDPTQHRAAQTLLNATKG

SEQ ID NO: 306777 - protein, 386 aa, unidentified
MQASTAATPTAKHCGTIFVAIELSQRSWLVALHSPDKDKVSHHKLEGGDHAGLLALIDRVRERAARTLGGVPAVASCYEAGYDGFWLHRLLLAAGITNYVFDPASIAVDQRARRVKTDRIDSERMLRTLMAYLRGEPRVVRIARAPSAEQEDARRASRERDRLVKEQTAHTTRIKALLRLLGMAVKNPRRRDWLSWLAAQRDWQGQAVPPRMLSEIRHEHARLMLVRDRLDALAQEAAAADPTPAEAEMTRRSELLRRLKCLGPAFATTLTSEVFYKDFRNRREVGSYFGLTPSPWQSGGIDRDQGISKAGNPRARCAAIELAWLWLRHQPDSKLTLEYRKRTLDAGKRIKRVAIVALARKLVVALWRYLTTGLVPEGAVLKTVKV

SEQ ID NO: 306778 - protein, 362 aa, unidentified
MRIIGCDLHARQQTLAILDTATGEAMEKTLTHSGSSVREFYAALPGTVRVGIEATGTMQWFLSLMEELGIDCQVGDPAKIRAAEPRKQKHDRRDADLILQLLVENRFPSIWQPSKELADLRALLLHRHQWVRMRTRVQNALQAIALANGLRRGPGLWSREGQSTIASLALAPHTAYRRTELQAMYAKFEADLGKLNQRVEQEAGQRPGATLLMTHPGVGPITALATDVFLGHPERFADSKALASYVGIIPSEYSSGGRQKLGGLSKQGNPLLRFLWCEAAAHAVRRDPELQRFYRRKLVQKGLGKARVAAARKLGIRLWIMLRDQIDYQEFCRRGQMQQRSGDACAGMPETPYGANSHRPVD

SEQ ID NO: 306779 - protein, 416 aa, unidentified
MNPSDPPSCVVDASSFQYVVGVDIGMESCSFCVCSPEKSLLIKPTTMTNAAQGFAQLHEQLQQLGVAPDRILIGLEATSRYGENLYHFLEGHGYELCLLHPRQTHEFAQRRGLRAKTDKLDAQTIACVLLSGEARRGYVPSELIASYRELVRLHTQLNDEVARYRNEIHAELSVLFPEFTQVFADPSRPTALALLQLYPSARAMAAAPVESLTTKLRELAPRKYGERTAKLLVALAQHSVSSGRATAARATSLKILCNQLQQTQKNLALLEAEIDRVLVGDSGATELGSVPEFGPKTVVVLRAELEYVSRFQRMDQAVAYAGLDIQVKESGKWKGQAKLSKRGSGRLRRILYLAALRCTRLEGSAFGAYYHRLIARGMRKREALMAVMRKMLIVAVHLLKTEEEYDPGKVAVAGAG

SEQ ID NO: 306780 - protein, 390 aa, unidentified
MQQLTTAVRSGSEEVVAGIDPSRYSFQLALRSRSQEYFNNKFEIFPQRIRELIGELKAYGLKRIVIEGAHLLGYTTLWEFRKAGFELFELPPYRAHKLNHLLCESHNDVDDAEAAATAGLHFERSVVPLFLDKKKQILYTLCRFRHQLVKEKTRHINRLHKLLSESYGWVYKKLKRSYPLESKYGRKFFQKYPSLNTAIEKKVELKEELGEEIYRLVVKSGKWQAGIYMQELEYLIKQEIEMITDGEKRVRQIEQKMKKAAESVEEANMLMKIPGVGVISASILLTSVKDIKKFEKESCFAGYCGVGPKMWQSGEAKAKSVKRRSYNRKLRAVFYNIAFSAMRVNSKARAYYKRKRKEGKTHRQALAHLARHYARIIYKVWKRGEYHELQ

SEQ ID NO: 306781 - protein, 316 aa, unidentified
MTNRKLTKSRVNVGVDVGKWSLDICIHEKELVWQVENTPEGIRSLMNRLSRYHVERIVMEATGRYEFALAEAAYDRGLPVCVAKPTSVRKYAGAIEQLAKTDRIDAQVIAEYAAVIKPRVTPEKSKNLIAIKDLLARRRQILSLRTQEINRRHIMDGGIKRSCRRLIKYFDVEIAWVEKRLEKLVEAESEWSEKREILESAPGVGKTLAFTLLADMPELGSLTNKQASALVGVAPINRDSGKMRGKRRIQGGRASVRTTLYMATLSATQCNPAIKAFYKNLVAQGKHKKVALTACMRKFITILNAMIREKQVWCAT

SEQ ID NO: 306782 - protein, 405 aa, unidentified
MLQQAWAGIDIGKGHHHAVVIDSEGTRLISRRVVNDEADLASLIAQVSGLADEVTWAVDMITGGAALLLALLATRAQHVLYISSTMVNRAADGYRGQGKTDARDAAVIADQARMRRGLTPLRVDDDLVAELRMLVARRGDLVADRTRAVNRLREQLLAICPALERALDVTNKGPLVLLTGFCTPDAIRRAGPVRLEQWLRKHGAARGAANLAARAAHAAASQTTTLPGEQVAALLVAQLAEGVMTLNEQITATDKLIEGRFHRHDLADVIISMPGIGVVLAAEFLAATSGDMTLFASADHLASYAGLAPAPRDSGRISGNLHRPHRYHRGLQRVFYTSALISIQRNPESRRFYDRKRREGKLHTRARPGPTPRQRPVGPDPRPTPLPTHTSPSPSLLTRSLDKRH

SEQ ID NO: 306783 - protein, 369 aa, unidentified
MVDRITYVGLDVHKEGIVVAVAAGGLRGEVREHGRIANTPTALDRLLRKLSGDGMRLRCCYEAGPCGYGIQRHVTAQGHDCDVVAPSLIPKRAGDRIKTDRRDAVSLAKLHRAGELTAVWVPDTRHEAMRDLVRARLDAVHSLRRVRQQLSGFLLRQGRHYSRPAWTKLHRRWLAGLKFEHAVHHIVLEDYIAAVEAAETRRDRLTAQIGAMLADWTLAPVVAAVQAMRGMALVNAATLIAELGDLSRFTNPRQLMAYLGLVPSEHSSGASIKRGGITKAGNRTARRLLIEASWSYRFPARLSREMLLRQENQPKPIRDIAWKGQVRLCARYRKLIRAGKPANIVTTAIARELAGFVWAIARQVTVTPG

SEQ ID NO: 306784 - protein, 366 aa, unidentified
MKKPSTMAILRKGKLQDQQLTIGIDLGDRSSFYCVLNGAGEVILEAKVPTSPEAMKEIFGKMPQSRVALETGTHSPWVSRLLSELGHEAIVAHARNVRLIGQSRRKDDRVDAQALARLARIDPRLLSPIQHRSAQAQADLSVIRARYGLIRARTGLICTARGLTKSFGERIRGRNPKAFKPAMGETLSPQLQAALAPLLSALEAITAQIREYDDQIEKLAEETYPEVALLKQVKGVGTLIALTYILTLEDPRRFRKSRDAGCYVGLQPGRRNSGQSEPQLHITREGDSYLRMVLVQGAQHILGPFGEDSDLRRWGLKLAERGGKNGKKRAIIAVARKLAVLLHHLWISCEAYEPLHNSRKRKPAAA

SEQ ID NO: 306785 - protein, 322 aa, unidentified
MSVSVLGIDIAKQKFDAALLVDGKTKHKTCKNSVEGFETLVIWLEKQGIKKVHACMEATGSYGEDLAIYLHEAGHIVSIVNPARIKGFAQSELLRTKTDKLDAALIARFCLAMKPGAWIPPSPEIRSLRALVRRVDGLIDMRSQEKNRISTAHESVISLIKGHIAYLDQEIEKIRRQIADLIEQNPQLKQRKELLDSIPGIGMVTIPHILAELDDLEKFTHVRQMVAFIGLAPRETLSGSSIKGKPRLCKMGHTRLRKTLYMPALVSIQCNPVMIAFYNRLKEKGKNGKVIVCAIMRKLVHVIFGVLKSGKKYDPNYKPASA

SEQ ID NO: 306786 - protein, 339 aa, unidentified
MQVTTIGLDLAKNVFQVHGIDDHGEVAFTRALRRSQVLAFFGRLEPCLVGIEACGTSHHWARELIKLGHNVKLIPPAYVKPYVKRGKSDAVDAAAICEAVTRPTMRFVEVKTPEQQAILSVHRTRDLIVRQRTQTINMLRAQLAEFGIILPQGVYHALQFAKVCVNGEPLNLPADAEEVVFDLCDQLLFLHAKILRHSRHMTQIAKREKRVALLRTIPGVGPITASAIVATVGSGKQFNNGREFAAWLGLTPLNRSSGGKERLGHISKMGDQYIRRLLVLGMTSRIRSIRLQPEKFDPWFADILSRKPSRVAAVAMANKTARMIWAVLTCNEPYKVRTV

SEQ ID NO: 306787 - protein, 374 aa, unidentified
MTNVEVFFAKGKPIYVGMDVHKKDWTVHVVCHGEAIYHATVSPDPKQLIARLKSFGAKEVHTVYEAGPTGYWLHEALVSAGIDSMVTPPSLVPRIGGRMKTDRRDSIKLATMLAGGFLKRVHVLSPQQRAHRQLLGTRNQIERHRKQTQAQMKSMLLFHGKRTPVGLLERWSEAHVQWLADLEWDFPALKVSMAALVDLFRHLDKQLKAMNEQIEALAQTDKYRERVALLTQIPGMGVYSAMTILIELQDVERFHRAEQLASYLGLTPSQHSSGERIHLGEITRCGNPRLRTRFVESSWTLIRYDMAVRATYDRIKHQSGSGKKAIVAIARRLALRVRRILLDHEPYHYGDGTRPQYAKDKRRAIRRFTITRTA

SEQ ID NO: 306788 - protein, 334 aa, unidentified
MEQITTVGIDLAKNVFSLHGMDAAGRTVLRRTVRRDRLVETVASLSPCLIGMEACSGAHEWGRRFEQHGHTVKLMAPKFVAPYRKSDKNDGNDAEAVCEAVTRPNMRFVPVKSTEQQALLAMHRVRQGFVVERTAVINRLRGLLSEFGVVLPLRSVTVRRQAAQAAEALPELARRAIGDLLEQLRLLDERIGAYDKEIEAQARLSEPARRLMKIRGIGATTALAIVATVGNAREFKNGRQFAAWIGLVPGQYSTGGKSRLGHISKRGDAYLRNLLVQGARSVLQTAGAHQDRMSRWALELQARRGYYRTLVAIANKNARIAWALLARNEALRTN

SEQ ID NO: 306789 - protein, 320 aa, unidentified
MEANLGIDVAKAKFVVALLTADGKVRHKSCANTPAGFADLAAWLQRQRVSPVHACLEATGTYGDALATWLHDQGHVVSVVNPAIIHAYARTQLARSKTDRIDAELIARFTATQHPPAWTPPAPEIRALQALVRRLDALHGMRTQELNRLAAGVTVAEVRASIDVVVTQLDAQIAHVQQLIRDHLDRHPGLRAQRELLTTIPGIGEATAAVLIAELFDKPYTSARQAAAFAGLVPRIVESGTLRGRSRLSKIGPGRLRKALYFPAVAALRWNPTIRAVRTRLHAAGKPPMVIIGAAMRKLIHLAYGVLKSGKAYEPTCAHP

SEQ ID NO: 306790 - protein, 310 aa, unidentified
MPDLHFIGIDDHLDVAVRPSGERMQFANQDDGIDQLIQRIRSFSSTLIVLEATGSYHRVLLSRLIAAALPAIAINPRQARDFARAIGRLAKTDAIDADVLAEFGEKIRPELRSVADEATQQLEAACTRRRQLVGMLAAEKNRLQSSPSSVRPQIKKHIQWLEKHIQQLEKDLDHQIRSTPAWREKDDLLRSCKGIGPTTSHTMLACLPELGRLTRHQIAALVGVAPFNQDTGRHRGRRHVQGGRTDVRSTLYMATLAAIRHNTVIRHFHQRLIAAGKLKKVAITACMRKLLTILNAMLRSHKPWNANFAS

SEQ ID NO: 306791 - protein, 367 aa, unidentified
MTSLAHRGYIHLGMDVSRDSIAVAILGPDSDVPITEKISSDSESVRRLIKRVGRPSGIWACYEAGPTGYELYRLLRSMKVRCDVIAPSLVPKGRGDRVKTDKRDARKLAGLHRAGQLTPVAVPSPAQEAVRDLCRTRGQMVGDLTRARNRLTMFLLRHGLVYRDGSKWTQRHETWLSAQHFDDAALSATYRHYRAAVALRDGALGDVEADLRGYFDTAPFADAAVRLGGYRGMTHMGGLCIGAEVFDWRRFPKARSFMAFTGLTCWEDSTGLSEHRGSITRAGNSRIRAQLVEAAWAYQHQPAVGETLRQRLALVGPQTSARSWSAQTRLCRRFHALAQRKNLKSKVATAVARELAGFLWAEMTAAE

SEQ ID NO: 306792 - protein, 320 aa, unidentified
MGQGQKAVPTVEQFVGIDVAKDWLDVAVHPRGTAWRAENSEAGLTTLVRKLARLKPAIVVCEATGGYQTDLLVALGTAAIPAAAVNPRQVRDFARALGTLAKTDRLDAATIAHFAQAAAIQPQALAPAAARELEALVTRRRQVVQMKVAEQQRRDRALPVVRRRIERVLATLQAELDDLDNELTTRLQASPLWREKEELLKSVPGVGPALTVTLLAELPELGQLSRKQIAALVGVAPLSRDSGTRHGRRTCWGGRATVRTALYMPTLVAVRHNPRLRLFYERLLAAGKAKKVALTACMRKLLTILNAMLKYQQPWSLHHA

SEQ ID NO: 306793 - protein, 423 aa, unidentified
MDVMHDRVAGLDVHKETIVACVRIMADRKATRECRTFETTTIGLETLLKWLTENACTHVAMESTGVYWKPVWNILSDGTFELLLANAAHIKNVPGRKTDMNDAMWIADLVSCGLIRASFVPEEHIQELRSLLRARKQLTREQASHVQRIQKTLEEANIKLDSVITHILGLSGRRMIEAMIKGVKNPGKLAELAHHRLKASPKQLYDALHGRLTDHHRFMLDLYLQQYDALARAIERIDQEVDAAIAKMDAEVAAAQATFRSLIALLSTIPGVSMMGATTILAEIGTDMSRFPTAAHLLAWAGLCPGQNESAGKRKSSRLRKGAPWLKTLMVQCAWAASRKKDSYYKAQFNRLRGRLGAKKAICAVAASMLTAVYHMLKDGTEHKDLGADHFDRRSVTVKANRLVAQIKKLGFEVEIHPSAEAA

SEQ ID NO: 306794 - protein, 388 aa, unidentified
MYMIYVGIDISKYKHNCFICKDTGEVIVENLSFTNNKKGFQQFLDLLKPYDNSNVRIGLEATGHYGLNLKLFLEKNNYSFMEFNPLLVKEFYKSLSLRKTKTDKVDAIVICQKLMSVPYKPNSQLFYHKYSIKSLTRLRETLVKQRSKYKVQLTNILDIIFPEFKPFFNNSFGSTSIYILNKYKIPERIAKMRDFETLNKLSRGNFTYAKFVKLKDLAKNTIGESNDIFEIELSSILNLYKNIDDHIIELDKQISTIIKELNPPTFSIPGIGVISCASIISEFGDISRFSNAAKMLSFAGLEPGIIESGTMSSKGKMVKRGSGYLRYSLMNVALTVIRYNNTFYDYYYKKISEGKCHRVALSHVCKKLIRVIYILETKNIQFDPSLLK

SEQ ID NO: 306795 - protein, 355 aa, unidentified
MNQEKYIGMDVHDATISAAVKNAQGKLLMECVLETKAATILEFIQGLRGTLALTFEEGILAAWLHDLLKPHVSRLVVCDPRKNALMRDGNQNDRADARNLAELLRTNQVKAVYHGKHGIRTLRELGRSYLALTKDSTRVMNRIKSVYRSWAIPCAGTSVYSRRRRAEWLAKLVEPGVRIRAEHLYEQLDSLEPVRQAARRELLRESRKHAAVNLLRQIPAIGPIRSALLVALLQTPHRFRTKRQLWAYSGFAVQTYDSGEYRMVRGKLQRNRERITVRGLNRNHNHDLKNLLKGAAISAIERPGPLQDFYAALVEKGMRTSMARLTLARKIAAITLTMWKKGVSFDPKQLQRQAA

SEQ ID NO: 306796 - protein, 382 aa, unidentified
MEVTNEAITARIYVALELSKSRWVVAIRLPGTGTTSLYQVPGGDLDGLMTLLHRARSIAEQRGSDELEICSCYEAGYDGFWLHRALEARGVRNTVLDSASIKISRRRKHVKTDRTDARGMLGVLMALYRGEDDVCAVVRVPSEEEEDRKRITRSRESLLHERIRRTNRIRSLLHLQGVRSINPNRDGWEHQLKDLETGDGRSFPKGLLREIRREAILLTTAKRLLAQINREIQAISQRKTRRRTGRGANPVAVRLCAIRGIGPQTAAVFASEVFYRSFRNRREIASYVGLSPTPYASGSVSRDQGISKAGNRRARRDAIELAWLWLRHQPGSALSEWYHRRVADGVGRVRRIAIAALARRLMIALWHYLEHGVIPEGAVVRT

SEQ ID NO: 306797 - protein, 343 aa, unidentified
MQSILTVGLDIAKSVFQVHGVDAVGQVVIRRQLKRRYVLEFFQKLQPCLVGIEACASSHHWSRELQALGHTVRLMPPAYVKPYVKRRKNDAADAEAICEAVTRPNMRFVATKTVEQQSCLVLHRTRHLLMRQQNSVINAIRAHLAEFGIVAPVGRNGVEQLLRVVADPKDSRLPEIARTCVAVLGAQLQTLKAQILESDRMITAWHRSSEVSKRLDEIPGVGPVLATALVASVVEPKAFRSGRDFSAWIGLVPKQNSSGGKERLGNISKRGDRYLRSLFTIGALAVIRYAKIHGTKHRPWLAAMLARRPAKVAAIALANKLARMAWAMMARSERYKEPVALAA

SEQ ID NO: 306798 - protein, 343 aa, unidentified
MAKDTMIGVDLAKSVFQLHAASMTGEPRFRRKLSRQSFPKFMGEQAPAVVVMEACGSAHYWAREMIKLGHEVKLIAPRYVKPFVKRQKNDAADAEAIVIAAQRPEMRFVGLKSAEQQSRAVLFRARERLVHQRTELVNALRAALYEYGHVVPQGIHQIIRIEAILAAPNSDLPDLMREECRDLLEQIAEQTVRITARTLKIKTLSAEANTARRLQTIPGVGPMTALAVEAFAPPMENFSCGRDFAAWLGLVPRQFSSGGKERLGRTSKAGQADIRRLLIIGAMSRLNWMGRKSIPDGSWLARMIARKPRMLVAIALANKMARTIWAMLTKNEDYRVPSQAVAV

SEQ ID NO: 306799 - protein, 371 aa, unidentified
MDEPSTFVGLDAHKDSIVVAMLLPGAVHPVEWQLVNEPGAVRRLARKLEREAPGGVRCCYEAGPGGYVLQRQLVAVGIPCTVVAPSLIPVKPGQSIKTDRRDARKLAELFRAGLLTEVHPPTEDEEAVRDLCRARDDAQRDLTRAKNRLTKFLLRRGCVYCVGRRPTWSQKYWRWLHALSFERPADQIVCEDYLLAVEQVAARLEALDDQLGRMSTTEPYRAPVAALRSFHGIDTVTALALVAELHDPRRFPSARQLTAYLGLVPRESSSGSRRRQGGITGAGNRHVRRLLVEAAWHYRHKPQVGRALRLRRRGQPPAVIALADRALRRLTLRHRRMMYQGKHPNTVTVAIARELAGHLWNALQATTPARS

SEQ ID NO: 306800 - protein, 414 aa, unidentified
MDDDIVRWFAAVDWGSEQHQACILDAAGKIMDERVFPHGGAGLAALCDWLVSVAGDPSIVAVAIEVPHGPVVDALLDRGFAVHAINPKQLDRLRDRFSVAGAKDDRRDARIAAAGLRTDPQLFRPVQIGDPAVIKLREWSRLAQELQQERVRLGNRIRQQLWRYYPQLLELTDDVAAEWVLALWTMAPSPVQAARMRETTLARLLKQHRIRRINAETAINILRVPIIKVAEGVTEAAVLHLRSLVARLRLANREFRQAEHKLDELCAALIRPEATKDDVPSDAAILASLPGVGRSILAALLTEASGPLIRRDYAALRTLSGVAPVTKRSGKTCIVVMRYAAQTRLRQAVFHWARVAVQNDPKCRVRYDALRARGHSYGRALRSVADRLLGVACVLLQRREMFDLDHGTPQAAAS

SEQ ID NO: 306801 - protein, 269 aa, unidentified
MKYYSGLDVSLKETFVSIVNEKGKIVKKEVVASESSAIAEFLLSQSREYESIGIESGQLSISMCKELRSFGLPVICVDARHMAAALSARINKNDKNDARGIAQMMRAGRGISKISCQVKVALGSRRQLMYCREQIMGTIRGLLKIYGIKLGKKSKIVIFSLKVQEAIKDLDKVSKDSIEALVCSLEIIEESIKKLDKILSEKGKKDEDCKLLTTVPGVGIIVAMTYKATIDNPHRFETSDTVGAYMGLTPRQYASGEVNRHGSISNGRM

SEQ ID NO: 306802 - protein, 331 aa, unidentified
METTLYAGIDVASQTLALAVLEHAEQPLAVSEYPNSAAGIKRLISRLRKVKLPVHVCLEPTANYHIAVTERLFAAEGISVSLVNPRAVSAFARSRMVRGKTDQSDARVLAWYGQALKPRTWQPPAESAVQLRLMSRHIEGLVKRETALKNRLRSSRLNHTPQLVLRDIKNEIKQVGRRIAKLREAALELIASDDDLNWRCQQLQSVPGIAQKSATKILAELSVLPAGLGKKQWIAAAGLDPMPRESGTSLRGRRRISRQGSAYLRTALNMPALVAVRNCPPLKEYYLALQRRGLTKLSALCAVMRKLLQLIWGMFQRNELFDETKVAAVRA

SEQ ID NO: 306803 - protein, 321 aa, unidentified
MNTDTVHIGVDMAEDSFDAALPAGILHLSNTAAGFRALLRDVRKLDRDVCVYVEATGGCEQQMCNFLLTQGIAVAKVNPKRVRDFAHGLGKLAKTDPIDAAVIGEYGRQARPRCLAPEPAYQRSLSAMVRRRDQITDLITAESNRLGRCHDSGVKKSLASSCRHLKRLQECMEKAIRTLVAEHADLMQRQKCLTQVDGVGDTTACAVLAFAPELGTLSRNEAAALVGVAPYNRDSGKFKGHRMIAGGRPEARRHLYMAALSASKHNHVLAPFYKRLVKAGKPKKLALTAVMRKLVMFLNQLLRSLNDQTAPLPTCAATAGA

SEQ ID NO: 306804 - protein, 386 aa, unidentified
MKRNDLSRSLVAFDQNSTLVAVVELSLKTWLVAGLVPGLARQPLKKQGSDPNALLALLARWRNEAIEAGSKIERMVVAFEAGRDGFWLARWLRVREIESYVIHPTSVPVSREHRRAKSDRLDTALLMRAVLGWLRGEPKHCSMVAIPTLAEEDARRPNREHEHLVGERTRVLNRLKATMVRHGIGNFNVKLRKACEQLAGLRTPEGEPLPPNTLAELRRDLERLRLVRDQINQLEKQRLERLQRAPQEGAHPMLLLLAKVLGIGVETADMLVHEVLSRNLRDERAVGRYAGITGAPDESGSRRREKGLAKSGNARVRRGMIQLAWRWLMFQKDSALAQWYRKRTADARADVRKTMIVALARKLLIALWRYVTVGEVPAGVKLRPAI

SEQ ID NO: 306805 - protein, 400 aa, unidentified
MNILAIDLGKFNSMCCYFNTETQEYSFWPVATSRSYMESVLKSATIDRVVMEACGPSGWMHDLCEELKIETLVCSTNEQAWLWKNVKRKTDKDDALKLARLDMCGQLTRVHVPQRQGREHRTLVKYRKTLDQRVGRMKNLIRSLFANQGLEIPRGARAWTVQGREVINGHRRPLAECSLEELWRGELDLELKQLDSLTAQLAEVESRLEEIAQDDDRIRRVQTIPGVGRKTAEVLVTALDDVDRFDNARQVSAYIGLVPRQYQSGETDRNGRITKRGSRLVRTILLECAWASLKYNPWSRTVFQRIAGGQKNRRKKAAVALARKIAVVAWSMLKHGTDWDPTRLEIDLEPEPDESAGDGPPDSRRWKRVTQRDAGQRAAVAHGSGRRPNECGQRFFESTI

SEQ ID NO: 306806 - protein, 448 aa, unidentified
MDGLEHHTKAYPDWRVSSRAGRREEMSRQVLREELLPRRTVTIARSFGLDLHQATVYVTVIDPQEGIRRFEFPVQEADIQAFEAQLRPDDRIALEATTNSYYFYHRLRPLVAEVVIANPIKLRPWLGQEDKSDRNDSHWLALLNYFGCLPVVWVPDEETEQDRRLLSRRTNLVQERTRCLNRIRSLLARHALICPASDLRTEDARDLVVRLGSRVPDTERQILDSYLAQLDGLQALLEPIEATAALRAVGRPDIELLSTVTGLDQLLSMTIMASIGTITRFPRPGSAVKYSGLSPRENSSGGKKKRGSIRKAGCRQLRWALTQAAKHLVKRPGTFRNLYRRLKRKGEGLALAACARKLMVVIWHMLTTGEAFREMDPKLAERKRARVSQRVKKARRVLSQRSSEWPNLLKHAPLLKQLCGGKTGLPLSLRPANPACRRWSQLEHDLTG

SEQ ID NO: 306807 - protein, 334 aa, unidentified
MALELLAIDLGKRSFHLYGIDGDGVILSRKVSRAKLADVVNEIAPATIAMEACASAHHWARCWLSAGCKVRLINPRFVKPFIKGSKNDAVDAEAIFEAAMRPTMRFVPVKSTDQQDLQSLHRARDRLICQRTALINHTRGLLAEYGIVLPQGPWRFAARAPAAVAEAELSDLVRTIFGELLNQLDDLDCRIKKFDEITVTLCRTNEACRRLAKLPGVGPVVATAIVAAVDQGRQFRSGREMAAWIGLVPRQYTTGGKPRLGGIGRRANHYLRRQLIHGARAVVTRLSGHLDRRSMWLKALVARRGFNRTIVALANKTARIAWVLLSRSEEYAAR

SEQ ID NO: 306808 - protein, 422 aa, unidentified
MLAEDQQTEEIVARVAACDIGKAELTCCVRIPHPSRPGRRLQEVVTYSTMTRSLLAMADRLAELGVTRVLMEATSDYWKPVFYLLEAAGFEPWLVNAGDVKHLPGRPKTDRLDAVWLCKVAERGMIRPSFVPPPQIRRLRDVTRYRADLVSVRSAEKQRVEKLLEDAQIKLSVVASRLFGVSGRQMLDALAAGERDPKVLAQLAHGRLRGKLTELEEAFTGYFTEHHAVLLRKMLARIDGLTADIADLEAMIAEMVTSFAATVNRLDEIPGLGPVAAAAVIAEIGLDMSRFPTPGHLASWAKFTPAVKESAGKNRGRNATGHGNRYLARVIGEAAAAAGRTDTFLGERYRRLARRRGSKKALVAVGRSILVIIWHLLSNPDAHFTDLGPDFFDRRYDPERRKRAHIHQLEALGYKVTLDPVA

SEQ ID NO: 306809 - protein, 419 aa, unidentified
MAFKIFRFNCCGLDVHKTWIFACIGLTDANGRTEYKEKRFSSFSRGLRDLAAWLASYNCTDVCMESAGKYWIPVFNVLEKTCNVILAHPKYTKPQKGNKTDRKDAKWICDLFMCDMIKPSFIPPAEIRHLRDLVRYRFKLTNMLTGEKNRAQNCLTVSNLKLDDVFSDVFGKSSRSITEYILSHPGETFDVTPFVDRRCKTPIEEIQAAVDGAVSPEQAIKLRQCLDHIDELEMHKKEMEREILRVSDPYSDALELIRTIPGFDKNPFTAIQVLSEIGGDMSVFPTDQHLVSWAGCCPRNDQSNFKIKSTRISRAGSYLKPVLVQVANALIKSKKHPEITERYRRIKSHRGHKKAIIAICRMLLTAIWHILTDLKPYTAEGYLAPRPVKTEKILTTSQALNLLKLRGYVIKDDLPVTAS

SEQ ID NO: 306810 - protein, 353 aa, unidentified
MKPRKDFSTAPLAVIGVDIGKEVFHIVGLGVDGKIAFRKKIRRLGFEDAFEKLPPSIVGMEACLSAHFVSRVLRRLGHEPRIIPAIYVRPFVKGQKNDYNDAEAIAEATLRPNLRAVQEKSQDQLDLQACHRVRSRLVSRRTATINQIRAFLIEQGITVRSGARALRNSLFAILENRRDEISPRMASLILGLYEDWCRLDKRIETVTSAIEELSQVEPKCQRLMSVPGIGPIIATGIVAAVSMGEAFERGRDFAAWLGLVPRQHSTGGRSVLGRISKRGSKYLRTLLIQAAKVLLMRPHNWPRYSFGAWLTAAASRLHKNKLAVALANKLARIAWSVLRNETAFDTHLEAAAI

SEQ ID NO: 306811 - protein, 343 aa, unidentified
MQSISTIGLDIGKSVFQVHGVDEAGQVVIRRQLKRRHVLAFFQKLPPCLVGIEACASSHHWSRELQALGHAVRLMPPAYVKPYVKRQKNDSTDAEAICEAVTRPNMRFVPTKTVEQQSCLMLHRARHLFIRQQTAVINSIRAYLAEFGIIAPVGRRGVEQLLDVVADRADHRLPEIARACVAALGSQLRALKAQILEFDRRIIAWHRSSATSRRLDAIPGVGPALATALVASVADARAFRSGRDFSAWVGLVPKQNSSGGKDRLGSISKQGDRYLRSLFTAGALAVIRYARIHGTGHRPWLTGLLARRPAKVAAIALANKLARMAWAMMARGQRYTEPAALAA

SEQ ID NO: 306812 - protein, 407 aa, unidentified
MEVICPRCAGLDVHKQTVVACVRIARDGAPLQEVRSFDTTTSGLLALADWLESFGVEHVAMEATGVYWKPVWHVLEGHFELVLANAAHVKNVPGRKTDVNDAMWLADLLAHGLIRASFVPPVAVQELRTLTRTRKQFVRERAAHVQRIEKVLEDAKLKLSVVLSDILGKGGRAVLQALVDGHSEPEYLASCITTRVKASRTELLEALRGRVSAHHRFMLKVHLSHIDALDKAVASIETEVGAGMKSFRQAAKLLSTMPGLSEVSANVVVAEIGIDMSRFATPGHLLSWACMCPRNDESAGKRRSTRLRRGGKWLKTTLVQAAWAAIKVKGSYLQAQFHRLRARRGTKKAIVAVAASMLTAAWHMLRDGTEWNELGATHFDRADAAKTANRLIRRLQQIGYVVQATPA

SEQ ID NO: 306813 - protein, 331 aa, unidentified
MGAQSIQSEVILGVDTHLDTHVGAVISETGKLLGTLAVSTDSAGYLKLLTWAKSLGRLRRAGVEGTGTYGAGLARVLHEHEIGVLEVNRPDRANRRFQGKSDPTDAESAARAVLAGTATAIPKAQSGAAEAMRAVSVARRSAVKAKTQAINQVRALLVCAPQEIRERLWKGKPAECIDGCARLRSLGTTPLLHTLTATLRMLAKRWLMLAEELKELDAMLEHLTGQHAKRLRQQFGVGPHTAAVLIGVAGDNPERLRSEAALAALCGASPLEASSGKTTRHRLNRGGDRSANNALWTQANLENLSENYKAVCDEGFRKAGLFDPEVRKSLR

SEQ ID NO: 306814 - protein, 353 aa, unidentified
MHYIAFDSHKRYTWALVESREGRKLKETKLPHEPGVIRSFLRNFDPGSPVAIETVGNWYWIVDEIEAAGMEPRLVHALKAKLMLGAVNKTDKLDVRGLNLLQRAGTLPTVWIPPHGVRDARELPRTRMFLARERTRLKNRIHATLNKYAIDISEVRDIFGVRGRELIAESIDKLPYNTRFVTGCLLEHLEEVEGKLEEIEDRMREVFMWREEIGYLMSLPGVGFILAVVIDVEVGDVERFPGAGHLASYAGVTPRVHSSGGKVRYKGLRQDVNRYLKWAFVEAANVVCRNRNRRGWGRKHVVRLYRRVSERRGHPKAIGAVARHLAESAYWVMKKRESYREPEISGGESAADT

SEQ ID NO: 306815 - protein, 359 aa, unidentified
MPHDTRVLLPLNVPSLTIGVDLGDRTSRTYELDAAGSCVAEGTVATTEAAMRRYFAARPRSRVVFETCTHSPWLARLVTTLGHEVVVANPSAMYTRGTRRRRNDALDARFLARQGRADVALLHPITHRSVDAQSALAQLRARDQLVKARTQLINHVRGAVKALGQRLRASSAESFARRARAELPAPLGPALTPLLDVIATLTQQIRAADHALAQLIATRYPVALHLQQPAGVGPLTALAYVLLIDDPRRFRRSRAAGAYFGLVPRLDESSTATPQLRISKAGDALGRRLLVSAAQYILGPFGLACDLRRHGQAIAQRGGKNAKKRAVVAVARTLAVLLHHLWVTGAAYDPDYLLHHRAA

SEQ ID NO: 306816 - protein, 409 aa, unidentified
MFFVGIDIAKKTHQAAIISDDGKLIGKAFKFSNTIDGFNLFLEKLGAVNTELSQFEIGMEATGHYWLNLYTWLADKNFKLHVINPLQSDALRNLYIRKTKTDSVDSKIIADVIRIGQYSETQLADDKIISLRDLSRQRFFLVDMASDLKRKIIAMMDRVFPEYQDFFSNMFGKTSVQIMKECTSPEQILEIPTEKLTEMLKKASRGRFKESKAKELKELASNSFAAMLSSDMISLLIRQMLEQIDLLEKQISDIEQIIAAQFAEINTKIATIPGVGTTLGATILSEIGDINRFEKPKQLIAFAGMDPSVKQSGNFVGTESHMSKRGSPFLRRAIWLASVVAVSHDPLFKYLFQQKMASGKNYSQAMGYICHKLLNTIFAILKTGEEYKPIYPPEIDVSKLANEAINSQK

SEQ ID NO: 306817 - protein, 332 aa, unidentified
MDKEATAIGIDVGKLKLHGALIIEGKIRSKSVANSSTGYQELTDWMTRQNVELDSCLVCMESTGVYSEPVALGLQALGLTVSIVNPARIKGFAQSELVRNKNDGIDAALIARYCEKMHPQPWKAPTPEQRRLRSWCDRLKALKDMRLQEENREEACTVAANLELAEHLRQHVEWLKVQIKQVEREIEDHIACHPQLKRDSDLLASIPGIGKATIAVMLGHVGDMQRFHSAKALAAHLGVSPRQRTSGTSIRGRTSMCRTGNRATRSALYMPAVVASRHNPALRNFAERLHANGLPKKAVIGAVMRKLVHLMFAVVRSGIAFQPDYPRGRQMS

SEQ ID NO: 306818 - protein, 354 aa, unidentified
MSKVKQLSFEGETIFVGVDVHKTNWKVNSRIGNMELASFSQDPSPEILGKYFKNNYPGAKIKVAYEAGFCGFGIQRSLTDLGIKCIVVNAADVPSSDKERKRKDDKRDARKLSRELADGSLKAIYIPDVEMEQVRTLIRERYRLVQDQTRCKNRIKHLLMFSGIQLSIKGQRWSQRYVKELEKAECKTEALKTALNLALQEYKQIRTIIKEATLSIRKIAQEQPFEAVQKYLQSIDGIGLINGMVIQTEIQDMRRFRTLDSLCDYAGFVPDISSSDERMVIKGITQRCNEFLREAIMESSWMLIRKDPAMLMKYNEYRKRMNNNKAIVRIGKHLLARIRYVWNNQKEYERGVVG

SEQ ID NO: 306819 - protein, 361 aa, unidentified
MKCVQRNKLDFSGQNIYVGIDVHLKSWSVAILSEHSVLKRFSQSPEPELLHKYLVSNYPGANYFSVYEAGFCGFWIHESLTDLGITNIVVNPADVPTMSKEKLRKTDAVDCNKLARELRSGSLEGIYVPGTATLELRSLIRMRTLIVKDSTRAKNRIKSLLHFHGVKIPEEFIRCSSHCWSKRFLRWLHNLELSTEYGKKTLELHLEQFIRLRKMLLQETRAIREISRKAPFAKPIRLLSSVPGIGITTAATLMVEIDDIVRFNSAEHLASFIGLVPMCHSRGDNDAVSNMTIRRHFMLRWLLVESAWTAIRIDPAMTMAYTEYRKRMNPQKAIVKIARRLVNRVYFVLKYEKEYVSCIVK

SEQ ID NO: 306820 - protein, 368 aa, unidentified
MKKIAYVGIDYHMNVVAIAVIIEGEKEFYDTIRLKNTDTLIAKYMQKLSHQFTIKACYEASSSGYCFQRKMRAWGYHCDVIAPSLVPKKPGSRRKNDFRDARELAQHYANGLLTIVHPPSEQDEALRGLIRCRQSLKEAEKRAKNQINSLLLSQGLHWQKSKWTLRHRQWLATLHLPHTCLQQVLDEHLALLHYLEARVLHFDRQIEALAQSELYAESVKKLCTIKGIRTLAAMILIAEITDFRRFASPRALMAFLGLIPAEHSSGDKQTGCAITKTGNKRCRTQLIEAALHYVKKPTIRGRLKSALSQVDASTATIALTCMQRLHKRYWALVMKGKEPKVARTAIARELAGFIWALMNQQPAPVTTV

SEQ ID NO: 306821 - protein, 421 aa, unidentified
MNQLADTLFTAYVGIDWADAKHDICVQSADGEVVEFDCISSRPEAIAAWAHDLYRRFGGPLAVAVELTKGPIVSALVRYDFIVLFPINPLLLARYREAFTPSRAKDDPTDAELAVDLLTRHPERFAPLKPQSVEIRKLMTLVEHRSKVLSDQRRFVNRLGHALKCYYPQVLEWFRQHNTVVFCDFLAQWPTLRQVKRARRTRLESFFKAHQVQFAHVIAARIEAIKSAVPLTDDEAVIEPHRLQVEVLIEQLRLTIAALKRYDDEIATLVQSLPDYDLLFSPLPGAGHILAPRLLAAFGEDRQRYQRAAELQRYSGIAPVTIRSGKTTWVRWRWQCPTFMRQTFVEWAGQTINKSAWAGAYYRQQRDKGASYEVAVRALAFKWIRILYRCWQTRTPYDESKYLEALRRKGSPLLKYLVEAA

SEQ ID NO: 306822 - protein, 389 aa, unidentified
MSYRNDQSKKSSTALDQASTLLAVVELSRNSWLVAGIVPGIDRHPLKKLGADENGLLALLHRWQQQAVKAGREIKRVVVAFEAGRDGFWLARWLRARGIEPHVIHATSIAVSREHRRAKTDRLDTEHLKRVVLGWLRGEPDHCRMVAIPTIEDEDAKRPNRERETLIRETTRLVNRMKACLVRFGVRGFDPTLRRAADRLEKLVTPEGVRLPPLTLAEMLRDMARLRFLREQIRSLEKARVMRLKNDPTTRTNAMVHLIARIFGIGIETADTLVHEVLSRNLRDRRAVARYAGLTGSPDESGSRRREKGLARAGNARVRRTMIQLAWRFLRFHTASGLAQWYNKRAADGRASTRKTMIVALARKLLIVLWRIVTTGTVPTDLKLRRIAT

SEQ ID NO: 306823 - protein, 399 aa, unidentified
MRTKRNVAQVGCDCHRLFSKLTARDEDGRIVWRRRLEHGDRIKLHEQLSGLPKGTPVILEGTFGWGWLSDEMLAADLDPHLASSTKIAAWRKARGLAKSDRLDADLLSELWTQRPRWWEVWLAPPEVRDQREWLRYRMSLVKIQTGVKNRIHAVFHRHGIIHGFSDLFGTAGRRYLSLLIVANDVRLPESGRRTLKGHLQLLDQLRRQIALATRAFRKQALGSSTAMRLRTLPGICWILGYTINAEIGDIKRFRSPRHLCSYSLLAPRANDSALEPEDEETPKGRHVGHVGRRTLKWAWIEAAHGAVRKGGRFGDIFDRYTDGGKRNRNRGYIVVAHELCRIACVLLKKEVDYVPSALPTRPGSKKKKPMRKKSEKTSKPSKSRPGTGQPHHPMVAAVV

SEQ ID NO: 306824 - protein, 446 aa, unidentified
MKKSSRMSVIHPHAAGVDIGAEFHVVAVPPDADVAPVRTFQRFTGDLHRMSGWLKTCHITTIAMESTGVYWLPAFEIPEAAGFNVILVNARDAKNVPGRKTDVNDAQWLQKLHSFGLLRASFRPEHDISVLRSYLRQRERLTEYRAAHIQHMQKALMQMNVQLHHAVSDITGVTGLSIVRAIVSGERDPSVLIQYRDVRCKKTPEVLQQALTGNWQPEHLFAPEQSVAFFDFYQEKIRECDDQIETSLLQLSTGTEEPEGVLPSARHRTKQPNQLSFDVRPLLWKITGADLTQIHGFGPYLALKFVAECGTDMNRWPDASHFTSWLCLSPGNKISGGKVLSSKTRRSSSRIAAALRLAATTIGRSDTALGAFYRRLSSRIGKAKAVTATARKLAILFYNALKYSQKYVDPGADYYEERYRNRVLDGLKRRAKSLGYSLQQDPELCV

SEQ ID NO: 306825 - protein, 342 aa, unidentified
MKDISVIGLDLAKEILHLIGLNKTGKLVVRKKLRRNQVEKYFKTLPSCTIAMEGCASSHYWGRQFQQFGHQVKILPAQYVKAYVRGNKNDYNDALAIAEASQIQQMRAVKLKTPEQQGLQALHRIRRKSVGDRTSLCNQVRGLLAEFGIVLPRGMSQIRNKLPEILADETNDLPFMLRDALSLKYIQLNQLDELIEQLTSSIEIESKQHTEIKLLQTIPGYGSITASCFYSHVGDGRGYKQGRDVSAALGLVPRQHSSGDKQVLLGISKRGDKYLRSLLVHGARAVVRVADKKTDRLSQWVTNLAARRGKNKATIALANKLARIGWAVIRKAQPYHTTYAEI

SEQ ID NO: 306826 - protein, 411 aa, unidentified
MRRIRDRVAGLDVHRDSVTACARLVEHGEVVEELERFSTTVAGVTELGSWLLSRGVTTVAMEATGVYWKPVYYGLEGLVEELWLCNASHVRNVPGRKTDLADAAWLADVVAHGMVRPSFVPPAPIRELRELTRYRKTQVDARGQEIQRLEKVLQDAGVKLTSVASTVWSVSARAMVEALIAGERDPAVLADLAKGRMRAKITELAEALASNWGQHHSIVAARIIAHIDFFDVSIAELTTAIGDRLGPFGNLIERMTEVPGISRITAEIVIAETGGDMTRFPTPGQLCAWAGVAPANHESAGKHRPAGTRKGGRWLRRTLIESAKSASRTKDSYFAAQYRQIARRRGPNKATVAVAHSLLTVLWHLMANPDQHYHDLGGDYFHRRRDPQREADRLVRQLEQLGYHATLEPAA

SEQ ID NO: 306827 - protein, 428 aa, unidentified
MNIEDTIRRKQFCQIKDEIAGCDDYLVVGIDVAKDKHHAFMGNTTGKTLSRKLVFENSLDGFRKLMEHSKAVKARGALSKVVFGLEPTGNYHKPLAAYLIRCGCHVVLVTGKAVKINREQLDGRWDKNDDKDAANIADLVSRGRCLYYDLPSPDLGQLRQVLSLRKRLKKEEHRLRMNIRNNLLAQYFPELDAYYSACESETLAIVSRCLDPHQIAGKHFDEFFTQVASKRRGIAQKLRLQKIHRAASQSVGCEMGPAVQVEAQLVVNKLGEVRRQLKEVEQWMEDIACGFAEYPYLLTIPGFGPYVAATVLAAIGNPQRFNSANQVLKLAGYDLSASRSGKNSHRAIAVISKKGNGQLRYALYQAARVASSRSADFINYFTGLLRGRERERGIKTKMRVKLAAKMLRIAWAIMKKKQVFNPDYLFIK

SEQ ID NO: 306828 - protein, 323 aa, unidentified
MKKFVGIDISKETFDIYFEQEDKGCHVKLQQTEEDYKVLLHLISKDAICIMEATGNYHLNLAHYLHQAGIKVIAENPLKIKRFSQMSLQRTKTDKADAKLIYEYGRVILSSTEPHFWQPDKTEIGHLKQHDTVRSQLIKQRTALSNSEEALNALTHLNDEVTQVLNDMVTAVDKAIKQLDKGMLKLVKEHHAETFDLVISVPGVGVKTATMMICLTDGFKKFSHDQVKQFISYIGMSPRTFESGTSVKGRAHISKVGNSRMRSMLYMCSWTAKRKNHQCAALYERLSGKGKPEKVIKVAIAHKLIRQIFGVIKSGEPFSKEYA

SEQ ID NO: 306829 - protein, 374 aa, unidentified
MEETVMNKEIYVGLDVHADTIAVALAAGGRGGEVRFFGTIQHSGDSVLRLTKKLTETGKIPTFCYEAGPCGYGLHRLLSKLGFDCAVVSPAMIPRKAGDRVKTDRRDAEMLARLWRAGELTPIWTPDEEQEAMRDLIRTRKQAMDARKVAKQQLLSFLLRHGLRYRNGKYWTKRHRRWLAELRRFPYPHQQLAFEELKRAIDQIETRVATLDKTIDEAVPQWHFAPVVDALRALRGVNTTVAATVVAEIGDIARFESPRQLMAWLGLVPSEHSSGSTTRRGRLTKTGNALARTMLVEASWSYRHPPKEGHPYLNRSAHLPQQIRDIGWKAQVRLCKRFRHLSRTGKPQPRVLAAIARELAGFVWDIARKTPLPV

SEQ ID NO: 306830 - protein, 345 aa, unidentified
MVDGLDLSKRTYEMCYFDQKGKVGRSGGETTKGGRAKLYAKLKAEDIVAMEANSLAFVMEKEMRAIGCTVVILNASQLSVIYASTKKTDKEDALKLARLVKIYEKEDLPTVDVPTDKEYYRRKLIKEYKTLKGDRTQELNRLHALFVQCGITTIKRSNVQTEVKRQKVLPQLFGYEAEQAKRLCERLTMLEAQIEELEQLIKKECKEDKDIQRLQTIPGVGDKTALAFAAYVGDGKRFDNGDEVANYVGLVPRVDCSGTINKYGHITKKGNKVVRALLYQAAWAIVRSSHGGALKAKYFYLTEHGKGKKISITAIARKMAKLMYLIMKNKEEEYQEVPVSALKAG

SEQ ID NO: 306831 - protein, 387 aa, unidentified
MTVPAQVFGLIPRHYDIFGGLDVAKKNMAVTFTDHEALMRSLRLPYSSAHLLHYVRKHFPDQRVAFVYEAGPTGFGLHDELVSAGYRCLVVAPSMVPTAPGDKVKTNRLDSRKLSVQLRGGELRSIHVPALRYRELRHLVQLRDTQVGQLKATKCRIKSLLLCEGLAFPPAPESSQWSARVLSELLELPCSPAVRFELDQLIGTLHFHFNSAAAAQKQVRYYCQNDPELRQSIRLLASLPGIGVIVATHLVARLGDWREISNVRQIAAFLGIVSSEHSTGEKANRGRITRAGDSRLRNKLIQSAWTAIRKDAELRAFYWRIYHRHPKKIAARKAIVAVARKLTTRIYAVLKEQRPYVLRPENFAAPLTAEETVGPRERLDNPQNEQP

SEQ ID NO: 306832 - protein, 365 aa, unidentified
MWEAPVEIYRTSVGLDVHARSVVACGLDRSTGEVFERRLTPDYREILEWVGSLPGPAMVTYEAGPTGFGLARSLVGAGIECVVAAPSKLQRPAGDRVKTDVRDARHLARLLHLGEISAVTVPSVEQEAARDLVRAREDCRGDLMTLRHRLSKLLLRQGIVYYGGKAWTGKHELWLRTHRFDVRGLQLAYDTAFDAMLAALDRRDRLDEAIAEMAADSEFTPVVTRLGCVRGIATLTAFGLATEIGDWHRLDGRSIGAYLGLVPTENSSGASRSQGGVTKTGNGHARRLLVEAAWHHRTRYRPGPELRKRWDAASLAARARGQAANRRLHARWARFDERKKRSVVANAAIARELAGWCWSLAVLDD

SEQ ID NO: 306833 - protein, 356 aa, unidentified
MDSTKYIGMDVHKEATTIAVMNSAGKLVMESIVETKAATIVQFIEGLRGELYVTLEEGTWAVWLYDLLKPHVTKVVVCNPRKNALLKAGNKSDRIDARKLAELLRAGLLSAVYHGETGLRTLKELGRSYLAISKDLTRTMNRVKALYRSWSIPCGGPSVYAPRHRAEWLSKITEPGVRRRAELFYQQLDGLQKLRQEARGDLLAESRKHGATELLRRIPYIGPIRAALLIALMQTPHRFRTKRQLWAYSGLALETHSSAEYHYVQGQLQRSKRPVALRGLNQNHNHDLKSIFKGAATKAGSAKGPFHDFYAALLAKGMKPTMARLTLARKIATITLIVWKKGVCFDAQQLKQQVSV

SEQ ID NO: 306834 - protein, 361 aa, unidentified
MFCERTSVGLDVHARSVVAAAIDGRSGEVFRARLTPAHAEVIEWVGKLPGPCAVVYEAGPTGFGLARALSAAGLRCEVAASSKLLRPAGDRVKTDRRDALILARLLRLDEVVPVRIPNESEESARDLVRAREGARVDLMRVRHRLSKLLLRHGIVYDDGKAWTERHDRWLHHQRFDAAPTQSAFEDAYEAVVLATARRARLDEKITTLAAESEFGPMTRRLACLRGISTLTGFALAVEIGDWERFSGGSIGAYLGLVPSEYSSGTSRVQGAITKTGNTHVRRLLVEAAWHHRSTYRPGVALRRRWDQAPAAARARAHAGNQRLHDRWVGLNLRRKRAVVANVAVARELAGWCWSLAILPPD

SEQ ID NO: 306835 - protein, 412 aa, unidentified
MEVVHPRCAGMDVSKKDAKVCVRVAGAGRRKTVETVTTWSSMTGQILALREHLSAEQVTCVVMEATGDYWKPFYYLLEDLPGVEVMLVNARHVKTVPGRKTDVADATWLAQLGAHGLVKASFVPPEPIRQLRDLTRARTAITRERAREAQRLEKLLEDSGIKLSAVASDILGVSGRAMLDALIAGDRDPALLADLAKRRLRNKIPELTEALNGRFNEHHAFLTQVHLDLIDRHTDAINQLTARIEVMMEPFQGFHDLICSIPGISTITADVIVAETGADMSRFPTAKHLASWAGTTPGNNESAGKVKSSRSRPGNPYLQGALGAAAMACAQNPRTYYGARYRRIASRRGPKKANVAIQHSMLIAIWHMGTTGTLYDDPGADYFTRLHPDRARKRAIHQLEAMGYRVTLDDAS

SEQ ID NO: 306836 - protein, 342 aa, unidentified
MTVIGIDPHKATHTAVAIDDNEQVLDEFKLRACAGQVDQLREWAAGFDKREWAIESANGLGYLVAQQLVAAGETVLDVAPMLASRVRLLGSGRSQKNDPNDARSIAIAALRSDRLARVRPDNHARVLRLLVKRHRDMARIRAKHCTRLHALLLEVHAGGISSKMSVTNAKQLLETIEITDEATRYRVLIAKELVEDIAHCDTALKTSKKRLAAAVNASGTTLTDIVGIGPVCAAIIIGYTGDVNRFPTKGHFATYNATAPIDTSSGPNSRQRLNPRGNRTLNHAIHIAAISQLRYPGEGRDYYDRKRSEGKTSKEAIRALKRRISDRVYRHLINDTTQPATS

SEQ ID NO: 306837 - protein, 366 aa, unidentified
MIVIGTDTHKQSHTAAALDGATGGVIAEQTARAKRRSFEDLLLWARQLGPERVWAIEDCRHVSGALERFLLAHGEQVVRVPPKLTAGARSSARERGKSDSIDAVSIARAAIREGLDTLPVAQLAGPELDVRLLVDHRERLIAQRTQLSNDLRWSMHDMWPEFDVPARALTASGWQERVASRLARAEQSARVRIARDELRRIRELTRTINALEGELATLIATLAPRLLAEPGCGVLTAAKLIGEIAGISRFATEAQFARITGTAPIAASSGRTERHRLDRGGNRQLNCALHRLAVTRGRMDPDTSGYLARKQAEGKSRREALRSLKRHLARRIWLVLQPPGRDTPPTRHRPAVTIHSNTPYGSFSLT

SEQ ID NO: 306838 - protein, 409 aa, unidentified
MDVLHAHCCGIDVHAKFVVACCRQIGSTGSVTKTSRTFGTMTADLQALAAWLTSEAVTHVAIESTGVLWQPVWNILEPHVTIVLVNPRDVRQVPGRKTDVTDAEWLAQLLQYGLLRSSFVPPVAIRALRDLTRGRAKLVDQTTAVTNRIHAVLHDANIKLGSVATDILGVSGRAMLQAIVEGETDPSRLADLARHRLRSKLPALRRALEGRVTDHHRFLLRRLLGQLAFLEAEIAIYDARIAEASAPFVAILARLDTIPGVDRRTAENLFAELGAEMSVFPTAAHLASWAAICPGNHETGGKPLKGTTRHGNRWARRALTEAAWGAKHTRGTYAAAQFRRLAARRGAKRAIVAVAHSLLVAAYYIIRDEVVYTDLGAAHFDRLAPTQLTRYFVKRLEGLGHKVTLETAA

SEQ ID NO: 306839 - protein, 354 aa, unidentified
MKTYYVGMDVHRASIWIVVLNGAGKLVMQSVIETGAERVRGYLKQLRGKVYVTFEEGTQATWLHDIVRSLVTEVVVCDPRHNKLLQSGNKNDRVDAQKLAELLRNGALKAVYHGDHGMRTLKELVRNYDCLVGDTTRVMLRLKAIFRGRAIPCAGHDIYRNDRRAQWLEKLREPGARQRASFLYAQLAALKPLRHEAKLVMVKEARRQAAYPWLMSVPQLGSVSVAQLMAVVGTPHRFRTKRQFWPYVGLAVVTRSSADHEIVNGVLRRSRRPIATRGLNRNHNHLLKKVFKSAATSACHSGPFKAGYDARVAQGMDPSLARLTIARQLAAITLAVWKRGEKFNMQMMKQQLAA

SEQ ID NO: 306840 - protein, 454 aa, unidentified
MQQSITYKAVPVKNVSLRFLKNVARRSTIHVGIDIGKHKLYIVVRWTPPRSRAIVYEHPWFVENTREIPELVVKLRKIMSQNKLIVGIESTGSYGDPLRQALGDAGVVVHQVRTKLTHDYAEIFDGVPSQHDGKDAAVIAELVSQGKSTPWPYVMQSDTENEMRYHVWKLMNTHKEIKRLQGKLEGLLARYWPEITSVLPLTSLTLLKLLKHYGGPSALFADKESTGNIHRFSCGRIREEKSQIICRIAKQTNGVRQGIWDLQACREVAVCMLELHKQSGTCKKRLKVLIEQSCTPLQRMAKILGVGTASVIWCRIGDPRRYHCSDAWIKAMGLNLVERSSGEYQSEYHISKRGDSETRRWLYMSSLRWVQESPVREWYQRKKFQTGKKIPGEEHKRTGGKAVVAVMRKLMKGLWYALVRDTPFDPKKLFFKEGTQCKDVTPGKPPSRKKRKMS

SEQ ID NO: 306841 - protein, 345 aa, unidentified
MNIASIGIDLGKTTFHLVALGEQNKVLLRKKFSRTQLLACTANLPASLIGLEACAGAHFVGTALREQGHQVRLIPAQFVKPYRKSNKNDFLDAEAIAEAVTKQNMRFAQLKTQEQLDWQAMHRVRDRLVQRRTALINEIRGFLLERGITLAAGPIHLRKNLSAVLEDAEQKLSPRLRWLLARMWQEWKQIETDIEAITDEIERISNEDARCRQLRQIPGFGPLVSTATVAAIGNGSAFRRGRDFAAWVGVVPRQYSTGGKQKLYGISKRGNVYLRRMLIHGARAVLFRVKYDTGGFGQWVHRLAQRAPRNKVVVAIANKLARIAWAVLSSGKDYRHQPLLQPMAA

SEQ ID NO: 306842 - protein, 409 aa, unidentified
MGWSGVGRGRNLTTDMTTTNTQSDTANPTAPQGKKAHQLIKLGVDVHWREHVVVRQIDGTSPQPAQRFTPEAFVAWVAKQVQQADVVHCCYEAGPFGFVLHRRLVALGVKSLVVRPRNWDEYGQKVKTDRRDALALVSCLDRYVAGNTEALTVIRVPTEAEERSRSVGRQRQQLLEHRKRLAAQGLSCARYYGHDLPEEWWRAKKFAALRDELPEFLVGLLAGLQPLALLAHEQLAALGAAIESAQSQELPTGLGALTAQLLDREMGDWTRFKNRRQVASYTGLVPSEHSSGERRQRGAITKHGNPRTRHLLIETSWRLQQFQPDYHALKSRRAALDQAKRKGDASSRKKLCVGLARQFIVDWWRIRTGRTTPAKLGLQMSWPSAHVLKGKAPPAAAPAAVVPVQPAAA

SEQ ID NO: 306843 - protein, 346 aa, unidentified
MWIIGCDYHPRFQQIAMVNTEGGEWEQRRLEQRRLEHPQEAEQFYRGLRGQKVRVGMEASGHARWFERLLAELGFELWIGHPGAVRAAAPRKQKTDARDAEHLLQLLLSGQLAKMRVWVPTAEQRDLRQLVLHRHRLVQMRTRVKNQLRSVALNEGIGRKPGLWSRKGQEQFRGLVLPAWTERRRQDNLELLGELEQRTLPLDQAVGEQAGQRPEVARLMSHPGVGPVTALAFVLTIGDPTRFACGKQVASYLGLIPSEYSSGGRQRLGHISKQGNALLRSLLVEAAHVAARVEPDLGRYYRRLAMKKHRSLAAVAVARKLALRLWWMWRRECNYAQWRASGSHAG

SEQ ID NO: 306844 - protein, 408 aa, unidentified
MKRYYIGVDWGDRLHQMYIGDDEGKKVREMKVQESPEGLAEIGRWLDERRAEGIELWAAIEKPAGRIVDFLLDHGVEVYPVNPKAVDRVRDRYRMSDSKSDAFDAYVLAEFLRTDQAHLKVLRPSSEKAQELKMLSRDQRRVGRHKTRLLHQLTTTLKEYYPRPLEVFEDLETGIALDFLQQYPTPAHLGALKRKEFNRFATKQHHLSKQRCEELWEKLNRPQLAVPEHVVRAKAQLVEVLIEQLRAAIKAVKIYNHKVESFFASSPAAQFAKTLPGGKSGTLVAAIWAELGDAQGRWESSRHLQAEAGAVPVTKASGKSRVVHFRFACNKHLRHAMYWFSFVSVNHSEWAKLYYRRQRDKGHSHHQALRALGAKWLKIIFVMWRDHKPYDENYHLANIARQKMRQAA

SEQ ID NO: 306845 - protein, 436 aa, unidentified
MEEVEDEPLFAERVAGIDIGKREIMVTIRVPSDTRRGRRQQETREFRAVRKDLLALADWLRAWGVTKIGMEATGDYWKPVYFLLEREGFDCVLYHAAQVKALPGRPKTDKLDSVWLAKITERGSLASSFVPPEEIRRLRTHTRYRRHLVQARTAEKARCEKLLEDAHLKLSSVITDIHGVSGREMLAAIIAGQRNPKVLAQMARTRMRGKITQLEEALDCSFFTEEHAFVLAMMLANIDHLTAQIKELTGKIEALCQPYLHQIAQLDAIPGFGVITAQDIIAEIGVNMAVFPTAGHLCSWARQAPQVSQSGGKRKGKNATGRGNPYLGGALGESAVNAGRTQTFLGTKYRRLVRHMPKKKAQGAISRTQLVICYELLSDPEAVYQDLGTDHYERRANIRREVRSHARAIERRGYKVILEPIEPGLDPDILPVTKAS

SEQ ID NO: 306846 - protein, 462 aa, unidentified
MRPPCNVDAGAGRHDRPPTGTRRPERTDRRETNVQPGDIDVWLGLDVGKSSHHACALDHDGNTILDTPVDQDEKQLRRTIVKLQRRGTVLVIVDQPNTIGSLPLTVARDMGARTAYLPGDAMRKAAQLLPGGSKTDRRDARIIASTALRMPETLRDCEPDDETMAALRLLSGWDEDTAHELTRTVNRLRGLLLHLHPALERALAGDRIKSDTALGLLEHYKGPDGLRRAGAARIREYARRHGLKGTAITDAVADAIGEQTVTVPGTRAAESLIPQLVSDLRRLRDRRTDISRQVEELLADAPLLTVLTSMPGIAARTASQILLAIGGDIGRFKDAAHLAAYAGIAPVTRQSGTSIHGERPARGGNKRLKNALFQTAFAAIRLDPESRAYYDRKRAEGKRHNAAVMCLARRRCNVIYSMLRNGTLYQPGGTHTTTTTPPRTETTPAHAPRPRQDTTHPGTRRT

SEQ ID NO: 306847 - protein, 353 aa, unidentified
MKKIFIGVDLHKHQITVCFLSNDGTERIEIYYFSENGINSFIEQLKLLKDCGYELELAVETTGNSEYFYNQIKSYVDKAIVLNTLKLKPIMKSYKKTDKNDCRIIAFFLSKNMMEGYSVNMPSEEAKSLRRLLKARYILMKARIGIKNQIHGILLGYGEETKKRFLTSKKGREKLRKMNYAEQSILNILIDNIDNLDKQIIEVENEIEEKVKSRKREDEIIQSLPGFGKIISASIIAGIDNIDRFEIPKSLTAYVGLVPFVNNSGDKVIHGKITKTGPAYMRTALVQAVLAMLRTKEMRNHPLVLNYYKMKETKCSGKAIIATARKLLNIIWHLLKRNETFDINYYFNSKVNI

SEQ ID NO: 306848 - protein, 452 aa, unidentified
MEEKEISMEVVNPHAAGVDVGSRSHWVAVGQREQDVREFGVFNHDLFEMADWFKEKQVKTIAMESTGIYWQNLYAVLISKGFHVILCNGKFTKNIKGKKTDIKDCQWIQKLHSLGLLSSSFLPDGKTEQLRTYCRQRANLLHLAAATSKKMQKNLSLLNLRLDVVVNDICGLTGLNIIRAICKGETNPEKLASLRHGNCRKSEAEIALALQSNGRKDYLFALGQELDTYDHLQKKISECDKMIEEMLNEIIDNDENKKQHFIEPKTYKRVNKNTPRDIDLNLKSYQMFEGTDLLAIEGVSYSTVLAIMSEIGIEGIRKFPTAKHFTSWLRLAPNNKISGGKVLSSKVPKGSNRLKIALRNAANAIGNLKESTPLRDFFHKINFRKGRVSAISATARKLAVIIWNMVVKRVQYINPEGYLFLDQKRKLGIVKRIQKQIAKFELTADDLQIIKT

SEQ ID NO: 306849 - protein, 354 aa, unidentified
MSEKLNSEIAVIGIDIGKNSFHLVGQDRRGSIVLRQKWSRGQVEARLANLPPCLIGMEACVGAHHLSRKLKALGHDARLMPAKYVRPYSKGEKNDYRDADAIAEAVQRPTMKFVATKSADQLDLQALHRVRERLVGQRTGIINQIRAFLLERSIAVRQGLHFLRAELPGILAKRTDVLSPRMLRVIEDLAGDWRRLDERIDALSDEIMTLARQDKGCERLMTVPGIGPIISSAMVAAIGSGDAFSKGRDFGAWLGLVPKQMSTGDRTILGSISKRGNRYLRTLFVQAAWVVLVKIKPEGWERYGLKSWIEAAKQRLHRNVLAIALANKLARIAWAVLHKGRAFECVKTNASQPV

SEQ ID NO: 306850 - protein, 406 aa, unidentified
MITVGIDIGKEKHAVAAIAATGEILMPPRFFAQTAEGFAGLLAQLERLGKPADIRIGMEATGRYWLPLRHTLARQGYRVESVNPLITSAEISKDVRGRKTDKADALAIAHALLRNRHNPAPAEDAATDALKSLTRHRTFLVRQKSSVKLCLRAALDVTFPEAGATVTSLFSPTSLAILEAFPSARLLSGANLKTLTAIVSKASRGLLSADYARSVRDAARNSVSAGIVNEGEEAALESLIRQIRFIEGQIEKAEERIKAMPAPEMASSLASVKGVGPLLSRVITSEIGDMERFRNPPSGKPPRDMDKRILAFAGCEPRLRESGKWKGRTKISKRGSPALRTALWQAASTCRLHTPLFAEVYDRQTKRGKPHSVAIFYVARKLIEVLCGMYKTGMPFSPQTVGGETC

SEQ ID NO: 306851 - protein, 412 aa, unidentified
MRIIYKRCCGLDVHKKVIVACLLVLDPNGELHKEVKKFGTMTQDLLALLDWLQKAGCTHVAMESTGVYWKPIYNILEGHLEVVVVNAQHLKGVPGRKTDVLDAEWLAECFQLGLLKASFIPPAPVRELRDLTRFRTSLIRERARTANRLQKVLEDANIKLAGVVTDIQGVSAWAMLEAIVAGTTDPEALADLAKGLLRKKREQLVAALSGRVKPHHRFLIAEQLSQIEYLEEAIQRIGTEVAERLRPFESKIKQLDSIPGISQQIAEVLLAEMGWDMSRFPSDKSLASWAGMCPGNNESAGKRRNGKTRKGSRWLRHALIEAAHGAAHTKNKYLKTQYHRVAAHRGKKKALVAVGHSILIISYHLLTRGQEYSDLGANYFDERDRTAVQRRCVKRLEKLGYSVQLQQTALAA

SEQ ID NO: 306852 - protein, 347 aa, unidentified
MSFVGVDLHTNSFTACRREADGSESFETFTLSPADVDRFCLTLDADDEVAFEATGNSAWFRDQILACAGRVVVVNPSQFKVIRQSVKKTDRNDARALALFLAKDMLPETRAKTQAESELGSLTQTRDLLVKQRTRLLNKVHALHNRHGIKLKRETLASRKRLLALAPDPFTPLEWAELEIVRDQALSLTEAIAKIDARIEEAASAMNGYEGLTSIKGIGARAAAVFLSTIGNVNDFESADKLAAYFGIVPRVSQSNETDNRGRITKRGSPLARTVLVQCTLIATRYSPYLKAYYDRIRLRRGAGKAIIATARKLLAIIYETLKNQWVFKDFTAFELKIPEIHAGQSS

SEQ ID NO: 306853 - protein, 438 aa, unidentified
MSNKVFFNLDDLFISVGIDIGADFSWMSIALPNQQFVGKPYKILHNSIDSLTTAVSKIKEAEELYSLESRIFLESTGIYHYPLFCYLRDKGFNCSVINPIITKNSTNINIRKVHNDRFDSKKAALVGLKPDLKVSLMPSDLALNCRNLCREYYDLMDNRSAYVNKLQGELRMAFPQYLGIFSKVTINTSLTLLETYTSPSAFLKADKQEIIDIIKSTARFGLTYAQNKYNAIIQAATDANQFGYIIDSNIKRIRLYISFIRKYDEEINNILESLHELVDANEDADFVKQIHLIETFKGAGFLSAVSIMGEIGDFSAFSKPKQLFAYFGLDPAVKQSGKFEGTKVQMSKRGSAIARRVIHTLTLQSISISRNGEAKNPVLREYYLKKCDSKPKLVAMGAVSHKVCNMIFAILRDNKPFKIIAPQEHIKQYNAAKCDIAA

SEQ ID NO: 306854 - protein, 359 aa, unidentified
MEYGAIDLHKKQSQIRILTAGGDVIEDRRIVTARERFTAVFGLRRPMRILVEASTESEWVARHLETLGHEVIVADPNYLPMYGDRSRRVKTDRRDVAALADACRRAVYRAAYRRSDQQRAVQAQLRVRQGLVNTRTRAISLARSLMRASGHHIRSGESASFLQRLAACEVPNDLTAILAPLRGVIEVVNDELASADTRFAALVENDPVIKRLTTLPGIGPLTASAFVAALDDVNRFRGAKAASQVTSYLGLVPREFSSGERQHRGHLVRSAQPQVQTLLVQAAWRVRRSTRSETAALRDWADRVSRRRGKNIATVALARRLARILFAMWRDEVDYQPRRIHANRQSQAATTEQPVARAV

SEQ ID NO: 306855 - protein, 373 aa, unidentified
MNYTTVYVGMDVHKESFSLCCYTNEKEQAEYCQKVKAHYSKVLNYLDAMRFHYGNDAVFICGYEAGCLGFTLYHQLTQHHVKCVILAPTSMAKPTGKKKVKTDKLDAALIARCLAHHDYSPVHIPTDKDEQVKEYIRMRSDHKAALKKIKQQISAFCLRHNYRYEATKSHWTQAHLNWLRALKPEGLYEEILSEYLSTYDQLTDKLERIDKRIEELASGPDYQEKVSKLTCFLGIKTHTALTTMVEVGDFNRFPSAQKFAGYLGLVPGEDSSGDSRNGLSITKAGNSHVRMLLTEAAQSYTRGRSGCKSQALKARQYGNTAQVITYADKANERLRRKYYRMVLTQNKKPNVAKTAIARELSCFIWGMMTENMQ

SEQ ID NO: 306856 - protein, 350 aa, unidentified
MSSTILAIDLGKFNSVFCWFEPDSRAQSFRTATTTPENLRRELLRQPVARVVFEACSQAGWAHDLCEELKLPALVASTTGAAWQWKHLKRKTDRDDALKLARLAAVGEVEGVPVPPRALRQWKSLIGLRKRLVSERVRAQNRIRGLLVSQGLSAPMGAKAWTELGLAGIGQFARPLADCPPAELWRGELHLLLERLRFLDTQTREVEARLDTLAASDSRVSLLTTVPGVGPRTAEVIAVHLFDARRFRGADEVSASAGLVPRQYQSGETDRRGRITRRGPKLLRAALVECAWCSLRYNAWARDTWLRLQANGLSKKKAVVALARKLLVRCWAILRTGQPWRAPTPATAAV

SEQ ID NO: 306857 - protein, 336 aa, unidentified
MMNASEMIFVGIDVSKDSLELALDDKSKTQCFGNDEKGIAALLAAINAALLTGEDGADKPQRKVGAVVLEATGGFERQAAVVLCLAGLPVMVVNPRQAHDFAKAMGFLAKTDAIDARVLSHFAHTLYQSEKREQLLMCLPDPRQMALHALIARRRQLIEMRVTEDNRWLMSPKIQRKSIDAVRKVLNREIGKIDEEVAAQLKGHFADKLKLIENCKGIGAVTQACLMSALPELGSLSHEQIAKLVGVAPLNCDSGRHRGRRVTWGGRAEVRCALYMAVLSAVRYNPVIKTFYERLLVKGKPKKVALVACMHKLLTILNAILKSGKPWDDHFSSKVA

SEQ ID NO: 306858 - protein, 355 aa, unidentified
MERYIGMDVHAASCTLAVISQTGKRLKDFPVETNGQALVEAIRMIPGRKRLVFEEGLQSAWLYETLSPHVDEIVVAGITESRGPKSDKHDAYGLAEKLRVGDLGKTVFKAPRQFTRLRELSRIHMTLVGDVVRAQARIKSLYRSRGILVSGVNVYGVRPREGWQKQLCSSAQTRATRLYDHLDFLLEQKKQAEADLLREAKKHPIVRILETAPDFGPIRAARLVPIVVTPHRFRTKRQFWSYCGLGIVTRSSSDWVQTADGGWIKARVPQTRGLSRQHNRVLKSIFKGAATTVITQRNKDPIHARYQRLLDGGTKPTLAKLSLARMIAATVLRMWKDEEEYDPERADSFTETREG

SEQ ID NO: 306859 - protein, 413 aa, unidentified
MLFVGDDWAEAHHDVEIQDETGRRLVRRKLPEGVAGIGQLHALLAEHLGVDVGPEQVVVGIETDRGPWVQALLVAGYQVYAINPLSAARYRERHVTSGAKSDPGDAKVLADLVRTDRQHHRPIAGDSELAEAIKVVARAHQSLIWTRQRQTNALRSTLREFYPAALLAFEDLAGRDALAVLAKAPTPEQGKALRVTQIEAVLRAAGRQRNLRPTAEAISAALRTEQLTALPQVGAAFGASVAAHVAVTAELVRQIASLEASLAASFEQHPSAEILRSLPGLGVVLGARVLAEFGDDPHRYADARARKNYAGTAPITRASGKSRVVLARYARNRRLADALYLWSFSALNGSPGARALYDAQRARGATHHAALRALANRLVGILHGCLRHGTNYDEETAWPGLTVTANQEQQVAA

SEQ ID NO: 306860 - protein, 466 aa, unidentified
MRESYRRCCGIDVHKNSVSVCVLSPVGRVRGEIRRRKFRTYTRDLKQLRTWLKNCRVTDIAMESTGQYWRPLWNLLEGEFDKLVLVNPQHIKGLNGYKTDPKDAQWIADLLEGGKLRGSLVPARPIRELRDLTRNRVNVLDDVNRVKNRIEQLCQSGNIKVSSVATDLFGVSGRRMLKAIVEGLRDPGWMADYARGALRRKRNDLTLALEGTFTAEQRWLLNRELHQLEWLEQQVELLENEIERRLIPFAEVMARVSTIPGVDRTTAWTIVAEFGPDLSAFADASHLASWAGLCPGNHESGGKRLSGRTRKSNRYIKRAMCQAAWAASQTKNCFLAAFYRRMSIRKGANRAIVALAHHMVVVIYNLITRNEEYVEFGGDYYDRRNKPKVVSRLLQRLQKLGYEVDLREAPTPATPELALPPEAQLPAKKRRGRPCKCSDRAIPCRHQAFADPTSLIPQHPLPVEFS

SEQ ID NO: 306861 - protein, 321 aa, unidentified
MTIVMGLDQHRAQITAEWVDTVTGEVCRSRVAPAHRESVRRFLARFEDHELEVALEATTGWRFVVEELQRVGASVHLAEPAETAARRGRKKRAKTDRADARLLRELVMVGRLPESWIAPDHILDLRARVRLRHTLIDERGEWQQRIHAVLYHHGCPHHHGIGLLTAIGRQWLGGLELPATAREQVTVALQMIGAVDAQLAPMDKELRAYARRQPGCKALMGLYGIGHLTAVTILAELGDARRFSSSREAVRYSGLDITVYQSDQRRAPGHLSRQGPPALRWALYEAASLLTARAAPTASTSCRRPSDSAANVPAWRSRASF

SEQ ID NO: 306862 - protein, 325 aa, unidentified
MAHSFDVVGIDVSKQNLDLYVLAHRQLRTVANTAAGHTELVNWLKSLGVRVAVMEASGGYERTIARALQRAGFEVRVVDPKRVRHFARAAGRLAKNDRIDAQVIAEFGAVFADTERCEIPPDAKRDHLAGLVAARQALMDHQTGLRNQISAAPAGAARHALAATLKPIAGAIKKLDRLIATAIAEHPPFAALAAQLDTVPGLGPVVISALIAWLPELGRLDRRALAALVGIAPFDDDSGKRTGQRYIQGGRRKLRNIFYMAGMGGATQHNPVLNAYYRALIERGKLPKVAIVACMRKLLTILNAMVAQNKDWEPKLATALSAGTG

SEQ ID NO: 306863 - protein, 356 aa, unidentified
MSIVAHSHPFVVGVDTHARNHVYTVLTAHTGAVIDTKDFPTTTAGINRAIDWVARRTEADADALWVIEGAASYGAILTGTVASHGYPVAEAPRMDATQHRGVGKSDDLDAHRIAAAALPLPVDKVRRPRLNNGVRQAIRILVAARDAMTTDRTRAVNALTALLRSNDLGMDARKTLGKTQIVEVSKWRTRNEELSMSVARAEAVRLAKHATDLEEQLDNNESQLAELVAVSDAAPLLEEKGFAAISAAKCLVAWSHHGRVRTEAAFASLAGVNPIPASSGNTVRYRLNRGGDRALNSALHMVAVSKMGHDDETRAYVMKRQADGKTKKEILRCLKRYIARRVFRTLSAQKTFVHAA

SEQ ID NO: 306864 - protein, 354 aa, unidentified
MDLAKSMFQLAVANGAWQVTEQHRLTRTQMERWFANRAVGLVVMEACGSAHHWARWLNALGIEVKLLPAAYVRAYVKRNKTDAADACALLEAARCAEIVPVKVKSIEQQALQGLHRTRSLWMGTRTSRINALRGFCREFGIVIAQGSRTGVEQMSRVLADPASAVPLLIRGTMKLLIEEIRLLEARISQLERELATLARRSPACTTLLSIPGVGLLTATAMVAATSGQVQHFKDARHFASWFGLTPKEHSSGATRHLGRISKRGDRYLRMLLTHGARSVLRAASVATQAGKSLDPLRQWALQVQRRTNHNKAACALANKLARICYATLRDAQPYGSPTTRLGKKIGRTAYSLAT

SEQ ID NO: 306865 - protein, 366 aa, unidentified
MKYQEVLQMPESIPYLSVGLDVGADFSWMSIMLPNGSLAGKPFKILHSDPDSRNLAAAKIKEAQETYSLESRCFLESTGIYHIPLLCFLRDKGFDCSVINPIITKNTTNMNVRKLHNVIFDSKKAAKVGLDVSLKTSIIPEDAIVDLRNLVRDYYYFKDLQSSIVLKLNAELKVSFPAYLGVFSKITTQTSLKLLEDYPLASDMLNAPKDELVKIIRTTALFGEKYAMAKYNALCSAARDAAVFGRALPSNAVRIRLYIDSYREYQKHLDTILEALHESVDKLLGTAVYNRIRLLQSLRGAGFLSAVVLIAEMGSFDLFPSPKKLYAYFGLDPAVKQSGKFKGGQSAYVQERFQPRQAHPSHDSAQ

SEQ ID NO: 306866 - protein, 368 aa, unidentified
MNTVKFIGLDVHKKTITIAIADQGRQHKPRVYGAIANDLDALDKFCRKMVSTASRLYFVYEAGPCGYGIYRHLTAKGFDCMVAAPSLIPKKSGQRVKTDRRDAAKLASLHRAGELSAVYVPDPADEAMRDLSRARQDAVNATKKAKQRLKAFLLRNRIVYSGRSAWSKAYFRWLADITMAYPAQQVALQEYIDAVHEGIQRVERLTDQIRQLVLGWRLAPAVSALQAARGVSVVVAVTLLAELGDLSRFQKPSQLMAHLGLVPSEHSSGESTKRGGITKTGNRHARRVLVEAAWAYRLPARVSRVLLKRQQDVPEQVCRIAWKAQLRLCTRFRRLTARGKLRQKVVTATARELSAFLWAMAKQLQPAA

SEQ ID NO: 306867 - protein, 387 aa, unidentified
MNKSNRVIGLDVHPDSFAGAVLLKGKDAASARVVSTSRRVELPELEKWVARHTGEQDGLVLEASGNAFAVAERLRVLQRQVVILDSHRAGKVGKAYCANDRVDAIKIARIYLTALSPVVWQPDAKTRERREVFSAYQAVVKEATRLKQQLRSMLNEHCVRLESGFRLSHPSAINRLLKLREWTPVRAMLLEQLHRGLVSAQARRTRLRRYMAQEVLDEPELLRLTRLCGISLITLYGLSASIGDIKRFSNSRKLSAYFGLNPSVEQTGNWEGEGALKRHGRGALRALLVQSAKKLLRVNNPLQKWGLAVATRRGRNKAAVAVARKLCVAVWHVMQGHVIGAIERMTTLHTKLHKLATELGLNTIKSQGYETKEAFVQKKLFVLRSYA

SEQ ID NO: 306868 - protein, 354 aa, unidentified
MTVTIVEEARPVTCRTVTGGVDTHADTHVAAALDPVGGLLGVREFPATAAGYAGLLGWLGGFGTVCLVGIEGTGSYGAGLARHVTAAGIRVVEVDRSDRQDRRRQGKSDPLDAVSAARAAQSGRARGAPKGRDGAVEAIRTLMVARRSAAGERTRTINQARALLLTGPDDLRIRFAGHKPAALVTGLASLRPRTGDVAGHATRIALRELGRRAQFLDGQLGRLDELIVPLVTARAPGLLAVYGAGPRTVALLLIAAGDHPGRLRSEAAWAHLCGVAPIPASSGKVARHRLNPGGDRQANHALWRIVFTWLGSDPATRAYAERRTAEGKSKAEIIRCLKRYVAREVYRHICPAGG

SEQ ID NO: 306869 - protein, 416 aa, unidentified
MKTYILREPKTVEPQTPERPGRRPDPAVTVSVNAICGPAPATASGLILFIGLDVHTDSIAVSLAPSESTEVRRYGIIGGTHDDVLRLAKKLQAAHPGVRLKFCYEAGPHGYPLARCLQAHGYDCILVAPSKIPRQPGDRVKTNRRDADQLARLYRAGELTAIYVPDPQDEAVRDLIRARYQVLKQQHRARQQLKMFLLRHNFRYAGTKAWSAAHLRYLATVKLPFAEQQFVFQEMVNVITEAGERLARYEAQIPRVLPGWRWAPVVQALMSLRGVAWLTAATLVAELGDLHRFATARQLMGYLGLVPSEASTGAQRKQGGITKMGNGIARRALIEAAWNYRAPARLSRELLKRQEGLPKEVKDLSWAAQTRLHHRYQHLTRVKHKKATVAAAALGRELSGFVWALGRLVRPHAKKT

SEQ ID NO: 306870 - protein, 334 aa, unidentified
MNDVTTVGIDLAKNVFSLHGVDATGAVVLRKTVSRAKLSAVVAQLPPCLIGMEACSGAHEWARRFAQFGHTVKLMAAKFVAAYRKSGKNDGNDAEAICEAVSRPSMRFVPVKSREQQAQLCLHRVRSGFVEERTANLNRLRGLLAEFGHVLPLGANALRTQVPAVLEDLPALAGDAARDLLEHVRVLDARILGYERQIQAHVRSSQLAQRAQTLRGVGPLTASAMVASVGEAREFKNGRQFAAWLGLVPRQHSTGGKTRLGQITRSGDGYLRTLLVLGARAVLRRAPHERDPLSRWALALRERRGYHRACVAIAAKNARHVWAALAGRTPALSA

SEQ ID NO: 306871 - protein, 365 aa, unidentified
MCQRVIVADESHEGAVHMQISTLGIDIAKNVFQVHGVDAAEKVVLKKQLRRGQVLEFVGKLPPCLIGMEACATSHHWAREFRRLGHDVQLMPPGYVKAYVKRSKNDAADAAAICEAVRRPSMRFVPIKNAEQQAALMLHRTRDLLIRQRTQLINAMRAHLAELGFVAPKGREGLQQLLRTVAQAEDEQLPSDARLACETLAAQLQAVQHRIDTLEKRIHQAHRANPASRRLDAIPGFGVIVSSAVAATMTDPKAFKTGREFAAWIGLVPRQNSTGGKERLGSISKQGDRYLRRLLIVGALAVIKSARTRPDRYPWVVALLGRRPAKVVAVALANKMARIAWAVLVKGETYRAATHASSRALAAGV

SEQ ID NO: 306872 - protein, 475 aa, unidentified
MKKSQKNKSAEVLKLLSKQKIRNVKELDGYKLSICHPDSAGIDLGSRELYVALNPAIAAEMDLPIVHKFSTFTSGLYACRDLLVSCGVTTISMESTSVYWVNICDVLEASDIKVCLVNPKKFRMVPGRKTDVLDCQWLQTLHLYGLLSGSFHPESQIRKLRSYMRQREKLLQDRTRYVQRMQKALTLMNLMLVNVIDDITGKTGLDIIRAILQGERDPRRLATLRNSRVKKSEEEIAEALTGDYKEEQLFLLELNYNAYCFFGQQLEKIDSQITDLLKNFPLKQEVPLGDTSKPKKQIKKSSGKNALQTKENLNELLFNIAGVDLSSITGLQTNTILQIIAEVGTDMSKFPSAKHFASYLGFVPHNKITGGVIISSKTDRIKSNAAQAFKKVIPSISQGKSALACFYHRIASKAGTGKAVVAVCRKLAMLYYNVLTCGKDYVDIGQSVYKKKLEEKEKMLLVKLAKKHNMLFVQS

SEQ ID NO: 306873 - protein, 411 aa, unidentified
MDRIYDNCCGIDVHKKLIVACFRKGNEQEIREFGATTRQLLEMADWLKDGSCEMAAMESTASYWKPLYNILESSGLNAMVVNARHMKAVPGRKTDVRDAEWIADLLQHGLLQPSYIPDKEQRELRELVRYRKSLVGERTRELNRLQKMLEGANIKLSGTVSDINGKSARNILEYLLTGASVDGPKYDEMYEQKIIAHNLKATKEQIIDDLNGVMSPLQRRMMKELLAHLDELNIHIKNLNDEIDSFMKPEEKQASHAIQDVTGIGNTSAQAIISVIGTDMERFPTDRHISSWAGLCPGDNESARKRKPGKTRKGNSLLRTTLITCAHSAVKNKKSYFHAQFMRISSHRGKKRAYVAVAHSMLIAIYHILKDGVVFKDLGADYYNQFNKERKINAYLKKLKALGWEAPVVAA

SEQ ID NO: 306874 - protein, 430 aa, unidentified
MSAEEKSLELRVSVDVGYRRHSVAMGLSSGEVLEEFEIEHRPEGFHEFFSRIEKHRRKKNYPVAVAMEGYNGHARPLDSMVRERGYRLYNLNNLKFARFKEIFPGAAKSDRIDARKGLELFQLSDHLPLAKEVLQEVRSTAPENEVLKRLTRRRRRLVNERVRVVNNLQADLQAVCPGLLEITREASNQWFLNFLLSADTFHQLARLRRSTLLKIPSVGVKTAAIIEGWQKRAHFSQEVNWVGEMIQEDAKRCLELDEKIKRLETKIAEVARASKIAKLLRTIPGFGAVCSSELAGEIGTIERFSSEGSLSLYLGMSTLDNSSGKYRGTKAPKHVNTRAKAAMMIAVDRHRKYVPESQRYYEKKRSEGKKHNQAIRALGRHLSRIIYKMLKEDRPYELRLEKGNTTTKVSPRSRVKTQIRRPKISAKGKN

SEQ ID NO: 306875 - protein, 380 aa, unidentified
MKNVRFIGLDVHAETIAVAVAEAGGEVRSLGTIPNRPEPVARLIRKLGKPEQLRVCYEAGPTGYVLYWQLSELGVKCEVIAPTLVPMKAGDRVKTDRRDAEKLARCYRAADLTPVWVPDAAHEALRDLVRARLAAKRDQLRARNRLGKFLLRHGRRAPEGTTAWSTKHLTWVKRQSFEQAAQQATMVDYLHEVEHAAERILRLERSIDTAIETLPEKLRAVIEALQSLRGIAKVSAVSIMAEVGELSRFESARQLMGYSGAVSREHSSGERIRRGSISKTGNAHLRRIVIEAAWAYRHRPGLGAALLARQRDQSEDIKAIAWKAQHRLNTRYTKLLAKGKAKQQVVTAVGRELLGFIWAIGVAAERSHCDAPKRVLKRAA

SEQ ID NO: 306876 - protein, 370 aa, unidentified
MSIKRILVNTIDTDLEYEVIGIDLAKNCVSAILLTTDGEIFGIDRLDYQELEKSAQELSPTIFAMEPCTEMNYMVQKLEDWGHHCIVISGKNVKDYVESHFSNQKTDLNDAQALAFLTKDTQLRTVKAKDPEQLKYASLTTLREQYVKQYRQTMVSLKGICQVWGLSISKGISGKARLKDMIENHAAFPAELRTALVGMVAHAQAVQKDLKSVTKILEELAKKDKACQLIQTVPGLGTICSCRLRATVGDIKRFKHPKDFPAYYGLVPRSMATGHNEKKGKITHRGDKTMRSLMVQGAGIVINQATKGNLHSKQLTKWILKKQKEKMPWGKLVCAVAAKLLRIVRAILISGKPYNPKIAGVAKCSLPKAS

SEQ ID NO: 306877 - protein, 463 aa, unidentified
MERKGRRKDNPRRRSSLLEQVNRNAAGIDCGSAEHYVAVPVDRGPEPVRHFKTFTADLHRLADWLVSCHIETVAMESTGVYWIPVYEILVARGIEVLLVNARHLKNTPGRKSDVTDCEWLRELHSVGLLRGSFRPDEEIVTLRSYLRHRETLVQNAATAITRMQKALVQMNLQLHIVIRDIMGMTGLAIIRDIVNGQTDPGRLAKHRDAHCKASETDIAGALTGHYRPEHLFALKQNLEIFDSSQRQIEDCDAQIQACVTDLAEKVAPPVAPLPSRRSRRNRRSNEPRFEVRPMLHRLANTDLSELDGIGPHTALRLISEIGTDMSRWKTDRHFTSWLTLAPNNKISGGRLLSSKTQPSANRAAMILRMSAQSLARTQTALGAFYRRLAFRIGKAKAITATARKLAILVYHVLKGDFVYKDPGADVYDARHRDSAIRRLRQRAAALGLSLVNGQTGEILDGVS

SEQ ID NO: 306878 - protein, 319 aa, unidentified
MICGVDVSSSTLEARIGREGASGTFFNTPGGIAALGAFCHAQDADLVAMEATGGYERQALLQLSEQGLPVAILNPRAVRRFAESMGRLEKTDAIDASMIAWYAEVKQSLPLRLAPHTQQHLRALVTRLRQLTAIRTAQLNQQRLITEPVVQASFDELLAVVARQIRALEQQIATLIQADPLWCVLNQAFRSIKGVADRTVARLMAEMPEIGTLSNKTISKLAGVAPLARDSGKHQGKRAVRGGRAAVREILFIVASVVGRYEPDFIAFQQRLRIAGKPPKVIRIALAHKLLIRLNAKAREVRRQLANSSPLSVPMPANS

SEQ ID NO: 306879 - protein, 386 aa, unidentified
MKRNDLSRSLIAFDQATTLVAVVELSRGSWLAAGLVPHLTRQPLKKLRSDSDALLGLLLRWRDQAIKAGGRIKRTVLAFEAGRDGFWLARWARARGIEAYVIHPASIPVSREHRRAKTDRLDAGLLMRAVLGWLRGEPKHCNMAAIPTVAEEDARRPTRERETLVREQTRAVNRIKSTFFRFGIRSVKVKLRQASKHLEELRGPEGAPLPPNTMAELRRDLTRLQLIRGQIRQIERARLERLKRAPRQGTHPMMQMLARIMGIGIETADMLVHEVLSRKLRDQRGVARYGGLTGSPDESGSKRRERGLARAGNARVRRGMIQLAWRWLRFQNKTALAQWYRERTTGGKPGLRKAMIVALARKLLIALWRYVTTGKVPAGAVLRSAT

SEQ ID NO: 306880 - protein, 340 aa, unidentified
MRLIGCDLHASQQSIAMLDRDTGEIVEKTLTHEGGAVREFYASIPPPIVVGIEATGSMGWFLRLMEELAIECRVGHPTAIRKAETRRQKHDRRDAALLLQLLAEDRFPAIWMPSTEYRDLRSLLLHRHQWVRMRTRVQNALHAIVLAHGVRRGHTLWNREGQALLASLPLPPHTADRRSELQALYQHFEAHIDRLDEQVKHVADERPRATLLMTHPGVGPVTALATEGFVGDPARFLDGKALASYVGMIPREYSSGTRQRLGALSKQGNPFLRFLWCEAAAHAVRRDPDLQRFYRRKVVQKGFAKARVAAARKLGIRLWIMLRDQIDYAEFCRRGLARQS

SEQ ID NO: 306881 - protein, 356 aa, unidentified
MDSTKYIGMDVHKEATTIAVMNSAGKLVMESIVETKAATIVQFFEGLRGALYVTLEEGTWAAWLYDLLKPHVTKVVVCNPRKNALLKAGNKSDRIDARKLAELLRAGLLSAVYHGETGLRTLKELCRSYLAISKDLARTMNRIKALYRSWSIPCGGTSVYAPRHRKEWLSKITEPGVRRRAELFYQQLDGLQKLRQEARRDLLAESRKHGATEQLRRIPYIGPIRAALLIALMQTPHRFRTKRQLWAYSGLALETHSSAEYHYVQGQLQRSKRPVALRGLNQNHNHDLKSIFKGAANKAGSAKGPFHDFYTALVAKGMKPTMARLTLARKIAAITLIVWKKGVCFDAQQLKQQVSV

SEQ ID NO: 306882 - protein, 353 aa, unidentified
MAGILALDLGKCKSVSCFLRDGDKEGVFATHVTDPAVFHDLFVEVAPDAVVIEVGSVSGWVVDLCRAMGIKVSVANTNDDRWVWRNVKRKTDRDDARKLAVMCLEGKLPEVHVPVREVRQWRSLIEYRAALVRRRTAVRNTIHAIMLREGKSLKAVGGAAWTSKRGRALSELARPLAECSMDQLWRGMLDLELRALERIAALIDEAEEKLDALATQRRGVELLRTIPGVGPRLSEIMVAVIDDPHRFKNARQVGAYAGLVPRQYESGQSIRMGRITGRGNPLLRALLTEVSWLMKVHNAHFRDVFARVERGTKARRKIAAVATSRRLLVSCWAMLRDNTPWRAPLKQSVPAQA

SEQ ID NO: 306883 - protein, 334 aa, unidentified
MKTLFFIGIDISKKDLDFAVRDQQQHLFHLKVDNSRSGLEKFKKACSDNNIVLQHSLICCEHTGIYSQNILILSIEEDLSIWLESSLRIKRSLGLQRGKNDKIDAVRISEYAYRYADKAVIWQPERRAIVKLRQLVGLRRRLLTAKGTLKVPLHEVGLFQDKKLQNEMEKLNRKPIDALERQIAEVEKKINELIKKDDSLSHLFKIVTSVEGVGSVVFWEMIITTNEFKLFSCPRKFACYTGVVPFEHSSGTSIRGGTRVSHIANKKMKRLLHMAALAVISKQGELGDYYHRKVEKGKNKMSVINAVRNKIIHRVFACVRDNRKYEKNYTPTLA

SEQ ID NO: 306884 - protein, 371 aa, unidentified
MKKGSSCRQSPERVAKVFRLLGSIMIGMYLGHKQSYFVLDGQGEVIQEGSVGTSKKAMAKVFGSMGRCRIAIEVSTHSPWVSRLLQAFGHDVVVANPRQVKLISASSRKDDRLDAQTLARLARVDPQLLRPIQHRSAKAQGDLMVIRVRAALVEARTSLVNTARGLTKSLGERLPICGTDQMGVEQTELLPAKLQQVLEPLLQQVVSLTEEIKESDRRVEQIAREDYPETRLLQQVSGVGPLIALTFVLTLEDKARFQKSRDVGCYVGLRPRRSDSGESQPQLRITKEGDAYLRKMLVQGAHYILGYRGPDTDLRRWGLKIAARGGKRAKKAAVIAVARKLGILLHRLWVTSEVYEPLRNVTVQRARIAAA

SEQ ID NO: 306885 - protein, 345 aa, unidentified
MIYVGMDVHKKSTTFCAIDEGGQVIKRGKVASGDEGWHNALSQWEPYDVRVALETGCLTWWAVDSLSRRGVDPVVVDARSFKLVSQSRKKSDRYDAHALADGLRGGLADRCAVEVPDERTRRARSLMQARQQILKQLNMTINAAKGLLRSVGVEIKKSEWAKESGWEKLLNNPAVPIWMKPLLVTQREVWEFLEEQRQNMDAMVIEESARWPEARLLLEMPGFGPIVTLGILSGIGDITRFKRPSQLASYAGLTPSSRDSGGVQKRGGITRQGRSLMRYLVVQAAWVALRSRALTPVLRKWAKRLIVKRGRKVAVVALARRLMVLVHKILSNGEAYNPTYPSIAI

SEQ ID NO: 306886 - protein, 402 aa, unidentified
MNCVGIDVSKGKSTIAVMRPFGEVVVSPFEVCHTVNELSELARQLKSLDGETRVVMESTGNYHAPVAWLLHDAGFYVSVVNAMLGHDYGNNSLRRAKTDKKDAVKLANYGLDHWLTLPRYVPEEDTRLMLKTCYRQYQQYSKVQTMLKNNLISLLDTAFPDANRLFTSPPRADGSEKWVDFVATFWHCECVCGLSEKAFTAKYQKWCKKHGYNFSEDKALDIYASAFAHFGVMPKTDTAKLLVEQAISQLRATSAALAALKQKMQSLAASLPEYPVVMEMFGVGPTLGPQLMAEIGDVRRFHSKKALVAFAGIDAPPYQSGQIDVRSRSISKRGSASLRRTLFLVMGVLLQCAPMDEPVYQFMDKKRSEGKPYRVYMMASANKFLRIYYASVKAYLDSLEHD

SEQ ID NO: 306887 - protein, 386 aa, unidentified
MRQANDLSRSLAAFDQPTTLIAVIEMSQSSWLVAGIVPGLERHPLKKLAVDEGSLLRLLQRWRDQAIRAGCRIERITVAFEAGRDGFWLARWLRAHDIEGYVIHPTSVAVSREHRRAKTDRLDTELLKRAFLGWLRGEADHCNMAAIPTIEEEDGRRPHRERESLVAERTRIVNRMKGCLARLGIRGFKPTLQRAPKLLSTLRTPEGTPLPPNALAEMGRDLARLHFVEGQISEIETARLERLEQAPTEKSHAMVRLLARVIGVGIETADMLVREVLSRNLRDRRALARYAGLTGAPDESGSKRREKGLARAGNARVRRGMIQLAWRFLMFQKESALAQWYRSRTVDARQGTRKSLIVAMARKLLIELWRFVTTGETLLGVKMRPA

SEQ ID NO: 306888 - protein, 428 aa, unidentified
MSYKIAGIDVHKKVLAVVVSDVEIESEYQFERRMFNSNPEQLRSLAAWLVEQEAEEVVMESTAQYWKPVWGALERYWKPLCEKREGARRKSGTLHLAQAQSNRGRRGRKRDFVDAERLVKRLVARELTLSFVPDAEQRLWRTVTRKKYQLRRDRVRLQNQLEALLEEAHIKLSSLVSDLLGVSARRMLKALAEGETNPAALAVLAHERLRATPEQLCDALGACTDLKPVYRQLLKMALEQLQLLEQQIGQLDQELATLLHPHQDAVQRLAEVPGLGVDSAQQIIAEVGPTAATFPSGEQLSSWVGACPGDEESAGVNYSHRSPKGNRHMRRLLNQAANAAVKVKGSIFEIIYRRCVPRLGHNQAIGLIAHRQCRLIWLILHKGTLYEERGPAVTKRSKYQRTWRMIRQLQQLGYRIESPNPQANQAQA

SEQ ID NO: 306889 - protein, 342 aa, unidentified
MVYVGLDVSGKSLVGYAVNERKRCVYKGEQPASRVGLRALVRQIGVGPKLVVFEAGNQMKWIADTLKTLDGVQVHVVHPNEVKWITESRGKTDRVDAKKLAELARADLLPRAVHIVEGPVRELRELVSARQQLQRKRVALITTIRGYVYQEGHRLPEKFFAGVAWREKLTRVSVSAPLRLIVQTFMTSIEALVVAEQQLTKRLRTIADPRCDLVETVPALGPLASRVVLSAVDEVQRFDDQKAVANYGALAPTIYQSGAVRHLGRINRDGRQEVRRVLLQCAHTVVRMKSAGAKPLQQFYARIATRRGKKIAVVALARKLLTTAYGVLKSGTPYDPRKLQPA

SEQ ID NO: 306890 - protein, 351 aa, unidentified
MESQITALPKLYIGIDIHKRNWKVHCATDLFAGKSFSMSSDPEQLRTYVSKHFPDYAVTTAYEAGCCGYYAHRCFEGYGWRSLVVNPADIHRKGKERHTKTDKIDAQLIARELKDGRLDSIIIPDKKREELRSLFRRRNDLVKDFRRVKSYIKMQLLYFGIKEPAEFDNDHWSHKYRTWLDDMVFTHPTAKATLDSRMRFFRFVDQELRDVSTQLRRYCKTNYKKDYLLLRSIPGIGGIVACGILCELGDLRRFNNIKHLAGYVGLAPSMYQSGANQRTMGMTPRANRLLRSYFVEASWQAIRADPVMQAYYRKHQGKNVKSIIIKVARKLLSRTLAVIKTGVPYTIGVVE

SEQ ID NO: 306891 - protein, 344 aa, unidentified
MKILALDLGMNKSVACVLDTDSHAYAFETFRTEPRKLRELMLAVQPNQVVFEVCSISGWVRDLCEELGCRYDVANPSHEAWRWRHVKRKSDRIDALKLARLAAMNQLPTVHVPTREVRQWRALVVYRHTLVRRRTRVKNHIRSLLLTHGLRLPPGQGGWTKAAIAEIHDHVASEEPGALWKVTLRVELDQFEAVSRAIERVEQELDAIAIRRPRVALVQTIPGVGPRLAELIVSVIDDPHRFRTGRQVGSYAGLTPRQYQSGESNRRGRISRQGNPLLRAMLVEVSWVSLRYNPVIRAVYERTCRGSRARRKIAIVAVARRLLVWAWAMLRDNTPWRPPQPALT

SEQ ID NO: 306892 - protein, 456 aa, unidentified
MRGVPEEIPDADSEQVLQRVCAIDVAKASGVVCIRLPGQNGRRFSRVWQVAATTNAVSDLADDLVAAQVQKVTVESTSDYWRIWFYLLEAAGLDVRLVNARDVKNVPGRAKTDKLDAVWLAKLTEKGLLRPSFVPPVPIRVLRDYTRMRVDLVRDRARYWSRLEKLLEDALIKVSSVASTLRTVSTRDMVEALIAGQRDPKALAELARGAMRGKHHALVEALTGRFDAHHGELARILLDQIDRLDAEIASLTTRIGQLLDEIDPPTAPNPGDTGGRGGEGGGGGGGGGGGGGVLHARARLAEIPGINTESAQLIIAEIGLDMTRFPTPGHLVSWAKLCPRTIQSGTSHTSAKTGKGNPYLKGALGMAAATAARGKHTFLSERYRRIIKRRGKGRALVAVARSQLVIIWHLLADPTARYHDLGADFHDRRINTTRKINSLVRQLEALGHTVTLQPHT

SEQ ID NO: 306893 - protein, 389 aa, unidentified
MKVYMFFIGVDIGKNHHEATVLDSVGKPVGNSIRFNNDEEGFRQLWETIPAQPRQFAMEGTGHYWLNLYTFLVSKEEKVLVINPIQTEAFRRGQIRRTKTDRRDSWVIAELLRTNAVHASYVPEQRVQQIRDLTRFRFGLVDQVSDLKRQLLAVLDRVFPEFEKLFSDPFIRSARELLRTVPLPEEIVNFDLSELSTLLAEASRGRFKDTKAQEIKKVAGCSVGTRFSQDAARLQIRCLLEHIEFLEVQIADIEAQLEELVQNQDQYLCTIPGISTTTAAVLLGEIGDINRFEKVEQLAAYAGIDPTTVQSGEFTGTKNHMSKRGSPYLRRALWLAATPARKNDPGLQAFYEKKLAEGKHPSTVTGAICRRLLNRVFVILKEQRPYEKL

SEQ ID NO: 306894 - protein, 349 aa, unidentified
MGLVIGLDASMKTCVYVAKDEAWETVDRGTLPATPADLAVLADRFPGATVVVESSSVTEWIVDRLTALGMEVFPAHPENVRRAQGKKNDAVDAGFLADAYRLGALRRSYVPPKEIRALRQLARRAAFLTKERTRFKNRVQAILKRRGIRLMDAEAEDDVPSVFAARHRDRLLAVDDPEIPVLLDLIDAVNAKRDALDAELLAAAESDPDARNLRTIPGFGPLTAVCVRAEVGDVSRFPTADSLAAYFGLVPVESQSGETLVRGHITRRGPAHVRWLLNQAAWQHVRHCPRGSIARAHRRTSRRAGRKRAITGTSRRLAKVCHCLLRERRPFHDERPRGSLGSVLRDGTA

SEQ ID NO: 306895 - protein, 446 aa, unidentified
MTNNSIQTNSSGAAQPTVPGPIVCWVGLDWADKKHCLVVRSSPTGPAKTYRVEQKPEQLDEVFLELRAQHPQGRIAVAIEQSRGPVLYALMKYDFLALYPVNPRTLADYRRAFKLSGAKDDPLDGDLLCELVCQHADRLRPLAVEDRATRQLRLLTEARRDFVDERTGLSNRLGANLKCYYPLALELVGEDLTSPMAMELLRRWPNLAKLQAAKPGTVRAFFYAHNSRSEDKIAARLEAIQRAHPLTEDPALLEPLQLQTQRLVTHLRAVQQTIAQYDEKIRQVFATHSQAWLFAPLPGAGPVLAPRLAAVFGTIPANFQAALDLLCFSGVAPVRKQSGAQERVHFRYARPIFLHQSIVEFAKCSIAKCDWARLLYEHELKEGKSKWMAIRKLAFKWIRILWRCWQAGQPYDETRYLRSLQRDGVQLYRSLYQALPPLQTPAVNNS

SEQ ID NO: 306896 - protein, 424 aa, unidentified
MGVLEQAADDEQIIARVAALDIGKAEVMCCVRMPGNAPAGRRRQEVQAYSTMTRSLLVMAERLRELRVTRVVMEATSDYWKPVFYLLEAHGFDPWLVNAKDVKHLPGRPKTDKLDAVWLCKVAERQMIRPSFIPPPPIRQLRDLTRYRVNLVSARTAEKNRAEKLLEDAQIKLSVVASDIFGVSGRDMMTALIAGERDPSVLAQLARVRLRAKMSQLEEAFHGHFTDHHAFLLAKMLARVDAITADIAEIDERIEAHLRPFADAVTRLQQIPGIGPVAAAVIIAEIGTDMSRFPTAGHLASWARFTPTVKQSAGRNKGNGSTGRGNPYLGRILGEAVVAAGHTSTFLGQRYRRLARRRGKQKAIVAVGRSILIVTWHLLSNPSTQFADLGPAFYDSRIQPDRKKREHIRQLEALGYKVTLEPAA

SEQ ID NO: 306897 - protein, 425 aa, unidentified
MSEKIVVGIDVSKAFSDICILSPNNDIIKSMKISNDVIGMNLIISVLEKVEDEYEDRAVVIMEATAHYHQILANFFRKHNYEVIVINPIQSGALKNINIRKIKSDKTDAYNIALLYRIKNYNETITHSDTVNSIKKLCRQHKELTDEIVEHINRLIAFLDISFPDYKKVFPDLQGKTPLSLLEKYPTVQDVLSPENKQDMIQLIKENSHKSYSYAEAKYEKLLQAAEKSIEVCIVNLSSAVLIQTTVSVIFSLQEALKAINDEIKRLSLLDEKFHKEIVLLQSIPGVGEYTACVVLSELGDVSNFSKPKELVAFFGLDPGVSQSGTYNRKNNKISKRGSPHVRLILHMLAKSNVYPNRNREYLNPVMRAYFEKKIAEKPYKIVMCAIMRKMVQIIFAVLRNQKPFELRTPEEHQKLIRENSKSAA

SEQ ID NO: 306898 - protein, 337 aa, unidentified
MQGWAADDMFQRPESYMETPRFVGIDVAKGELVVAALPGEEERWTAENDEQGIRTLVERLKRERVALIVIEATGGYELRAVSALANASLPVVVVNPRQVRDFARSTGQLAKTDRIDARMLALFGERVRPEVRVLADEDQQALDQLLTRRRQLIEMLSAERNRLGQALGSKTKLVKKSLKSHISYLERELRVSDTELAGMIRSSALWRERDDLLQSVPGVGRVVSLTLLAELPELGRLNRKEIAKLVGVAPLARDSGTMRGKRMIYGGRASVRAALYMGTLVATKYNPVIRALYQRLLRAGKAKKLALVACMRKLLTILNAMAKNNERWRADTTLTTA

SEQ ID NO: 306899 - protein, 337 aa, unidentified
MIVIGADTHKRTHALAAVDEGTGRVRGHRQIKAEEPGHLAAVRWARGLDDERVWAIEDCRHVSRRLEQALIAAGERVVRVPPHRMGASRRGEREPGKSDQIDALAIARAVVKDGRWHLLELCPELERSLGRGSLEQPRQLDRIDRRLRRMSVSARVRVAREQVAQLRVLSRQADALERELLVLIKAHRPQLLAEIGCGALTAALLIGRTAGAERFRSDASFARQAGTAPIPCSSGQRDRHRLDRGGDRQLNHALHIIAITRARHDPATKAYLARKQAEGKTKKGALRCLKRHLARRFHYLLSLAAQTPRNVAEFPAQPQRDATTNTGAAPTPMPCLT

SEQ ID NO: 306900 - protein, 364 aa, unidentified
MKDYTTKAGMDVHARSITICAAVAETGEGFRATLNEPEPSDVASWLLALPQPVYCAYESGCTGFRLARELRAAGIDCDVIAVSTLPLSAKDRQQKCDKLDAAAILAAISNPQSRHTVVWVPDEATEAGRNLARLRERAAGDLRRMKQELSAFLLTHGMVWNEKTKSGRLRKAYTRAWWEWAGSLEFAEAADRAAFRRYVERVRWAEGELAAIERDIAEQAAGPENKPYVDALTLVNGIDAGAAYLIRVEFGDFERFPGGRKVTAWVGAVPRNGSSGPRDKHGPITRAGNGYLRRRAVEAVGTVASWRRVRKAPREGAAPSAECARMALDANARVAGRYRRLACDSGKHANKAKMAAAAELVRWA

SEQ ID NO: 306901 - protein, 319 aa, unidentified
MAQNDLVVVGIDVAKEKVDVCVRAFALRQTFPSTAPGHRKLVGWLRKHQVSKAVMEASGGYEREWRKVLHNAGIEVRIVDPKRVRSFALSAGRLAKNDAIDAEMIAWFAETFSEAPSRTHDPAHEELLALVKARIALVELKTRLQNQNEHAASGPVQKAHARILKSLAAEIAKLEAAISAKVKATQDFAKRAEIIESVPGFAETTSATLLAGMPELGQVSDEIAAALIGVAPFDDDSGKRRGERHIKGGRRWVRNAIYMPCLGAATQHNPVLKAFYQRLIAKGKEPKVALTACMRKLIVILNTMIARRQKWDPTRYVVA

SEQ ID NO: 306902 - protein, 482 aa, unidentified
MKPSQQKQFQKTSCHRAQVGWQGMNRKQRREMTRKIQAADLSLEVVHPDAAGIDIGNEAHYVAVPPTRDDEPVRRFGCTTAELRDMAGWLKQCRIRTVAMQSTGVYWIAVYDILEAAGLEVYLVNARETKNLPGRKSDVQESQWLMKLHTYGLLRNSFRPPQEIRTMRTYWRQRNDWIRSAGRHIQRVQKALTQMNIQLANVLSEVSGVTGQAIIKAILAGERDPHELARFRDRRVKASADEIARSLEGNWQEDLLFLLQQEQESYEFCQKQMSECDERLQHFLQQREDRSRGASLPEEKRKERLKKKKTNKPRFDLRAELFRMTGTDLTQIDGIDVRTAATVISEAGWDMSKWRTEDHFVSWLRLCPDNRVSGDKIIGKGRLPTTNRLTVALRIAATTLRPSRTYLGAQFRRLKARLGAPIAIKAMAAKLARLVYRMLRYGMQFVDQGAEFYEARHRQREINSLKRKATNLGFQIMEAPAA

SEQ ID NO: 306903 - protein, 321 aa, unidentified
MNYVGIDVSKATFVVAYSSAKGSGTKTFENTTKGVHKFIQTITPEDTHCVMEATGNYSMLLVYLLSKAGITVSMENPLKIKNFARVMLSVVKTDEIDARMIAMYGEKMNPAPFKLRSDSLMVLKQKRTVLRQLKKQLNANTNLQEAMEALPFIDSVCKKILDKTVKFLREQIKEMEEELSSLANIEYKKQMDLLTSIKGIGVTLATALIVATGGFTYFDNAKQLTRYLGLSPTYQQSGTSVNLKGHINRNGDSYLRSQLYVAAFSSLRCNTECKACFDRLRANGKPGKVAVVAVANKLVRQAFAVVTQGKEYVDGFISAKK

SEQ ID NO: 306904 - protein, 313 aa, unidentified
MAMLVSEITLGIDVSKDELVICVWETGEITHLVNDQASIQSWLDAQHGTLRVAIEPTSSYHLAFVEQAHAMRLSVYPVNPRQLAHYREAINVRNKTDPQDAWLLARYLAHEAASLRPIRPLSARAQQLWSLLKRRAVLVEARKQLDQSLRDISLPRKALFSEIRRVINRIDQRMKKLLKQLGWQDDYRRCLTIPGIGVLNAIALVSVFHRGTFATADAFVAFIGFDVRLRESGRFKGQRKLTKRGEAEVRRLLWCAAQPARSYRPFDRYYQQQLEKGLSKIAAKVILARKITRIAFALLSKQQSFKKQEIAYS

SEQ ID NO: 306905 - protein, 444 aa, unidentified
MCGLGGASMANEGRPIAMRFCAVLAQNASARSPQEITQRRRITAVNGPSLLELAALGKVAKVAADRSKLRWLRALDLMGWMAPLRHQSAKMVVVEDHQEREPSMSEITTIGLDLAKNVFQVHGVDETGAVAVRKRLRRSQVLAFFASLPRCLVGMEACATAHHWARELIAVGHEVRLMPPQYVKAYVKRNKNDLADAEAICEAVKRPSMRFVPVKTVEQQSALMMHRARDLLIRQRTMLVNALRGHLAELGLIQAQGLHRVAGLTAIVKDDTDERVPAMARQVLKVIAGQIGEIQGRIAALEAEILTWHKSNPVSQRLATIPGIGPIIATAIAATVPDPSMFHSGREFAAWLGLVPRQNSTGGKARLGGISKRGDGYLRRLLVSGAHAVLLRRSITAQADPWLISLLCRKPRLVAAVAVANKTARVAWAIMNRGDTYRRAAAAA

SEQ ID NO: 306906 - protein, 434 aa, unidentified
MEEITDEPLYRDRVCGIDIGKAGLVATIRVPSDANPARRAAETRSFGTTRREVLALADWLRCWQVPAVVMESTGDYWKGPFYRLEAEGLECVLADAKQVKHLPGRPKRDPSDSRWLAACFERGAVTACFVATEEFRVIRLHTRYRRDLTEERTREKQRAEKLLESAAIKLSSVVTDLHGVTGRDIMDHLIAGETSPKVLAQLARARARRKIAELEAALEGAEFFTPAHAALLATMLDRIDHLHAEIARLTEMIEHLLAPHEEQLAQAESMPGWGRRSAQDALAETGPDMSRFPTPAHLASWAGRTPLDNSSGKRKGKAKSKKGNRYLAAVTGETAVAAGKTQTREGARYRRLARRRGKAKAQVALGNTQLKVYHALLSHPGTRYQDLGPDYYERQAGTRRQIAHHVGKLAALGFEVTLARLPEPDPTGPDNQAA

SEQ ID NO: 306907 - protein, 307 aa, unidentified
MQFYIERHRHTCGVDLHGRNLYLCVLDPDRRIVLHRRVDCDEKKLLRALAPYRKDLVIGVECMFKWYWLADFCDEHGIPFVLGHALEMRAVHGRKSGNDRLDAERIARLLGSGMFPLAYVYPKQMRSTRDVMRRRSFMVNQRSALINHIQVTNLQYNLPELGKISKPDNREGIVARFEDPAVRASVEADLAVIDIFDVVIARLERIIIRAARGHDHHAFALLKSVHGIGDIIGLTLLYEIHEIQRFSSPGGFLSYCRLIKCEKTSNGKKKGTGKRKQGNHHLKWAFSEAAALFLRANPAGQKLHSRW

SEQ ID NO: 306908 - protein, 356 aa, unidentified
MSEKLNSKIAVIGIDIGKNSFHIVGQDRRGALVLRQKWSRGQVEARLANLPPCLIGMEACTGAHHLSRKLQALGHDARLMPAKYVRPYCKGDKNDYRDAEAIAEAVQRPTMKFVATKTADQLDLQALHRVRERLVSQRTGIINQIRAFLLERGIAVRQGLRFLRAELPDILAKRTDVLSPRMLRIVEDLSRDWRRLDERIEGLSSEIEALARQDQGCARLMSVPGIGPLISTAIVAAIGTGDPFSKGRDFGAWLGLVPKQMSTGDRTILGNISRRNNRYLCTLFVQAAWVVLIKVGPKQWERYGLKSWIEAAKKRLHHNVLAIALANKLARIAWAVLHNGRAFEYVKTNATVSRFA

SEQ ID NO: 306909 - protein, 315 aa, unidentified
MKSISGLDVHADTIVVAVAEAGGEVRSLGVIPNRLESIRKMIGKLAPMKTLKCCYEAGGTGYVLYWQLTQLGVACEVIAPSLIPTKAGDRVKTDRRDAEKLARCYRAGELTPVWVPDANHEALRDLVRAREAAKKDQLRHRHRLGKFLLRHGKRPSDAGKAWTQKYLNWIRIHVHFEQPALEATLKHYREEVDHIAERIAKLEQAIDEAVKQASPEMRAVIEALQALRGVAQTTAATVVAELGSLSRFARPSQLMGYSGLVSSEYTTGNRVQRGAIIDRPIFRHFSVVMRSSCSATAKSRLSRRRSLCWILGSSR

SEQ ID NO: 306910 - protein, 420 aa, unidentified
MAPLSNQQFKAFVGLDWADTKHDICLQQAGDDRREFDCIPHQVTRIDEWAKALHQRFGGPIAIALELARGPIVSVLQKHAFFTLFPINPAMLAKYREAFKPSRAKDDPTDAELALDLLLRHPERFSPLRPQSAGMRSLLSLIEQRRELVGDKTRFTNRLTNALKQYYPQALEWFDDIDTVLFCDFLTRWPTLPAVRRATRKTLETFFHAHNCRRAQLIEGRLESIRCAVSLTDDPGIVAPHRLLALMLVAQLRTALAAIDVFDKEIASVARTLPDFDLFDSLPGAGPHLTPRLLAAFGEQRERFKGADELQKYSGIAPVTERSGKKCWVHWRWQCPKFLRQTFVEWAGQTINKSFWAGAYYRQQRAKGSSYQAAVRALAFKWIRIIYRCWQTGTRYDESIYLNALRKRGSPLLGNLGLPG

SEQ ID NO: 306911 - protein, 372 aa, unidentified
MTSIIYVGMDVHTTNYTLCCYSMEDDRFFAEVQVEPDAKNILKYLARIEKQQSRDCRIVCGYEAGCLGYSLYHQLHAHGIDCVILAPTTMMTKPGKRIKTDRRDARLISKCLAFHTYSPVYIPTEVDDAVKEYIRMRDDANSALARVKQQIVAFCIRHGKIHDGKSYWTNKHLEWLSSLDLGNKILSEVLQEYLIRYYQLREQVDMYDMRINELAQAEPYRQKVEKLGCFRGIAAHTALSFCVEVGDFRRFATAQQFASYLGLVPGECSSGDKQQYTGITKAGNSHLRKLLVETAQVFGRSATKSGKSVALKERQAKCDSLTVAYADKANARLKKKYFKIAMRSKVNIAKTAVAREMACFIWGMMTDNISCA

SEQ ID NO: 306912 - protein, 423 aa, unidentified
MRSIGIDIHRDFMEVAIAEEGQLRGCPRVAMDPETLQLFAESLGAEDQVALEVSGNAWEVVRIIRPHVGRVVAASPTDTGMRQARAKTDRLDARALARLLASGQLETVWVPDEATQAMRRRLRRRTQLVVTKSRAKNEVHAALMRRLVPKPGFSDLFGVAGRRWLSELELPAAERESVDSALRQIAFCEAEIAAIEKVVATEALASAEIRRLMSVPGVGVITAAAFMAAVGDIRRFPSAKKLVGYLGLDPIVRQSGSSEASYGRISKQGSAAGRYALVEASWSVVKAPGPLHAFYERTKGRRGASVAIVATARKLACLFWTLLTRGEDYAYGQPSLGQRKLRQLELRAGAPRRSGGGAGVWKANAAVRDAERKVVEQAEAAYRRNVAEFKRVEALRAKQRKEAEKAQAQQREEGAGATSGRAS

SEQ ID NO: 306913 - protein, 443 aa, unidentified
MSELAVLDPRAAFVDVGSEKMHVSIAGGPPALFGTVTSQLHALRDYLAEHQVRSVAMEATGVYWLPLYGVLEAAGMEVVMVDGRQTRNLPGRKTDMKDCQWGATLHAHGLLRAGFVPPANIRRLQDYLRLRGDHIAAAAGHVQHMQKALERMNIKLHEVISSLTGASGLTVIRAILAGERDPQVLLGLCDIRIRNVKAERVVESLRGDWAEEHLFALAQAVQSWDHYQGLTAACDRQIAVVLRQMPDAKVPPSAASTKTGKPRTRPGVNAPDIADLREILAQICGAKDLTTLPAHSEYSVLQLIGEVGTDLTKWRTEKHFTSWLGLAPGSAQSGKRKASVKRRRNRAGQIFCVMARALARSKYVALGGFYRRMAARRGGLVANKALARKLATLFWRVMVKGLDFVETGVAQYEAKVLETKHRILHRLARQLGQKLVPNPAAVV

SEQ ID NO: 306914 - protein, 476 aa, unidentified
MDDAEQILERVAAIDVAKASGKVCVRVPHDTKEGRRVTRVFDVVATVPAVEGLADHLVCQGIERVVLESTSDYWRVFYYLLEERGLEVWLVNARDVKNVPGRPKTDKLDAVWLAKLNERSMLRRSFVPPVDIRRMRDVTRMRVDLVADRTRAKQRGEKVLEGALIKLSSVVSDLFGVAGRRILDALVAGERDPRRLAALGTGLKASPEALTAALTGRFSDHDAFLLKIYLDQVDALDQQIATLSARVEQMTAAMLLPARQSGTVEPAGATVVDGVPGTVSTVTGEIIPPAADAPADATPPPTDRPPVPRTVADLVDLLDQVPGIGRDSAQLILAEIGMDMSPFPTSGHLASWAKLTSRTIQTGASLRMGRTGRGNRYVRRTLGTAAVSAGRTNTFLGVRHRRLRARRGGLKALVATSRAILEIIWRMVHDQVPFRELGADHHTRQPDPERRKHALVRQMKNLGVSPEEAASMLAAA

SEQ ID NO: 306915 - protein, 467 aa, unidentified
MGHDRSRSRQTSGKKVKHPSLLERINLDAAGIDCGSETHYVAVPPERDPESVRSFKTFTADLRRLADWLEACGIKTVAMESTGVYWIPIFEILEDRGLEVVLVNSRHIKNVPGRKSDVLDCQWIQELHSVGLLRGSFRPTAEIASLRAYLRHREKLVQGAASHIQRMQKILVQMNLQLHNVISDITGVTGMRILRDIVAGVTDPTALAAHRDYRCRASEEEIVASLTGSYRPEHLFMLRQHLELFDTFQRQIQACDGEIESRLHQLAAKQSKPTTVPSPRCKPRFSDNEPRFEIRDPLYRLAGADLTQIDAIGPYTALKLIAEIGTDMNRWPTHKHFTSWLTLAPRNKISGARLISSRTQPSANRAAAILRMCAMVVGRTSTALGAYYRRIAYRIGKPKAITATARKLAVLVYAVLKGDVHYNDPGAQAYEEDHRARTLRNLRNRARTLGLGLVRLETGEVLDTSVS

SEQ ID NO: 306916 - protein, 418 aa, unidentified
MEDENNWFVGVDWASQTHHVRLSDAKGAKIGERTFAHGGEGLKEMADWILKSTGAAPEAVMVAIEVPHGPVVESLMERGFQVYAINPKQLDRFRDRFSPTGAKDDSRDAEALADALRTDRRCFRLLAPLDPVVVELREWSRIADDLRVERNRLSNRVRELLWRYYPQFLELSDDFAADWFLDLWRLLPTPDKAKRVRETTVERLLKRHRIRRITAAEALERLKAPSIPVAAGTVSAATGHLEAVARRLALVNRQISEANCKIDRLTARLAGGEERAEGQREEQRDVTILRSLPGVGRIVLATLLAEAQDALHRRDYHALRCLSGVAPITKRSGKSKIVLMRQAAHVRLRNAVYHWARTAVQHDPRSRAKYAALRARGHGHGRALRSVADRLLAVACAMLESRTLFIASHSTKISSPSA

SEQ ID NO: 306917 - protein, 311 aa, unidentified
MIQTICGVDVSQAWLDAWMEEAGCERFANSPEGVAALADWVGAQGGALIVMESSGGVEQPAYLELWRHGCPCALANPKSVRRFAQAMGRLEKTDRIDACIIAGFAAARRLQPTLPPSAGQQRLTALATRLRQVGSDLGVHKQRLASTRDPEARASLKEAIAFFTGQASALTQKIKAAVEADPLWQALDRSFRSVKGVADKTVATLLADLPEIGTLSNRAVAKLAGLAPIANDSGKRHGPRSIRGGRTAVRTILFLVADIARKYDPSLGEFRNRLLEQGKPKMVVRVALARKLLVRLNAKARETRQALAYGS

SEQ ID NO: 306918 - protein, 372 aa, unidentified
MTITSMPDPAAADTAAATPDEVVLGVDTHRDRHTAAVVSMSGALLACEEFAATAAGYRAMLAWARRHGQLRRAGVECTGSYGAALSRMLQAEDIAVFDVNQPDKRARRTRGKTDKVDAEAAARAVLSGRATVTAKTGDGQVEAMRLLKTVRDSAVNARTKAINQLKAILVSADPALRESLSGLGPATLIRRCAQLPDPAEDASTAHLAAVCALRMLAERIQRLKAETYDLEKRIEALIADTAPKLLVRRGVGPDSAAALLVAAGDNPERIRGEASYAALCGTSPVEASSGNTQRRRLNRGGDRQANAALHRVVISRLRWDPRTRNYLQRRLAEGKTRREAIRCLKRYVARELFAVIRAAQPPTDAADAAAAA

SEQ ID NO: 306919 - protein, 366 aa, unidentified
MEKKIAYVGIDYHLNSLSIAVMVEGEKDLYQTIRIRNEDKVILKYMKKLAKDFEIMACYEASCNGYSFQRKMLQWGYHCDVIAPSLVPKKKGDRRKNDFRDARNLAQSYAHGMLTVVHPPTEYEESVRSLIRCRLAFKEDEKRVKLRINSLLLSQGLDWPKKKWTHQHRMWLAKLRFDNPQLQQVLDEYLEHLQYLQIRIKNLDSQIEQIAHSDIYASSVKRLRAFKGIGTLAAMILIAEITDFRRFPNPRALMAFLGLIPSEDSSGDRQKGGSITKAGNRRCRTQLVESVQHYVRKPVIGPQMRQDLAEVDAKSANIARKCMQRLHKRYWALIMKGKARQVAITAIAREFVGFIWAMMQPEPVAN

SEQ ID NO: 306920 - protein, 285 aa, unidentified
MNKYKETFGVDISKDVFDVHGSKTGHHQYKNDEPGFKKFLKRLPDDCLVAMEATGYYHYRLAQFLYKNAVVVSVINPLSIKRFIQMKLAKVKTDKSDSKAICEYALINEVPIYSALTDLQSECLQLFRLLDVYIKQRTAIKNKMHGEQTLGIPSNFVYRSLRRHRKWLDKEIKSIEEKLLSLVKEDQQQQLSLLKSVPGIGPKTALFLIVITDGFSKFETASQLCSYAGITPTIRESGSSVRGRARISKVGNRKLRNLLFLCSFNACKHNKACRELYERIVVISE

SEQ ID NO: 306921 - protein, 482 aa, unidentified
MKKRTIYQNQSQELLHLFEAAGSSAKVLCVPMDYAKKDHLVMFCNGHGNILRKPFSVKNSPDGIEHLVDQVTRSCRRRGIKKKHVFFGGEDANSFAENFVSTLRCQGWLVAGVNAHDAKKQRANLQASTDRIDLMGIATMLLNCRANCCPAQSGIYRNLRTLVRHRRKLVAMLTEVKNRVHGIVDRLFPGFLNESKCGIVPFTQSSLYLMENRFSPKQVRRRKREKLIEILKRFGTSKAEETAFKLQQYASQVLHTPVEYVDTLQLSLAQHVKHIRCLQECVAQLEKEIAVSLAQTQGAFLTSFRGIGIVLAAGVTAEIGDPNEQKPLNNLVSYSGIIPRVKQTGGTDGKTYTGKVAKRCNRILKDYVVQSAHHMGLHGPEDLMTDHKRRDASGQHADFGIGRRYLRTGMRLMRTSQIYLPPWLRKADATLEERAGYYLMIWPKLREKWVKFGALEVAFAKDRPLGLWRQMVQELYDIKLKL

SEQ ID NO: 306922 - protein, 408 aa, unidentified
MEVRYPRCAGLAVHKKTVVAAVRIAEGRQVRPEVRRFATTTTALLALGDWLAAEEVTHVAMEATGVSWKPVWHVLEDAVELVLANAAHIRQVPGRKSDVPDAQWIAELLAHGVIRGSFGPPAPVQELRDLPRTRKQLGRELTQHNLRIQRVLEDATIKLGSVISEVLGVSGRAILDALVAGETDPGRLAAAAKGRLKCAPEDLVEARRGRVTVPHRFRVGQPLQLGASLRARMAAFDAESERRREPFPPAVERLTTIPGVSEGAAQAIVAELGVDMTRFPTVSQLRSWAGLCPRLDESAGKRRSTRIRKGAPWLKAMLGQCAKAAARAQGTYRQAQYQRLKSRRGGKKAAVAVAASILTAVYYRLRDGVEYRDLGADPFTRRDKVKIAARLARRIRDLGYEVDIRQAA

SEQ ID NO: 306923 - protein, 356 aa, unidentified
MQNNFQSPESVILGVDTHLDIHVGAVISQAGKVLGTRIIQTNQIGYQELFDWAKSFGVLERAGIEGTGTYGAALTRFLIKNSIYVVEVNRPDRSKRRLEGKSDPLDAENAARTVLSGSSKAIPKMQSGACEALRIISVARRSAVKARTQAINQLRSLLVSAPQDVRDKLWKSKPHECVAACINCEVSEYSPLRIALYSTLRSLAKRWGALTEELNELDESLDKLTRKYASNLRSQFGVGPQTAATLLAVAGDNPERLKNEAALVSLCGVNPLPASSGKTVRHRLNRGGSREANNALWTIALVRMRSDPRTRIYVDRRTGEGLSTKEILRCLKRYIVRELYPLILSDLTYANRPLLT

SEQ ID NO: 306924 - protein, 355 aa, unidentified
MNEIKYIGMDVHQASTSIVVLNAAGRMVTSALVETTASALLAFIRGQRGTLHLTFEEGTHAAWLHDLLAPHVGRLVVCDPRHNALLKAGSKDDPIDAHKLAELLRLDALRPVYHGQHSLATLKELSRSYTTLVQDSTRVMNRIKALYRSRAIACPGIKVYSPSYRASFMEQLQQAGVQQRAQVLYQHLDLLSLLRREAKRALLAESRKHSVSRLLRPVPGLGPVRIAVLLAIIQTPFRFRNKRLFWAYVGLGLVTRISAEFAVVNGQLQRSRKAPAIRGLNPNHQRELKEIFKSAATAAVHRPGPWQQFYQQRVAARHKPELVRLAVARKLAAVTLHLWKKGERYDVQHLKATAV

SEQ ID NO: 306925 - protein, 390 aa, unidentified
MDEAGRVLARKRLPEGAAGMAQLHGLVGGCLGEEADAAEVIVGIETDRGPWVAALAAAGYLVFAVNPLQAARFRERHQVSGAKSDTGDAHALADMVRTDSHQLRPAAGDTPQAEGVKVLARTHKTMIWERTREVQRLRHQLREYFPAALEAFADLGAPEALELLGKAPEPARAAKLTRAQVSAALKRAGRRNITERATAILAALRSEQLGQPEVLTLAYAATARSLIAVITVLNEQVKALQGQVEEHFGRHPDAEVILSQPGMGPVLGARVLAEFGDDPRRYADGKARRNYAGTSPVTRASGKRKVVAARFVHNDRLVDALHAQAFSALTASPGARAFYDQQRANGHGHHDALRRLANRLVGILHGCLKTRTLYDEDTAWAHRQQTQQAA

SEQ ID NO: 306926 - protein, 343 aa, unidentified
MISETVNHYDHYIALDWSLDNVTVARMRASSSQPKVIKLDSDIRLVKEYSNKYHGNTILCLEETTGSHWLYVELKDYFDKIFVCDPYRNRLLSEGAKTDKIDAVKLCQLLRAGLLKEVYHSLDADYHLRKIVSAYEDWVKFGVRFKNQKSALYRAIGLQHKNDCIDESKELLKFIESHQESAINLYEERKKEYEQLFRSLRRQNRLISNLTAISGINNISAVTIYSKVIDASRFENKYKYWSYCGLVKHEKQSGGRSYGKRSPRYCRKLKSIYKTASLAAIGGKNDIRDYYDYLLSLGISTRDARNGVARYIAKVSYGMLKNKSKYIPYQWRISQEKKTIEIT

SEQ ID NO: 306927 - protein, 493 aa, unidentified
MSEASMSGSKKAVSGYFPAGSRTNTIDNGSLPAALYQLPWPESPQRTTKILFFVRRDWIYSIFCYHKNKGRSNNMPSKKKNTSVVSVVHDICCGLDVHKKMIVACLVSSDAGDGERSEVMEFETFTEDLIKLRNWLLEKECPVVAMESTGPYWTPIHNILEGYFQVILVNPRHMKNVPGRKTDISDSRWLSGLLRYGLLKAAFIPPKYQRQWRDLTRMRKNYMETVGHFKRRVHKLFQEANIKIDSVLSDLFGSTGRNLMGLLVSKESSLTFFEVEDCLRGSLREKARELYRSVKGFFEEHHRILLTVLLNTIEKLEEQIEELELRIRQVLKTSEELIDRLKEIPGVGDVSAHSLLAELGTNLEAFPSAAALAAWCGICPGNNQSGGKRFSGRSRVRNHHLKTIMVEIAWPAVKKRGSYYKAKYYALKSRIGAKKAIIAVAHRILKAIYYIIKHGVGFKDLGEAYLLERSKASKIRYLSKQASLLGFELKPVI

SEQ ID NO: 306928 - protein, 449 aa, unidentified
MMEHGMATSKAKTSRSKLEVMHPDAAGIDVGGSMHFVAVPNEASEQSVRPFGVYTRDLHAMADWLQGCGVKIVAMESTGVYWIPLYELLERRGFEVMLVDARQVKNVSGRKSDVLDCQWIQQLLSYGLLKAAFRPQDQFCELREFNRLRTRLLADQGRSVQHMQKAMTLMNIQLSQAISDVAGVTGQKIVRAIVEGERDAKVLAAYRDGRIKASEEEIAASLQGTWRAEHLLALKQALGRFDFYAQQLQECEAEIQRVMGKLEVHTKELSKGKKRSKAKNAPKFNVRERLLKMCGVDLTKVDGIDETTALNIVAEVGTDLSRFPSDKHFASWLGLCPGTRISGGKVLGAKTKHSVNRASQAFRQAAAALRSSKSALGAYYRRLCGRMDKGKAVTAAAHKLARLFYALMTKGQEYVDQGQQYYEERYRQRVIHQLQRRAQSLGMSLVPTA

SEQ ID NO: 306929 - protein, 287 aa, unidentified
MLYIGLDVHKEFCQACVIDESGRALSNERFSSTSEELDRFLDWFQDAKFVMESTGIWEFIYEGIEKRGFEAVLAHPLKVRAIAEARVKTDKVDAETLAQLLRADLIPRSWIPPKDMRDLRQLVRQRAYLVRDASRFKNRIHAEILRRGVRRPENLKTPFAQRSIRWMRSLGIPTVTSCLNCLENVQVQIEEINAQLLEEYNRRPDAQLIATVPGIGFYGALLILAEIDDVRRFHHPEKLCAYAGLVPTLSQSASCVRYGSISKDGSAYLRWILTESVHVHTRNDPES

SEQ ID NO: 306930 - protein, 345 aa, unidentified
MEHFAGLDVSVKETSVCIVDDVGKMVREVKVASEPEALLPVLANPLYRFKRIGLEAGPLSQWLSSALAEAGLPVICVETRHMRAVLQAQINKTDRNDARGMAQMMRAGLYRPVHVKTLRSQKLRMLLTHRKLLQSKAIAIDNDLRGTLRNFGLKVGVVGASKFEARIRELVEDLPDLGALVEPLLIVRRTLREQIGILHRRLLVIVRQDEVCRRLMTVPGVGPVVALTYRASVDVPARFRSSKAVGAVFGLTPSKYQSGEIDRTGGISRCGDEMMRVMLYEAAHIMLVRVAKWSWLKAWAMKIAKRRGLKKAIVALARRLAVILHRIWVDGSEFRWTREQASPAA

SEQ ID NO: 306931 - protein, 418 aa, unidentified
MVQTNDNGIVSVVHPICCGLDVHKEKISACLITSSLFGGQQTEVEEFGTFTDDLIRMRGWLLEHDCPILAMESTGIYWRPVHNVLEGYMEVILVNARHIKNVPGRKTDISDSKWLAGLLRHGLLKGSFIPPKEVREWRELTRLRRTYVESLADYKRRTHKLFESANIKIDSVVSDLFGVTGRNLMKLLVDGPSQISLEQIEACLRGKLKGKRDELFHSIQGFFTDHHRYLLSSLTRTIAGLEKEIEAINDRLRKVMQTREPLLHKLMEVAGVSEVSARAILAEIGPTMDPFRNSAALCSWSGLCPGNNESAGKRHSGRSPVRKHHLKTIMIEVAWAAIKVKDSYYRDKYYRLKARRGAKRAIVAIAHRLLKAIYHIIRDGVSFRDLGEDFLNQNNKQATLRRLNQQAQKIGYQLVPQD

SEQ ID NO: 306932 - protein, 367 aa, unidentified
MKDSITVVGVDSHKNSMEIVTADNFGAMEVRRFGTIGGTMDALDRAVRKLASRGTTLHFIYEAGPCGYEIYRHLTRKGFSCQVVAPSKTPRKSGDRIKNDRRDAETLARLGRAGELTAIHVPSEEDEAMRDLTRGREDAVRALRTARQQLSAFLLRYGKRYPGKKPWTPAHLRWLADLSLPHPSQQIVLQEYIATVREGTERTARMTDQILQLLPGWRWNPVVEALQALRGVAPLVAVTTIAEIGDLSRFENPRRLMAYLGLVPSEDSSGETTHRGSITKTGNGHVRRVLMEAAHAYAFPARVSRHLLKRQEGLPEPVRAIAWKAQVRLCGKFRRLTARGKLPNKVVTAIARELSGFMWAIAREVKV

SEQ ID NO: 306933 - protein, 473 aa, unidentified
MGKGSGGNGMTRGDRRRNARRERLRAMLPRDGAVIGIDLAEDKQALAVIDHDVRVLARKTERVKVFRLGAALDWAVGQARAQGFGQVTVACEPTGARWLQVQRLCAERGLPLVCIQPLISHIAREQQDFTRHKTDESDCVMIARLAVELHCYVPEELDETWAHLRHLGRRRAQLITAATASAQRIRDFLSVAWPAVPETCARPLESVTWLAALQVVTARCGADPGKLAAMGEQEFTALVRGAVPGWGGQKAHGPISRRVFAALTDTEGVVVSSRRGLLRRVADELGDLQRTRAQLRAVEADMVAVLDELGLSRLADIPGLTAVGAAAILAETGDPHRYDNSSSLVKHAGMSPSDNASGAFSGQAHISRRGRPGLRLVVWRAVWPMLQYNPVMAAKYQAMTRAADTAAADAGPQQGRAAQAAARARRAKARVACAASLLRWIYCMVVHDTSWDPAVASGAASRHDAPHTQAEAA

SEQ ID NO: 306934 - protein, 427 aa, unidentified
MKEQSRTIVGIDWSADSHTCYDLQTDKSFKITDSVEGYEKLLKNYPEAVFVIEEANNRIGDYLLINNREVYVLPPCRSKEARKYHFSSGTKSDGLDAQAIALTFKEHPSYCLKARYSKVGVKITKLVTAYNIVSKTHSQQCNRLYSLLLRYFPEYLHIMDKQYRSDTSLRILSVCPTITELKKVSNEELRKILNKENYRMTSILKNKLDRIRSEGISWEDTSCEGKLILLLVNTLLSLRKGLEVLKKEMEKTLKNSPYRIILSIPGVKAVIGSYIVKAYLTHDFKSYQEIQKYAGTAPLLFQSGRKSIMLMRKKCDNDLKGMIHMAAFASLKTCGWARNYYRRKRKEGKTYGHALRALGNILLKIAFSMLSKMKEYDETLFLNAKGIKTTQLNDTSFSETFPYPEYSQDAQLSLAATKDVVDNLIVT

SEQ ID NO: 306935 - protein, 353 aa, unidentified
MKRTPKYVALDVHQATTVASVREASGRVIARSILPTERCALVEFFAGMRGSVHVAFEEGTQAQWLHDLLSPLVDSVIVCDRRGEHRGNKADQVDADMLSRRLLAGDLRAVYHGSQNRATLRELTRAYSNLVEDSTRVMLRLKSLYRATAIRAPGRRVYSASERAQWLARLSDRGARFRAEMLYAELDVLRDLRPRAKAAMIAEARRDPAWGVLKSIPFLGPVRVSLLLATMKTPWRFRTKRNLWAYAGLAVVTETSAEHDLISGRAVRRRRRPLTRGLNKNHNRILKYVFKGAATAAIGRRGPLQDLYRAMVARGMREDMARVTLARKFAALTLRLWKRGERYDPAQLSAQST

SEQ ID NO: 306936 - protein, 417 aa, unidentified
MTDGKNASSCRYVALDIHKHYSVIAAVNRDGQIVLDPVRIEHEDLEAQLRKKLLPSDQVVIESTTNAWHIYDLLEPLAAKVLVANPIRVKQIACAKVKTDIRDTLILARLLAANLVPTVWVPPVEVRDLRYLLSQRRRLVGMHTQTINRMGSVAHRHHLNHPKGKRYIEKNTEWQQDDELSDSEKFQLELDMATGEHLDGQAKKIAEKIARMSQEEPWAANMMYLMQLPGFGVITGMTVLSAIGDIARFESSGKLSSYSGLTAGVEQSGTKNRGKGITKEGRKELRWAMVEVAQRAVKSDPYWKSRFQALERRMHRNQAIVAIAHQMLELVWHVLTHKQAYRHFSEERIAYKYLTWGWQLDEEARDGLTRQQFARYYLMRLGIGHDLKRIALNPKYPRKLASEAEVLALKPELNQTR

SEQ ID NO: 306937 - protein, 340 aa, unidentified
MQVSTIGVDVAKSVFQVHGVDAAGEVVVARKLKRSQVLKFFEALAPCRVGLEACGSAHHWARALGALGHEVRLIAPKDVKPYVRRNKTDAADAAAICEAVGRPHMRSVPIKSVERQAVLSMHKARLVLINQRTRTTNALRGHMAEYGLIAPQGARGFEGLMQRLAGGELDEQVPAYLVSSLLALAATLAPLEAQLRRIDQEILAWHRQDADSRRLADAPGFGVLVSSAIAASLGEPTAFRSARDYAASLGLTPRIEATGGKARLGSISKRGDRYLRRLLVNGAQAWLLSPKAKADPWIARLLAEKPRGKAAVAVANKMARTAWAMIAKGQAYRPRTAAAA

SEQ ID NO: 306938 - protein, 358 aa, unidentified
MAKASMAHRQATRVIVGVDTHRDVHVARAKDTLGRALGEMAIPASAKGYRALLSWSRGLGEIEAFGVEGTGCYGAGLARHLRSEGEVVIEVIRPNRQARRRRGKSDPADAEAAASAVLSGEASGIPKAGDATVEMIRALRVARSTANRARTQAINALHALVVTAPEELREDLRGLPGPRLVRTCASFRPGELIDPLSATKTALRSLARRHEALTAEVRGLGRELRRLTVKACPQLLDIYGTGPDTAGALLLAAGDNAERLRSEAAFAKLCGASPVEASSGMTTRHRLNRGGDRHANAALYRIVMVRLRQRHPPTIDYVSRRTAEGKSKREIVRCLKRYVAREVYRALTEVNGATSSAA

SEQ ID NO: 306939 - protein, 332 aa, unidentified
MEKFYFIGVDVSKKKLDFCVMFEGKVVHEEETANHQSAVMSLLHQLEEDYGIAGGQMLVCAEHTGQYTFPLACACKAVACKLWLENPTEIKYSSGVQRGKNDKVDAKRIAIYARRFQDKVQYYERPTEDIERLKQLESERTLYVTDLAKYKGQMKDQKDYMPKALYERKMKRLQALMDNLEVAIQAITDEMDEVIASCPVLSRQRELLMSIDGVGRVVATNMIITTEAFTRFDDPRKFNCYAGVAPFSYSSGSSQHSKARVSHRADKVMKRLLHLAAVAVTHRVGGELKKYYERKVAEGKNKMSVINALRAKIVARMFAVIKRNEKYKPILS

SEQ ID NO: 306940 - protein, 355 aa, unidentified
MYGLKHQKEKRSMDHFAGLDVSVKETSVCIVDEAGKVVREVKVASEPEALLSVLKNPAYRFKRIGLEAGPLSQWLFSALAEAELPVVCVETRHMQAVLKAQINKTDRNDARGIAQMMRVGLYRPVHVKTLRSQKLRMLLTHRKLLQSKAIAIENDLRGTLRNFGLKVGLVGTVKFEARIKELVENLPDLAVLVEPLLVVRRVLREQFVILHRRLLAIVRDDEVCRRLMTTPGVGPVVALTYRATVDVPARFRKSKAVGAVFGLTCSKYQSGEIDWSGRISRCGDEMMRVMLYEAAQSMLHSKKWSWLKAWAMQIARRRGKKKAIVALARRLAVIMHRIWVDGTEFRWTREQAVTA

SEQ ID NO: 306941 - protein, 343 aa, unidentified
MEAKRYIGIDLHRNCFTACVRLENGREYLKEWKLEDMTKFTAKLRPTDQVAVEVTGNTRLFHDAVAPHVERVVAVNPSQFKVITHSVKKTDPNDARNLALYLAKDLLPEVRMKDKTQAQIASLTQTRDTMVKLRPALKNKVNNLCSAHGVNLNKESLASEKGLRAVLEMHFDQLVNLELKIIIDQIRSLNKSIAELEETIGKESQKLEGHKNLTSIKGIGGLSGGILLSIIGDIGDFADEGKLAAYFGIVPRVSNSNETERSGRITKRGTKLGRTTLIQCALIAQRYSPYLKTYYEKMKNRRGTGKAIVALARKFLGIIYRTLKNKWVFADFPNFVLAEEATA

SEQ ID NO: 306942 - protein, 431 aa, unidentified
MLKINPLSTLYVGIDVSSKSNYVCALDFFKNKYINSSFANNQPGAEELALKILECLKEHPDITTLVAALESTSVYSIHIANYLSSCEELMRFKPYVFVLNPKCTANYKKSYIGLGKSDPIDAFVIADYARAGNIESEPWRGSQFLALKRLTRHRLHLVECMTREKTYLVSNLYLKFSELQMLEGDDQPFCDIYGATSSSVLMEYFSPEEILDSSEEDLIAFLAKKSRNRIKDISKTADLLKKAARDSYRLDKALYEPLNVSIASSFNCIETFKREIKVIDNAIEKEIKGLNPNAFIILQSIDGIGPVFAGGIIAEIGDITAFHSSDALAKYAGLTWKSNQSGDFDGEDTPMIKAGNRYLRYYLGEAANSMRKHNVEYGTYYRKKYNEVPKHQHKRALALTSRKFVRLVYGLLARNQLYSGVSLDTSIKDSN

SEQ ID NO: 306943 - protein, 402 aa, unidentified
MNAVGIDVSKGKSMVAIMRPFGEIVSAPFEIKHTASDIHSLVELINSVEGESRIVMEHTGRYYEVLAHQLSKANLFVSAINPKLIKDFDNDSLRKVKSDKADAVKIARYALDKWQNLKQYNVMDELRNQLKTMNRQFGFYMKHKTAMKNNLIGILDQTYPGVNTYFDSPARSDGSQKWVDFASTYWHVDCVRKMSKNAFIDHYKNWCKRKKYNFSKSKAEEIYEKAKELVPVLPKDNITKLIIKQAVDQLNSVSTTIESLRTLMNETASKLPEYPVVMAMKGVGTSLGPQLMAEIGDVSRFTHKGAITAFAGVDPGVNESGSYEQKSVPTSKRGSSVLRKTLFQVMDVLIKTHPQDDPVYQFIDKKRAQGKPYYVYMTAGANKFLRIYYGRVKEYLSSLPES

SEQ ID NO: 306944 - protein, 391 aa, unidentified
MVCVGIDVAKDKHDCCILDSDGMVRADCFTIPNNMDGFKQLLQTIRNCTKKSDKIKVGLEATGHYSYNILGFLLDNDLAVYVMNPLHTNLYRKSLSLRKTKTDRVDARTIATMLLSDVDLKSYTDTAYHNEELKSLTRYRFDKVRERAKLKQSVSRLVTILFPELEKLVPSLHGVSVYALLSEYPGAKQISEAHLTKLTNLLSIASKGHYGKEKAIQIREAAKSSIGSVMPAKSLELKHTIKLIKELTSEINEIEDSIQQIMDELHPPILSIPGVGIQSAAMILAEIGDFSNFESPDKILAYAGCSPSTYQSGKLTNCYAHMEKRGSRYLRYALYNATKYVCHWNPVFAKYLAKKRAEGKHYNVALSHATKKLVRLIYALQKSGKAYLTAA

SEQ ID NO: 306945 - protein, 351 aa, unidentified
MMIIGCDYHPSDQQIAFVDQETGECSERRLNHSEGEAEKFYRDLQQRGVSVRVGMEATGHARWFERLMAELGFELWIGDPAEIKTRRVRKQKTDRQDAQLLLKLLLEDRFPRVWVPSPENRDLRQLLWHRHRLVQMRTRIMNQLQAVAMNEGIRRKKALWSKSGRVQLESFSLAPWSGRRRQDLLELLDRLNPTIDQLSAAIAQQAEKRPEVRRLMTHPGVGPLTALAFVLIIGSPERFRCGKQIGSYVGLIPCEDSSAGHQRLGHISKQGNSLLRFLLVEAAQIAVRHDPDWRRRFLHLAVRRERRIAKVGMARKLAVRLYWMWRKGWDYQQVLQFGSHAGQPVKAHGVK

SEQ ID NO: 306946 - protein, 403 aa, unidentified
MTTPAQVSVWIGLDVGKETHFADVLDNDGERLFSRGISNDQGDIEALLDRAGKHGVPGLVIDQPGSIAQLVLTVAAKREVPVAYVPGLVMRRAADLYPGEAKTDRRDAYIIADTARTRRKQVHWLDASSDELLAQLRVLNGFDTDLAADQTRVTNRLRDSLTSISPVLERALGNRVHQAGVRDLLAALPTLTALRAAGPDEIRATVARRSPRLASKVAEAVAKALAAQDVTVPAEKATGRVIAELAGELDRVFARRDALAKEIEEVFLAHPFGEILASLPGIGPRTGARILAEIGDGTDFASGAKLAAYAGLAPVTRQSGTSLNAETRSRRGNHRLKNAMFLAAFASLRDPASKAFYDRKRTEGKRHNAALICLARRRCDVILAMLRNREPYQPDRSKAAKAA

SEQ ID NO: 306947 - protein, 345 aa, unidentified
MTYTTTLTVDYHDQTCVVRYRRAATGTEQVLSVPTTPEALAQLVDRARRADGSGARVAWVQESTTGWARVQALVGDRADFQLANVLQMPRTPKAHRKKTDKVDTARMQREFLAGDLPLAHQPPAAVRQLRRLVAWRENLVSRRTALRNWINRYLAHETWEDRRGLWSAAGRQRLRAWLAGVPATDALVLGGKLDELDHLEGQLGQAEAALRAAYRDSPEAQRLDAIRGIGEVAAVSIVARIGPVGRFRSAEQLIAFAGLAPGVQQSDQTRRDGRIGGGGTDRHLRHYLIEATVWARELPRYRATYERVARRRGNKIGRLVVARLLLRSIYKVLRDGVAFAPSAGV

SEQ ID NO: 306948 - protein, 429 aa, unidentified
MNPTQKIDPSSSTTQFVAWIGLDWGDKEHAFCLVAPGSSQSETGKLTHSAETLHRWFKDLEQRFGGRPVALAVESNRGAVLHVLAQYSWLTIFPINPVTSARYRKAFIPSGAKDDLPDAAIVLDLVRYHQDKLRPLIWEDENTRKLSALVLARRDTVDRRTQALNQLTSVLKTYYPQAFGLAGEDLRAPMALEFLRRWPDLISLKAARLSTIRNFYYRHNVRRPELVEKRLAQIKEMVALTTEEAVVSVALLQLKLLLELIATFNKHVARFEAEIATTFAAHADAALFKDLPGAGPALAPRLAVAFGTDRTRYPNAESFQKYVGVAPVREKSGGQLWTHWRWQAPVFTRQSLVEWAGQTVIWCQWAKRYYERMKAKGKKHHVILRSLAFKWVRILWKCWKTNTAYDEGMYLKALEKKKSPNLPLPETSQ

SEQ ID NO: 306949 - protein, 325 aa, unidentified
MGKETALGIDIAKEKFDVRLEVNGKAKKQQFANSPDGYKKLVAWLNLLKVERVHACMEATGTYGEALAEYLYVLGHLVSVVNPARIKGHAQSQMKRHKTDELDAEVIRHFCETQTPELWHPVKPEIKELRSLVRRRDDLVTMRTQESNRLQSGELTDGVRKSIDSMLEHLEQQITELEDQIQQHIEQHPDLKHQVELITSIPGLGQRTAIKLVAELMDIAGYTDARSLAASVGVTPSQHRSGTSVNGASHISKVGNGALRGALWWPAVSAMQHNPVIRNFVKTLQKAKKHNFAIIIAVIRKLLHLVYGVIKNDTPFDTNWATSKA

SEQ ID NO: 306950 - protein, 408 aa, unidentified
MDRINPRCAGLDVHKDSVWAAVRIDGVRQIQKFGTTSSELLRLGDWLVSQGVTIAAMESTGVFWKPVWNLLEDRLELLLVNAQHIKQVPGRKSDVADCDWIAQLLEHGLLRASFVPDRPQRELRDLTRQRTQLLGDRARVVNRLQKVLEDSNIKLASVATDITGKSGRAILDALVEGKLSPQQMAELVHKRMEAKKPAMARALEGKVTAHHRFMLRSLLQQTDNLDQMIDSFDKRIAEVMSPLELEAVKQLDAVPGFHQRTAQNLIAEIGTDMSRFPTAKHLASWAGLCPGNNSSAGKRKSGRIRKANVWLKAALTQAAWGASRTRRSYYSAQHRRLTTRRGVKRATIAVAHSLLTTTYSLLSKNKQFVDLGASYFESQRPDPSRQAEHMLKKLQRMGYKVTVERPAA

SEQ ID NO: 306951 - protein, 395 aa, unidentified
MFIVGIDIAKRSHEAIIIAEDGQVVRKAFSFRNNCTGYNLLLEQVRRLTLVKSQIVFAMESTAHYWLALYARLLKDGYAVMVLNPIQSHSLRELYIRKAKTDARDSLIIADLVRFGRCKASNVPQDKILALRELCRSRAYLVDMAADLKRKLIALLDRIFPEYESLFDSVFSKASIAVLSKYSTPQKVKNANLRKLTDILMESSNGHFGEWKAHQLKEAACSSFGIDDSGGVYSTLLGMFLEQILSLTAQADSLEKQISVFFQEFNNPLTSIPGVGTVLAATILSEIGDITRFSSAAKLLAYAGLDPSVKQSGEFKSNQNRMSKRGSPYLRRAIWLASTVAVHRDPMFQTYYEKKISEGLHYMNVIGHVSRKMTAVIFAVLRDGQPYQPILQSAG

SEQ ID NO: 306952 - protein, 352 aa, unidentified
MVPGINRQPLKKLAADEVALLQLLYRWREEASKAGRTIDRVAVAYEAGRDGFWLARWLRGRGIEAHVIHPTSVAVSREHRRAKTDRLDTERLKRAFLGWLRGEQRHCSMAMIPTPEEEDAKRPNRERENLVSDRTRIVNRMKSSLARLGIRGFKPTLRKAPERLARLLTPEGALLPPNTLAELQRDMARLRFIMDQIREIEAARLVRLEHNPEQGSHAMVRLLAQVIGIGIETADMLVHEVFVRNLRDRKAVARYGGLTGSPDESGAKRREKGLARAGNARVRRGMIQLAWRFLMFQKESALAQWYRARTADARGATRKTMIVALARKLLVALWQLVTTGEVPEGVVMRRAA

SEQ ID NO: 306953 - protein, 420 aa, unidentified
MKSASNTLTSTLPEYPPNDVTAGIDWARDDHAVAIVDDRGREIHRWAVEHTAAGLRQLVDVLGKHGVGEVAIERPDGPVIDALLGAGLTVVVISPNQVKNLRGRYGSAGNKDDRFDAYVLADTLRTDRARLRPLVPDREATVALRRACRARKDLVKHRVAAANQLRAHLRNVLPAVVGLFKDLDSAISLAFLTRFDTQDKIDWLTAKRLGDWLAKQGYSGRVDPAVMHQRILDAPPGATGAHGTAQAPITITYVALLRTLTEQIKTLEKQIDAQLTTHADAHIFTSLPRAGRVRAARLLAEIGDCRARFPAPESLTCLAGAAPSTRQSGKLRAVGFRWSCDKQLRDAVTDFAADSRHANPWAADLYQRARARGHDHPHAVRILARAWLHVIWHCWQDNTAYNPTQHRALQRVLATQTHAA

SEQ ID NO: 306954 - protein, 350 aa, unidentified
MSEYIAFDSHKRYTWMERMDPATGEVDCRRIEHAQGAIRRALEGRARGTPVAIEATANWYWIVGEIEQAGLEPQLVHPRKAKLMMGLTNKTDRLDAHGMNRLQQNRTLPVVWIPPGRLRDLRELTRTRVALVRQRTRLKNRLLAVLAKYGLRIEASDAFGRRAREQWERCGERLPEQTRWVLERLLGLVDRLDEEVRAIEKRLEELVEQTEEMGWLMSLPGVGVILAATIALETGEVSRFGSAEQFASYAGTTPRVHASGGQVRYGPLRVDVNQYLKWAFAEAANSVAVHHRRRADWHVSRLYLRVRQRKGHAKAVGAVMHHLAVSAYQVLRRRELYREPVRERVCTSGV

SEQ ID NO: 306955 - protein, 397 aa, unidentified
MYIVGIDIAKRKHEAAVIDGEGTVIIKPFSFTNNCSGYNRLLAMLAKAKLPLDEVSFAMEATGHYWLALFTRLQKEGFRVQVINPVQTNSIRSFYIRQAKTDPRDALLIAEVIRFGHFSESTLHPENIYELRELCRGRHAIVSMQADIKRKVVALLDQVFPEYETAFTNLFGDTSMAILQACPTPKELSEMPLEEFCHLIEVPSRKRFRTEKAQELQALARNSFGFAMAGGVFSTMIRLYAKHLDFLKQQVREMDRKIAEIMETLDTPITTITGIGPTLGAYILSEIGDISRFSSAAKLAAYAGIDPTMRQSGEYNGVRNRMSKRGSPYLRHAIWLAASSAVLHDPALKLYFQKKRDEGKPYMASVGHACRKMVSIIYAVMRDNKAYTPYIPNEISA

SEQ ID NO: 306956 - protein, 385 aa, unidentified
MDVKKRFSEDGMDASRIESVSIRGHHNREGRIMSKVIGLDIAKRVFQLHSVDPKTGEIERLKLQRSELLEYFAKLSPAIVAMEACSSSQHWARRFGAMGHQVRLIATKFVRPFVKTNKTDAADAAAIWEAAQRPGMRFVPVKSEQQQGILALHNMRDLLVKSRTAQMHQIRAVFYEYGIDLPRGRHWGLKAMPTAFVRADGRVEGMVLEALRNQLELIHDMSRRIEALERQLEGYERSDERCRRLRAIPGVGPLTATAIVASVGDAREFRSGREFAAWLGVVPRQSGTGGRVRLLSISKRGNSYLRAMIIHCARAVAARQRVQPPWLLKLLQTKHWNVAVVAQANKIARIIWALLAHGGTYQADWAGATAQDGSTTVSKRFAYWH

SEQ ID NO: 306957 - protein, 413 aa, unidentified
MELLHARCAGIDISKKDAKVCVRVQGRGKSPTAAVVTTWGAMTNQILALREHLLAEKVTCVVMEATGAYWKPFYYLLDDGLDVMLVNARDARNVPGRKSDVSDAAWLADLGAHGLGRASFVPPPPIRELRDLTRTRTVITRERSREAQRLEKLLEDAGIKLSSVATDITGASSRRMLEALIDGQRDPTAIADLVHWRMRPKIPALIEALTGRFSEHHRFMTRLFLDRIDAHSADIARLDTRIEAAMEPFAAARELLMSVPGISRITAEVFIAETGADMSVFPTAGHLASWCGLSPGSNESAGRVKSTKTRPGNPYLKGALGIAALSVIRRKETYFWAKYRRITVRRGPMRALAAVEHAMVIAAWHMLTNGEFYREPGPDYFTRRVPAKAQARAIAQLESLGYKVTLEPLADTA

SEQ ID NO: 306958 - protein, 493 aa, unidentified
MNSRRHKPPMTPKTTNNNNNNNNNNNNNNNNRNDTPASQAATPQTFDPTILQMINPNAAGIDVASEEMWVCVPADRAEPNVRAFGAYTDDLEAIADWLQGCRITSVAMESTGVYWIPLYQVLEARGFDVCLTNARHLKNVSGRPKTDRLDCQWVQRLHAYGFLRASFRPTDAICQIRSIERHRGALIRDAARHIQHMQKALHQMNVLLPKVVKDITGATGMAIIQKILDGERNPVKLAALRNPHCQSSEEEIAKALKGDYRREHLFVLRQAHTAYHFVQGQMRECDRELERLLHDLDKQVDANQTPPPPRAKTPQPAHRNDVQFASHDGRTLLYECFGVDVTRMPGIDVSSGLVLLTELGPDLSPWPTAKQFAAYLGLAPNIQSSAGTVRSSRTRKVASRAAGVFRLAAQAVARSKTALGAGYRRWKARLGGPKAITATAHKLAVIFYHMVTERTNYRELGEAAYTQQQRQRAVKRLKHQAKQLGYTLVTQPG

SEQ ID NO: 306959 - protein, 342 aa, unidentified
MLIIGCDYHPSVQQIAMVDTETGDYSEHRLKHSDGEAEKFYRDLKLRAVKVRVGLEATGHRRWLERLLMELEFEVWIGDAAQIAAMRVRKQKTDRQDAQFLLKLMMEDRFPRVWMSSLEDRDLQQLLWHRHRVVQMRTRVLNQLQAIAMNEGIQRKGGLRSAQGRKRLEQLPLGPWATRRRGDLLVLLDELNKSVDELTAAVQQEAEKRPEVRLLMTHPGVGPVTALAFVLIVGYPERFQCGKQIGSYVGLIPAESSSGVHRRLGHISKQGNTLLRFLLVEAAQAAARFDSEWRSKFLRLAMRRERRIAKVAMARKLAVSLYWMWRQQRSFQPALEVGSYAG

SEQ ID NO: 306960 - protein, 425 aa, unidentified
MTEKTAVQFAAWVGIDWADRKHDICLQPGSEGKRELLVLEHRPEAIDEWANALRVRFAKQPIAVCLEQRKGALITALRKYEHLVLFPVNPRLLAGLRRAFSPSGAKDDPSDAEIALDILLQHRDKLKAWAPEDARTRQLQALVETRRRVVGQRVRTSNRLSANLKGYFPQALTCFDGFETVLACDFLTRWPSLGEAKRAREETLRAFFLTHNVRGQALIAERIARLKNAMALTSDAGVILPALLATRTLVAELRTLIGGIAEYDTAIANAFKAHPDAFIFASLPGAGPTFAPRLLAAFGRDRARFASVRAMQEYFGIAPVTERSGRSTWVHWRWSCPKFLRQSIVEWAGMSIRYSCWANAYYRQQREKGKKHHAAIRALAFKWLRIIFRCWKDRRPYDEAKYLLALQRRHSPLLQYIAEPLTKAT

SEQ ID NO: 306961 - protein, 405 aa, unidentified
MRYYIGVDWADAEHAVWVEAEHATLVTKRTVAQTAAGLSEWGRWLDERRAEGIDLWAAIEKPEGRIVDFLLDHGVRVFAVNPKAVDRARDRFRMSSAKSDPFDARVLATFLRTDHTHLAPLRPSSEAAQELKGLTRDYVRHVRHQTRLLNQLTVTLKAYSPRGLELGGELTSQWRRAFLHDFSTPAALATLTERQWHRWGRAHRLSAARMAELWPVLQAPQIPVPPHVVRVHARRLGTLLQLLAAASSAVEAYPTAVTDFFGSMPTAEWATSRPGASGTTVPRLYAELGDADGRWQTFRHWPAPGGTVPVTERSGHSCLVKFRFAGHLHLRDAVQQFAFQSLQHRTWARAYYDRCRQRDLSHHHALRSLAAKWLKIIFVLSTRHIASDETYHLATIGRQHLQQPA

SEQ ID NO: 306962 - protein, 312 aa, unidentified
MTNLICGVDVSSATLEARLGRDGPVERFARSAAGVAELAAFCKQHQVAFVAMEATGGYERLPFGVLWAAGVPAAIVNPRAVRRFAEAMGILEKTDRIDTGVIAWFAEVKRIVPQPPAAPAQQQLAALVTRLRQLTELRTAQSNQRRLVTDPTVRGSFDALLKLVAGQIRELADRIVQLIDSDPLWQKLDAAFRTIKGVADRTVARLIAELPEIGTLSNKAAAKLAGLAPIARDSGKLAGKRPVRGGRSGIRSILFVVADVVRRYDRDFTDCHRRLTEAGKPKKLIRVALARKLLVRLNAKARDVRRQFAIPA

SEQ ID NO: 306963 - protein, 384 aa, unidentified
MTNQMLQRNDSKTTDIQTTRLLVAMEMSLKTWRLAMMVEGGTRKRVKTIEAGNYLELEQAVAEAKARFRLPEETRVVFCYEAERDGFYPYRRLTEAEHTVWVIDSASIEVSRRQKQAKSDGIDADKLAELMQRQARGEPKALRIVRVPAFEAEDQRLLPREREILLQDLGRVRNQIESVLFTQGYRDVPKTARGLKAWLAQPRELGPQLRERLGPQFPRLALLEAQFQAVAKVMALQVRQEQSAGIVAVARTLMQLTGIGLIGAWVLASEIFGWRQFRNRREVGAVLGMTPTPYSSGQDEREQGISKARNQRARAMLVELAWLWLRYQPDSALTLWFKTRFSGGGKRLRRIGIVALARRLAIALWRYAAQGIVPEGATLKAAKA

SEQ ID NO: 306964 - protein, 344 aa, unidentified
MVTIGIDTHKATLAVSAIDEAGRERAAETFPNDREGHVRLLQWARIHGPERRFGIEGSGSYGAALARRLVASGEQVVEVPAVLTDRERRHLRRAGKSDPGDALAIARVALREKSLGPAPMPGITEDLKLLVDAREHCLAERTRVANQLHAHLVVLTPGYKDEIKNLSAACYLAAVTRLLRRVGSVRAELARAELVRLRALDVESDALEGRIRALVQLSGSSLPTIRGVAALTAAKLLGETGDPRRIRSASAFAQMSGTAPIPASSGQTSRHRLNRGGNRQLNRALYTIALTQARTDPRAKTYMARRIAEGKSWLDALRCLKRHLADVIWRTMLADAQRAAEFGA

SEQ ID NO: 306965 - protein, 351 aa, unidentified
MRRPKDKLIAGIDLHSNNLMIGLINQDGTRVAHRKLACDLKAVEEFLRPYKSQLQSMAVESTFNWYWLVDGLRQLDYSIDLANPAKIEQYHGMKHVDDKDDAYHLAELQRLKILPKAHVYDPKLRPVRDLLRRRTMLVHQRTALLLSFKSLYARTTGQALDLSDVKKMEPEQAPKLYEHPANQLIARVQAEHIQSLEKSIRLIEKAVLDCAHELPLYERLLTIPGIGRVLGMTITMEVGDIKRFKTDGDFASYCRTVDAKRLSNGKAKADNNQKCGNAYLAWALVEAANFARRFDEPCRRWYDRKAAKTSKVLATKALACKLAKAAWHVMAGPGSYDEKRMFPELAAKKKD

SEQ ID NO: 306966 - protein, 357 aa, unidentified
MVTGLKHQKEKRSMDHFAGLDVSVKDTSVCVVDDTGRIVREVKVASEPEALLAALRNPAYHFKRIGLEAGPLSQWLFSAMAEAELPVICVETRHMRAVLKAQINKTDRNDARGIAQMIRVGLYRPVHVKTLRSQKLRMLLTHRQLLQSKAIAVDNDLRGTLRNFGLKVGMVGATRFEARIRELVEGLPDLAVLVEPLLVVRRVLREQIAVLHRRLLAVVRDDEVCRRLMTAPGVGPVVALTYRTTVDVPARFRKSKSVGAAFGLTCARDQSGERDRAGAISRCGDKMMRAMLYEAAQSMLVRSTRWSWLKAWAMQIARRRGKKKAVVALARRLAVILHRIWVDGTEFKWTREAVPAA

SEQ ID NO: 306967 - protein, 346 aa, unidentified
MSVYVGIDVHRKRSQVAVIDGDGEVLANRNVPNGVETILGVIGGLPPGTPAAFEAAFGWGWLLEVLEDYGFDPHLVHPLQCKAIASARLKNDKVDAAILAQLLRADLLPEAWIAPPAVRQLRALLRHRAQLVRLRTLLRNRIHAVLADHGHDRPSGCWSGPGRAWLASLELPAVSREVIDDDLALIDALQVPIDRLDWEVRQRARSDPRVKVLTQLPGVGPFTALVILAEVGDVTRFGSARKLASWAGLTPTVRGSDRTVRHGHISKQGSAWLRWILCEAAQTAKRSPQFAASYQAIARRRGKKIATTAIARKLLTRAWHLLAGAERAAGPPATTTSAPAQTGGGH

SEQ ID NO: 306968 - protein, 342 aa, unidentified
MKITTVGIDLAKNVFQVHGVDQRGKVVVQKRLRRQQVLTFFTQQPPCLVGMEACGGAHYWARRLQAQGHTVKLMAPQFVKPYVKANKTDAADAEAICEAVTRPNMRFVPIKNADQQAILSLHRARQGFVRARTAQANQIRGLLAEYGITLPQGICHVANRLPEIVEDAANELPGLFREVLQRLVVHLRELNHQVQELEEQIETWHRGNRASQKLAKIPGIGPLTASALSASIGDAKAFRNGRELAAWLGLVPRQHSSGGKPLLLGISKRGDAYLRTLMIHGARSVIRVARRKSTATDRWSTDLLERRHTNVAAVARANKNARIVWALLAHDRDYRADYELAA

SEQ ID NO: 306969 - protein, 343 aa, unidentified
MELHAIGIDLGKTVFHLVGLDSSGKVIVRKRCSRAQLLAYTANLCVHVIGMEACSGSRFLGRALRAQGHNVRLMPAQYVKPYIKTNKSDYIDAEAIAEAVQRPTMRFVPIQTEEHLDLQAVHRVRERWVMRRTAVVNQIRGLLLERGLPLPKGRSHVDHALPEILTDPALRLSGSLRVLLGQLQLELEQLTARIEQMDAVIQQTARENEACQRLTAIPGIGPVTATALVAAIGNGAGFRRGKDLAAWVGMVPREYSTGGKQKLLGISKRGNSYLRRLFVQGARVVMQYRTKQAPGLSVWLSQLMARTHQNVAVVALANKLLRMAWAVLCKNERYRVPLLATAP

SEQ ID NO: 306970 - protein, 443 aa, unidentified
MSKKPSTHLRGERGQAFADLIRGVPPEQLLCVSLDISKYFHVAMIHNGLGEIVMSTFEIDIFQSGFDQLCQAIEQARSRSQAQVVLVGMEPTSHYFENLARHLLQRYPRVKLVNSFAVKQNREQQLMRREKTDPIDAAAIGDLLRRGEGTLYKPLAGVYLQLQQIDRVRLGKVKIERMLKNQIIGHLDRIFPGLVLLGDAAKERYTPLFGTDFWLCQTLQDLVRVCPNPHDLVKMSPQQLVQAFHAQQRRLGPVTAARIVAQAHQTLLPNPELAAIRCELLQHDLELLETVQIHITTLEQRLASLVAQTPYQVWTKLKGLSVIQVASLAAAIGDPASYTDAAQIFRRSGLVSGRNDSGRRQRKGQGNPVLKAGDVYLRRALMGAIATLILHQPVLRRYDQKLQTTKPAGVARVATARKTNGILWAVLRDQSANTLIYCKGAEM

SEQ ID NO: 306971 - protein, 395 aa, unidentified
MYYLGIDIGKNNHEAGLIREDGSHVGKSLRFANAREGFQQLLLFLEQSLPEREAFCIGMEATGHYWLALYSFLREQGFALHVINPIQSDSLRNFHIRKQKTDAVDCFLVAEVIRFGSFSETHLADEDIMALRNLARFRESLKDSCADYKRQVVTVLDQVFPEYAALFSNVFGESSKAFLKTYGTPEQVVDVNTKSLAALLRKTSRGRHGTDKARELKSLAARSVGLTLCSDAFAFQIRILIEQIEFTEKQIDEIDKKIARQLRKFSSVILTVPGVGPATGAVILGEIGDISRFSNPKKLVAFAGIDPTSFQSGNYVGQHNRLSKKGSPYLRRAVWMSALIAVRCDPVFKAFYEKKRGEGKTHGTALGAVSRKLLYTIYAVLKANKPYEVRRQGIE

SEQ ID NO: 306972 - protein, 379 aa, unidentified
MRNDSTVYVGLDLHKDSITVAYAIDAGEVELLGKTGTTGADIDRLCTRLQSKAPHVRVVYEAGPCGYGLYRQLVQKGFDCMVCAPSLIPRKPGERVKTDRRDAIKLARSLRADDLSAVYVPGIEDEAFRDLARAWAAAREDLWRARHRLKSFLLAHGVRYTGSANWGEAHRRWLGRCSFPSAWQHLAFDEHRRTIEDRLAQCTRLETALREAVISWRFYPVVLALQAMRGVQFVTAVGMVSEVGDLSRFEHPRQLMAWLGVTPSEHSSGGKRRQGSITKTGNSYARRLLVEAAWSYRHPARVSPEIQARLEGLPKAIIDRAWDAQVRLCRRFRRLTARGKPINITVVAIARELAAFIWDISRLAMSLAIPRSKLPAACA

SEQ ID NO: 306973 - protein, 427 aa, unidentified
MKYKQNFKIMQITDKTLVIGVDIAKKIHYARAFDWRGIEVAKTINFKANSTGFSEFKEWARKMAEKNGKDKIVVGFEPTGHYWFTFAQAVLEEGIMVVQVNPYHVKSSKELDDNTPSKSDHKDPKTIAMLIKDGRYQIPYLPKGGYAELRKANNLREEWLKKICSVKNKVQRWLDTYFPELLDVFSSWEGKTAVMTLERMALPAKITEFTAEEILKIWREEVKRGVGIKKAQQLLETAADSVGMKEGLKMAEYEIRLLMKEYKEIREVMDDIEEKLEVMAMAIPGAINFLEIKGIGIKTVAGFFAEIGDITRFTHPKQIIKLAGLNIRENSSGEHKGQTTITKRGRSRLRALLFRAILPMTAKNEEFSELHKYYTTRKENPLKKMQSLMALCSKLIRIVYTLVTEDVKYDPEKMLKDIHRNEVPVAV

SEQ ID NO: 306974 - protein, 334 aa, unidentified
MKYTPVGVDIAKHLIQVHFIDEHTGEVIDKQLRRQDFLMFFCNREPCLIGMEACRGSQHWGRELTKLGHKVRLLQAHFVKAFVMGNKNDVMDARAIWMAVQQPGKDIAVKTEEQQSVLVLHRSRRQLVKFRTMQINSLHGTLLEFGKTIHKGRELPEALERMKERLPPYLITVLENQYNRLNELDSLIEDIEKKLTSVARQNETCKRLLDIPGVGPLIATAAVATMREASAFKSGREFAAYVGLVPKQTGSGGKIRLLEISKRGNTYLRALFIHSARAAALLPKEPGPWITELKKRRPTSVAIVAMANKLARTVWAIAAHGSKYDKNHVSIRSY

SEQ ID NO: 306975 - protein, 356 aa, unidentified
MSRDIKYIGMDVHKEATVIAVLNGSGKLVMESIVETKAGSILQFIHGLRGELHVTWEEGTWAAWLYDLLQPQAAQVLVCDPRRNAFLKEGNKSDKIDARKLADLLRTGMLRPVYHGEHGLRTLRELGRSYQTISQDLNRVMNRIKALYRGWSIPCAGTQVYAPRYREEWLQKIEHAGVRRRAELLYQQLDGLQALRRTLRPELLAESRKPKAAKLLRQIPCIGPIRAARLLALMQTPHRFRSKRQLWTYCGLGIETRDSAQYRFVRGQLQRAKKPQQIRGLNRNHNHEMKEIFKGAATRASCGVGPLRDFYVALLAKGMKPEMARLTLARKIAAIALTLWKKEERFDAEQLKLQAA

SEQ ID NO: 306976 - protein, 318 aa, unidentified
MNTNTLQNINVGVDTGKSQLDIYVRPLDIYFTVPNTDKGISDAIKIIKKHKPQRVVIEATGRLEMPFILACDKAKLPYVVANPLRIKRFAEAIGQRAKNDRLDAELIAHYAERVQPELTKLKSENIRLMSDLVTRRNQLLTIQTMERNRLQILPKNISSTITPILTALKNQLEKVEAKIEKLIESCPEYQAKNTILQSMPGVGKILAASLISNVPELGFITNKQASSLIGVAPITRESGRFKGKRMIKGGRPQVRTVMYMAMMSAIQYNPVFKATYERLLAAGKPKKVAIVACMRKMVVTLNSMLRDGAIWDKDSVKN

SEQ ID NO: 306977 - protein, 316 aa, unidentified
MVTKTVEHCYGGIDVSMDRLDVMILPERRGFSVDNNAAGWTELIERLHGSPVAAIGIEPSGGYERGVIRALLAASLSVRRINPNKLRQFARARGVLAKNDRLDARLIAEYVAIMPTRIVQRDVAAERLAEVVTMRRQLCDERVTVENQAAHVEDAMLRRLNKRRLARLEADINLLDKRLAEMVAADPTLAQRYELLTSMPGVGPVLAFTLIALLPELGQMSRKQIAALVGLAPYDFDSGRLRGHRSIYGGRMPVRNVLYMAALSACRYNPALKVFHNRLAAADKKSKVVIVAVMRKMITTLNAMLRDKAEWQPKTA

SEQ ID NO: 306978 - protein, 419 aa, unidentified
MNYAPLRVLPDVPPGGAVAGIDWASAGHVACVVDMSGKVAGRLAVAHDRAGIAALTTWLRRAGAAETAIERGDGALVDALLAAGFTVVVIPPGQVKGLRSRHSSSGAKDDHFDAFVLADALRTDRARLRPLVPDSPQVLALRQAVRFRKDLVRDRVRAGNRLRAHLQAAFPGSVGLFSSLDCRLSLAFLAAFPTSAHAAHLDEEALTGWLETVPARGNCAPGGVLAARLSAAAPGAGDPALLAPVTVQMAGACADVAARIRAVEDQIAAQLAACPDGHLFTSLPRAGTVRAARLLAEIGDCRARYTVPRALAAAAGVSPVTRKSGKWESHDYRHAVSADLRDAVCDFADGSRRASPWAARTYEAARARGKDHPHAVRVLARAWTAIIWRCWQDGVPYDPAKHRALQDILQDQAGQEDGR

SEQ ID NO: 306979 - protein, 347 aa, unidentified
MNFYTQQHKYYCGIDLHARKMYVCVINQQGSVQLHKNIDTDPTLFLELIAPYQEDVVIGVECVFCWYWLADLCAAQQLSFILGHALYMRAIHGGKTKNDKIDSYKIASLLKGGNFPVAYSYPAEWRATRDLLRRRMYIARRCGELVAHIQNTNTQYNLPGFNKKLTRKHNHNGVAERFEDPEVRKSVEVDLEMIESLNEILKKLEWHIEKTARQHDYHTLYLLRSIPGVGQILALVILYEVHDIGRFPRVQDFSSYARLIRPKKESDGKWAGTSNKKIGNHHLKWAIKEAAILMLRESSQAKYYVGKLERKYNKGKALGIFTHKLGRAIYFMLKNKEAFDMKTFFEQ

SEQ ID NO: 306980 - protein, 356 aa, unidentified
MAIVAHAHPFVIGVDTHARNHALVILAAATGEVIDAEQFPATAAGLGRAMSWVGRRTGGDLDTLWVIEGIGTYGARLARAAAEAGYQVVEAARMSARANRGVGKSDPLDARRIAAAVLPLDSAELRRPRKDDGARAALRVLVAARDHMTAERTAAVNALTGLVRVADLGIDARRPLTGKQITEVSKWRTRAEELGLATARAEAVRLAKRVVALEEELATNQASLTALISQSPARGLLEKNGIGPVTAAIALTAWSHQGRVRSEAAFASLAGVNPIPASSGNTVRHRLNRGGDRRLNRALHMATVTRMRMDPDTRAYVERRTAEGRTLKEIRRCLKRYLARQIYRHLNATHAPVPAT

SEQ ID NO: 306981 - protein, 317 aa, unidentified
MTESVKVNVGIDVSKDFLDVHVGNVALRRVPNRSSGLSVLKRILSRYSVSLVLCESTGGYENLAVTYFQSLGYDVCVINPRQARDFARSMGRLAKTDRIDAQILCRLADVIDASPERTRFIRPLTDERRQHLVSMVRRRRQLCDLMTAERNRRAKTDDYGSESISTVLDFLTDEVARIDRDIAAHVGSCFSDISSLLQTFTGIGPVTASTLLGELPELGKLNRRQITALVGVAPFNRDSGYMRGRRRISGGRSSVRNVLFMAALSSVRFNPVLKAFFTRLVAAGKPKKVALVACMRRMVCILNAMLRDGSRFEVAVG

SEQ ID NO: 306982 - protein, 411 aa, unidentified
METIFERVGALDVHKAQVTGCVRVPDDAGRRVPQVAEFDTTVRGLIALRDWLAAYRVTHVAMEATGVYWQPVWHMLEDDFELTLCNARHVKNVPGRKTDVSDAQWLCQLMEAGLLRGSFVPPKPQRRLRTLTRYRKTQIAERQREANRLHKALEDTGIKLDCVATNILGLSGRAMLDALVSGTTDPVVLAELAKGRLRAKLPALREALEGRFEAHHALVIGAILAHLDFLDEQIQRLTDAIEVELGPSGLAGVALAATMTGVAARTAEVMVAEIGTDMRVFPTARHLASWAGRCPGNHQSAGKRRSGRTRNGSKWLGIALEEAALAAIRTRNSYLQAQYQRLKPRIGHGRALGAVKHSMLIAYWHMFTTGETYRDLGGDFFQRRDPERATKRLVAKLQALGHNVTLQPAAA

SEQ ID NO: 306983 - protein, 347 aa, unidentified
MLHAGLDLSRKKLDVCLLADDGAHLDQLAVPPDVDSLRTLARRIGEVHREPVCAVIESMTGARVVHDTLEACGWSVEIADAQKVKGLAPLACKTDKIDSMVLAVLSHRDLVPAIWLPDPRVRQERELARFRLHLVKHKSALKCRVHSTLINFGRACPVTDLFGAEGRRLLKRLEVPEPWRSNVTASVELIDDLEQQIAEINRRLKEEHAYHPYIPLLMSVPGIGWVLAFTIAGEIGDIERFSSPEKLTGYTGLCPRVNQSGERDRRGPLTKHGPTYLRWALLEATMHASRHPAYAERYERTKRRLGKQRGAKVAQIDIARRLSHAIWHMLSSNRPFAPRGAAFRLAA

SEQ ID NO: 306984 - protein, 497 aa, unidentified
MGCCALESGDAFLAIPFRNLTNCAAQPFRWSQQEELQMNHTRSKSKNGSKMPMVHPNAAAIDVGATMHMAAVRADRASEPVRSFGTFTADLHRLVNWFTECGVETVVMESTSVYWIPVFELLDSHGFTVCLVNARDAKHVPGRKTDVSDAQWLQRLHSFGLLRASFRPKGQIAELRSYVRQRERLLEYAASHIQHMQKALTEMNLQLHHVVADITGATGLRIIRAILAGERDPGALACLRHYSCHSSAETIAKALTGSYRAEHLFALEQALALYDAYHEKASACDARIEAVLKELSIHRGRGHGPAPRASRRRNRTDQANALTFDVREALFALLGKDITTIDGLGPYLSLKLIAECGDDLSSWPSAKHFTSWLGLAPSNKVSGGKMLSSRTRRSGGRAAALLRLAAVTVGRTDTALGAFYRRLSSRIGKAKAVTATARKIAVLFYNAVRYGMDYVDPGASAYETRYRTRVVNNLHRRAKAFGFVLQPLEPKVGAAVS

SEQ ID NO: 306985 - protein, 351 aa, unidentified
MPRRSTVSAVTTIGIDMGKNTLHMVGLDSLGAIVLRERVSRGRITSRLANLPRCLIGIEAGMATHYVARELAALGHDVKQVPPAYAKPFRQGHKNDFRDAYAVAEAVQRPTTRFVPAKTNEQLDLQALHRVRSRLVSERTAVINQIRGFLLERGIVVRQGLRFLRHLLPDILSKRTDVLSPRMVRIISDLVGDWRQLDERIETVTNEIETLAKSDDGCRRVMTVPGIGPLISSAMVAAIGNGAAFAKGRDYSAWLGLVPKQMSTGDRTILGRLSKRGNGYLRMLFMQAARVILLRPANWPKHSFGAWLVRAAQRLHPNVLAAALANKLARIAWTVLAQERSYEARVTKATA

SEQ ID NO: 306986 - protein, 320 aa, unidentified
MKIVGCDLHARQQSIAMVDTETGELSEKRLMHEGNAVRDFYASLEGPVVVGIEATGAMQWFLELLEELGIECRVGHPAKIRAAETRKQKHDRRDAEVILDLLVMKDRFPDIWMPSIEQRDLRTLLRDRHQWVKMRARLQHTLQAIALNHALREGRALWTAAGRRALQDLALPPYSAQRRGELLSLYTQLEKRIQQLDKQVETEARQRPRARRLLTHPGVGPVTALATEVFLGDPTRFATANQVASYVGMIPCEHSSGKKQRLGKLTKEGNSLLRYLWVEATLHAVVKDAKLKRFYRRKLIQKGMGKARVAAERGSPCGDA

SEQ ID NO: 306987 - protein, 347 aa, unidentified
MDHIGMDAGMVNSHVCELTEAGEVVERQIRTERRRLQQVFGSRPTARILIEASTESEWIACCLEELGHEVIVADPNYAPMYAQRSRRIKTDRRDARALAEACRLGAYRAAHRTSETQRDVRAVVGIRELLVRTRTRWIVHIRTLLRRDGLRLAPGRAELFVARVNDVPLSPRLAAQIAPVLALLAPLNAEIAALDSQVSNGAREDERTRRLMTVPGVGPLTALVFVATIDQVARFRNAHQLESYLGLVPREWSSSEMQRKGSITKAGNTRMRWLLVEAAWCILRRKKKPETALLREWADRIALRRGSHVAAVALARRLAGILYAMWRDQTEYDPNQIGRRGQMRQVA

SEQ ID NO: 306988 - protein, 388 aa, unidentified
MHMIDQPVRPTAIRTDLGAIFVSLELSRSTWLVTSLSPANGEKMSKHSVRAGDTAGLFARFTHLREKCRQRTGYSFPIITVQEAGLDGFWLHRVLEKEGVESNVVDPASISTSRRRRRAKTDRIDGETLLRTLMAYKRGEPRVCAMVRPPSPEEEDRRRISRERKVLTGERVTHVNRIKGLLFAQGISNYEPLHKDRRRRLEELKTGDGRALPSHIKSQLYRELDRLELLLEQIKAVEAERDALIAAQATNATPAPVKMLLNIKGIGAEFATVLWAEGLFRHFDNRRQVASYAGLAPTPWQSGSVDREQGVSKAGNPRLRVTLVQMAWLWLRHQPRSALARWFTERVHRNQGRFKKSTIVALARKLLVALWKYATSGVVIEGAMMKDA

SEQ ID NO: 306989 - protein, 363 aa, unidentified
MELTKVAIDLAKNVFAVAGADARGRIVLRKQLRRGQLAGFIARLAPCEVAMEACGGAQFWARRFQALGHRVVLLSPATVRPYRTGNKTDRNDAAAIVEAMSRPSLRPVALKTVAQQDTLALHRMRSLLLKHRTALSNHMRGLLAERGIVFRQGIAALKRELAEILTQDNDDLSSEMRVSLRDLSEMLRALEQQIGACEGRLARKFAADERCQRIEQVPGVGTLIATALVATVGNAREFRNGRELSAFLGLTPGQHSSGGKTQMGGITKRGDRYLRTIMIHGARAALRYCPRKRDPRSLWLARLAQRRGPNVAAVALANHNARIIWALLSREENYREPDAAVFRADPPKVVRRVRHEKLLVVRD

SEQ ID NO: 306990 - protein, 417 aa, unidentified
MWNKATRVKSSVESASNKHIGGILMVCVGIDVAKDKHDCFIISSEGEILADVFTIPNNAEGFDTLLQAIRRSTRPEDKIKVGLEATGHYSYNILGFLLDKGLPTYVINPLHTNLYRKSLSLRKTKTDRVDARTIAAMLMSDVDLKSYTDTVYHNEELKSLTRYRFDKVRERAKLKQSVSRLVTILFPELEKLVSSLHSASVYALLSEFPGAKQISSTHMTHLKAVLKNASQGRYGQEMAETIRNAARSSVGSVMPAKSLELQHTIRLIRELDAEIEDIETAIQAIVDEMQSPITTIPGMGVRMGAVILAEIGDFSRFDSPDKILAYAGMSPSTYQSGQLSLSGAYSHMEKRGSRYLRYALYNATKHVCHWDPTFAAYLAKKRAEGKHYNVALSHAAKKLVRLIFAMEKSQRPYCAAP

SEQ ID NO: 306991 - protein, 348 aa, unidentified
MGDSSMNISVLGIDIAKNIFQLHGVDSSGKRILKQRIEREQLSAYVANLPLSTIAMESCGGANYWARVFQRQGHIVKLISPQFVKPFVKTNKNDANDAEAIVEAASRPSMHFVPVKQVEQQDIQSLHRVRSRLVRNRTALINEIRGLNLEYGIAIPQGALKVKSHLRSVIDDKENELTCSSRELMQELYDELVELEGRLKKIEKKVKLICKENDQCQRLLSIPGIGELTATAIVAAVPNANEFKNGRHMAAWLGLVPRQSSSGNKQILLGISKRGDRYLRTLLIHGARAALCRYKNTNNKYGEWLSHKKESLSLNKAAVALANKNARIIWSLLKTGEEFNSNQQKVAA

SEQ ID NO: 306992 - protein, 402 aa, unidentified
MFAVGVDVSNGRSTVAVLQSKTSTLMKPFEIPHTAEGFASLAGKLAGLDGEVRIVMEHTGRYYESFARAMHSAGFFVSAINPLAIKNYQDGINIRRVKTDKADAMKITRFALDKWEILPQYTPMDTIRYDLKTMHRQFQLSSKTKTALSNNLVALLEQSYPGANRYFDSPARPDGSQKWVDFVSIYWHVDRVRKMSLSTFTSHYQNWCKRKQYNFSKSKAEEIYKAAKELVPVLPKDDLTKLIIKQAVDQLNTASQTVEKLRSLMNETASKLPEYPIVMAMTGVGPSLGPQMMAEIGDVMRFTHKGALTAFAGVDPGVKQSGAYEQKSVHASKRGSSTLRKTLFLVMNVLIKLKPQNDPVYLFMDKKRAQGKPYYVYMTAGANKFLRIYYGRVKEYLDSLPQ

SEQ ID NO: 306993 - protein, 342 aa, unidentified
MEQVSVVGLDLAKSVFQVHGVNAQGEAVLRRRLTRGQLLKLFEKLPPCLVGMEACASAHHWARELTSLGHEVKLMPPQYVKPYVKRGKNDAADAEAICEAVTRPTMRFVGAKSPDQQATMMLHRVRKILTRQRTQISNALRAHMAEFGITAAIGRGGLERLIAVIADQDDARLPDEARACLGVLCTQLELIKEQILDNDRRILADARRTEAGRRLMKIPGIGPLLASAIVACVPDPSTFGGGRSLSAWIGLTPRQNSSGGKERLGSITKAGNTYLRELLVVGAMAVVRRAKQGSTKRSWLTQLLARKKPKVAAVALANKNARIIWAMLATGEAYRDPELAAA

SEQ ID NO: 306994 - protein, 381 aa, unidentified
MKNCMRWVGLDVHAETIAVAVAEGNGEVRSLGTIANRREAIRALVKRLGRPETLRACYEAGPTGYVLYWQLIGLGVRCEVIAPTLVPKKVGDRVKTDRRDAEKLAKGYRSGDLTAVWVPDASHEALRDLVRAREAAKADQLRARHRLQKFLLRHGRRAPAGVRTWTQKHQTWVKAQVHFEHAAQEAALVDYVSEVDHVAERIARLEKAIDLAILEAPEKMRAVIEGLQALRGVAKLTAVTIVSELGEISRFQRAPQLMGYTGLVPSEHSSGERTRRGAITKTGNAHLRRVLTEAAWSYRTRPSVGAALRRRQAGQSEAVKEIAWKAQHRLHTVYRRMLGKGKPSQKIVTAIGRELVGFIWAIGVIVERAQRESHLVRSAMA

SEQ ID NO: 306995 - protein, 344 aa, unidentified
MYFIGVDHHKQWSVMSVLGDVGPEIKFGQVANRGEAVGRFLEGYRPFQAVIEAGYSSYVMADLLRELGGEVKMANPGELKAIAHARIKTDKRDARMLAELLRGGLIPEVTQRAPENRRAQRVMRLRAFWVEKRTELKNKIRALLAQQREAIRLEVERRSDGLFSGKGLEYLSRLELPQPDQMILEDLLESYREGQEHLRKTDGLVEKLYAELEEARRIDTVPGFATTLSVLVAVEIGDVNRFVSAAHLHSYAGVIPTTHASGGRTYHGHITKAGNRWLRWAALEAVFPATIASVELRGLYSRLARHKNPNVAKVAIARRLLTIIYRVLKEKRNYIVGMKNPSAA

SEQ ID NO: 306996 - protein, 430 aa, unidentified
MDDREIIRLEQFRQLKKEIRGSEEHLIVGIDVAKQKHNAFLGTATGKTLLKRLVFENNREGFEKLLMHVESISASNGHKRVTFGLEPTADYHKPLAEFLINREHNLVLVSGVAVKRNRELLDGRWDKNDMKDSANVADLISQGKCLFYEYPTHVLRDLRSLLSLKRKFKKIEHGFRVRIRNHLLAQYFPELDRYYGHSDSENLAIVQWCLSPSKIAKMKYEDFFRLVTTRDRGLIQHQRLKAIWDSAHSSVGCSAGTATEFEAGILVDTLKQVRETIGNINEKVIEICVLFPEYKYLLSIPGFGPDVSAIVLAAIGDPFRFESGNQVLKTAGWDLSANRSGRRSDSVTPVISKRGKADLRYALYQAALIASTRNKHFTPWFIEKLKGREKEKGIKTKMRVKLAAKLLIIAWTLMKKKEPFNPELLKVKKN

SEQ ID NO: 306997 - protein, 467 aa, unidentified
MTPHAGKRFRTSPPGDALAVQQPQAAGIDVHAAVHFVAVPAEDVPPGFVNPEPRLPAGVRKFGTNTGDLEALADWLTACRVTTVAMEFTGVFWIPLFDLLASRGFQVILVDPRQTAHAPGRPKSDVLDCQWIRRLHSYGLLTGAFRAADEIVRWRGFQRQREMLIRYAAQHIQPMQKVLEEMNVKLTEVVSDIVGQTGMKILRDIVRGVRDPVKLAKHRHELCKATKEQIAAALCGNWRPELLFALRQALKLYDFYQKQLQECEGRIEECLRAMEDKSKGAPLPPPPRQRKSQKNEVRFGARVLLFKMAGVDLTQIEGISATTALVILSELGVDLSAFPHEKNFVSWLGLCPQHRGSGGKIFKRRTRRGANRVARALRMAAQGCHHAKNALGAFYRRIQARCGGAKAVVATARKLAERVYRMLRYGQEYVRQSQEAYQEAYQLRLVKSLAKKAASLGYKLVPEAMTP

SEQ ID NO: 306998 - protein, 408 aa, unidentified
MKLYVGIDVSSEKLDVCFLDSEANILKECVLPNNLNGAAILKADILHFAQKTAYTRVIAGMESTSVYSFHPSTFLALDPELKAIGLEVVVMNPKSIHRFKGIFEEDKTDVIDAFRIADFLRFERFNTSLLKEEKYLSLQRLTRSRYQLMQQMTECKQHFLENLYYKCNTLTKEVDTSVFGAAMMDLLTDSLTLDDIAKMDLEELASILQQKGRGRFGDPLKLAESIAKAARDSYRLGKVMQESVDVVLATYALMIKTIKDQIKSLEKAIEQILETLPESQSLLSIPGIGPVYAAGILAEVGQIGRFENEAKLAKYAGLYWKQNQSGNYESERTSLTRTGNHYLRYNLVEAANSVMRNEPVYREYYLKKYNEVPKNQHKRALVLTARKLVRMVDVLLRNHQLYAPERSV

SEQ ID NO: 306999 - protein, 300 aa, unidentified
MIEQHRTVYGGVDTHKEFHVVAAVDEVGRILGTETFPATAAGYRRLERWLERYGTIAKVGVEGTGSYGLGLTRVLGAHGIEVVEVNRPNRQLRRRRGKSDTVDAEAAARAVLNGEATSVPKAADGIVEAIRALRVVFCSTRNARTRIANQIRDLLVTAPDQLRETLEPLDTDERVASAARFRCSESLDPAGTTKVALRTLARQHQMLTTDLDALRARLDELTAQANPALRHAVGIGPDVASILLVAAGDNPERLTTDAAFAALCGASPVEASSGKHVSHRLNKGGTATPTTPCGASSWSA

SEQ ID NO: 307000 - protein, 438 aa, unidentified
MKVLHERVAGIDVHKDMIKVAIRSPGDKPWTRKTEVFEFRTFYGVLQEMACELRRRGVTHVVMEASGVYTEPVYHALCEQDFTEVIVVNPAHVKALKGHKTDAKDCARLAELLECGLLHGSFIPSAEQKEVRDLTRYRMKTVQARTSEIQRLHKALESAGIKLGSVMSDITGVSGRLMVDALIDGERRAQVLADLAKGTLRSAGKQADLSMALTARFTDHHAMLCRLHRDQIKLHDHAIAGLDEQIAGGASRWLRELGLLKSVPGFGEVVSAAWLAEIGPEPHRWFPSHDKLASWATLCPGNNISARKRKSGRTGDAGTYIKPMLVQAAWAAIQVRGRLQARYRRLVRRFGGDKNPGAKKKAIIAIAHTLLKIAYQVLKTGQPYTDLGADFYTRRESPEQQQAYLERRLQKLHPGCTVTITISPPPGSPSPDAPAEAA

SEQ ID NO: 307001 - protein, 340 aa, unidentified
MQITTVGLDLAKNVFQVHGVNEHGKVVLRKQLRRDQVAAFFANLPACLVGMEACSSAHHWARKLGSMGHTARLMAPQFVKPYVKSNKNDAADAEAICEAVARPSMRFVPIKNVEQQAVLALHRVRQGFVRARTAQANQIRGLLGEYGLVVPQGIAYVAKRVPELIEDASVELPGAFRLLIDRLLQHLRLLHRQVDEIEAQIKTWHRASDASRRLEKVPGIGPLTATALVTSVGDAKNFDNGRQFAAWLGVVPRQHSSGGKPTLLGMSKRGDAYLRTMLIHGARSVIYRATQRLDAESWLMKLTNRRNKNVAAVALANKTARTVWALLAHDREFRADYAAA

SEQ ID NO: 307002 - protein, 335 aa, unidentified
MQIATIGLDLAKHVFQLHGVGPDGCVILRRKLRRTHMMPFFASLPPCLIGMEACASAHYWARELSAFGHEVRLMPAHYVKAYVKRGKNDAADAEAICEAVTRPTMRFVAIKTKEQQAVLVMHRARDLLVRQRTQLINALRGLLAEFGICEPQGVRHVGRLRAHLDEDTVPEPGREVLRLLVAQLVELEKRVTAIDAKIRGWHRDNPMSQRLAKIPGVGPLIATAIVATVGDASLFRSGREFAAWLGLTPRQRSTGGKQRLGRITHQGDAYIRRLLIIGAQSALQCSKETKENVWIRGLLTRCARLKVAVALANKMARITWALMAKEDVYRRAPTA

SEQ ID NO: 307003 - protein, 357 aa, unidentified
MKVTTIGIDLAKDVFGLHGVDGKGRVAFKKRLVRSRLLEFMSQLPPCLVGLEACSSAHWWARKIERLGHRVKLMSPRFVKAYRKSDKNDANDAEAICEAVTRASMRFVPIKSEAQHEVQALHRVREQLLKSRTALVNQARGLLAEHGIVAPLGIARARRLLLEILADPERHGLSGLFRETLQEMAERLRFFDERVGAYDDRIERRFKEDERCRRLAKIEGVGPLVATAVVAAVGNASEFKSGRELSAWLGLVPRQHSSGNRSQLLGISKRGDRYLRTILIHGARAALRRADHKRDQRSRWATRIKQARGYNKAAVALANKNARIIWALLTRGENYRPPAISVASPTADRISPTQVQA

SEQ ID NO: 307004 - protein, 347 aa, unidentified
MDQIIIGVDTHKSKHIAFAIRHQGACLGRMTISADSQGHRDLEAWASGFGTVKAFDIEGTWSRGAGLSRDLLAMGHRALDVMRPNRQLRYLHGKSDSLDAESAARSVLNGQATALAKTQTGACETIRHFKIARDSAVKSRSQAMITLKTLIINAPAELRDTLDLIKGPITLIRHIAALRPGKITSPTASAKTAMRAIARRWLVLHEEIQAHGQELERMVREKAPDLMNSHGISTMTAAEMLILVGDNPERIKSEAALAKICGVCPIPASSGKTKRMRLNRGGNRHANAAIYIIAITRMRDHGATKSYIAKRTAQGKSKREIIRCLKRYIVREIYRELCVPNDTKRTH

SEQ ID NO: 307005 - protein, 361 aa, unidentified
MLMPRTRNKISFDGQNIYVGIDAHLRNWTVTILTEHNFHKKFSQDPKPETLHNYLQRNFPGAKYHTAYEAGFCGFNLHRRLNELGVNNIVVNPADVPTTDKEKKQKEDARDSRKLAMTLRSGELKSIYVPSRESEELRSLLRYRKTLVKDISRGKNRIKSNLYFHGVEIPPEHQQNSKYWSNKFTQWLKSISHTTDYGTIVLQDLIETNLNLRTKLLKVTQDIRKASKDKMYSKRIDLLTSIPGIGIITAMTILTELETLERFKSFDKLCSYTGLVPTTHSSGDKDNTGKITPRANMILRNALIESAWIAARIDPALSLTYNELCKKMKPTMAIVRIAKKLLNRIRFVLKNETKYIYAVIS

SEQ ID NO: 307006 - protein, 372 aa, unidentified
MSSRILFVGLDVDDQAFHAAALERESGETGEFRCRATLKALERSLEGLANRFPGRQIRICYEAFYVGFHLQRDLARLGYFCEVISPSSVPRVRGNAVKTDRIDARKLAQFYANGQLKAVAPPDAEVERDRDLLRSRQRLLHQLCQIRSQIHSLLRRQGIHYKTQTGYKSHWTKHHLGWLERKALSLEGSLGLNLRLLLQQMKWMDHTLGEYGRAIEELAKSPRYEKPVRALVCYKGIQHIFAMTIATEIGNIARFDHPRSLASYMGLDIREYSSGGKHHRLGITKQGNRYLRTAFVEANQRGWAFGRISRDLKNRREGAPPEWVEIADRCLNRLCKKGRRLLRAGKHPNKVKVACAREMVGFVWESLRAVAA

SEQ ID NO: 307007 - protein, 322 aa, unidentified
MNKYTETFGIDISKDVFDCYGSKQGHLQFKNTEHGFIKFLQLLDDNTLIVMEATGYYHYRLAQFLHKKKQVVSVVNPLSVKRFIQMKLAKVKTDKSDAKAICEYGIINEVPLYNALTEVQSECLQLFRLMDSFLKKRTATKNKIHGEEVLGIPSKWVYRSLKRDLKHLDKELLGIEKQLLSLVKQDQQIQLTLLQSIPGIGLKTALFLIVITDGFKKFETASQLCSYVGITPTIRESGSSVRGRSKISKVGNRKLRNLLFLCSFSACKQNKACKNIYERIVNKGKSKKLALIAVSNKLLKQSFAIAKSGLPYDETYVSVLSK

SEQ ID NO: 307008 - protein, 342 aa, unidentified
MNTVYVGLDLGSSNFQQVALNHEGVSRMNRDFSTSEANLVKAFSDLKGEIHVHLEAGELAPWAASIIAPLVRRVVCSHPQSNAWIAKDADKCDRIDAYKLAELLRLNRFKEVHYAPDQPRRNFKQLVQHYDELTAQQARLKTKLKARLRMQGVIVTGERLFSIKGRKEVLARVESRDLRTAITQLYDVLDQSVTAQEQARLLMLRAAQAFPEIKLLRTVPGVGPIGACRFSAYIHTPSRFSTTRKLWKYCRLSVSHRSSNGKPLRRPRLDRSGCGRLKDVSRKAFDVAIRSRQDNGFKRAYQQALETTHDATHARLTVQRKIVSTLRAMWLTMTPYCDQLSR

SEQ ID NO: 307009 - protein, 384 aa, unidentified
MEKSSTLYVGLDVHKDSLEIATADAGRDGEVRHVSSIGGDLVALDKALRKLLSKGHRLHVVYEAGPCGFVIWRHLTAQGLSCEVVAPSSIPKRPGDRIKTDRRDAMMLARLSRSGDLTAVRVPGAADEAVRDLVRAREDAVREQRNARHRLKALLLRNGIPYAGKTSWTAAHLRWLATLKLEHAAQQIGFQEYLHSITEAGARIARLEQAMRDTLAEWTLKPLVQALQAMRGMQLIASMTLVAELQDFLRFENPRQLMAYVGLVPGEHSSGPKRRQGSITKAGNSVARRMLVEVAWHYQHSPRVSPIIATRQDQLPKEITDIAWKAQLRLNAKFKGLVARRVMKTKAVVAVARELAGFVWAIGQEVQTSGWQGIEIKPASSTAA

SEQ ID NO: 307010 - protein, 344 aa, unidentified
MAIVGAFDVHRKQITFDYLDTETGRELHGRIQPACRERMRAFLDRFAGRDDVAFSVEACTGWRFVVEELERARFAAHLAEPAETASARGPKRRAKTDRADARLQRELLASGRLPESWIPPEKVREIRVKLELYKDLRDEHTAWVQRVHATLFHQGVPAIGNGGLDTPATRARLAAGEGLSAAGAQAVRAALRMLDAIEAELDALHRELAAFSSRQRGCRALAAQYGVGAISAVAIWAMLGDARRFSASRKAVRHTGLDVTVHSSDGKRAPGHLSRQGPPVLRWALYEAGYCAARRTSPDHGYYTAVQERIDGNRAALSMARKIARRSHHILRDLGDAAFAPAPD

SEQ ID NO: 307011 - protein, 367 aa, unidentified
MAKSIENLSSVTRIGLDLAKNVFQLHAVDAAGAVIIARSVRRGALLRYFDKLPRCLVAMEACSSAHHWGRALVALGFEVRLIPPAYVKPYVRRNKNDAADAAAICEAVARPNMRFLAVRSVENQAQLMRHRVRDMLVSQRTQLLNSVRGHLAEIGIVAPQGAQHAYALKALLTEGADANGEIVIPDCVRAALLPLSQQIDALDAGIAAIDKEIAALARNDATARRLMTIPGVGPLTASAIVATVRDLSAFASGREFAAWLGLTPRQNSSGGKERLGRITKMGDRYLRKLLVVGACATLRHRAGHDDALRVWAGQLLERKSAAFRFKLTAVAIANKVARIAFALMTKGGDYCGRVYCGGEDRPAPANA

SEQ ID NO: 307012 - protein, 411 aa, unidentified
MELCYAVCCGLDVHKKSVSACLRRPGPSGQRKAEVRTFATTTGALLELSDWLTSAGCTHVAMESTGIYWRPVYQILEERMTLLLVNAAHVSKVPGRKTDVKDCEWIAELLEHGLLRGSFVPPAPLRELRELTRSRRQLIETHSRQANRVQKVLETANIKLGDVATDVLGASGRAMLKALIAGERDPVALAGLALGRLKDKRAALEQVLNGRFTDHHAFLLRSLLAHLEFLEAQISDFDRGIAEATRSMTPALEQLDTIPGVARRSAEQIIAELGDDMKQFPTAGNAASWTGICPGNHQSAGKRRHARTPKGNRWLRSTLVECARGAVRKRDSYLAAQYRRLAKRRGDKKAIVAVAHSILVAAWHILRDGVDYRELGGEYFDRVQRDHLVRYYQRRLAELGVNALIVEAAAS

SEQ ID NO: 307013 - protein, 408 aa, unidentified
MKTLHKRCAGLDVHKAEVVACVRLISKRKVEREVRRFPTTTQGLLALAEWLESAGCTDVAMEATGGYGKPVWHILEGRFALILANAAHVRNVPGRKSDVNDATWLADLLAHGLIRSSFVPPPAIQELRDLTRTRRQLTREIVQHVQRIQAVLEEANIKLCSVITDIMGASGRRMLKAMIAGETDAEKLAALGHERLGCTRAELVEVLTGRVREHHRFLLGQHLRTIEQLKDSVAAFDARIEAALSPFHDIVERLEEVPGLAATSTETVIAEIGTDMSLFPTAGHLLSWAGFAPRLDESAGKHRSTRIRKGAPWLKPVLVQAAWGAARKKNSYFQAQFLRLKARHGAKKAAIAVAASILTTVYHMLRDGTCYQDLGPEYFTRRNPAQAAARLANRIRNLGYHVEIRAAA

SEQ ID NO: 307014 - protein, 349 aa, unidentified
MYYVGVDYHKRYSVATVLDASGTMLARRRVDNRLDDFRDFLAPYDKAEVEAVVEATRSWGIPVDILEQLADRVVLANPGEVKLIAKARISTDKVDSLSLARLLRMDWVPEAYLRPKANREQQLILRLRCFLVQLRTRVKNRIHDLIDRQDESVREMTTGFSDLFGKKGMTWLRSLELGHPSGKLLGQLLAVYDALDKEVRQSDRLVAELFAVDDDCKLLAKTPGIGTFFAVLIKTEVGSIERFANSPRFNSYAGVVPSTESSGGKTWHGRIIKQSNCWLRWALVEAVIPATVADAGLRAHYEYYRRMKGSRVAKVITARRLGCIVYRVLKERKPYFEQPVPRRGYRQTG

SEQ ID NO: 307015 - protein, 343 aa, unidentified
MQTVTTIGLDIAKSVFQVHGVDAGGHVVIRRQLKRRYVLAFFQKLPRCLVGIEACGSSHHWSRELQALGHTVRLMPPAYVKPYVKRHKNDAVDAEAICEAVTRVNMRFVATKTPEQQSCLTLHRTRHLFIRQQTSVINAIRAHLAEFGIVASVGRHGVEQLLGVVADASDKRLPEVARACVAALGVQLQTLKAQILEFDRMIRAWHRCSEASRRLDDIPGVGPVLATALIASVGDPRAFRSGRDFSAWIGLVPRQNSSAGKDRLGSISKRGDRYLRSLFTTGALAVIRYAKIHGTKHRPWLTALLVRRPTKVAAIALANKIARMAWAMMAKGERYKEPAALAA

SEQ ID NO: 307016 - protein, 315 aa, unidentified
MSDVPCFAGSDVAKAQLDIAVRPSGERWVVPNDAGGAMTLVERLQVLHPTLLVLEATGGLERVATAALATAGLPVVVVNPRQARDFARATGQLAKTDALDARALAHVADVMRPTPRPLPDAQRRERRALLGRRQQLIVMRTAEQNRLAGTSERLQTDIEAHITWLNAAIATLDDDLETMLRASPLWRENDDLLQSAKGMGPVSAHTLLLELPELGTLTRQQIAALVGVAPLNGDSGTLRGKRTIWGGRAHVRTVLYMSTLVATRFNPQIKAFYERLLAAGKVKKVALTACMHKFLTILNAMLKHRTPWQPQEVQS

SEQ ID NO: 307017 - protein, 455 aa, unidentified
MNKVRSKKTKAKTVIEMSIVNPYAAGIDVSDKEHVVAVPENSDPARVKIFGTMTADIMKLVEWLKACKIETVAMESTGVYWKPLFSMLARNGFEVYLVNAKHVRNVTGRKTDESDAMWIQKLHSCGLLKSSYLPDDEQEALRTLVRYRRILMQDSSRFINRMQKSLELMNIKFHTVISDITGLTGKAVIEAILRGERHAINFLPYIGKRIKADKETIVKSLEGNWRGEHLFTLGESYKMYLTYRDRIAACDHEIEKQLQHCEAKGNDGIIEQNIKSKMKLIKKVKFKNHPRFDVRGYLERIHGVDVLNIYGLSETGGLELLAEAGTDLSKWKNEKHFVSWLNLCPNNKISGGKLISSTLLKKKPNPASVAFRQAANGVQKSNNWLGDYFRRMKAKGGNKYAIIATANKIATIYYKMVRYKQEFNPIELETYRQKYKQAKIAYLERKLSQLKTEVA

SEQ ID NO: 307018 - protein, 370 aa, unidentified
MDERIKFFVGLDAHKDSIAIAACEAGREPARFVGTMGPDVNGLLKLLVKAGDPAQVNVVYEAGPTGYGLHRELCRRGYRSQIAAPSLIPRRAGERIKNDRRDCLRLAELSRAGELKAIWVPDEAHEAMRNLWRAREDAVGMRLKTRQQLQAFLLRHGRRYPGRTNWTKSHERWIAEQRFEHDGDRIALAEYQLAAQAAEQRVDRLTTALTEAAKGWCFKPVVAALRALRGIDTVCAIGLVTEIGDISRFGTARQLMAYLGLVPSEHSSGNSIRRGSITKTGNAHARRLLTEAAWSYRFPARLSQQLRRRSSDLPEPVRNHAWKAQQRLCGRFARLSSRGVQVNKVCVAVARELAGFVWSIAHQASRTQTH

SEQ ID NO: 307019 - protein, 407 aa, unidentified
MLLVGDDWAEEHHDVEVQDEAGRRLARARLPEGVGGVARLHELVGEHLAGDADPGQVAIGIETDRGGWVQALIAAGYVVYAINPRQVARYRERHGTSGAKSDAGDAHTLADMVRTDRHQLRAVAGDSEQAQAVKVVARAHQTLIWERHRHLLRLRTALREFFPAALDAFGDLTAPDALELLARAPDPASAARLSRAQITAALKRARRRQAEGIAAGIAAALRTVHLAQPPAVAAAYAATVRSLVTMIAAFNTEIAAMEEQVKVCFGQARDAEIYLSQPGLGPVLAARVLGEFGDDEHRYAGAKNRKNYASTSPITRASGKKKTVLARYIRNDRLADALHQQAFCALTASPGARAYYDQLRRRGQGHHAALRQLANRLVGILHGCLKTGTTYDEHTAWAHHQARQTAA

SEQ ID NO: 307020 - protein, 378 aa, unidentified
MPSENTVHIAIELSFSSWLVAARLTGAKKSRLHRIEGGDTGALLALIAELRSRALTELGGAAEVACCFEAGRDGFWLYRLLTAHGILVYVLEPTSILVNRRSRRAKTDRLDAEGMLRVLAAWLGGDRQVCSMVRVPTPEEEDGKRPHRERERLVQEKLRIENRIEALLFTQGIRARPSLRSWERELTELRTGDGRTLPPLLRAELDRLRRRLVLILELIRELEAERAAALAAAPDEAMAQKITSLQRVRGIGANFSAVLVREVLYRSFANRRQLASYVGVAPMPYQSGGMDRDRSISRAGNPRARTTLIQLAWLWLRYQPGSALATWFRERVGTLQGRTRRIAIVALARKLLIALWRYVEAGVLPAGVEIRTGTVPAA

SEQ ID NO: 307021 - protein, 344 aa, unidentified
MNKITRMGVDLAKNVFQLHGVDRSGTCVFKRRLSRSQWVKHIVVHIEPGCEIGMEACGGAHHWARVLQHHGFVVKLIAPQFVKPYVKSNKNDANDAEAICEAMSRPNMRFVTVKSIEQQDIQALHRVRSTLVQQRTAKGNQIRGLVSEYGLVAPQQLHRLRAAIPVWLEEEENGLTRHFRCLLQGLYHDLIGLHQRVQELDKDIAQLAKQHDVTKRLQQLRGVGPMIATALVATVGDAKQYNNSRQMAASLGLTPRQHSSGNKERLLGISKRGDAYVRTLLIHGARAVLQQAKHKEDRLSRWVTELAKHKHPNVAAVALANKTARMAYAMLRDGTDYDPNVAAH

SEQ ID NO: 307022 - protein, 339 aa, unidentified
MSKLLKNFVGIDISKTWFDAAVIKAGHPSVSMHDQFSQSPDGFKKMITWLRQQNVLLNTETLFCMEYTGIYNTGLVNFLVEQKAQLWVEMPLRIKKSAGFERGSNDKTSAVKIAGYAFRYQDSIQLWQPVDSSIEKIKQLIAQRDRVVNAITQLTVPVKELLECGCNKEAKELEKIQRSCLKALQKTKAAIEQLIVKTVGQDALIAKKVQQVQSIKGIGQVTAVSLLAYTKGFTTFSNAKQLACYCGVVPFAKSSGTSVRFKPTVSPHANKKLKKLLHLCALSAIRNDVEMQTYFERKVAEGKNKMSVINAVRNKLIHRVFAVIRDDRTYEGNYIRKCA

SEQ ID NO: 307023 - protein, 380 aa, unidentified
MNVCGIDVHKIHLWVHIKDDKGNDVFATTFRRNPKGLQSLKRLCQQNHVSKAIMESTSTYWKPVYQILDKVRIECAVVNAYQLKVLGKHKTDDRDAELLATWGLLNVLNSSFIPSIEVHQLRELVRTRVATQNRKGAIISRMKTMLEGSCPGVTEALKNLNLLYAQLFLESWGQQERVNLTFEQWVDTIDDGRVRKGLIRRKSVLGYWWDHPLDKVQQYLLDYQMRQFQFYRDELIMLETLIGTTLDQTDLKMPVYLIKSIPGIGFLTAVTIAAELGSVERFNNGREAAASCGLTPKLKGSGGKTHTGRITKHGPKSVRRAVYIACKSVIRFSPSHNEFYQRIKRRRGGKRALIALCKKLIVQAWTMWSRRELFKANVAA

SEQ ID NO: 307024 - protein, 463 aa, unidentified
MQTRPLEAVAGFASVSGSSAHLWVERRDEVPTRPAMPQGSGMQGATLAHVTTSTIDPTLTEAAATEVFAGIDWGGSFHQICLIDEDGKVLRQQRVPHDAAGFDELDRLLTCHRARLRVAIERAEGLLVEHLHLLGVEIFCVSPKISARARERYRMAAAKSDAFDAFVLADTLRHEHRHWRALTPPSPVLAELRAISRDRDRIVIAQQATENRLRAVLEAYHPAPLHLFSTLDRDITLDFITDYPTPEQAGRVGTARMDGFCRRHGYSGRTQPEVLVERLRPHLLSAGEGTAAGKAFSANLFTEQLRMLNTHLRAYDKRLDELLERHPDTPIFTSFPGVGPVVAATLISEMGEDRHRFPAPGALLAEAGLSPVTRASGRTRQVRFRYASNRRMRHMIDWWMFTAIREDDWTRQAYDHARARGQGKYRALRGLGSRWTRILWRCWTDHTRYDPAIHHRNPEPTTA

SEQ ID NO: 307025 - protein, 318 aa, unidentified
MSHGYDKFVGIDVSKDALDVHGLPDGSPSRFDNTAAGRAKLLSLLPQAGACLSVVEATGGYERDLVAEAVTAGHHIAVVNPRQVRDFAKALGLLAKTDRIDASVIARFAETTRPVPKGYDERQEQLRELIVRRRQLLDHRTAEKNRSEMAHSSLVRKSVLKLIETLNKDIQRIEKAILQLVESNDDWRERFEKLKGVPGVGGQTAATLMAELPELGHLNRQQVAALVGVAPFNRDSGQFRGRRAIWGGRQSVRNALYMAALSAKKHNPVIREFAARLMAKGKPPKLVLTACMRKLLIILNAMLQSGDSWSPRVATLTP

SEQ ID NO: 307026 - protein, 346 aa, unidentified
MTKPQPTVEVFAGIDVSAREISVTLMQGREGNPTLATFANHALGHKALLVFLSERAEGVRVCLEATGNYSIDLALILHTHRQVEVSVINPRRARKFAESLGERSKADPVDARVLCQYAARMPWEPWRPPSLRALRLRAITRAIESLGVMHTQENNRAHALGSSQALPTLVLRERQRHQRYLENRMQQLRREARRLIARDAELERRYRLMLTVPGIGETSALQILGELVVLSDSADARQWVAFSGLDPSIFTSGSSVEKRPRISRGGSRHLRRALYMPALVALRREPHLRGFYQRLLSHGKARLQAVVAVMRKLLHSLFAMFRTNQPYDGSKLCAVDVPGNPIAACA

SEQ ID NO: 307027 - protein, 347 aa, unidentified
MRFYTTPHRYYCGIDLHARRMYICILDANGQVRVHRNGPATPEHFLATIAAYREDVVVAVECIFTWYWVADLCAQEGIPFVLGHALYMKAIHGGKAKNDKIDAHKIAVLLRGGMLPMAYVYPRAMRATRDLLRRRMHLMRKRAELLAHIQNTASQYNLPAFEKRIAYESNRAGLPDHFDHPVVRKSIGVDLALIEHYDRLLKELELYILRTARQHDPNALYRLRTVPGIGKILSLVLLYEIHDIRRFPTVQDFASYARLVKCTKESAGKRTGTSGTKIGNAHLKWAFSEAAVLFLRQNPTAQAWLKNTASKHGKPKALSILAHRLGRIVYYLLLRDEAFDMQRFMAA

SEQ ID NO: 307028 - protein, 409 aa, unidentified
MRIIGLDIHRAFAEAVAWDDGKLKRLGRVDMRRPLLEAFAKKLSNEDVVVVEATGNAASVAAVIAPHVKQVVIANPKQVRVIAHAKIKTDTIDASVLAQLYASGFLPEVWIPDEPTQALRRQVTRRNQIVRQRSRLKNIIQSILHSHLIPSCPHADLCGASGRAWLFHQVLPEDERLAVERHLREFDRLGEDLKVIERDLARSALGDEGVKRLMTIPGVDMVVALAIVAAIGDVGRFEQSQKLVSYLGLNPSVRQSGPGPAYHGRITKQGRGHARGMLVEAAWAAARAPGPLRAFFLRVRARRGQHVAAVATARKLAVLIWHLLSKGESYVWARPALHARKLRDLELKAGYKAARGQRGGAHAYNIKSHRDQERRWVEQAETAYARFVSGWNPRGPKQARTGAATEVRR

SEQ ID NO: 307029 - protein, 332 aa, unidentified
MTNAAREAATADTRPLDYIGIDMAKARFEWGVHGTRSTQGATNDAAGFETLLAQLRERRVGLIVIEATGGLEHALASVLLQHDLPVAVVNPRAAREFARSMGHLAKTDAIDALALAHYAHTLAHKANQAGVQLTPLPAHLESLQVMVLRRKQLTDMRTAELNRRGGAMRVLRKSIDAVVKTLNQQIDALNKDIGMHLDEHFKDLNRRFDSIQGVGPNTCAAVIAFMPELGRISNARAAKLVGLAPLNNDSGTSRGKRSIWGGRTLVRGALYMATLSAVRFNPVIKAFYVRLLAAGKSKKAALIACSHKLLRILNAMARNGQPWRPELHRLTA

SEQ ID NO: 307030 - protein, 342 aa, unidentified
MGSVLGGRRSRHVMSAFVCGLDVHKDSTYATILNSEGKIVNQTRMNNEKVLSYLSHFNVSKVAMESSNQVASLYRQLASKGYSVVVSHPKKTRYIAEAKIKSDRVDSRAIAELMRLDALPLAYMPDEETAMLREKVRRRAFLVRERVKLRVKIKSILTYEGLKWPSDHGLFTEKGEAWLHGLNLESVESYLRVLKPLDDEIKLVSKQLKGLAEDNEDVKLLMTIPGIGYYSALLVKSEIGDISRFPFGERLCSYAGLVPSTHASGNTVRHGGITKEGSRWLRWVMVEAAQTHVHKYDTAITKAYHRIAERRGRRVAVVAAARKLLMCCYSVLKNKRPYHDQA

SEQ ID NO: 307031 - protein, 359 aa, unidentified
MTSSRMPHPASDQHDRLGDIVIGVDTHKDVHVAVVLTTTGTMLGSGKFPTTAAGYRDLLAWARGHGELRRAGVECTSSYGAGLTRYLLSEAVTVIEVGFPDKATRRRRGKSDVIDAESAARAVLSGDARAVAKSSDGPVEMIRMFKLAKNSAVKARTQAINQLKAVLVNTDPSLRESMSVLGPKTLLRRCRDLAADGDPADTITAAAYTLRTLANRILALTDEIDDLNRLLDTVIRSHFPHLLERPGVGPDNAATLLITAGDNPDRLHSEGSFAALCGASPVEASSGKSQRRRLNRGGDRQANAALYRIVLSRLRLDPATRSYRDRRISEGKTKREIMRCLKRYVAREIYNLLRPIPAV

SEQ ID NO: 307032 - protein, 400 aa, unidentified
MPAFWVGIDSGKRAHHCVVIDQAGAVLLSKRVESDENALLELIATIAKIADGHEVCWATDLNAGGAALLIELLAAHAQQLLYIPGRIVHHAAATYRGDGKTDAKDARIIADHARMRTDLQPVRGADQIGVDLRLLTARRTDLISDRVRSINRLRATLLEYFPALERAFDYSKKAPLTLLSGYQTPEGIRRIGLTRLIGWLRKRGCRNSAKMAEKALIAANSQHTVLPTQTTGSALVVRLAEQISTLDAEIADVDAQITELFLQHDSADVLLTMPGFGPVLAATFLANIGGNLDAFDSVDRLASVAGLAPVPRDSGRISGNLHRPRRFNRRLLRTCYLAALSSLKNSPASRTYYDRKRSEGKSHKQALIALARRRINVLWAMLRDHTIYQEPIPHITAQVA

SEQ ID NO: 307033 - protein, 382 aa, unidentified
MRTDQAYTSIEDVLAVSLELAAAKWKVALHDGHREQPAVHTVAQLQAVARLQAVLDLIEQHKDQWSLPAGVRVVVSYEAGQDGFWICRALQGRGIECYVIDPASIPVERHKRRAKTDRLDAIKLVINLRAWLRGERDRMHVVHVPSPQDEASRHLMRDRGQLQKEVLQHCDRMRKLLATLGCWDEVDHKHFAGRLARDEVKCHDGAPLSPEMRGRLLRECERLALAQQQLAELEKTRQASLPAPARQRRDDLARLKGIGEVGASRLALELFWREFSNRRQVGACTGLVPQPYDSGESQVDQGISKQGNRRVRALLVEMAWCWLRYQPDSALTRWFNERTQSTGPNRRARRIAIVAVARRLAIALWRYLKDGEIPNGARLKSA

SEQ ID NO: 307034 - protein, 356 aa, unidentified
METKKKISYLGINIFIGLDVHNKQWTVTIIIVDEFYKTIVQPPDAVVLGNYLRRNFPDAKYYSVYEAGYCGYWVHYALEEQGIQNIIVNPADVPTMHKQRRRKRDPSDSKKLAKQLMNGDLESIYIRNKQLLEDRALVRSRSMLVKDQTRYKNRIKGLIANFGFQITDEKVKSYWSRKYINYLLDNINNYGGFSITLKTLIEELLHLREQVLKVTREIRKLSAEERYSRNVGLLTKIKGISILSSMVILTELGDLNKYRTLDKLASYAGIVPDESSSGEKENKLGITRRCNKHLKRVLIESSWIAVRNDPALMLAFINYNKRNTLKTKSIIKIARKLLNRIRYVLTTGQEYQISTI

SEQ ID NO: 307035 - protein, 414 aa, unidentified
MIHLEETDNTLVEPYTVFCGLDVGKSTHHATALTPAGKKLHDRPLPNDEPALRALFAKLAGHGRLLVVVDQPASIGALAVTLARAMNIDVAYLPGLAMRRLADLHPGESKTDARDAYVIADAARTLPHTLRRVGTDDEALAGLTVLVGYDADLAAESTRLSNRLRDALLHIHPAGERLLGSHIHRPGVLELLTAAPTPADWNRLGEAGMAEIMRPRSPRLAKTLPGKLMAALGEQTVEVPGTAAFGRVITGVADALLRALDERASLAKAVEAALAAHPLAKVLTTMPGVGARTAASLLTIIRDVSDFPSAAHLAAYAGLAPVTRRSGSSIRGEVRSQRGNHALKSTLFLSAFASLHDPTSRAYYDRKRAEGKRHNAALICLARRRVDVLYAMIRDRKPYQPPGSEPEADQPQAA

SEQ ID NO: 307036 - protein, 433 aa, unidentified
MKVKYEDRQKQKVIAITTDTLVVGVDIAKNYQWARFVDFRGIEHDRALKFKNSRGGFETILARIREICKKENFAKAVVGMEPTGHYWKAFANWLEKQDGIKVVLVNPYATKQAKELDDNSQTKSDKKDALTIAKLVKDGRYFELYLPHDVYAELRGLSTTRTGLNKRKNALKNTITAVMDEYFPEYGEVFKCPLSGKASRHILKTCPFPKFILELGEDGVTDEIKKAVKKTVGRKKAAQLIETAKESIGVDYGEEAAGLKLRLMLEELELLEKQTEELEGQMADALHQTDYADFLLSIKGIGIVTLAACLGELGDPTRFEDSRQMSRMAGYNLVEDSSGKNKSGTKISKRGRKNLRCVLYQMALTMVATNDEMKQLYHYLKTREEAPLRKMQALIVVSKKILALIHTLAKKKENYDPGKVFGHVRREQMKAAA

SEQ ID NO: 307037 - protein, 326 aa, unidentified
MKAAPQWVGIDVSKAYLDVYLRPSGQAFQLPNNPQGIAQVVERLRGVNVQQVILEATGGLEMAAAQTLQGQGLAVSVINPRQGRDFARASGKLAKTDRIDAGVLAHFGAAMQPAVSVLASTEQQALQEALTRRRQLVEMLSAEKNRQSQAQGKLRQRIEAHLEWLQQGIKELDDEIEQLSQAQAQWRSAITLLKGVPGIGKVIATTLVAQLPQLGQVSDKRISALVGVAPFNRDSGSYRGTRSVYGGRATVRAVLYMGALVAVRHNPVIKAFYTRLLAHGKPKKLALVACMHKLLRILNAMLRDAKPWQLPSSATVPPQPEPMQAI

SEQ ID NO: 307038 - protein, 376 aa, unidentified
MEHDSTLYVGLDVHKESITAAYALGMGEVELLGKVGTTKTDIDRLCKRLQSKASRIRIVYEAGPCGYGLYRQLQQKGIDCMVCAPSLIPRKPGERVKTDRRDAIKLARSLRADDLSEVYVPTVEDEAFRDLARAWVGAKDDLKRARQRLKSFLLSHGVSYTGRADWRAAHRRWLSTFAFDSAWQQLAFEEHRRTIEDRLAQCDRLEAALREAVVAWRLYPAVLGLQTMRGMQFTTAVGMLAELGDLSRFTHPRQLMAWLGVTPSEHSSGEKRRQGSITKNGNSYARKLLVESAWSYQHPARVSPEIQRRHEGIPKPIVDRAWDAQVRLCRRYRTLVARGKQKNIAVVAVARELSGFIWDISQLAMSLASQPQRRAA

SEQ ID NO: 307039 - protein, 416 aa, unidentified
MRIVYARCCGLDVHKRTIAACVLLQEASGQVQQEIRRFGTMTRDLLELADWLQDRQVTHVAMESTGVYWKPVWNILEGQFALVLVNAQHIKAVPGRKTDTRDCQWIADLLQHGLLRGSFVPPTPIRQLRDLTRLRTSLRQDHTAVANRMQKILEDANIKLASVASDWLGVSGRAILTQLLAGEEDATKLADLSRRRLRAKLPQMQLALEGRLTDHHRGMLRVLWDQLEFLEAQLTKVDAQIQGHVQEYQEALALCITIPGIEEVAAANLLAEIGMNMEQFPSAQHLASWAGICPGNHESAGKRLSGKPHKGNTWLRRSLCQAAWAASHTKATYLSARFRRLAARKGEKRAIVAVAHSILIILYHVLKTKQPYRELGADYLDRINAAQLKRYFVKRLENLGLQVTVQYVEKAAAPPT

SEQ ID NO: 307040 - protein, 410 aa, unidentified
MSYTIAGIDVHKKMLMVVVLDVECRDDPPARARFGTTASELQRLLVWLQEREVQEAVMESTAQYWKPIWYALEAQVKLHLAQAFSNRAPRGRKRDFRDAERLVRRMVAEELFLSFVPPPEQRVWRTMTRMKVQLARDRVRLHSQLECLLEEMRIKLSSVITDLFGVSGLRILQALAEGQTDPRQLAALGDERLKCSEEQLIDALTGKPEPVHLQLLAMYLERLRGIDTQMEKLNRMIAEAMKAHEEAVVRLAEATGFGADAAQQVIAEVGPQASSFDSAAQLTSWAGTCPGKEESAEENHSTRSAKGNKYLRRVLTEVAQAAVKTKGSHYQIVFRRLLPRLGYKQALWAVVHRLCRMVWKILHDGVRFVERSTQRDPHAAIQRAKTLTRALRRLGYKVDITPISLATTEG

SEQ ID NO: 307041 - protein, 408 aa, unidentified
MEVVYRCCCGIDVHKKIIVACLDQGGEQSLREFGTTTSEIKSLATWLTESGCEMIAMESTGVFWKPLYNLFELMDLDAMVVNAAHMKALPGRKTDVKDAEWIADLLRHGLLKASYIPSREQRELREITRYRKSLTEERCRETNRLQKILEGANIKLDSVVKDINGKSARKLLEKIIEDDVPTSEEEVSKVVHGRMRSKLGQLVTAIEGITTPLQRKLLAQVIDHIDDLTRRIADLDKLVQDYMDEYEAAIAALCDIPGIARRSAEVILAEIGLDMSRFPSAAHLCSWAGVCPGNCQSAGRRKHGKTTKGNKPLKTILTQCAKSARSVKGSYFSAQYQRIAARRGKNRATLAVAHSMLIAIYHMLKNSAPFRDLGSDYYDSFNRDRKIHSYLKRLKALGWEPDVLPGSA

SEQ ID NO: 307042 - protein, 462 aa, unidentified
MSKTKRPATLENLAVVHPNAAGLDIGAREIWACVPPGRDVETVKRFNTFTPDLQALADWLVACGVDTGAMESTGVYWIPVFELLEARGLKVYLVNSWHLKHVPGRKSDYLDCQWIQKLHSLGLLNGSFRPDGEMVTLRGYLRHRAQLLEHRAPHVLHMQKALQQMNLQLHHVLSDITGETGLKILRAIVAGERNPVKLAQFRNPACKSSEETIAQALTGSWKAEHLFTLRQSLELYDFYTQQVTACDAEIEKQFAAMKPRWDGPEEPPDVPRVKPGSKSKNQPKLNVRREIIRLTGVDLVAVEGISASLAQTILSETGTDMSKWPSDKHFGSWLGLAPHNDISGGKVLRSRTLKTHNRAGQAFRQAAASVIRSGSAFGAYYRRKRGQLGPMQALVATAHKIARTVYYMLKNRVQYHDIGAEAYEQKQKEREVAYLKKKAAKLGFDLLPHDSTAAIARAVAMV

SEQ ID NO: 307043 - protein, 322 aa, unidentified
MVVGFDVSKASTNWALVNGIGKVLAEGKCNNTERAVATVLVPIRGKYSRLRCAVEATGIYHLPVLRACEVQGIPCRQLNPIQTKQFTRTTVRAAKTDRKDAVYVALLGLRGAGYTVLPVDDALMAAKTYLRLADRLRDAGHSMLFMQQYLHDNGQGLSEDSLTACRIQLLAAVQDYRGRAAKALDASRPVALLQSIPGIGPVLAMGIVAEIGNLGRFHNAPQLVAYAGLDPRIKQSGPMHSTGRLTKRGSPFLRQRLHVASMGVQRYDPELKAVHERQRARGKSYTAATVCVSRKLVHRIFSVLKRDAPYEVRSLDAAPKNT

SEQ ID NO: 307044 - protein, 342 aa, unidentified
MLIIGCDYHPGMQQIAWFDNESGECDELRLEHGTGEAEKFYRELKRRGVRVRVGIEASGHTRWFERLLAELEMELWIGNPAKIAAQRVRKQKTDRGDAQLLLQLLREDRFPRVWVPSPENRDLRQLLWHRHRLVQMRTRVKNQLHAMALNEGVQRRSRLWSKQGRAQLESFALNRWTARRRHDLLELFDQLTPQIAELSQAIEQEAERRPEVQRLMTHPGVGPITALAFVLVLGTPDRFRCGKQVGSYLGLIPCEDSSAGKQRLGHLSKQGNTLLRYLLVEAAQAAVRCDAQWRRCFVHLAMRRQRNVAIAAMARKLAVSLYWLWRNAEDPPAAPQSGSHVG

SEQ ID NO: 307045 - protein, 406 aa, unidentified
MAVMIGIDPHKGSHTAVAVTATEEPLGKVRVRACPAQAEQLVAWAAAWPERTWAVEGAPGLGRLLAQQLVAAGERVLDVQPKLAARVRLLQTENTGKSDPNDALSVAVAALRSKGQRPVLADDHATVLKVWAKRHRDLSRAHNQVACRLHAVLCDLVPGGVADEITAGHAAKILGQITPADPAAEARKELAAELLADIRHLDAQRREIKKKLATAVKASGTSTTQIFGVGPVIAATVIGDVVTVARFPRRDHFAAYNGTAPVEVSSGEKKIYRLSLRGNRRLNHAIHMAAITQIRYKHSDGRGYYERKIAEGKTHKEALRCLKRRISDALYARLRADARNAAAASTRDPGGQPGNDSVSSAAGSHPEHRLFGSATPGPAPSLRSATALPQAMRPSEPSAKKTRRDP

SEQ ID NO: 307046 - protein, 343 aa, unidentified
MQISRVGIDLAKDVFQLHGVDHHEKAVWHRRLKRNNWLKVLLKTVDPGCEIGMEACAGAHHWARLLIQKGFTVKLIAPQFVKPYVKSNKNDAKDAEAICEAMSRPSMRFVSVKTVEQQDIQAAHRIRSELVSQRTAKGNQIRGLVSEYGLVAPQRMNHLRAAIPMWLEDAENGLTDRFRCLLHGLWHDLKALDVRVEELSCEINRIAENDPAAKRLQQLRGVGPMVATALVAAVGNAQQFANGRQMSASLGLTPRQHSSGNKERLLGISKRGDAYLRCLLIHGARSAVYAAKSKEDRLSQWVTNLSARRHPNVAAVALANKTIRIAWAMLTQGTDYKPDLMAA

SEQ ID NO: 307047 - protein, 371 aa, unidentified
MNTIVYVGMDVHKESYTLCCYCYDTDKVEYKQTIPSDYKLVLKYMESMRSRYEGEVSFVCGYEAGCLGYSLYHQLREHEVDCKILAPTTMAITNTSHVKTDKRDAANIARCLAFHTYSEVYVPDDEDNSVKEYIRMRDDQKLMLKKIKQQILAFVLRQGKKFEGGKTYWTIAHMRWLKSLDLKGLDKETLSEYLVTYEYLTEKIERLDNRIEELASGEKYKEKVKNMGCFLGIKTHTALSMVVEIGDFNRFEKAPKFAGFLGLVPSENSSGDSTNRYSITKAGNSHLRRLMVEAAQSYSRGNVGHKSLALKERQKGCSGEVIAYADKANERLRRRFYKMTLNKGINRNVATTAIARELACFMWGMATGNIS

SEQ ID NO: 307048 - protein, 330 aa, unidentified
MSGFVGIDVAAKTFDVVVRIDGKANKVEQFSQTPDGHAAVVRKLQKLAPELIVMEATGIYYLDLAVTLTRANLPVSVINPKSFHHFAAMKLNGNKTDAVDAALLAEFAQCMSPRLWNAPQDELLGLRDIGRQLNRLTASRTQAKNRLHALTSKSMTLPMLIEDEQDGIEQLERRIKRLTQAALALITGNATLAAHFSHITAAKGIGETSAIAILAELCVLPSTMKSPQVSRYAGLDVRHTQSGSSVNKPARLSKAGNVYLRAALYMPAMSAVRHDVRAKAFYEALTGRGNKKIQAQCAVMRKYLTGIWACMQTQTAFDSTLLFSEQHIKN

SEQ ID NO: 307049 - protein, 364 aa, unidentified
MTSMPQPSPAATAAAISRVVIGGVDTHKDLHVAAVIDAGENVLGTRSFSTTRAGYRALVRWMRSFGDARKVGAEGTGSYGAGLARHLAAAGIEVLEVDRPDRSERRRKGKDDDLDAIAAARAALHGKRTSIPKGKDGAVESLRVLRVTRNTAIRARRNALQLLRMSIVSAPEELRDQVRNLTRMQLIRTCAAWRPDTSDAADPVPATRIALKSLARRILELGDEIAMLDELIKPIVEKLAPQLLDRAGIGVEIAGQLLVTAGDNRERMRGEPSWAMLCSVAPLPASSGMTQRHRLNRGGDRQASSALHLAVISRLRIDPATQACAARKTAEGHSKLEIIRCLKRYLAREVYYLLHPSQSASSAT

SEQ ID NO: 307050 - protein, 394 aa, unidentified
MFYAGIDIAKNKHEASVIDADGIAMLDSISFSNSKEGCEKLLALFDRLGVTKNSVLIGMEATGHYWLSVHAFFLEQGFDVKVINPIQSEAFRKMYIRQTKNDSKDSFIIAQIMRFGQFSATDLSEEVIIALRQLSRYRLALVDSCGDCKRRVIALLDQVFPEYASLFSDAFGVASTEILLKYPTPEDMLTVSIPKLTAILNKASRGHFSVEKAKQLKAVAAGSFGVAFAKDAFSFQIKQLMEQLVFLEKQIDDLEKEITALLKQVGSFITTIPGIGDTLGAIILSELGDINRFDAPAKLVAFAGLDVKVNQSGEFSGTKNKFSKRGSPYLRRAIWLAASRAAFCDPILSDYYQSLRARGKHHLTAVGAVARKLCNIIFVILRENRPYLQTPPKS

SEQ ID NO: 307051 - protein, 319 aa, unidentified
MAQNDPVVVGIDVAKAKVDACIRAVSQRQTFASRPQGRRKLIGWLREHAVAKAVMEASGGYERDWARVLRQAGIEVRIVDPKRVRSFALSAGRLAKNDAIDAEMIAWFAETFSEAPSQPHDAAHEELQALVKARLDLIDFRMRLQGQSEHAAPGLVQKARAHISKSLTSEIAKLEAAISAKIKSMPDFAERAAIIESVPGFAETSSANLVAGMPELGQVSAKVAAALIGIAPYDDDSGKRRGERHIKGGRRWVRNAIYMPCVGAATLNNPVLKAHYQRLLAKGKAPKVALIACMRKLIVILNTMLARRQKWDPSRYALS

SEQ ID NO: 307052 - protein, 410 aa, unidentified
MEVLYPHCAGLDVHKDTVVACVRHMVNGSVKREVRSFSTTTKELLALSDWLAGEGCTHVAMEATGIYWKPVWHVLSDGDFTLVLANAAHVKNVPGRKTDVNDATWLADLLTHGLIRGSFVPDEQTQEMRTLLRTRKQLVREGSRHVQRLQKTLEDANIKLDSVISDIIGLSGRRMIEALIAGETDPAALAALAHRRIKATPDELEEALRGRVTRRHRFLLQLHLQQIDAVNAAIDQIDREVDADVEPFRATVHLLTTIPGIDELSACVILAEIGRDMSRFPTAGHLISWAGLCPRNDESAGKRRSTRMRKGAPWLKTTLVQCAAAAARKKASYLQAKFHRLRARRGAKKALGALAASILTSVYQMLISGELYHDLGPHHFDQRTKASTTRRLVTRLQNLGYAVQLSPLAA

SEQ ID NO: 307053 - protein, 359 aa, unidentified
MKKPAQHLIAEVPRRQAKVEITIGIDLGDVWSHYCTLNQDGEIVDRGRFRTTPKAIEKWFTDVPPARVAMEAGTHSIWISALLQELGHEVIVANVRELRAISHSDRKSDQVDAEKLARYARLDPNILRPIAHRTVAQQEALTLIRARALLVRLRTAAVNAVRGLTKACGFRMPASATTCFAQRCLAVMPFGLAQALGPVLQQIAEMTAKIKQYDRQIQQLGQTEYPETQALLKVHGIGHLTALTFVLTLGSKERFGRSRDVGCYLGLRPRRSQSGDHDPQLGITHAGNAYRLLIECSNHILRPHGRDSALRQWGLHLAARGGKQAKSKAVVAVARKLAVLLHRLWSTQEAYIPFYEKAA

SEQ ID NO: 307054 - protein, 307 aa, unidentified
MFVGIDVSKDRLDVHLLPGDEAFAVARHGEGLEELVERLRTLPLGLIVLEATGGYETVVAAALAAANLPLAVVNPRQIRDFARATGRLAKTDRLDAQIIARFAEAIRPEPRSVPDAEARALGELIARRRQIVEMIGAESNRRRHLTHKRLLRGLERVLAVLQAQLSEIERDIDDAVRGSPAWREKDDLLKTVPAIGNTIARTLIAEIPELGTLDRRKIASLAGLAPINRDSGTLRGRRTIAGGRGPVRTALYMAVMVSIRHKLPLSHTYQRLRTAGKAPKVAIVACMRKLLTQLNAILRDRKPWQPA

SEQ ID NO: 307055 - protein, 386 aa, unidentified
MQKLNDLSRSLIALEPAGTLIAVIEMSLSSWLVAGIVPGVERQPLKKLAVDESALLKLLHRWREEAEKAGRRIERIVVAFEAGRDGFWLARWLKAHSIEAHVIHAASVAVSREHRRAKTDRLDTELLKRAFLGWLRGERDHCKVVAIPTLKDEDAKRPNRERESLVGEQSRIVNRMKAALIRLGIRGFNPKLKRAAGRLDSLRTPEGEPIPPNTLAELRRDMERRRLVSNQIRQIEEARLERFEQAPNDGPHAMVRLLARVVGVGIETADMLVHEVVSRNMRDRRAIARYAGLTGSPDESGRKRREKGLARSGNGRVRRGMVQLAWRFLTYQKESALAQWFRARTENALRARKPMIVALARKLLIALWRLVWQGVVPDGVVLRPAQ

SEQ ID NO: 307056 - protein, 400 aa, unidentified
MQCTDHPCHSQSTVRRYDRALFMGVELSKSIWLVAVSAPGSDKISKYRVAAGDIAALWSLLSRLKAQAERHQGGPVRIVSIYEAGLDGFWVHRMLEAHDVESHVVDAASIAVDRRSRRAKTDRIDVEKLLRTLMGWARGERRICSMVRPPSVTEEDERRLTRERGTLVTERVRHVNRIKGLLATQGVLDFEPVRRDRRKRLDELCRWDGQPLPPRLKAELHRELDRLELVMSQLTRLEVERDKALHANRPMSEQVAKEATVEAPSSGGAGAQLLRLRGIGPEFASVLSLEALYRSFANRREVAAYSGLAPSPWKSGGIDVEQGISKAGNARLRKTMIQVAWLWLRHQPGSDLSRWFHQRVGDRRGKIRRITIVAVARKLLVALWRYVTQGLVPMGAELKA

SEQ ID NO: 307057 - protein, 343 aa, unidentified
MDEISMIGLDIAKNVFHVHGVDASGAPVLRRELRRGQVEKFFAKLPATLVGIEACGSAHHWARVIGRYGHRVRLMPPGYVKAYVKRNKNDGRDAEAICEAVGRPNMRFVAVKSVEQQATLSVPNTRDLLVRQRTAAGNALRGMLSELGIVAAQGTKGLRTLMQQLEQPSEAIPELMRNALLLLARQWEALDAAERMLEQQITRAAKADREARRLMAVPCVGPIIASTVLAKVPDPRMFRSGRDFAAWIGLTGRDRGTGGKHRIGRISKQGDRMLRTLLINGASAYLLHQKRRGVTDPWLREMLARRPYKVVMVALANKTARIIWAMLAKGEEYRARASVPAAA

SEQ ID NO: 307058 - protein, 364 aa, unidentified
MKKSSKKQQGGAGAESRPEKVVGLDLGDRHSHYCMLTVAGEVMEEGRIQTNTAALEKHFGSEPRMRIALEAGTHSGWVSRLLKSYGHQVIVANPRKIPTLTASKSKNDRNDAEQLARMAAFDPELLHPIEHRSAERQQDLNLIHTRSVLVRARTMLINCARGLVKSAGGRLPACSSEAFSEKVPAAVPPALKAACTPLLKQIAQINQTVAAMDKQIDGLDKKYPEIAVLRTAPGVGPVVAACYVLTLDSPQTIPTNRQAGAYLGLRPGQQQSGDSNPQCGITRTGNTYLRSLLVQSAQYILGRFGPNSELRCWGLKLAASGGKRGKKRALVAVARKLAVVLLSMWRNRKKFEPFPQSETQLATV

SEQ ID NO: 307059 - protein, 349 aa, unidentified
MIIVGCDYHPSFQQIAFVDTETGELKEQRLMHCEGAEEFYRALTATGLPVRVGMEASGHARWFERLLAELQFELWMGDASEIRRKRGRKQKTDRQDAQHILHLLLKDDFPKIWVPSWENRDVRQLLWHRHRMVQARTRIMNQLQAVALNEGLRCKKRLWREHGRQQLEAFRLAPWASRRRRDLLELMDRLNPMIAELSQEIEKQATGSAHVQRLMTHPGVGALTALAFVLIIGEVERFHCGKQVASYIGLVPLEDSSGNRRRLGHITKQGSSMLRFLLVEAAQVTVRSDPQWRRQYFHLMMRRGRKTAKVAMARRLAIRLYWMWRRGWDYEQVSRFGSHAGQPGNRHGV

SEQ ID NO: 307060 - protein, 366 aa, unidentified
MLSKPSAFGEDAEGYAHLFQLLGAPEDCFVALEATGHYWRNLFVSLVTKGYAVAVLNPLRTRRFAEEELERTKTDAIDALGIARFAAQKRPTPTMLPEPEAEELRELVRLRERLMGDLGDRLRQLHRAVDLGFPEFTNHVRTLESELAIAILSRYPTATAYRNVSPKRLARLCYDGRHEVGEQLARTLVNTAKNSVGRHHSDTYRREIAYACEDIIALRGRLRELARDIKQKLEQHDVGKLLTTINSIGAQTTAYLIAELGDPARFHSAAALASYVGVAPRLRQSGKRRFSGTAVVRLGNARLRKALWMPILTAVRFNPWLRAYYDRLVSSGKPRKVALVAAMRKLLAAVWSVARNRRPFVLYPAT

SEQ ID NO: 307061 - protein, 368 aa, unidentified
MNSVKFIGMDVHKNSITIAIADQDRRAPARIYGAINHDLGALDKFCRKMVSTASELCFVYEAGPCGYRIYRHLADKGFDCMVAAPSLIPKKSGERIKNDRRDAKKLASLHRAGELTAVYVPNLEDEAMRDLSRAREDAVSATRKAKQQLKAFLLRHHMVFSGRCKWSKAYFNWLSDIAMAHPAQQVAVQEYIDAVHENMHRVERLTDQIRQLVPSWRLSPVVAALQSARGVSLIVSVTILAEIGDLSRFENPDQLMAYLGLVPSEHSSGEKNKKGAITKTGNSHARKVLIEAAWAYRMQPRVSRLLLKRQQGLSDQVRQISWEAQLRLCARFRRMATRGKPKPVVVTAIARELSAFLWAIAKQVQPAV

SEQ ID NO: 307062 - protein, 338 aa, unidentified
MRTESTPGARGPVFCGVDTHADSHWLCVLDWRGRKVLSRQFPADAAGYEALAGAIAAAGEPACVAMEGTSSYGAGLTRHLASLGMPVREALSPARMQRRRPGQGKCDEADAERAARAAMSGSKLGTPKSQDGWVDGVRCMLAARSGAVKARTSAINTARSLLTTAPEGLRSRFRGMGGTRLMEELPSVRSEGALGAALGALADLWAAARDAALDMERAIEASLEENCPALLAMYGCGPVSAAKLAVAAGDNPGRLRSEASFAAICGACPIPASSGKTVRHRLNRGGDRQANSALHEIARQRVMRDPETAEYAERARGRGKSDREVMRCLKRYVAREAC

SEQ ID NO: 307063 - protein, 349 aa, unidentified
MARNIGIDLHRNNFVVATRAENGRTYVRTWKMEELGRFAEQLRPDDRLAVEMTTNTRFFYDAVRPSVKEVQVVNTAQFKVIAKSVKKTDRRDAETLALHLEKDMLPTVRLKEVEQGQLAGLVSTRDTLVKQRTTLKNKINNRFAMYGRPIRREMLSSEKGLAAVEAEPFDALVRIEIGALVAQIRALNASVRELEKAIDAASEKLKGYRSLTSIKGVGPVSAATLLTVIGDVDDFADAGKLGAYLGLVPRVSNSNETERSGRITKRGSKLARTALVQCALVAKKYSPYLNAFHARVRQRKGGGKANIALARKLLEIIYRALKNEWVFEDFAQFRLVGGVNPLKAKARTS

SEQ ID NO: 307064 - protein, 307 aa, unidentified
MTAFVGIDVSKATLEVAVLGEPDARQFANTVRGWRTLSTWLKRRAPARVLLEATGGYEQAALDALHAAGLPMVRVNPRQARDFAKGTGQLAKTDRLDAQVLARMAAAVDVPRYAPREDWRRRLGQWQQRRGHLLQTLVAERQRLEPLDDALLRRAAQRHIAFLERELRALDEGIGQQLEARPELASLRSLRGAGPVLQATLACELPELGHLNGKAIAKLVGVAPLARDSGQWRGRRLIWGGRAGVRSALYMSALTATRFEPTLREFYQRLRGRGKAAKVALVAVMRKMLIILNARMRDALAGSASSA

SEQ ID NO: 307065 - protein, 353 aa, unidentified
MNFIHYVGFDVHKKTISFCVKAPAGEIVEQGVLPSRREAIERWCHQQEVPWQGALEATLFSGWIYDVLQPHAAKLEMADPRKLKAITAAKTKTDRIDARTLADLLRCHLLPSCYVAPPEIRELRRLLRYRNLVVSEAVRMKNRTAGLLMEVGVTYNKQKLHGQRYFHDLIDGLEEVPASVIELLRYSRAALEMFTSTQRRLVQRLRRNRALRDRVALLETIAGVGEITALTWALEVGSPERFPSARQAVSYCGLTAAFRVSADKRQRGPISKQRNAHLQSVLIEAAKLAPRWNPVLEQVRERERQRGHRNRATLAVARKLVAYLLAVDRSRQPFRMPHSDIPETEAAPTTVTT

SEQ ID NO: 307066 - protein, 407 aa, unidentified
MEIIYERCCGLDIHKALIVACFLGNGKKEIKTFGTSTDELLNMCAWLKSRKVEKVAMESTGVFWKPIINIFELEDIPALLVNAQHVKNVPGRKTDVKDAEWIADLLKHGLLRASFVPNRDMRELRELCRYRTSIIEERARELNRLEKVLQGANIKLTNVLSRVETQTGFEIVKALSEGVVNPDLLSMLAKGKAKAKADELKIALKGLIQPHQQMMLKSMLNHISNLDNTIATLNLEIETRLAAENETVKLLDEITGVGIASAQTIIAEIGTDMSQFPKAENLASWAGLCPGNDESAGKRKSGKVRKGNPTLKKTLVQCGRSAANSKNTYLNSMYKRIAARRGAKRATVAVAHAILIICFHMIKDKTHYKDLGADFYASISKEAILKRSILNIQKLGYFVTIQKNEIA

SEQ ID NO: 307067 - protein, 374 aa, unidentified
MNFIGIDLHTNKFTCCYRDENSSVENPTTGRVIKTYELNAEGLSAFYRTLNGETYLLVEATITTFSFARLLKDKVKAIMIANTYELKQVSLARCNTDKIDADKLCRILKAQVLSGEQLISPVTVPPPPIQELRGLFTTYRLYLKQKVQLKNRIHSVLKEQLHGFTQEEIFDKKGKEQIREISPGTALNFQVNQLLDRMERDEQDIQALKDRILLQASPFMAQIEILTSMKGVSVFIAIAIIADIIDVSRFRNSKAFTSYLRSAPCVSNSNTSVSIRGTNKKGRKVSATLLAQSLNHMLDGSLKLRRWYGRLCEYKKTGLVRTGLRRRVLAEIFQMLKKKEYHYGRDAQKHGVKMAQYLRFLEKQKNTIILEKTA

SEQ ID NO: 307068 - protein, 368 aa, unidentified
MGEITRAMPARVGADLAKSVIQVDGVDGAGRRVVAKALRREQFLGWCAQLPPGCIVAMEACSSAHHWARKLRALGLDARLIAANFVSPYRMEGKSGKNDATDAAAICEAASRPNMRYVPIKSCEQQGLMSLHRVREGFKEERTACINRIRGVLGEFGLVFGKSPKTLRSVLPEVLEDAANELSTQARWVLQRAFEHWRELDEHLRWCDRQVGAHVRSDAAAKRAARITGIGELGASAMAAGVGEFKQFRSADQFGAWLGLVPRQNSSGGKTSLGRITKRGDDYLRTLLIQGAKSAVMSAHKRDDPVSRWLVQLRERVGWQKACVAMANKNARILWAVMTREHGFDPQHVSVKPPAKQPTVQALSCCAA

SEQ ID NO: 307069 - protein, 402 aa, unidentified
MNAVGIDVSKGKSMVAIMRPFGEIVSAPFEIKHTASGINSLVELINSVEGESRIVMEHTGRYYEVLAHQLSEANLFVSAINPKLIKDFDNDSLRKVKSDKADAIKIARYALDKWQNLKQYNVMDELRNQLKTMNRQFGFYMKHKTAMKNNLIGILDQTYPGVNTYFDSPARSDGSQKWVDFASTYWHVDCVRKMSLNAFIDHYQNWCKRKKYNFSQSKAEEIYGKAKELVPVLSKDAITKLIIKQAVDQLNSASTTVESLRTLMNETASKLPEYPVVMAMKGVGTSLGSQLMAEIGDVSRFTHKSAITAFAGVDPGVNESGSYEQKSVPTSKRGSSDLRKTLFQVMDVLIKTHPQDDPVYQFLDKKRAQGKPYYVYMTAGANKFLRIYYGRVKEYLSSLPES

SEQ ID NO: 307070 - protein, 338 aa, unidentified
MAIVMGLDQHRAQITAEWIDTDTGEVSRSRISPAHRAGVRKFAERFRGQELEVALEATTGWRFVAEELRRVGAVVHLAEPAETAARRGNKKRAKSDRADARHVRELLMIGRLPESWIAPDHLLDLRSRVRLRHTLSHQRGEWQQRIQAVLYHHGCPQRRNLMTAEGLQWLKAQPLPAGAREQVTVALGMIDALDAQLAPLDKELRAYARRQLGCKALMKHFGVGELTAVTILAELGDVDRFSSSREAVRYAGLDITVHQSDQRRSPGHLSRQGPPALRWALFEAAQSAARQGSPDRDYFAQAAQRLGANRACLSVARKLLKRSYHTLRELGEEALQPA

SEQ ID NO: 307071 - protein, 347 aa, unidentified
MTKHKYVGMDVHSATTVSEVINEQGKTVARSIVETKAAEIKDFIRGLTGTIHVTFEEGVHAAWLHEIIKPLVAEVIVCDPRHNKLIQSGNKSDQNDAHKLAELLRLGSLKAVYHGDCGTRKLREAVRGYNALTGDCLRVMNRIKAMFRGRGIDCGGTEVYRVIHREQWLDRLGDPPAKARLELLYEQLDSVSGLREKARREMVTQARSHSAYKVLKQIKTLGPVRIAEIIGVVRSPFRFRTKRQFWPYCGLAVRTASSADFEIVNGKVRRTAKRAATRGLNHNYNRELKKVFKGAALLATVTEPFKQYYEGLTASGMKPEMARLTLARKIAAITLAVWKSQSRNDYY

SEQ ID NO: 307072 - protein, 342 aa, unidentified
MQITTIGLDIAKNVFQIHGIDAKEKVVARKQLRRSQVIRFFKALPPCLIGMEACATAHYWARELTKLGHEVRLMPAKDVKAYVKRNKNDAADAEAICEAVRRPTMRFVRIKSAEQQGQLMQHRTRDVLIRQRTQIINALRAHLAELGLVAAQGNAGVNELRAIVTDEQDTRLPIDARASVIVLAAQLEALESVIGAIEKRIKMQHRSSEASQRVEAIPGIGVIGATAIVATVADPTIFRSGRDFAAWIGLVPRQDSTGGKQKLGPISKQGDRYLRRILVVGAIAVLRRAQENPGKYPWLTQLLARRPFKVVAVALANKMARMAWALLAHGGTYRAPELAETA

SEQ ID NO: 307073 - protein, 410 aa, unidentified
MEVILRCCAGLDVHKDSVEACVRRMSAGGKLGHEVRHWGTTTRELVEMGRWLSGAGVTHVAMESTGVYWKPIFNILEAQFEILLVNAHHLKNVPGRKTDIKDSQWIAQLLQHGLLKGSFIPPRPQREVRDLTRQRTQLVDEASRISNRIQKVLEDANVKLGSVASNVVGASGRLMLEAIIAGQDDPVQLADLAQRRLRSKIPQLEQALYGKLTEHHRWLLRLLLDQFQTSEQFIARLDERIAELTRPQKPVLEKLDAIPGVDRRVAEVLMAEIGPDMTPFPSDAHLASWAGISPGNNESAGKKRSGKNTKGSRWLRQALVQAAWAASHKKDSYFQAHARNLMHRRGRKRGLVAVAHSLLTVIYHMLKNGTEYRDLGPQFLDRLRANHLIRFHVRRLQQLGLQVAVAPAAV

SEQ ID NO: 307074 - protein, 369 aa, unidentified
MPVVRGERAARFTFGTPSPRGSIWRAFATVLWKPEQLIDFNSHLQGWETENMPELIHVGIDVSKDALEVACGPQSPTQCFTNDDAGHEALVNVLHVHRVDLIVMEATGGYEAPCACALQAAGLAVAVVNARQARDFAKAMGYLAKTDRIDAQVLAALAAVLANRADRQKLIKALPSDEQQRLHALVLRRRQLVQMLVAERNRLPMSHQAARVSIEALIKAIRKQIVDIEADLSSHIVHHHADLAGLLRSAQGIGPHTSMALIADLPELGKLSNREISALVGLAPFNRDSGKMRGKRMIFGGRTQVRCALYMATIVAMRHNRVIQRFYQRLLAAGKPKKVAIVACMRKLLTILNAMVRTGKQWDETFHFA

SEQ ID NO: 307075 - protein, 471 aa, unidentified
MGKGSGNGTTRGDRKRNARRERLRGLLPRDGAVVGIDLAEDKQALAVVDHDVRVLARKTVRVKAFRLGEALDWAVAQARVKGFAHVAVACEPTGPRWMQVQRLCAERGLPLVCIQPLVSHIAREQQDYTPHKTDESDCVLIGRLAAELHCYIPEELDEAWAHLRHLGRRRAQLITAATASVQRIQDFLSVAWPVVTEACAQPFESVTWLAALQVVTSRCGGDPARLAALGPEEFTALVRAAVPAWGGTRAWGRIIGRVFAELTRTEGVVAWSRRGLLRRCADELGDLARTRAQLRAVEADMVMVLGELGLSRLGDIPGLTATGAAAILAETGDPRRYDSSSSLVKHAGLSPSENASGAFEGQARMSRRGRPGLRLTAWRAVWPMLQHNPVMAAKYAAMTQAAGAAAADAGPRQARAAAAARARRARARVACAASLLRWIYSLVVHGTSWDAAVASGAVACQHAPRCQPEAA

SEQ ID NO: 307076 - protein, 419 aa, unidentified
MKNWTELTHFAGLDWAGDHHDVAVVDQQGQVVAEFRIEHSAAGWNEFRQKMAAYPAWGIALETRSGAAVEELLQSAGTVFPLQPKAAARYRERKAPSGVKDDQLDAWAMADALRVDGQHWRALAPEDPLIQELRLLCRDEVALIEQRTALVNQLRAALREYYDPALQAFDNWTLPAAWALVVQFPTPTELAAAGKRKWEKFLHVHKLWRPETVEKRLQLFAQAADWKRNEAVTRAKSRLAVSLAQMLQTLERQLDDYRQAIEELFARHPDHDLFGSLPGAGSKLAPRLMSELGEDRARFATAQSLQCLAGTAPVSFQSGQVFRVKMRRCCNAHLRHAVHLWADCSRAACGWAQAYYQAQREKGKSHACALRCLGHRWLEVLWKMWQDRTHYDGDLHARNQQKHGSWVIQILTAPATKPV

SEQ ID NO: 307077 - protein, 412 aa, unidentified
MEGETVIAGVDTHKDVHVLCLLDGLGRKIRSGSFRADPEGYDRLAEAIGDPGSCLVVGVEGTASYGAGLTRRLVELGYNVVEVLRPKRDKARPGEGKSDPLDAERAARKAASGRGCSVPKSQDGWVEAVRQLYVARRLAVATSTSCVACAKSMLTTAPGALRERFRGCERPKDLMPLLARRRKAGDALEESVLASLRSVATVWKEARSQVESCDARIRALLEANAPALLGIEGCGTTTAAALVVAAGDNPGRLKGEAAFSMLCGVSPIPASSGKTERHRLNRGGNRQANWALYEIAIKRMAYDERTKRYVAKRTSEGKSRREAIRCLKRYIAREVYRVLMDPNPDGAAPEGPELAKMRKAMRVTQKQAAAGLGMSAASLGHLEHGRRRSTKLERRYYELLCELKGALPQTAY

SEQ ID NO: 307078 - protein, 332 aa, unidentified
MFVGMDVHRNRTQVCVLDHKGNEVRNRNVTNDRQSLRKELAGLRRGTPVVFEAAYGTGWIAELLGDLGFEAHLAHPAGCRAIADAKLKNDRVDARTLANLLRTGYLAEAWLAPKEVREQRLLLRERARLVRIRTTAKNRIRAQIADEGVPAPSHGLWTKEGATWLGTLDLSPMHRWVVTDCQALLDVLHSRISLLEAEIRRQAKPDKRIDALTAIPGIGLLSAMTLVSEIGDISRFATARKLCAWAGIIPSMRNSDRTIHHGHITRAGPAAVRHVLAEAAQTAVRKEPYHSDFLATKQRRGTGIALVRVSRKLLTEAFYALQALEDEQRQCS

SEQ ID NO: 307079 - protein, 370 aa, unidentified
MTISNLLFIGMDVHKDSIEIAIADGDSHEVRRYGRIGGTHDAMRKTLRKLVSQGKSLHFCYEAGPCGYEIYRYLVSEDHDCWVVAPSLIPKRPGDKVKTDKRDAVQLARLLRAGELTPVYVPNREDEAIRDLSRAREDTMLVQKSARQRLKSFLLRHDIRYQGKTSWTEAHLRWLADEVRCPSPAQQIVFQEYVNAVTESQQRLQRLDEQIKHFAQAWRLYPAVKALMSMRGVKMIVAITVVSELGDLSRFDNPKQLMSFLGLIPSEYSSGPRQKRGGITKTGNGHVRRILIEAAWCYRYPAKVSREMQLRQEKLPLVIRDIAWRAQLRLTKRYQHMQRKGKPHNVTVVALARELAGFMWAIVNEVKYPR

SEQ ID NO: 307080 - protein, 425 aa, unidentified
MNYKQNEKINQVKESTLVVGIDIGSTKQYARAFDWRGIELGKVFTFSNSREGFEAFKAWMRHLQDKYRKSDVIVGIEPTGHYWFDLGAYLEDEGILLVMVNPYAVKQTKELDDNSQSKNDRKDPKVIAKLVTEGRYSAPYTPDGVYADLRIMVANRKRLIREMTQIKNRFARWFAIYFPEYTDVFGDYEAQSSMLLLKKVCTPEAIVELGAEKINQIWRDAKLRAVGMKRATTLCETAKRSIGLKKGSSAARYEMKLLLEDYEYKKAQLDAVMEEVEKLCRKIPESEQMLAIKGIGVITVAGFLAEVGDVRRFESPRQIQKLAGLSLRENSSGKHKGQTTISKRGRSKLRAVLFNAAIPLIAKNPEFKSLHEYYTTRANNPLKKKQSVIAISCKLIRVFYAILANGVTYDPQKLLSDIHRQPQAA

SEQ ID NO: 307081 - protein, 315 aa, unidentified
MKTTTKTTERNVGIDIGKSTLDIFVLEQDNHWQTDNTEAGVRALAARLARYKLARIVVEATGGYERKLVYALAEKGLPVVVVQPMHVRQFAKAQGILAKTDKLDARVIAEFGAIMKPPIRQIQTKKIRYFRDLLARRRQLMEARTQELNRLDKADKAIQSTHKRLIKILDKEVAWVTAKLERTVGEVTEWQETYEIVTSVPGVGDGVAHTLLGELPELGSLSPRQVAALCGLAPFNKDSGSFKGKRRIKGGRAPIRTMLYMAMMCAIQHNPVMKKFYAKLVAAGKHKKVALTACMRKLVTILNAMVRDGRRWQEA

SEQ ID NO: 307082 - protein, 343 aa, unidentified
MQAVTTIGLDIAKSVFQVHGIDAAGKVLIRRQLKRRYVLAFFQKLPPCLVGIEACATSHHWSRELQALGHRVRLMPPAYVKPYVKRQKNDAADAEAICEAVTRANMRFVETKTPEQQSCLMLHRTRQLFIRQQTSVINAIRAHMAELGIVAPVGRKGVEQLLVAAGDASDPRVPEVARACLAALGAQLRRLKAQILEFDRRIMAWHRSNETSRRLDAIPGIGPALATALVASVADPKAFRSGRNFSAWIGLVPKQHSSGGRDRLGSISKQGDRYLRSLFTAGALAVIRYAKIHGTQHRPWLTALLARRPTKVAAIALANKIARMAWAMMAKGERYKEPVALAA

SEQ ID NO: 307083 - protein, 379 aa, unidentified
MQTITLYIGLDVHKDSITIAIAEPGPKGEIRLFGTITNDLGRLENALGRIRKAHPGAHLEVAYEAGPCGFVLARRLKQLKIPCLVAAPSLIPKPPGAPFKTDKRDARAIARLLRAGELTAVYIPEPTDEAIRDLCRARTDAVDDLRRCRHRLKGFLLRHGYRYQGKANWSQPHMRYLRELVLPHPAMKTILEEYLQGIDAAHQRVQRIEASMLILLDTWRLKPAVQALMSFRGFQLVAAMVTASELGDIHRFAHPRQLMTYLGLVPTESSSGPHQRQGGISRCGNSHQRWLLTECAEHYALPPKISKELSRRQEGQPEAIRALSWKAQNRLHLRFQRLLARRLQRHKAKVAIARELCGFIWALLRTQDCYRQPAAAQPA

SEQ ID NO: 307084 - protein, 414 aa, unidentified
MEIVNTHCAGLDVHKRIVVAAIIVPDTKGGLHRETRTFETMTADLLALSDWLQSYHITQVAMESTGEYWKPIFNILEPSFEVLLVNAQHIKTVPGRKTDIKDSEWIADLLRHGLLKASFIPPVGQRELRELTRFRTTFVQEKATLVNRVQKVLESANIKLASVASNVVGVSGRAILDALIEGTATPEQMADLSKGRLKDKREQLTKALEGKVKAHHRFVLTELLCQIDGLDETIAHFDDQIREYCRPFEQSVKFLDTIPGIARQSAEIIVAEIGTDMRRFPDADHLSSWAGVAPGNDESAGKRRSGKTTKGDRPLRVALNQAAHAAAHTKGTYLSAQYRRLAPRRGSKKAIMAVAHSILIIAYYLIKNQEPYRELGADYFDKRRPEAIAKRLVKRLENLGYQVDIFHQPACVSV

SEQ ID NO: 307085 - protein, 410 aa, unidentified
MQTIVERGCGLDVHQATVVACLLIVRKNGTVHKQVRSFGTTTRELVSLREWLLAEGCTHAAMESTGVYWKPVYAVLEGALEIVVANAYHVKNVPGRKTDVKDAEWLADLLGHGLLRSSFVPPKPIRELRDLTRYRRKLVEAQTAERNRLLKVLESANIKLASVATDVFGVSGRLMLRALIEGVATPEEMSELAKGTLRRKIARLQPALEGNLEPHHRFLLKLQWQPVEAAERDLATLQERIQQKLEPYAAQSALLDEIPGVDRGLAAVIIAELGVDMTVFQSVSHLASWAGVCPGNNESAGKRRNSRVTKGNLYLKSALIEAANAAARAKGTYLRDKFYRLKARRGYKRAALAIAHKILVAVHHMLLQNVSYKDLGDLYLDKLNKHHLTRNLVHRLERLGFEVTLHLKAA

SEQ ID NO: 307086 - protein, 315 aa, unidentified
MTKLNTSFSGFIGCDVGKAEIVIHDSRDGTTTTIANRAKPLAAYAATLNTNCLVVCEATGGYESILLNAMLKANIPAHRADARKVKAFIRSFGIRGKTDAIDARALAQYGRERADKLRLWQQIEMAQGQLQSLVLGREDLVRQRVANKNRLAAPGNAAIKPSLKTVIECLTKQIAKIEAQITQLIQTNPKLARNAKILTSIHGIGTVIANGLQALMPELGTMGRREVAALAGVAPHPNQSGGRDKYRKTIPGRPIRSILFMAALSASQSKTGLGDFYRRLLSHGKTKMVAMVAVMRKIIVIANAKLRDAEQIKLS

SEQ ID NO: 307087 - protein, 450 aa, unidentified
MAQGSGLTRGDRNRNRKLADLRDVVRRDRAVLAIDLGEDKQVAVVMDHECRVLARKTVRAKAHHLDALLAWGTERAGKSGFAGVTVACEPTGHRWKALMGLADGAGQAFVCVQSMAVHRSRETDDYTLGKTDHRDAYLIGKLVTRLECYLPERADETWARLRHLGARRAALVTDVTAVRQQAADLLGCAWPAALGAAARPVESLTWRAAMAVVTARCAGRPERLRKIGYDRFLAAVRRELPRWGGKVVRHRIVKALWDALTDRRGVLQQRPGAIERIELLLEDWRGLRRAVAETEKRMLAVLDELGLTGLASSIDGVTALSAAVILAESGDPRRFSSGRAMVKHAGLNPSERTSATISGQTQISRRGRPGLRTAAWRAVWGALRYNKVLQARHARLTGREEGRRLADGQARMACAAALLRWLWAVITTGRAWEPAIASGQAAARTMAGAA

SEQ ID NO: 307088 - protein, 454 aa, unidentified
MAQRNRDVTPKLGKSRAAALTITHPNAAGIDIGTASHYVAVPPDRDDEPVRAFASFTVDLHRLADWLDACGVDTVAMESTGVYWIALYELLESRGFHVLLVNARHVKNVSGRKSDVLDCQWLQQLMTYGLLRGAFRPAEPVCVLRSLWRQRGMLLRSQARHVQHMQKALTQMNIQLTNVISDVAGETGQKILRAIVCGERDGQVLAAMKNVRIRASVDEIARSLQGNWRAEHLFALKQALAAFDFIGSQLLECDREIELQLQCLQAHDGEPAKGKKRSRARNAPKFDLRTLLFRMCGVDLTRIDGVDVTTALAVVSEIGVDMSRFPTVKHFTSWLGLCPGTKITGGKSLSGKTQRCANHAAQALRLAAAALRSSKSALGAYFRRLCSRMDKPKAVTAAAHKLARLIYTMLTKGEEYTDQGQDYYEERYRERVLRALSQRAAKLGMQITPIEQTA

SEQ ID NO: 307089 - protein, 419 aa, unidentified
MSFKILKFNCCGLDVHKTWIYACIGITDSNNRTEYKQARFSSFTKGLNELCAWLAKYNCKDVCMESTGKYWIPVFNILEQHEIWVTLSHPKYTKPMKGNKTDRKDAKWICDLYMCGMVKPSFIPPADIRELRALVRYRYKLTCMITGEKNRAQNCLTVSNLKLDDVFSDVFGKSSRSITEHLLQHPGEKFDVTPFIHGHCKTPIEEIQAAIDGAISKEQAVKLRQCLNHIDELNKHISEVEQEILRLSDKYEAALNLIRTVPGFNKNPMTAIQVLSEIGGDMSVFPTAKHLVSWAGCCPRNDMSDRKIKSTRISRAGSYFKPVLVQVANALIKSKKHPEFTTRYKRIKARRGHKKAIIAICRMILTAIWHILTDLKPYTPDGFLESRPVSREKMLTTSQALNLLRQRGYLIKDDPLPAS

SEQ ID NO: 307090 - protein, 345 aa, unidentified
MMLIGCDFHPSWQQVCWVDTETGETQQCKLVHAAGEAEKFYGQFSAPARIGMEATGNCQWFVEMLAALGHEVWIGDAAKIRASDVRQQKHDRRDAALLLRLLMEERFPRIWTPSSEQKDLRQLLIHRYKLVRLRAQAKNGLQHLAMNQGLQKKNRLWSKAGQQALRDLALQPWASRRREDLLNVLVMLDRQIESLDLAVQQAAEQNENAKLLMSQPGIGPVTSLAFVLTMGDVSRFPCGKQVASYLGLIPREYSSGGKQRFGPISKQGNRFMRMLLVEAAQVAVRCDPQLRREYLQRCHHDKPKGVAKVAAARKLAIRLYWMLRTQKRYPEIVHVESSSRVALGG

SEQ ID NO: 307091 - protein, 421 aa, unidentified
MRGLRGKRLRTVKEGTVIATVDIGATTNTGYCTSVDGRDMKVFKFGNTREGFEKFSHMIVAARNRFGCGEVIVGYESTGPYAEPLVHYLMDKPVSIVQVNPLHTKRLKEVNDNSPGKTDDKDPRVIADIIRLGRALSVVVPEGDAAYLRRLNNARERHVGERTALLNQMQQLVFLIFPEFKTVIKQMRGRTVRFILKKYTTPEKIESLDKAVLGEEMRKRSMGKLGITEAELLITAAQQTVGIKEGVAGIVLDITHIIAQLEVVERFMSEIEAEMVIALERIPSSARLLSIKGLGMISVAGLIGEVGDFSKFRTQSELLKLAGLDLYEVSSGKRRGQRRITKRGRSLMRKILYFAVVHMIGKHGIMHDYYERLTGRGTLRMRALVAAMRKLLRIIHAMMRDNRDYIGQYEAPKRRVIKKAA

SEQ ID NO: 307092 - protein, 413 aa, unidentified
MNEQSFVWFIGIDWGSEKHQGCVIDQQGDIAGERSFAHSGAGLAELSDWLLSIVGAANAAAVAIEVPHGPVVDSLIDRGFAVHTINPKQLDRLRDRFSVAGAKDDRRDGYVLADGVRTDRRLFRRVSVTDPRIIELRAWSRLAEELTEERVRLSNRVHHELWRYFPQLPKLTDDLAAPWFLELWSLAPTPAKARQLRKSTVEQLLKQHRIRRVDAETVIRTLREPAIKVADGVAEAASVHMRSLIARLRVINRELREAEHQLDKICTAIGESEPASGDCLQRQDVVILKSMPGIGRINLAALLAEGSGPLSRRDYPALRTLCGAAPVTKQSGKSRIVVRRYAAHVRLRQTVYHWARTATQHDPKSKARYAAFRLRGDSHGRALRGVADRLLGLACVLLQKQTPFDPRYGQPAT

SEQ ID NO: 307093 - protein, 335 aa, unidentified
MKKYLFYVGIDISKLKLDVVMIHGESSSSSEHFIVENTQKGVKEIVSHLLKKRIDVSQTLFCFENTGVYTSPLSYYFSQKGFDYWIVPAIEIKRSKGISRGKNDKTDAKDIAMYSIRNIDKLRLSSMAEMEIQQLKLLFTEREKVMKSIHLFESSKENIGFTSKEVYKMVNSINLKTLNHLKKSLKELEAKMKEIIKNHTVLNQQFKLIQSVPGVGQQTAIYFLISTKGFNAFDSARKFSCYAGVAPFEYSSGSSIKGRTKVNHLADKKIKSLLQMCALSAIKCDHQLKEYYNKKKEEGKNKMLVLNNIRCKIIGRIFAVINRQTPYINTYKFAC

SEQ ID NO: 307094 - protein, 388 aa, unidentified
MYHVGIDISKFKHNCFIATDAGVKVKEFVFDNNKSGFIELKDSLTPLGKPQEIKIGFESTGHYGTNLKSYLSNLGYTYVEFNAYLTHLFSKALTLRKTKTDKVDAKVISSMLGSVDYETLHTQFYHMNDLKELVRQRNVYLGNRSKELVKLTNLLDKSFPEFKPFFKNRLGSGALFILKRFKTKARIAKLSMSDIELVKSKTKGKMTYPKLNRLKQLAHDSIGVSSKVYDLLIQTSIEQFEHLTNSLKAIDSEIITLFKQTDSKLLTIPGLGIITAATIYAEVGDFRNFSNPAKLIAFAGFDVRIIQSGTQEHYGKLVKHGSSLLRSALWSYALPAIRFIPTFNDYYHKKKAQGKHHKVILSHICRKLIRMIYYIEYHNISFDQSLSR

SEQ ID NO: 307095 - protein, 382 aa, unidentified
MKKAITGVRRFVGLDVHAETIAAAIAEKDQAARDLGTIPNREESIRKLARKLSEGGAWAACYEAGPTGYALYWQLTKLGIPCVVVAPTLVPTKAGDRVKTDRRDARRLASSFRAGELTAVWVPDAQHEALRDLVRAREAAKQDQLRARHRLGKYLLRHGKRPPQQMRAWTENYLQWIKGKVSFDQRSQQVTLEDYLNEVDHAGARVARLEKAIDEAVEQAPENMRELIQALQALRGVAKVGAVTIVAEVGILTRFEHPRQLMGYSGAVSSEHSSGGKIRRGGITKTGNAHLRRVIVEAAWSQRYKPVLSLAMRKRQEGVSAEVQELASKARHRLHHRYMHLLGKGKTKQEVVTAVAREMLGFIWAIGVSVERAQAQRGKGAA

SEQ ID NO: 307096 - protein, 348 aa, unidentified
MSKISQYVGLDVSLKETSICVIDDAGKIVWRGRTDTTPEAIASAVKQHAPHAVRIGLESGQLSTWLFHELKAVGLPVICVDARHAKAALSLKVSKTDANDALGLAQIMRVGWYREVSVKGLDCQAVRTLLVVRAQLVSQVTTLKNCVRGVLKTFGLVLPKGLRSQFPGRVRAAIDGHPVLGAIIEPTLLVLEATRAQLIVYDRAIIQRARSDDTARQLMSAPGVGTVVALAYMTGVEDPARFKRSSSVAAYFGMTPRRYQSGEVDRAGHISKCGDGMVRSLLFEAAKVLLSRSARPSALKTWGEALGKRIGPKKATMAVARKLAVILHRMWITGTTFQWNAEAASLAA

SEQ ID NO: 307097 - protein, 336 aa, unidentified
MSHYCGIDLHSNNHVLVVIDEEDKRLYEKRLGNDLSLTLKALTPYRETLHGIAVESTFNWYWLVDGLQEHGYDLQLVNTAAVKQYDGLKYSDDHHDAFHLAHLMRLGILPTGYIYPKEQRAIRDLLRRRLSLVRTASAQLISAQSQIWRSTGLRIKSAELRKLEFAPPLVDDYTLQAVQAGLAVYQVIQREIDALEQTAHQAVKLTEAFKILQTITGIGKILGLTIMLETGTIDRFAGPGNFASYCRCVDSKRTSNGKKKGEGNAKAGNKYLSWAFSEAAHFSVRFEPLAQRFYERKKAKTNGIIAIRAVARKLARASWMMLKHQVPYDARRMFPG

SEQ ID NO: 307098 - protein, 342 aa, unidentified
MYYIGLDVHKKSISYCVKDASGQIHQQGKAGATRWELDIWMKTLPQPWTAAMEATIFTGWIYDYLKPHTAGVKVAHPLMLRAIAASKKKNDRIDASKIADCLRCDFLPECYMDSTEIRERRRTLRYRSLLVRQVVQLKTRAASLLMETGVSYDRQHLHRLGFIPELLARKDAIDQSIRPLLRVSHDSILRLRHIETALIRSLQRDPLLAERVRRLQTIPAVGKITALTWALEMGDIARFPSIRQAISYCGLCGDEQKSADKTVRTPLSKKRNKHIQHVLVEAAKLAPRYDPDLALLYAREKQKGNANRATLAVARKLLAYLLAVDREKRDFVPIREFSSTAA

SEQ ID NO: 307099 - protein, 366 aa, unidentified
MSIHVPSEAVVLAMDVHKNSISTGVLEPGETSAVVDRISTDEDSICRLIRRFDDPTRVWACYEAGPTGYGLTRTLRRAGMRCEVIAPSLIPTAPGQRVKTDKRDARRLASLFRGGQLSAVKVPGPEEEAVRDLCRARADMVVDQTRARHRLDKFLLRHGRVWRDGSNWTHKHHAWIDTQRFDERAATITFDHYRAVLSAREAAVVAIEADLFDWTSRAPFAEVVSRFAAYRGVTELGGLILAAEVFDWHRFPTAGMFMSFTGLVPSEHSSGESQRRGGITHAGNAHLRTQLVESAWAYRSPAVVGAHLRRRQEGAHPDTIARSWKAQQRLCTRYRRLDARKHNRKVVITAIARELAGFLWAEATAT

SEQ ID NO: 307100 - protein, 359 aa, unidentified
MGWTRTEARMDRFVGLDVHAASTTVAVVGPSGRHLETRVVETNGRSLVNALRLIPGNCHVCLEEGIQAEWVYELLKPHVTEVVVAKVERRRQPKNDARDALGLAERIRTHAVGTPVFKDTAPMASLRELARLHAKVVADVVRSKNRLKCLFRARGIETAGKGVYGTAERDAWLKKLPKAKRLAAEVVYAELDAIEPLRTKVEEDLIREAKRFPIARKLETCPGLGPIRVAQLMATVVTPGRFRTKRQFWSYCGLAIVTRSSSDWVQDEQKRWKRGTVPLTRGLNRSCNRPLKYVFKSAATTVITQPDSALGKEYTHLVNSGTKPNLAKLTIARRIAAIALALWKHDEEYDPTKHPKQAA

SEQ ID NO: 307101 - protein, 713 aa, unidentified
MAKNRRYRQVDVKSVDVEKIAELGSKLLVGIDVAKTNQVATFEDPETHRRLTVKWAHPAQTRDFFALLEGLRARKRTVEIVMEPSGTYGDPFLHWFHTHDFPVRRVLGIQVHAGAAMLDGVRSGHDAKSAGLMVAIDQLEGSRDWLARAESTRDLRSLVTLYRWHDDQRRKLFGMAEAHLARWWPELSTLLSARSKIYWRLLAEYSGPEGVAADLSGAAHFMRRVGRAFLMDEKITAVCASAASTLGVPMNALERRELAFIGSEFLRCADECSTLGADIEGRVRILAAPELVRLLGAATTGTLIAHNLDPLRFDNPRAFVKALGLNLKVRSSGKHQGKLRLTKRGAPRARWMLVLAAARLIPREPVVKAWHQAKRARDGAQGGARNGMISVVAIARKLAAAAWHVARGAEFDAERLFDASRLGRYLHAPVMSRTNGAIAGAPASDELGADEALADEALADELLADEVLADAVLAALEDGGEEAMSESLSEALEDGGEEAIAETLSEALEGGGEKAIAETLSEALEGGGEKAIAETLSEALEGGEEAIDEAMASVDVTVHDAIAPPPSPAPASSGVQRAPEPRRRARRGDPRPVLQAAICAAGAEVVLAEEAALAAEDHPAVPPQTPTTERHPPSAHRPVPRRGTAAPASRGCPHQDQARAVLDGAGAQAGGAGTADPPAKPKDALADPPPPAPMHLLSLAGRLTRGISRLMPR

SEQ ID NO: 307102 - protein, 355 aa, unidentified
MDSTKYIGMDVHKESISIAVMNAAGKIGMECLIETQASMILQFIDGLRGNLQVTFEEGTSAAWLYDLLKPRVTKLVVCDPRKNHSMREGNQSDKIDARRLAELLRLDHLTPVYHGEHGLRTLKELVRSYLTITKDLGRVMTRVKAIYRSWAIPCTGQQVYVASHRAEWLAKIKEPGVRRRAEFYYQQLDALRVLRQQVRRDLLAESKKHQAWKRLCQIPSIGPIRSATLLGILQTPHRFRTKRQLWTYSGLGIETHSSADHRSVHGQLQRSKKSVLVRGLNRNCNHDLKNLFKGAAVVASSKPGPFEQFFAALVAKGMRPEMARLTLARKIATIVLIVWKRGVCFDAQHLKPQTA

SEQ ID NO: 307103 - protein, 408 aa, unidentified
MNAVGIDVSKGKSMVAALRPMGEVALLPQEFLHTEVGLEQMAYAIIALGEDTRVIMEATGRYHEPVAAALHEYGIYVCVLNPLYIKQSGGGSIRKVKTDKADAMKIAKYGLDNWVDLREYTPMDTVRQQLKLCSRQYNLYMKTVVSLQNNLISLTDKTFPGVNELFSSPERADGHQKWVNFVMTFWHCDCICRVSEKAFTERYQKWCKRKGYHYSAEKALDIYAGSCGHFTTLPKNDNTKLLITTAAQQLLAGKMTLAALRAEMARLARQLPEYDTVHAMYGVGEITAAQLMAEIGDVRRFPRRSSIVGFAGVDPAVNQSGKHAAQSTPTTKRGSPHLRKTLYQIVCTYLRKAPEDEPVYQFLDKKRAEGKPYFVYMTAAQNKFLRIYYARVKECLEDFDAQQNSAQS

SEQ ID NO: 307104 - protein, 345 aa, unidentified
MTEAYDGRQVVGMDLHRRRSVLVRMSMDGRKLETVRIENSPAALRAVLARCGQRPLVVLEATYGWYWAAGVLAEAGAEVYLAHPLGVRAFSYRRVKNDERDASDLADLLRMGRLPEAWIAPAEVRALREVIRYRHKLVQQRTSCKDQVHAVLAKLGVPVTHSDVFGRGGGLWLDQLVLPEPYAAKVASLRALIGVLDGEIARLGQRAAGMLAAGPGYAAVRELDGIGPVLAAVIIAEIGDVTRFRKPGQLCSWAGLTPRHYESDTKVIRGHVSKQGSRMLRWALVEAIQHQPAGTRPQQAKEAILARRGKEARNIAKTAAARVLLTQVFYALRDGHVRRASHPAA

SEQ ID NO: 307105 - protein, 392 aa, unidentified
MYIVGIDIGKNHHEASIVSPKGKQIGRSLRFATTHKGADSLMSFIFKNIGNSPCVFGMEATGHYWYPIYSFLKAKGYTIYVINPIQSDSLRKMYIRQTKNDSIDSFLIAEVIRFGQFGTTSMADENILAMRQLCRYRDSVISSRTEIKLRIGTIMEQIFPEYEKQFSSLWVSTSMGILEKYLTPENIENAPIDELFEIIKDKSHNKLTMKKAISIREAAADTFGIKIAQDAFSFQLKQLIDRMNFLDKQIEALDCQILEYYEKFDCYLHTIPGIGMIAAATILAEIGDINRFKSSSALVAFAGIDPTVRQSGEFSSTHNHMSKRGSPYLRHAIFLVATTCSFHNSPLNAYYKKKREQGKHHLTATGAVARKLTTVIYAVLRDGKPYKPKKFC

SEQ ID NO: 307106 - protein, 402 aa, unidentified
MNSVGIDISKGRSTIAVMRPFGEVVISPFEVRHTDSELSELARQLKSLDGETRVVMEATGNYHAPVAKLLHDAGLYVSVVNAKLVHGYGNNDLRRVKTDRKDAVKLANYGLDRWLTLPKYVPEEDTRLLLKNCYRQYRQYSKVQTLLKNNLISLLDTVFPNANRLFSSPIRGDGSEKWVDFVAEFWHCKCVCERSERAFINKYQRWCRKHGYNFSETKAQTIHAVASGHIGVMPKSETTKLLVEQAVAQLRVTSAALAALKHEMQTLASQLPEYPVVMDMFGVGPTLGPQLIAEIGDVRRFYSKKALVAYAGLDAPPNDSGDMTGRHKSMSKVGASSLRRTLFLVMNIYLRKSPLNEPIYQFMDKKRAEGKPYRVYMMASANKFLRIYYATVKAYLEALDQT

SEQ ID NO: 307107 - protein, 318 aa, unidentified
MNIIGLDISKDTIDATLHKTNGSIHYIKFKNNDDGLKQFRLWIKGNRIRKVYIGMEATGIYYEKAADMLSSYYTVYVINPLKIKDYGKSRFNRTKTDKADSNLIADYIKRHQDTLIPYQIPKNKALQKLINLKNQLHQHQKQIKNRLHSTEEDFIRNIHQDLIDTIQDKMEQVKIAISEQIKKQTDNNHYRNLQTIPSIGKDTASVLYAQLTEKHFKTANQFVSYAGLNPAIIQSGTSVRGRGRLSRYGNRRLKSTLYMPALCAYRFNAFPKLINNLKKAGKPKMVIIVAIMRKLAKLAYYIVKTGQPYDAERHRLNQ

SEQ ID NO: 307108 - protein, 343 aa, unidentified
MDYFAGLDVSVKDTSVCIVDDTGRIRREVKVASEPEALLTVLRNPAYRFKRIGLEAGPLSQWLFSALAEADLPVICVETRHMRAVLKAQINKTDRNDARGIAQMMRVGLYRPVHVKTLRSQKLRMLLTHRKLLQAKVIAVDNDLRATLRNFGLKVGMVGTIKFEARVKELVENFPDLMASVEPLLVVRRVLREQISILHRRVLAAARNDEVCHRLMTVPGVGPVVALTYRATVDVPARFRKSKSVGAVFGLTPARDQSGERDRPGAISRCGDEMMRTALYEAAQVMLLRSAKWSWLKAWAMKIARHRGMKKAIVALARRLAVIMHRIWTDGTEFRWTREAAAA

SEQ ID NO: 307109 - protein, 371 aa, unidentified
MTQAVKYVGLDVHKETIAVAVADGERGGEVRFVGTIVNEDDAVRRLVKRLAAPDVTLSVCYEAGPCGYGLHRLLTKLGQACIVIAPSMMPRRPGDHVKTDRRDAMTLAGLLRAGELTAIWVPDEAHEAVRDLIRARRSAQENATEARQAVRSFLLRHDRRFGGKTAWTKMYWRWLSEQRFDFPHQQLAFEEMQKRVLEAQARVGRLEAALGEAMQAWHFGALVHNLQALRGIRLIVAATLVAEVGDLTRFDNPKQLMAYVGLVPSEHSSGARTKRGRITRAGNGHARTMLVEAGWSYRLPAREERRYRERVADLPDEIQAIGWKAQVRLCQRYRRLAATGKPQPKVTTAIARELVGYAWDIARRVSPALAG

SEQ ID NO: 307110 - protein, 366 aa, unidentified
MKKTSTVRVNGNMIFKGHKLTIGLDLGDRWSFYCVLDEAGKIILEQKVATTPEAMKQTFEKIPRGLIALETGTHSPWVSRLLRELGHQVLVAHAQKVQLITKSKRKDDRHDARTLARLARIDPELLGPVRHRSAKAQIHLTVIRARAELVRARTALVNAARGLVKSYGERLPKCGTQQVNRELAAELSTELRDVLEPLLQEVESLNERIQEYDTRMEKIAKESYPQVELLKQVKGVGTQIALTYVLTLEDPHRFPKSREVGCFLGLRPGRRDSGESQPQMHISKEGDRYLRTMLVQGAHYILGPFGADSDLRRWGLKLAARGGKNAKKRAVVAVARKLAVLLHRLWVTGEVYEPLRNSQKAMRAVA

SEQ ID NO: 307111 - protein, 475 aa, unidentified
MVRPSGTEAPGARKCGQADTHDELRARVSSWPPLRLARLRCERESVGVVSPAAPIIDNQWERGMRRVIGIDVHRTFGEVVIWENGVLQRSGRVEMTRTALEGFCKSLRSTDEVVIEATGNSMAVSRVLAPFVARVIIANPLQVRAIAQAHVKTDKIDAGTLASLQAAGYLPQIWTPDAATERKRRLVARRYQVVRHRTRIKNEVHSILHAHLIPRCPHADLFNGRGRAWLVRQPLPDDERSAIDRHVRELDRLAEDLTLLDREIAQVAIEDAATRRLMTITGVNLTVAAGIVAAIGDISRFTSPQKLVSYFGLNPRVRQSGLGPAHHGRISKIGRSHARAMLVEAAWAAAKAPGPLHAFFVRIRAKRGHQIAAVAVARKLTVLCWHMLTRNEDYLWARPALIANKTRGMELQAGHPQQKGSRRGAAYAYNVKALRDKEMLLAAQAERSYERLTAQWKARRPKEPARGRLSSAGHK

SEQ ID NO: 307112 - protein, 365 aa, unidentified
MTTRQSSTSSSTDPPVRREVVLGVDTHGEVHVAAVISPLGKVLGTESFPATAPGYRQLLVWARKRGTVRRAGVEGTGTFGAGLSRYLLAEHVQVFEVNRPDRSARRLLGKSDPLDAQAAARAVLSGRTRARAKSGDGPVHSARIYKLAKDSAVKARTQAINQLKAVLVVADPALRERLSSLGNAELFRTCATLSPHDGGGDEDAVTQATHMTLRMLAERIEQLTGQINELNQRLTRLVEHHAPQLLVPVGIGPDSAVTLLITMGDNPERLNTEASFAALCGVSPIEYSSGRRRTRRLNHGGDRQANAALHRIVFTRLRHDPRTQAYYVRRTQEGKTRREIIRCLKRYAAREVFNLVRPGSRTPAL

SEQ ID NO: 307113 - protein, 333 aa, unidentified
MNTVGIDVGCKELVVVVMVNGKARKATSFENTASEHQAIIHTLTKLKGTSRVCLEATGVYHFDLAVALSRAEGLEVMVINPKAAHNFAKALMTRSKTDAIDAENLASYAERMPFVAWERPADEYISLRVMSRRIAAISKQKTQTKNQLHALVSTIETPRLVIDQTKELISFLDRQIDTLRDSALLLIHQQNELKTAYILVTGIKGIAHASAIQILSELMILPKDMTARQWVAHAGLDPRIFDSGSSVSKKPRISKVGNRYIRQALYMPALVASRFEPNIKEYYHHLIDDNGLKKVQAVCAVMRKLLHAIHGMLRTNKEFDGTRFYTLPVTTDS

SEQ ID NO: 307114 - protein, 381 aa, unidentified
MYVGLDVHKKHTWAITIDEGGKIVREEKFPSSGDGLIDFVRSLSKEDKVVMEASSTWTHIYDLLDELGIEVCLAHPLQTKAIASAKIKTDRISAETLAQLLRADLIPTAYVPSKEIRELRTITRYRACLVKLQTQLKNQVHAILARNGIKHEFSDLFGMAGMKFLLDLQFSLSDMDWTILLSSMSAIVHISAEIEKISKHIASLVKEKEEVKLLMTIPGIDYYSATLILAEIADVKRFPSYKQLCSYAGLVPSVQQSGSSRRYGRITKQGSKWLRWILVQAVQHLVKRPGRLQDFYLRIARAKGSKVAKVAVARKLLRIIWCMLTRNEPYREEEERLTEAKYRRMVTKAEEYSKTIEDVFEEARELSEWVEGYKVYMVGER

SEQ ID NO: 307115 - protein, 401 aa, unidentified
MKEFNAEEARFKTVTAIGAFRQAEAYTGYPAYIGLDVHKDTIAVAVARAGRQEPEFRGEIANKPKTIAKLVERLSQEFNGEVLLFCYEAGPCGYVLYRQILELGHDCQVVAPSLIPKKPGERIKTDRLDAKKLSRCLRNGDLTAVWVPDEEQEAMRDLTRTRGDFKAQERKARQQLNAYVLRHGHSWPSNRTRWTKTHCNWLESLKFPHDWQQVVLQEYIEAVKVATQRVVDMTAQMMRVLPQWSLAPVVDSLVALRGIDKLAAMVLLSELGDISRFVSPRQLMAFLGLVPSEHTSGGRRRQGAITKTGNSHARRMLVESAWSYRFPARQTAHLKRKAKGASDEAKVIAWRAQKRLCGRYQHLLRAGKNTKQTTVAVARELAGFIWDIACHEMPKVQQASR

SEQ ID NO: 307116 - protein, 413 aa, unidentified
MDVIVERCAGLDVHKATVTACVRYPGLGRARAQALHTFGTTTPDLLALRDWLAAHRVTHVAMESTGVYWKPVYYTLEDGFPEVLLVNATHVAKVPGRKTDVADCVWIAQLLECGLLRGSFVPPPVIRELRDLTRYRKTLIQDRTREVNRLHKVLEDAGLKLASVATDVLGASGRAMLTALVEGTTDPGVLADLARGRLRAKLPALRQALTGRFRDHHAFLLTQLLAHLAYLDEALATLSQEIEGHLAPFAEAAARLQSMPGVKARTLEAIIAEIGVDMRRFPTAGHLASWAGLCPGNNETGGKRRRGRVRKGNRWLKAALVEASLAAIRTKGSYFGAVYRRICRHAGHNVAIVAVAHAILEIAWHLLAQGTTYRELGADYLHRRNTEQTARRHVRFLETLGYRVTLEPVPAAA

SEQ ID NO: 307117 - protein, 427 aa, unidentified
MAYRIAGVDVHKKRLAVVVSDVEVEGEYEFERRKVGTSPDQLRALAVWLAEREVEEVVMESTAQYWRPVWEALERHWQPLQQQRAAAAPTSGRLHLAQAQSNRGARGRKKDFPDAERLVKRLVAQELTLSFVPDVEQRLWRTVMRRKSQVTRNRVRLQNRLESLLEEAHIKLSSFVSDLLGPSALRMLQALAEGETDPQALAALGSCRLHATPEQLCDALGACTALHPVYRRLIKLTLEELRVIDEHLAQLDHEMAQLLSAHQPAVQRLAAVPGLGVDSAQQIIAEVGPTAATFPSPKHLASWVGTCPGEEESDEVNYSHRSPNGNRQMRRVLNQAANAAVKTKGSIFELVYRRLVPRLGHAQAIGAIAHRLCRLIWRILHQGLTYEERGPAVTLLRAQRRTAKMIRDLRRLGYRVERSPAPSGSPA

SEQ ID NO: 307118 - protein, 337 aa, unidentified
MKFINIRELSTGTSLIPPESMSAPKPSPWSSAVRVPREFKNTPQGHTALSNVLRKTRVTRVCLEATGSYHLDLAVALDDAGLEVMVINPKAAKEFAGAMQTRSKTDAVDATLLAEFAQRMPFKPWERPDDLALGIRACARRIAALNKQRTQTKNQLHAAQQTALTPDFLLANLRHNIEYLDAQIEHLRQRVLDLIAADAHLQQSFDLLTSIAAASAIQLLGELLVLPPDMKAKQWVALAGLDPQVHDSGSSVHKKPRLSKAGNRYLRIALYMPALSAASHNPHVRGYYRHLIADRGLKKIQAVCAVMRKLLMAIHAMLKTRSTFDSRRFYSLTETPA

SEQ ID NO: 307119 - protein, 514 aa, unidentified
MSEGTAVPPFSRLSPRLLRKHSAWHIRHIPLTQNFHPQPLAPARKADWVHAHCARFRSPYAAQDKPFASGFTNPDPNGGDIMLKINYMSTLFVGIDVSSKTNAVYAMDFEENKYISSSFGNNQPGADKLVNMIAECMQKHKNLDTLLIVLESTSVYSVHISNFLSASEVLMPYRPYVFCVNPKATSNYRKSYIGMEKTDPTDAYLIADFGRVGRTKKLEPWRGGQFIALKRLTRHRMHLSECITREKTYMVSNLYLKFSELQLLEGDDRPFGSLYGATSSAVLTEFLSPQEIIDMPEEDLLAFLAEKSRNRISDISKTSELLRKAARDSYRLDKCMYEPLNISLASSFNCIHAYQKEIRLIEQAIEKCINGMNPNALIILRSIPGIGPVWASGILSEIGDITAFHSSDALAKYAGLYWPKGDSGNFTSEDNSMSKAGNPYLRYYLGEAANSVRKHIPEYADFYARKYAEVTKHQHKRALALTSRKFVRLVFGLLVKNQLYTGEKLDTEYNTESN

SEQ ID NO: 307120 - protein, 350 aa, unidentified
MIIGVDYHPSFQQIAFLIEETGELEERRLNHSEGEAEKFYRDLQQRGICVRVGMEATGYARWFERLLAELGFELWIGDPAEIKAKRVRKPKTDREDARLLLKLLLEDRFPKIWVPSPENRDLRQLLWHRHRLVQMRTRIMNQLQALGMNENKCGKGKLWSAAGRAALEQLPLAFWASRRRQELLELLDRMNPAIEELTAAVEKEAGKRPEALRLMTHPGVGALTALAYVLIIGTPERFAGGKQISNYMGLIPSEDSSGGRQRLGHITKQGNSLLRFLLVEAAQAAARCNPDWRRRYRHLAMRRRKNIAKVAMGRRLGVRLYWMWRNSSEYSPSFEFSSHAGKLETGNGRQ

SEQ ID NO: 307121 - protein, 450 aa, unidentified
MANGSCVSRGDRNRNARLARLRALVPVSNAIVGIDLADKKQMVVVTDHDSKVLARKTFRCRAWDLGIALDWAADRARGTGWAGVRVACEPTGHRWRVLGQLAAERSMPFVCVQPMLSSWARRSEDLTFDKTDEKDAVLIARLTTQLRCYAPEPVDETWGRLRHLGARRDQLLTSLVSQVQQIRALLECVWPAALDTAQQPFRSQTWTAAMRIVCDRDGGDLTRTRRLGLTRFEQAVRHEILKRGGQKPCGRIARKLFTALADPAGVLAHRRGALERVHLLLADWAEDQRRLADTETRMLTVLDELHLTELVTSIDGVSPVGAAAVLAETGDPRRFTTARALVKHAGLAPREKLSGTYVGRTKLTGQGRPGLRLAAWRVVWAVLHTNTVYAARYRHLTSRENNKLTPTQAQTVIAAAVLRQLHAVIVTGRAWDPAIARHGTQPQHEAPIAA

SEQ ID NO: 307122 - protein, 345 aa, unidentified
MSKLSSELSGVTRVGLDLAKHVFQVHAVDAAGVAIDKRQVRRAKLLDYFAALPPCTVGMEACSSAHHWARQIEAMGHETMLIPPIYVKPFVKRQKNDAADAAAICEAMGRPEMRCVPVRSVENQAAKMVHGVRETLSGQRTQLLNALRGHLAEIGVIAPQGHQHGRKLATLVEQAVPELPECVVAALLPLVERLRDIEAALDAIDRRIADDARANADARLLMTIPGVGPLKASAIVATLGDRGIHQFNGAKNFAAWLGLTPGQHGTGGKARLGRITKMGDRYLRKLFVVGAHTVLIHADKHDDRMRQWAKKLRSTKKIKLAAVALANKTARIAYAVLATQKPYAA

SEQ ID NO: 307123 - protein, 486 aa, unidentified
MKLRKDQPKQKNTARPVPGTESAGWHQMNRKQRREIARKIQAEDLSLAVVHPNAAGIDIGNESHYVAVPSDRDEQPVRRFGCTTAELKAMAAWLKQCGIRTLALQSTGVYWIAVYDILEAAGLEVYLVNARETKNLPGRKTDVQESQWLMKLHTYGLLRNSFRPLQEIRTMRTYWRQHQDLVRSGCRHIQRMQKALTQMNIQLANVLSDISGKSGQAIIHAILEGERDPYQLAALCNANVKASEEDIARSLEGNWQEDLLFLLQQEQEGYEFCRKQMAKCDAQLQQYLGQRKDRSAGAALPEEKRKKREHKNKKNHPQFDLREQLFRTTGTDLTQIDGIDVLTAMTVLSEAGWDMSKWPSEDHFVSWLRLSPDNRVSGDRVIGKGRLPTSNRLNAVLRMAASTLRRSDSYLGAQFRRLKRRLDAPVAIKAMAAKLARLIYRMLRFGMQFVDQGAEVYEAAHHQREIYHLKRKAASLGFQIIEATAS

SEQ ID NO: 307124 - protein, 355 aa, unidentified
MKNQAIHYVGLDVHQGTVVASVRNEQGTVVMSATVPTEASAILGIVRAWGPRVHVAFEEGTQAQWLHDLLQPHVERVIVCNVRGKSEVANKSDRIDSDDLSEKLRVGSLKAVYHGAPSVLTLKELMRNYNSLVEDSTRVMLRIKALFRARAIRTPGTSVYRAARRQEWLDQLTTSGARVRAASLLEQLDLLLKLRPKAKAAMIAEARKQPGWKSLRSIPFLGDIRTAQLLAIMATPHRFRTKRNLWPYAGLAVVTRSSADQEFVGGRLRRRAKASRTRGLNRNHNPMLKSILKGAATAAAAKAGPLQDIYEACLARGTKPEMALLTLTRKIASIALRLWKKGELWDPAKLTMQTT

SEQ ID NO: 307125 - protein, 418 aa, unidentified
MEVVNPRCCGLDVHKKTVVACVITPEKKAIRTFFTMTNDLLKLKDWLRECGVTNVAMESTGVLWKPIYNMLEDTLKVAVVNAHHIKAVPGRKTDVKDAEWIADLLRHGLVRASFVPDRAQRELRELVRYRRGLIQQRADVVNRIQKVLEGANIKLSSVATDIVGVSGRAMLEAMVKGVEDPQELMAMAKGRMRKKEADLREALQGLVGPHQRMLIDSQLRHLTFLDEEIERLDEEVAARMRPFEAEIKRLDDIKGMGRRAAEEILAEIGADMSRFPSAAHLASWAKLCPGNNESAGKRKSGSTGHGNPWLRSIMVQVSWAAAHSKGTYLSALYHRLAGRRGSKRAIIAVAHAILTIIYSMLRNHNLYQDLGVMYFDHLNRESVVHRSVRRLETLGYSVTLVVIPSPPPETLAEPVFSG

SEQ ID NO: 307126 - protein, 371 aa, unidentified
MKDELSVTYVGIDVSKDRLAVAVADGAPGGEVVSWGTFENAPASVHTLLRKLAKRAAPVAVCYEAGPTGYGLYRQVRAFGFECSVVAPSLIPMRAGERVKTDRLDALRLARLFRAGELTPIWVPDETHEAMRDLVRARESAAEDQRHKRQLVSAFLLRHGRVYHRTKPWTMRYFQWLQRQSFDHPAHQIALQEMLQAERNARERLGRLTAHIEALVPEWSLAPAVNALQAMHGVALISAVTFMAEIGDVRRFETPVKLMAYLGLVPSEYSTGKTTRRGGITRAGHARVRHKLIEGAWTYRYPARPGARKLYILREQSPDIQDIAWKAQSRLTARYRKLRRNGKKTTVITTAIAREMAAFMWDIARRTMPAH

SEQ ID NO: 307127 - protein, 391 aa, unidentified
MTRISAGVDVPKNRSTVCIMDQDGKVIMRPFLVWHSTEELDFLADTLKRLNGEVRVITESTSVYQYPIALQIKERGLFISIVNAYEMKQFANIDFRGGKTDKKDSRTIASYGISYWYKRVEWQIPKDTYFNLDLLNRTYMNAKKHRQIILQELQHYIDCAMPGMDKELHSLNLSTKKGFMLDFVEKFWHRDEIVNMTEAEFTEVFTAWAKKKGYRPVEGKAAKIYAIAKSCIPYYPANPTVKTILQCIVDKLSGVNRTLVTIVTQMIEEAKKLPEYQIVREMPGVGDPLAARFFGSAGDIRRFKNSKALVAYAGIDSPPDESGDFSSTHRHITKKGSKVFRDTGYEIMMALRAQKRTWEKVRKNPEVYDYMLRKEAEGKPPPKLNELARFN

SEQ ID NO: 307128 - protein, 340 aa, unidentified
MENFAGADLHKKVTQLGLLRRGKPPSQYRFPNDRHTVEKVLGKLPAGTKIAVEATSNWWWFVEKVRELGHEVYLSHPKQTKAIASARLKSDKVDALMLARLLKADLLPMVWIPGERERYVRELLSHRGRLVRSRTAVINEMHAVYAKRNMEVVGKAWLKVDPVPYRAKELSGYGPRIVEENVELLRFVNEQIRGLDKELRKIANEDAQAKRLMSIIGVGPVSAVAVSCWVGDINRFGNSKKLVSYFGIAPKVRQSADRERHGHISKEGSRMVRWLLIQAALSHTHKSRGPVRKHYLGVSSRQGKMIARVAATRKLIGVMYHMMKDEIDYEEFLRRGSSAQ

SEQ ID NO: 307129 - protein, 377 aa, unidentified
MKRIKFVGLDVHAETIAAAIAEQDGEVRSLGVIANREESIRKLVKKLGPVEQLRFCYEAGPTGYVVYWQLTAMGAKCEVVAPTLVPVKSGERVKTDRRDALKLARNYRAGELTPVWVPDAAHEALRDLVRAREAAKKDQLRAKHRLGKFLLRHGRRPPTGVKPWSLNYLSWVKHEVHFEQLAQEATLLDYLHEVEHAEARIARLDRAIEEAVKLTPAKMRAVIEALQALRGVAQVTAVTIVAELGEVSRFTRARQLMGYSGIVAREHSSGKSTRRGSITKTGNAHLRRVVVEAAWAYRHRPNVGETLRKRQEVVSEEVREIAWKAQHRLHMRYRKLTARGKNNGKVVTAIGRELLGFIWTIGVKAEAAQKESERRAA

SEQ ID NO: 307130 - protein, 370 aa, unidentified
MTFFIGVDLHKTQFTVHVRTEDKIETLDEIKQYPTTESGYELFLERLKTFKEIGANVKIGVESTGNTRFFKNQVEKVGAEVTVINTLKFKVINESTKKTDKHDASTISEFLSKDMLPESYLCGKETENIRRLLKSRERLVRSIVGQKNEVHALLVSLGISDELRSLQSKKGRQKVLDTLESNNDYVLEAQSVKLMIQIIDQMSESVKVIEKQLTEITKNDEMVNRLLTIRGCGKITAWTIRAYTEDITRFASAKKYAAFCGLVPWVQDSNETIHHGKITKRGPQELRTSFVQLVLGIRRCKDTSSWRMMQRYEYMKKNKGSGKSIIATARKMAEIVWAMLSDKQDFDSSKMMGKYKPMNLVDQALAVINQ

SEQ ID NO: 307131 - protein, 360 aa, unidentified
MTIAGEGTAHRIVGGVDTHKDLHVAAVVDEQDRVLATRCFATTRQGYRQMLAWMRSFGEVQRVGVESTGSSGAGLLRFLQQAGVEVLEVTTPDTHDRRRRGKTDDLDAQNAAHAALAGKRTVTPRSRDGMIESLRVLSACRKTAVAARRIALQMIQNTIVRAPDGLREALRRMTRMQLVRTLAAWRPDLTGYRDIEAAYRISLKSLARRYLELHDEIADLDAMIRAIVDELAPNLVARNSIGHAGAAQLLLTAGDNPERLKSEAGFAALCGVSPVPASSGKMIRHRLNRGGDRAANSALHIIAIGRLRTDAKTKAYVARRIAEGHSKLEAIRCLKRYIAREVFTLILQRQKEINRTRIAA

SEQ ID NO: 307132 - protein, 341 aa, unidentified
MVEVITIGLDLAKSVFQAHGADAAGEVVFRKKLRRDQVAPFFASQPRCLVAMEACASAHHWAREIGALGHETRLIAPAYVKPFVKRQKNDAADAEAICEAAQRPTMRFVQPKSAEAQGAAVVFRTRDLLVRQRTQLINALRGHLAEFGHIVRKGADHAPELAELVRDPETALPAEARSVLLITVEALEVLHAKIKVLDREIGARVKRSPLARRLMSVPGVGPILATAMVALAPDPSTFRRGRDFAAWVGLTPRQHSSGGKERLGRTTKMGERSLRRLLIQGASSEAAAAARRGARDPWLARMLARKPRMLVTVALANKTARIIWALMARGGSYKAPVAMAA

SEQ ID NO: 307133 - protein, 352 aa, unidentified
MKTLRKDVFSGEELFVGIDLHKRNWHVTIRSADVELFCSNIPGSWEALDKVLKRFKDCKIKVVYEAGYFGFWLYDKLIKYGHDCIVTPPSLIPQEYGNRVKTDRRDSRKLAHLLAKGMLKDVWVPTKEERFHRQVSRRRRQLIKDRIRTQGRIKSELQFYGIDIGETRGKWSKVYLENLHRIKFKNRWMQESFNRLLDLYDFLDKQVREQTILLKELSESDPYRKKVEILRSVPGIGTIVAMEILLELQDVSRFRRAEQLAAYVGLTPSQYSSADKVRMGRITGIGKNSVRTALVEASWKLITKDGAMREKYERIKARAGGKRAIVAIARTLLLRTRRMLLDDIPYAVGVIS

SEQ ID NO: 307134 - protein, 408 aa, unidentified
MQVYIGIDWSEEKHDIVFMNQAGADLASLCISHKLEGFAQFDATRRKLGLATQDCLVGVETAHSLLVDYLWSQNYQNLYVLPPNQVHDNQGRFRQSGAKDDPADARLIADILRTDRGRLHAWQPDSLLIRQMRAEVSWIMQLTSEITRLSNRLRAVLLRYYPAALEVFSAGLTTQIAPEFIRAYPNPQAAKALSWPEFQEFAKRHRYSNYQLLPKCFARLQADYPEPNPETVLIFQEQAVQLAGLLLENTRTRLRNMSRLKELFEQHPKHKVFASLPGAGDWIGPALLAKFGDNLQRFPHPSVAQALAGTCPVTKRSGKHKSVQFRYACDKEWRHICQEWALALVHRTQSPIAVAYYQQIRPHCHSDEHAYRCVAHRWLAVAWKLWQSDQTYDETYHFQQKALRSKPR

SEQ ID NO: 307135 - protein, 421 aa, unidentified
MKPQAPEAFAAFLGLDWADAKHDVCLQAAGSERREFLVLEHSPEAIDAWVQTLRTRFHGQPVAVCLELNKGPIVSALRQYDFLVLFPVNPFTLAKYREAFTPSRAKDDPTDAELQVELLLKHRDKLTPLSPQSPTMRALAQLVEHRRRLVGDKVRCTNRLTSALKNYFPHVLQWFQEKDTTIFCDFLSRWPTLKAAQLARRATLESFFRAHHVRSADIIQTRIEAIKSAVALTTDAGVIIPNTLMVQALVAQLRVTLQAIADFDNAIAQRAQAHPDFPLFDALPGAGAVFAPRLLVAFGEQRERFTSAEDLQKYAGIAPVTERSGKKSWVHWRLQCPKFLRQTFVEWAAESTRHSFWAQVYYQQQRDNGKAHQAAVRALAFKWLRILYRCWQDRTPYNESVYLNALHRRGSSLMQNLAKES

SEQ ID NO: 307136 - protein, 411 aa, unidentified
MLFVGDDWAKDHHDVELVDDNGRRLARARLPEGMDGVSRLHALIAEHAPPEWADLDPDEVAARVRVGIETDRGPWVQALVAAGYQVYPINPMSVARYRERHSTSGAKSDAGDAHVLAEIVRLDHTHHRPIAGDSPQAEAMKLVARTHQTLVWDRSRQLLRLRSTLREFFPAALRAFDDLTAPDALHLLGAAPDPDRAARLSHTEIIAGLNLAHRRSAAAKATHIQDLLRADRLGQPAPVQAAYAAIVTTQVRLITALNIEIEHLGQVVADHFGRHRDADRYLSQPGLGVVLGARLLGEFGDDLHRYTDAKARKNYAGTSPITRASGTRRVVLARYARNRRLADAVHQWAFCSMRGSPGARGYYQTLRARGIGHQAALRQLGNRLVGILHGCLKTNTTYDEATAWPHPQPVS

SEQ ID NO: 307137 - protein, 343 aa, unidentified
MTVYVGMDVHRKRSQVAVVDDAGVQQRNRNLANDPAKLVPVLGGLPPGTPVAFEAAYGWGWLVDLLEELELEPHLVHPSRCKAIASARLKNDKVDAATLAQLLRADLLPEAWIAPQATRDLRALLRHRASLVRRSTACKNRIHAVLADRGIPDHFSLWAGPGRAWLADLELPATPRGIIEDCCGLLDALATPIGRLEREIATLAKPDPRVQALMALPGVGKLTAMTLVAEIGDITRFPTARKLCAWAGLTPQVRNSDRKVRHGHITKQGSPWVRRILQEAAQTAKRHPMFASAYTQLARRRGKQIATVAIARRLLARSFHILSQLEAASAPEKAGTGRARVSA

SEQ ID NO: 307138 - protein, 310 aa, unidentified
MEHSTVVGIDVSKDRLDVHVLPSEEAWAVSRDADGLAELCRRLAGLKGVVALEATGGYENIVAATLSSAGLPLVVVNPAQVRAFAKALGQRAKTDPIDARVIARFAEATKPLVRPLPDQATRMLSDLLARRRQIVEMMASESQRLRRTDMPRVRKSIERILAALKQELGDVDHDIDDTVRGSPLWREKEDLLASVPGIGRIIARTMVADLPELGRLGRKQIGALAGLAPFVRQSGRWKGQSRIGGGRPTVRTVLFLGAQVAKRHNPVLRAFYERLIATGKSKMAATIAVAHKLLLILNAILRDKKPWQTA

SEQ ID NO: 307139 - protein, 349 aa, unidentified
MKLYSAIDLHATNNYLAIIDGDRNRLLKKKLANDPQLILSVLMPFQADIAGIVVESTYNWYWLVDTLMEEGYQVHLANPSAIQKYSGLKHADDQHDAFWLAELLMLGILPQGYIYPKQERPIRDLLRKRSHLVKLRTSLVLSLQNIITRNCGVKVNANNIKALTQNRVYPHLLGNDDLSLAGMVSKESIDFLTRQITKIESFIENKFKLEQDYQNLLTIPGVGKILALTIVLETGAISRFSKVGNYVSYCRKVASRWTSNEKLKGKGNTKNGNKYLAWAFSEAAEYARRYHHTSRNFYNRKRNKTNVMVAHNALAHKLARAAYYIIRDNLAFEETKLYRQKDLAGTVNH

SEQ ID NO: 307140 - protein, 397 aa, unidentified
MAKVRRKNGIGKDREFKVVNVNAAGIDISPKELQVCVPNDRDERCNRTFGVYTKDLDDISLWLRQCGIETVAMESTGVYWLPLFRVLVRDGFDVILVNPKEAKNYAGKKIDEADAHWLMLLHTYGLLKACFQPDTITRQIRNLTRHRDNLIKSCSREVLHLQKEMEEMEQMNLKLDNVFSDILGKSGQAIIKAILDGERDPEKLASLADWRCKKSKEEIMASLRATWDDDHLFIMKQSDDLYHYYKDLVEETEGKIEELVNAYSAKVNKAGAKELCRSHKQAQQHTEVSFDVEQYAYHLWGVNVMNIPCMSKNSVLRLVAELGADFTQKFPDVKHFLSWANLVPDNKISGGQLLSSRVPKKKNPVGQVFRQCANSLWRSKEPLDDYFRHVKARSGHL

SEQ ID NO: 307141 - protein, 353 aa, unidentified
MKKIVKQVVGIDVAQKELVVCLGRMYSDLTFELYAHKTFGNTKNGFTALLLWIKKMIDAGIAVCYVMEATGVYHEPLAYYLAEQGCGLSIVLPNKISNYFRSLDVKTITDKTASQTIAQFGLERNLDKWKRPKEIYKKLRQFTRERDQIVQERTIVKNQLHAEQAEAQPNKKSITRIKQRIALLDKQEKEIQKELASLIKEDKEMHALVIILCSLPGIGLLTAAIVLAETNGFELIRNKRQLASYAGFDVKEKQSGTSVKAKPRISKRGNKYLRKAMHLPALTAIRHDERFKNIFIRLVSKHGIKMKAAVAVQRKLLEMIFTLATKKMKYDKNYPNTTDKVQTEDISKNKTAA

SEQ ID NO: 307142 - protein, 349 aa, unidentified
MSPDQGLPGKEPTMFIIGCDYHPRFQMIAVLEKATGEVKVLRLEHENGEAKKFYANLPKGVLVGIEATGCTAWFERMVSECGHELWVGDPAEIRARMVRKQKTDERDALHLLDLLLTNRFPRVWVPSPEERDARQLLQHRQKLVGMRTSVKNQLHGLAMGQGLCRKQKLFSESGRKQLEALELGAWASRRREELLTLLDDLNPKIAELDKAVEAEAARRPEVVRLRAQKGVGPVVGLAFVLTLGTVERFRRSRQVVSYLGLNPLENSSGGHQRFGHITKQGNTMMRWLLVEAGQTAARLDAELGRVYKRLKLRRGANVAKVAIARRLAVKMYWILRQVPDPAPAGSHVR

SEQ ID NO: 307143 - protein, 432 aa, unidentified
MTAAPYDLVIGLDRSDKKADLCLLDTRSGERRSVIIDTAPEALREWLGALRQQHPAARVGLCLEQPAVHLIAFLETYAWLTLHPINPITLQKYREAFVTSRAKNDTGDADYLADLLLTHQARLPVWAPPDSATRAVQQLVLHRRAVVEERTGLSNRLIALLKQYYPQALALCGEDLWRPLATAFLLKWPSLSAVQRAKPATLKQFYYLHGSRSLKLLEERLALVARAVPVTGERALIASFVLRVRLLCRQLQLVQQSVTEFDRQIAAAYAAHPDRAIFASLPGAGPVFQPRLLASLGSQRERFDSPASLQCYTGVAPVTKRSGGSCRIHRRYLCPKFQRQSFHEYAGESILWSRWAAAFYLQQRRKGCPHHTAVRALAFKWQRIIWRCWQDRTPYEETKYEAALRKSGSPIVALFDQVELGKSPWKNPAKKN

SEQ ID NO: 307144 - protein, 284 aa, unidentified
MGKSIRNFSTVTRVGLDLAKRVFQVHAVDAKGEIVVARKLTRSQLIPFFAALPRCVVAMEACSSAHHWGRALIELGHEVRLLPPAHVKPYVRRNKSDQVDAAAIYEAMSRPGQRFVPVRSINNQAELMRHRTRELLAGQRTAALNALRGHLAEIGLIAPQGAQHAYGLKRMAADGFNENGEIVVPDCVRGALRSLVSQIDALDEAIGAIDRELAASVKADETAKRLMTIPGVGPVTASAIVATIQDAGAFASGREFAAFLGLTPRQNSTGGKTRLGRITKMGDR

SEQ ID NO: 307145 - protein, 367 aa, unidentified
MEKVSTTTAKQSRNISRQTLTIGLDLGDRNSWYCVLDEVGQIQLEQRVRTTAKALREVFRAMPRSRIALEIGTHSPWISRLLSEVGHEVIVANARKVRLIGESRKKDDRLDAQTLARLARIDPELLYPVKHRSAQAQADLMMIRARAGLVRARTSLVNTARGLAKSYGERLRGCNVRNMDPEKAERLSPELQRALEPLLATIEELSERICEYDDRIEALAQASYPQVEQLKQIKGVGTLIALTFLLTLEDPHRFAKSRDVGGYLGLQPGRRKSGESEPQLHISKEGDPYLRTLLVQGAQHILGPFGIDCDLRRWGLKLAERGGRNAKKRAIVATARKLAVLLHHLWVSGEAYEPLHNCSRETAAAAA

SEQ ID NO: 307146 - protein, 424 aa, unidentified
MDQVLERPAALDVHKEQVTACVRTPGEGGRREQVVREFKATVRGLLGLRDWLAELGVTTVAMEATGVYWRPVWAVLEDEFELLLCNAAHVKNVPGRKTDVGDAVWLCQLLEFGLLRASFVPPKAVRELRELTRRRRTLVRERAQEANRLHKTLQDTGIKVDCVASDILGVSGRLMLDALIAGQRDPAVLADLAKGRLRVKIADLQEAMEGCRFSAQHALLIGGILRHIDFLDAEITALGDAIEAHMAADREREDSERPFELAVQVACSLDGIQARTAQMLIGEFGTDMSRFPTDAHFASWAAQCPGNHQSAGKRRSGRSRKGPKWLDGALHDAAMGAIRVKDGHFARKYRRIKARSGHKVAIGAVKHAIVIALYHMLKNGEMYRPPTPHPDAERKQRERTTKRLIAQLERLGHSVTLQEGAAAI

SEQ ID NO: 307147 - protein, 354 aa, unidentified
MKTYYVGMDVHRASIVIVVLNGAGKVVERITLQTSATAVRSYLQRLKGKVYVTFEEGTQAQWLYDLVRGLVTEVIVCDPRQNRLLAAGNKSDAVDAEKLAELLRNRSLKAVDHADHGMRALKELVRIYDSLVQDSTRVMLRLKALYRGRAIDCRGHDIYRQDRRPQWLKKLKERGAKQRAEFLYRELAALKPLRHEAKLLMVREARKQAAYPWLLSVPRLGAVSVAQLLAVVGTPHRFRTKRQFWTYVGLAVVTRSTADQEVVNGVLRRSRRPVATRGLNRNHNHLLKRVFKMAATSACHSEPFKAGYEARRQQGMDPALARLTIARQIAAITLSLWKRGEKFKVERIKKQPAA

SEQ ID NO: 307148 - protein, 374 aa, unidentified
MNFIGIDLHTNRFTCCYRDEQSSVENPAKGRDMKTFDLNTEGLAAFFQTLTSDTYVLVEATITTFSFVRLFKDRVKEVFIANTYELKQISLARCNTDKIDADKLSRIVKAQILSGELLISPVVVPPEEIQDLRSLFTTYRLYKKQSTQLKNRIHSLLKERLHGFTQEEIFSRKGREHIRTISPGTAMHFQVNQLLDRLERDEADVEELEKQVLVQAEPYMAQIEILTSMKGISVFIAIAIIADIIEVSRFRNSKAFTSYLRSAPKVSNSNTSTSIRGTNKKGRKLSATLLTQSLNHVLSSSLKLQRWYNNLCEYKKAGLVRTGLRRRVLAEIFQMLKKGEYHYGRNARNHEAKMAYYRHFLEKQKKGKIIKKTA

SEQ ID NO: 307149 - protein, 448 aa, unidentified
MIRTGSDADRKIGPAARSFAADAHDCIMVRTSTNLPNTDPMQVRETNAGKAGSPPLNRGSDQMHHVTNIPSPEQTGTGADYAILFVSLELSRSTWVATSLAPASKKMSKHTLIGGNGRDLLDLLARLKTRAEQRIAAPVKVVTIHEIGLDGFWVHRLLDANGIESHVVDPASIAVPRRHRRAKTDTIDGETLLRTLMAWQRGEPRVCAMTVPPTPSEEDHRRVSREREALLRERIRHTNRVRGLLFGQGITNYNPLHKNRRERLKKLQTGDGRPLPARLKAEILREIDRLELVLRQISEVEAERDEMLRSAEASSPAALLMRIKGIGTEFATVLYLEGLFRHFENRRQLAAYAGLAPSPWKSGSIDHEQGISKAGNPRLRTTMIELAWMWVRYQPDSALSRWFRDRVGSERGRTRRISIVALARKLLIALSRYVTHGEIPAGAVMKAV

SEQ ID NO: 307150 - protein, 338 aa, unidentified
MNKITTVGLDLAKHVFHVVGLDRHEKEVTKKMLRRAQVLEYFAKLPPCLIGMEACAGAHDWARRLKGLGHEVRLISPRFVKAYVRGNKNDYNDARAIAEAARRPGMRCVAVKTVEQQDRQALHRLRAARVAERTALCNQLRGLLAEYGVVAPKGVATLRRRLPELLEDAEAPLTPTFRQLLHRAYRQLRELDGHVEFYTGLIEQQARESEAQRRLQTVPGFGPIVASMFHAAVGDGTAYRRGRDVSAALGLVPRQHSSGGKEVLLGISKRGDPYLRSLLVHGARAVLRQAHRKDDRLSRWVVKLKAERGANKAAVALANKLARIGWAVLRQNTVYHPA

SEQ ID NO: 307151 - protein, 343 aa, unidentified
MDVSTIGLDIAKSVFQVHGIDAAGEVVIRRQVRRRQLLGFFEKLGPCLVGMEACATAHYWGREIAALGHEVRLMPAHYVKAYVKRGKNDAADAEAICEAVQRPTMRFVSLKSPEQQSLLMLHRTRELLVRQRTMLANALRAHMAEFGIVTRVGLPQIKELLAVIADEDDHRLPRDARACLQSLGRQFLSLHEEIGAADKRLHAWHRSSPVSQRLATIPGVGPVTASALAASIGDPSMFKSGREMAAWIGLVPRQNSTGGKQRLGKISKQGDQYLRWLLVAGAMTMIRHAKRRGAARQPWLDDLIARRPTKVAAVALANKMARMAWALLSQCGAYRQPVVTASL

SEQ ID NO: 307152 - protein, 319 aa, unidentified
MTTSSVVVGVDVAKDRLDVAMRPSGETWSEANDEAGITALVARLRPLGPALIVCEATGGFERAAIAALAAAGLPVVVANPRQVRDFARATGQLAKTDQLDAGILALFAERVRPTPRPLPDAAAQLLDAVLTRRRQLLEMLVAEKNRLGFAPKPLHRGIQAHVRWLERQLDDVTKELAGLIEASPVWRAKDDLLQSVPGVGPIVSSTLLGELPELGTLSHKQIAALVGVAPLARDSGTLRGKRLVWGGRASVRTALFMAALCGRRWNPALKRFYDRLKAAGKPTKVALIACARKLLTILNAMVRDNKRWAVPAPSVQYSC

SEQ ID NO: 307153 - protein, 341 aa, unidentified
MMIIGCDFHPRFQQIAFLDQDTGEHGERRLNHPGEAERFYRSLVGRQVRIGAEATGNFRWFRHLMEELGQEFLLGDATAIRAACPRQQKTDKRDARHILNLLVEDRFPVVWQPSAENDHVRQLLLHRCRLVRMRTRVKNQLDSIAKNEGLLSSRVWSPRRRSEIEALPLPGWYAHRRADLLGLLDELDARIRPLDEAVQEAAEDNQEARLLMTHPGVGPIVSLAYVLTIGDWRRFPRGKQVGSYLGLIPAEESSGSKRRLGQVSKQGNTLLRWLLVEAAVHAQRHDASWHRQYVRLSMTKHHGVAKVAIAHKLAVRLYWMLRSAQNYEQVMERGSHAGQSV

SEQ ID NO: 307154 - protein, 428 aa, unidentified
MKTTSNSQTSNDRAGRPGKSRKPVQRDAKEVMAELVARLNQKLEAEPGKARAAEGRQADACGPNRERLTVGVDLGDKRSNFCILGLDGDKLTEGELRTTQQDFAEFFQLLAPARVVMEVGTHSPWARDVVAQYGHEVLVANPRQMEGPKKRKRKNDRIDAHKLARVGRMDPQSLFPINHRSVEVRQDLVAVRARDAVVSVRRDLINTARGLVKSMGGRLPKCSSASFPHQAEEALPVAVRELLLPLVRLVETLNSCIQAYGEMVEKLGEKYPHTKLLRQVKGVGPVTALAYVLTLEDPQRFAQSRDVGAYLGLVPKQEDSGDSQPQLRITKMGDRMVRRLLVGSAHYILGPFGPDTDLRRYGLRLSERGGKNAKKRAVVAVARKLAVLLHRLWVTGDVYEPLHRALSEAARVEAAHRTASKSAEEKAA

SEQ ID NO: 307155 - protein, 342 aa, unidentified
MHFEYFIGVDIASDTFVATTLEKSLKPLLVAKEFSNDPDGFDAFVTWLTAAKVDKRTAVICMEATGVYAEALCYCLHAQDWWVAVHPPLEVKRAFAPVGHKTDSVDSRQIAEYAVRFTDKLRRWQPRKALLEQIRTLLNTREQFVRQKTMHKNTLHALKRKPVRTPLAEKLLLESIAHFTKNIKTIESEIKDSIKKDDNLYEQFLLLLTIPGVGLLLASHVLVLMASLHSMHNPKAVSAWLGISPYEKRSGTSVFGKAHSRGYGPTTMRKLLHLAARSVRTHNPVFQKYFERKVAEGKSKKLVLNNISNKLVKIICAVLRENKPYIPNYQSINPAVLSLTKS

SEQ ID NO: 307156 - protein, 319 aa, unidentified
MQRIIIGVDVSQDFLDAHVRPTSMRKRFANTEAGIAELVAWARPLAAERILFESTGPYQMAAVGALLAEGLPAVVVNARQVRDFAKAMNYLAKTDKIDAGVIAHFGEVATTKVRPLESEEIRTLRDLYDRRGQLVHILAMEKNQRHSATVARASAKVLQSIDKHIAYLQKQIHDLEKRMDQLIENSAAFQARNDILQTITGIGPQVSRTLLIHLPELGQYSRQKITALVGLAPFNDDSGDHVGQRHIRGGRPKVRIGMYQAAIAAIRHCPHIKAFYAALKARGKASRVAIIAIARKLLVLANAMIRDMTPYKEPANSVC

SEQ ID NO: 307157 - protein, 520 aa, unidentified
MATLGSRSRPRRRRIPTSVGKPRGVLHPRVQQVGPDHFGIVCFDCAKVRSKFLLADFYGRLLLPPTLVAHTRPALDAAVAQIRQAFAQHQLQDGLIAIERTGRYHRLVQRTFAAAGFETRILHPFVTKQYRQPVDPGNKTDDADLAAIHRATVTGCALLEATRDEAWTTLQLVIRHRRDLVEKGVALNCQIRDHLEAAVPGYAACFDKLWESRVPWHLLRHYPSAAQLRTAGLTALCHSLRQAEIRFQQRTVTAVLAWAEQAAPGDVAASQHVRFALELYADRQHKTQEIQALEREIANRLAQTPYVLLLSFPGINVVSAADFAGEMGPIEHYANAKSITGRAGIRPSRYQSGNVDHSDGPLVRRCNRALRAAILRVADNLIHCNHHFQVLATGWARQGKDPRDIHIRVGLRFSRIAFQMVAGRQVFRHPGIHGRSYILDKLNAFHREHDTPMPETLRDLQAAIAQLPIREYAAEARPLQEEMQRIREGRRRGPQLLGDILPIVFARLGVGVVQSPESGE

SEQ ID NO: 307158 - protein, 349 aa, unidentified
MQPPGLAFASMSQNNLIIYAGLDVAKESLAVDFQGRSYTFANDAKGHARLVRILSAAQNVQVIMEATGGYEQPVVRALHAAGIALSVLEPSRVRAFARAKGLRAKTDPIDAAVLRAFGEALAPRLTTAPSAEQQQVGELVMRRRQLTESATCESNRAAHYTDPMARRQAAALMRLLRLQIAQCEKAIATLIANDPIMAPRAARLQEVPGVGAITAATLIAEMPELGSLRDEGVAALAGVAPYNRDSGPFAGSRRIGGGRASVRCALYMAVLSASRHDPILKTFHQRLIANGKKPLVALTAVMRKLVVLLNRMLKNPTLKLQHTRPTGSSTIVPPKRRGLGLAKPQLSQN

SEQ ID NO: 307159 - protein, 374 aa, unidentified
MEHNLSGFSYLMGRVQFYMDRDGFGDVVFGPEPSSVYHKPLAEFLIEQGYLVVYVTNEAIKKNRSLLDGRWDKNDTKDSANVADLVCQGKCQYYDLPDIKLRDLRNLLLFRKRLRKQLHSSKMRIRNNLVAQYFPEFDKLWKTCEAENLAIVRWCLAPAKIAAMKFEDFCCLVTTRSLGDRQQQRLFKIWDTACFSIGCFAGSALELEAKVLVDTVKLIKTQIAQVDEAIEAICLSFEEYQYLLSIPGSGPYVSAVVLAAIGNAYRFENASQILRLAGFDLNAKRSGKKSATAVPVISKKGKADLRYAVYQAALIASSLTTHIAHYYHRLLEGRQREKGIRTKMRVKLAAKLLVIVLDTDEKKEAFNPDYIISL

SEQ ID NO: 307160 - protein, 345 aa, unidentified
MKLTVIGMDIAKHVFQLHAVNANTGEIERIKLKRSQVTDFLAQRERSLIAIEACGSAHRWARELQKLGHEVKLISVRSVRPFVLRNKTDAADARAIWTAVQQPEARFVAIKSEQQQTILALHRIRAQLMKFRIMQTNALRGLLYEFGEVLPEGSREFAEKISGALAKIANRLPAILIDSLREQWARVQATDKEIAVLERRLKVALCDNQECQKIAEIPGVGLLTATAAVAAIGDAKTFRSGREFAAWLGLVPKQTGTGGHVRQLGISKRGDTYLRTLLIHGARSGDHQRRMNRLARRIASATSFQCSGGCRSQQTRPDHLGGASKGYEIHGTRHGCIARCVARLN

SEQ ID NO: 307161 - protein, 355 aa, unidentified
MDNKKYIGMDVHQATISVAVRDSAGKLVMESILETKASTILDFIRGLGGNLSVTFEEGTSAAWLYDLLKPHVAHLIVCDPRKNALLKVGNKNDRIDPRKLTDLLRAGLLSPVYHGESGVRTLQELARTYLTVTKDVTRVMNRLKGVYRSWAIPCAGQTVYAPRHRSAWLEKLVQPGVRRRAEQLYQQLDKLVEIRREARQELLRESRKHPAREFLSQIPRLGPIRVALLIALLQTPHRFRTKRQLWAYCGLALQTRSSGEYRYSGGQLQHSKRPPAIRGLNVNHNHDLKSLFKSTATQASGANDPWGDFYENLLARGMKPAMARLTLARKMAAIVLRIWKKGEHFNPEPLKRKSA

SEQ ID NO: 307162 - protein, 404 aa, unidentified
MKGPIVSIDVSKGKSDYQAFKDLNVKYTGSRSIKHNKEGFDEIVNLVREMEKKLETEVCVVYEATGVYHRVLKKVLEDNNIKQFIINPLLSAKTRKNDSLRSPKTDKLDPKSIAKTYYSHSLHNSHKQETIYHELRELSRYYEDILVHIRKDKVAFRAQLDIVFPGYDTLYDDLYGPVALAIIEKYPHPEILQKKKINTVSKVIQNKTCHRQAVSDTMADKAIEYSKTIYSGCDKDDIEVLILQRFIKKLNEDMAEAERTIGEMIKLAQELPDFNIIKSIPGIGDNLAARIIAELGDMTRFKKKNELVAFAGLDPRISENGQNDGDHMHITKKGNKRLRCLLYLAVTCSIRLKRDDNSIKDFYIKKKQQSNPMCSKAAKTACASKLVRIIYSMCKTGELYQYNK

SEQ ID NO: 307163 - protein, 417 aa, unidentified
MDSHSKKVKHINKKTLMVTLDIGKAVHYGYLRSPSGEEVKPFPFDNRREGFNELWDRVWQFKQAQGLEDVVIGFESTGPYAEPLFHFLRKKPVHLVQVNPLHSKRLKELTGNSPCKTDKKDPRVIADIMSLGHALTLVVPEGAAAQLRRLTQARERAMKRRTALLNQIQHLVFVVFPELLDVFKRAHSKSVLYLLQHHPTPQDIVDLGCESLTVLLRRVSRGKVTAERARQLFEAARESVGITEGRESILVEVKHLLTAIAQEDELIDDLKQQLHYYVQQIPYRQSMLSIKGLGTITVAGLIGEAGDFDAFATVDEVTKLAGLDLYEVSSGKHRGRHHISKRGRALMRKLLYFAALTMVRKQGIMHEDYHQMLGRGMPKVKALVAISRKLLRLICALVRNRTVYIAQYHQRSLGIAA

SEQ ID NO: 307164 - protein, 328 aa, unidentified
MDVSKQSVDVCVLLGDDILLEKQISNTISEIESFLQSFLKKNAYSTSDVLVCAEYTGKYTYPLCLSCQRVGVDLWLENPYAIKHSCGLERGKSDRQDARKIAPYARRYEDKVRLFVLPEKAISSLRELVSEQELYIVDKKKYQGQLTDEQDFMNPQDYRQKSARLKILLKGLTAAIKEIEKKIQKIIEGDETLSHQFKLLCSIDGVGERTAVKVIVETNAFRDFTDARKFCCHAGLAPFSYTSGSSIRSRNRVSHRADKSIKALLHMGALTAATRMEGELHEYYLKKVSEGKNKMSVLNAVRAKLVHRMFAVIRNNKFYEKEYRNTLA

SEQ ID NO: 307165 - protein, 330 aa, unidentified
MENIALIGIDLGKNSFHIHCQDRRGKAVYRKKFTRPKLIEFLATCPATTIAMEACGGSHFMARKLEELGHSPKLISPQFVRPFVKSNKNDFVDAEAICEAASRPSMRFVQPRTESQQAMRALHRVRESLVQDKVKTTNQMHAFLLEFGISVPRGAAVISRLSTLLEDNSLPLYLSQLLLKLQQHYHYLVEQIKDLESQLDEDEVGQRLLSIPCVGTLTASTISTEIGDGKQYASSRDFAAATGLVPRQYSTGGRTTLLGISKRGNKKIRTLLVQCARVFIQKLEHQSGKLADWVRDLLCRKSNFVVTCALANKLARIAWALTARQQTYVA

SEQ ID NO: 307166 - protein, 349 aa, unidentified
MEEYVGLDVSKEETSFCAMDGAGKILAQGKVASDPESLFEALKEHTLCPARIVLETGTLSGWLARELRKLGLPADVIDARQAHAVMKLQHNKTDANDAVLLAGIARAGFCRPVSVASEAAQKLRILIKARKHLVSQRVATQNAIRGFLGSLGIRFPKGSGKLAARVTAALEDRPDLEPMIAPLLLSAEALAVQIAALDREVGARAKAMAACRLLMTVPGVGPVTALAYAATIGDAGRFAKSRDVGAYVGLTSRRNQSGEMDYSGRISKFGDSLLRSQLYEAANSLLTTVRKAHPLKDWARRIKKRTSHKKACVALARKLAVIMHRMLVSGEAFRWPEKEVAKKATATAS

SEQ ID NO: 307167 - protein, 407 aa, unidentified
MVQSMSLVGLDVHASQTHAAVLDTATGELRGVRLRMPPTAVAEFLATLPGPVRAVYEAGPTGFGLARAAIDRGVDVRVVAAGRVPRASGDRVKTDRRDAERLARLLAAGELRFAFVPTIADERFRDLIRAIEDCRGDLMRSRHRLSKFLLRRDVRWIGPGSAWTTRHMNWLRARRFDDVCSQATFVDYLAAVELLVGRRAALIAALEQAIPDSSHAATIARLRCFRGIDTLSAAGLCAEIGDWTRFRPKQLSGFLGIVPSEHTSADKRRQGSITKAGPVHADCSSRPPTTTVTTPRSVTRSADDSTAKTPGSSRSPGAPNAACTSAGRSSPASAASPPASSRSPAPASSPPSAGRPPPSAEPIPRQPPREPVLPGRAREHRASRSSRRAVREPAMGNHRPFGGGARL

SEQ ID NO: 307168 - protein, 344 aa, unidentified
MNSTTIAIDVAKSVFEVAISEQPGQVRDRQRLSRERFRRFLAERPAATVLMEACGSAHHWARHAQAHGHRAVLVPPHVVRPYVLRNKTDRTDAKGLLEAFRNEDVHPVPVKSETQQALAALHRLRSTWLATRTARINTVRGVLREFGLIIPTGAHHVVPQARTLLEEADSGVPGLLRPALAVALEEIREIEARIRAVEQQLEAAAAQTLSVGQLRTIPGIGLLTATALVAAVGDVQRFPSGRHFASYLGLTPREDSTGPRRRLGAISKRGDTYLRMLLIHGARSVLCHAKTTTAPPPDRLRAWALQVERLRGHNKAAVALANKLARIVWAVWRHGTDYMGTPAL

SEQ ID NO: 307169 - protein, 370 aa, unidentified
MDQAHGVAGIDPHKSTATVAVVDNCGGRRGCRSFAIDEAGIEELLTFLIDSELVLDRIGIEGSAFLGRPLVLALAAAGYDTREVQANRTAERRGRRRRAKTDSEDAEAIARETLAHPDLPPAGKRRTPNTGWEALAAIRNWRESLVLQRVRLLTEAEAVLVVLPVTVRAALPSTSRVLPQLKALSNGSVDLDGLSLADQIKLDRLAASLTDIAALTARIKELDKKIPALLERLGCTLTAIHGIGVVSAMDLLTEIGDPCRFTSEGQFARWCGAAPIALSSGEGDGPARRHRLDLGGNRAVNSILHTMHVTQVRCHPPAKAYMARQAERHKPKRAARRSHKRHLANVIIRHMWKDASRLPSAADASVQAAA

SEQ ID NO: 307170 - protein, 351 aa, unidentified
MMIIGVDYHPSFQQIAFLIEETGEYDEQRLNHEGGEAERFYRDLKRKGIRVRVGMEATGYSRWFERLLAELDFELWIGDPAEIAAKRVKKRKTDREDARLLLRLMREDRFPRIWVPSPENRDLRQLLWHRHRLVQMRTRIMNQLQALAMNEGKRWKSKLFSQKGRAEFEKLALGPWASRRRSELLELFDRVDPSVEELTTAVQQEVHKRPEALRLMTHPGVGPITALAYVLIIGTPERFTRGKQIGTYVGMIPIEESSGGKQRLGHISKQGSSLLRYLLVEAAQAAARYNPHWRRRYIRLAIRRHRSIAKVAMGRRMAIRLYWMWRNGCDYSPSFEFGSYAGQLEKRHGGK

SEQ ID NO: 307171 - protein, 385 aa, unidentified
MTQMTQMTLQANNTASAPVLYMALELSKSKWKTGFEYGRKRRTVNVPGGDVERLREAIAEAKKKFKLPAEVVIQSCYEAGRDGFWLHRLLEGWGISNLVVDPASIEVSRRSRRTKTDRVDLEMLLSKLRQHYSGERVWKVVRVPTPQAEGGRHLHREAERLKKERSAQVNRLKGLLFGQGIRLERLNLKEWPAQVAGFRTFDGHALAEDLQGELTRAGERLELIENQLKQLETEQDRRVREAGESGGPLAMVRQLRMLKGIGRVAAWVFVMEFFGWREFRNAKQVGALAGLTGTPYASGETNREQGISKAGNRRVRSLAVEIAWLWLRYQPDSALSRWFAERFGGTGKRHRRVGIVALARKLLVALWRYLETGVLPEGATLKTAL

SEQ ID NO: 307172 - protein, 400 aa, unidentified
MDERKGFRWFLGIDISKETFDACCISGQGEKQFSISTSMDRKGFEELIKQIASLSVPQESVLIGMESTACYHVNLYSFLISLGYTVIVINPLLISNFVKLQLRKTKTDKKDASVIAQFLLLNRDSLGRTVGSSDFTDIRDLSRQRESLVDQMTSNKIEIKRLLTMTFPELEHIACIFTKSMLRLLCQYPSAASIRQAKRSKIARILIPGSYGKQTDASVERIVKVAETSIGTASPAKEVILKQKVSLLMQLEQHLQELTDILTEQCKGKMRRDMDILTSMRGIGKKTAMNFLIEVGRDVKEFESHKKVIAMAGLDPALYQSGKIDRKGKITKRGNRHLRRVIWVMTTKVIQFNARFKQYYLKRIQDGLPYKMAVLATAHKLIRIMFAMLTNETQFNESMN

SEQ ID NO: 307173 - protein, 338 aa, unidentified
MKLYGAIDLHSTNNVMVVINEHDQVVYQKRLPNDLSLIAQQLSSYRRSLEGIVVESTYNWYWLVDGLMEKGYRLHLANTAAIQQYNGLKYTDDHSDARWLAHLLRLGVLPEGYIYPKQERAVRDLLRKRGQLVHQRTANLLSIQSLISRTTGNSISAQYIKALNIERVDGVLPNSDLVLALKANLAVMNSADGQIEILEKAVQDRVKLRPQFRFLKTVPGIGPILALTIMLETGQIERFASVGNYASYCRCVGSKKISNGKRKGSGNTKNGNKYLAWAFVEAANFAIRFNSKIKGFYQKKKSKRNAIVAIKAVAHKLCRACYYIIKDQVAFDLTKAFA

SEQ ID NO: 307174 - protein, 353 aa, unidentified
MKEESVSGYFSNKDLYIGLDVHKKRWVVSIRTYDLELKTFSMDASAIELERFLVSNYEDALLHIVYECCFSGFWIYDYFHNKGYDIIVTPTNRILRDGGFVKTDKIDARKLAFQHSRDLLKAVIVPSIQIREYRSLFRFYDKQKEREGIILRQIRCILEQKNHPLKWERWNKIFLKKLKEVKFQERIFNMKFQSIIGEYEFLKEQINDSADFIKKIKEDKVLGERISRIEKISGIGVISATRFVVFLFDIKDRFISGEKLVHHLGLTPGEWSSGDEVRKGRTGLTGDKKLRSIIIQLAWIAVRKDGALLNKFERVFKSSGCKQKAIVAVARKLMVKVHAITVKEEDYVVNKAA

SEQ ID NO: 307175 - protein, 401 aa, unidentified
MTAVRSRAWIGVDIGKTHHWVCAVDETGKKLLSLKVLNDEAQIIEVITSITDLADGRVWAIDILGTPSALLVALLANAGEQVRYASGRVVAAMSTAYTGEGKTDAKDAYVIAETARIRTDLAVIDADTDLVRALDVLTGHRADLVADRVRMINRLRDLLTSVFPALEREFDFASCKGALVLLSGYATPESIRRMGEARLSRWLRQRRVRGYADVAARAVAAAQTQQTVLAGQDVAASIVAELAEAVLAQHARLKLLDQQIQDAFAQHPQAEVIESMPGFGPVLGASLLVAAGDLAAFPTAGHLAAAAGLVPVPNDSGRRTGNVHKPRRYSRPLRHALYLSAQTSMMRAGPNRDYYLKKRDQGRSHSQAVIALARRRIDVLWALLRDNRTWTTAPPTRAQAA

SEQ ID NO: 307176 - protein, 362 aa, unidentified
MGKTEKTRRLCVGVDLHKTQFTVSALTEDGEVVLQEEYRTTPDGYSEFIEEMHQYEEEDGCSIELAVETTGNARFFKNQMEKEFFDVTVVNTNKFKVITYSTKKTDANDALTLAMYLQKEMLPEAHLCSQTSEEIRRMLKTRRILVQSSVKIKNQIHGMLLGYGIETNAAQFQSKRKRQDLINDLADHDYSEFTASSLEVMLNILDGLEGQIKDVEAQIEKMVEDNEDVELLKTIPGVGKIGAATIASYTEDLERFDGNFKRFAAYIGIVPSVHNSNETVHLGHITKHGPQELRTAFVQVALGMIRLSSKTGDWRLMREYQRMKKEKGSGRAIIAMTRKVARIVFVMLEKREEFNPELMLSK

SEQ ID NO: 307177 - protein, 351 aa, unidentified
MKTEHTAGPKLFIGIDIHKRSWKIHCSTDISSGKTFSMNPDPAKLKSYVERHYNGYDVYTAYEAGCCGYYAHRSFEGYGWHSLVVNPADIHRKGKEKFTKTDRIDAQLIARELKDGRLQSIHVPHQEREQLRSLFRRRNDLVKNFRRIKSLIKGLLLNQGVTIPDEFDNSHWSHDFRNWLDEIEFAYSPARMTLDSHMRYFRFVDKDLRDVSSQLRRYCKVHYKKDYILLRSIPGIGGIVACGIISELGDLRRFNNLKQLAGYVGLAPGIYQSGNTIRNSGITRRAHRLIRSYFIEAAWQAIRTDPVMQDYYRKHLGKNVKTIIVKIARKLLSRTLAVIKTEIPYEIGIIS

SEQ ID NO: 307178 - protein, 416 aa, unidentified
MSRKFMRTNTCGKLSQLLNIFERWFSHMYSYFVGIDIAKNTHWASCLSSDGEIIFEPFSFSNDNSGFQKFISKLESLDKTKILIGLESTAHYGENIISYLFNLDFNIGLINPIQTANLRRSNIRKTKNDKVDTKIIIKALTLGNYSLITSRDINNLKLKGLCRSRRNLVTMRSKAKIQLVSYLDQIFPELAQFFKGNLNLNVSYQLLKEYSSPKQISSLHLTKLSNILHDNSHGRYNKQDAIRLRELAKNSVGIDNPSLSLQIKHAILQIELYNEQIAEVEALYKQILDEMNTPILSIPGMSYNQAAVIIGCIGDINRFEHSCQLLAYAGLDPSVIQSGNFQARSTRMSKRGSGMFRYSLVYSAHNVVKNNKTFRDYYELKRSQGKSHYCALGHVAHKLVRIIFKMLKDNITFNLD

SEQ ID NO: 307179 - protein, 325 aa, unidentified
MAKCITVCAGIDTGKRKLDVAIEGNGGQLQIENTADGHKVLWEWLQRHKVKRIGIEASGGYEQPVVAALRRKRFVVIVFQPAQVRAYAKFHLQRAKNDKIDAALIAACTAAVKKIYPAPDPRLSPFAEHLTMIDQIGEDITKLKNRIESCRNERIRAVWKEDIARLAKRGRTELKALVAAIRQYPDLAERLDLIHSVGGTGLVTAVGILVRMPEIGQLTREQAAALAGLAPYDDDSGDQVGARHIDGGRERLRRALYLAALPASFRWNPQLIALYQRLRAAGKEHKRALIACARKLLIFVNTVVARGTPWQGEPPAARIANPSAA

SEQ ID NO: 307180 - protein, 403 aa, unidentified
MNNVAGIDVSKGKSMVSVLRPFGEVVAKPFSIGHTGSELKELADYLKSLDGETRVVMEHTGRYYEPVARFLHDEGVFVSAVNPKLIKDYGNNTLRKVKTDKADSRKIARYGIDNWAELRQHTPMDTIRMQLKTLNRQQSLYTKTKTMMKNNLLALLDQTYPGVNALFDSPVREDGSQKWVDFATTFWHVDCVRNMSLTAFAERYRKWCKRHGYNFSQSKAVEVHAGAQDLIAMLPRDALTKTMVRQAIDALNAISASMERLKAEMQALAAQLPEYPVVMAMHGVGDSLGPQLMAELGDVTRFTHRNAITAFAGVDPGADQSGTHEAKSTRVSKSGAPELRRALFLVMDCLLKTQPQDDPVYRFMDKKRAEGKPYLVYMTAGANKFLRIYYGRVKEYLASLEGN

SEQ ID NO: 307181 - protein, 387 aa, unidentified
MPQPNDLSRSLVALDQDSTIIAVVEMSQSSWLVAGMLPGIERQPRKKLEPSAERLLGLLHRWRDEAVKAGRKITRIALAFEAGRDGFWLARWLRAHGVEAHVIHPSSVAVSREHRRAKTDRLDTELLKRGFLGWQRGERGHCTMARLPTIAEEDAKRPNRERECLVGERTRIVNRMKGTLARLGIRNFKPTLRKAVERLATLHTPEGSALPPNVSAELQRDMARLGFIVSQIKEIEEARQKRLEQEPETEPHAMVRLLARVVGIGIETADMLVHEVLLWPMRDRKAVARYAGLTGSPDESGAKRREQGLARAGNARVRRSMVQLAWRFLRFQKASALALWYRARTADSRVGTRKTMIVALARKLLIAPWRFVTTGETLEGVILRSAA

SEQ ID NO: 307182 - protein, 453 aa, unidentified
MAQRNRSIPLKPGKSRSALTITHPNAAGIDIGSASHFVAVPPDRDDEPVREFPSFTVDLHALADWFDACGVDTVAMESTGVYWIPLFELLESRGFTVLLVNARHVKNVSGRKSDVLDCQWLQQLLTYGLLSGAFRPTDAVCVLRSLWRQRGMLLRSQGRHVQHMQKALTQMNIQLTNVIADVVGETGQKILRAIVAGERDGHVLAKMKNTRIHASTDEIAKSLHGNWRAEHLFALKQALGMFDFIGTQLTECDREIEAQLQCLHVHDGEPAKGKKRGRARNAPKFDLRTQLFKMCGVDLTRIDGIDVTTALAVISETGTDMSRFPTVGHFASWLGLCPGTKITGGKVMSGKTKRVANRAAQALRLAAAALRSSKSALGAYFRRMCSRMDKPKAVTAAAHKLARLIYTMLTKGEEYTDQGQEYFEERYRERVMHHLAKRAEMMGMKLVPSEQPA

SEQ ID NO: 307183 - protein, 407 aa, unidentified
MGFYQTAGADVVVGADVGKGFHHLFALASSGEVLFDAPVANREPEIRSALERAARRGTTTVVSDQPGPLSALLFACARDMGMDTRFITPRAMHALLAASDPDRKDDAWDAQLIARGAIESPRLLKSPRRRHIGLAAELEMRRIDSLEKTALMNRLHDKTLSECPAFEAAVSDLGFDSDLAIFMLRRWGGPLGLRRCGRANLRRAVLATRGMGPAAAGKADAVYSAAASQRTVPEGAAENEAVVAQLASRLAECLGRLAEREAAIEGMLEREPAAAILMSMPGIGPITAATFLAEVGDASGFRSGDALAHYFGLSPKRAKSGSSLDAVSKSVSCNRRARSAMILAANAARMVAGTPSAAYYERRRRPDEFGRREGHYHALVALARKMVGVLWAMLRDGAMYERRMTAR

SEQ ID NO: 307184 - protein, 349 aa, unidentified
MGEVSTIGVDIAKSVFQIHGVDADGTVVIRKRVGRAKVVEFFADLPRCLVGMEACATAHQWARELKKFGHDTRLMPPTYVKAYVKRGKNDAADAAAICEAVTRPSMRFVPIKSVEQQSALMLHRTRDLLIRQRTQLINALRAHLAELGLVAAKGHEGLQQLVMAVTESGDERLPSNARFACQAIVAQLHAVQTQINGLDKRIIQAHRANADSKRLEAIPGFGVILSTAVVATMTDPKAFRTGREFAAWIGLVPRQNSTGGKERLGSISKQGDRYLRRLLVLGAISIVGTARTRPDKYPWVTELLGRRPAKVVAVALANKMARTAWAVLAKGETYRAPARSSSAAIVAAA

SEQ ID NO: 307185 - protein, 339 aa, unidentified
MYPFYLGIDLHLKRTYMVLMDAKGEIINKGRISNQEITKYLQEKVPKEAYAVLEATRNWPFMYDLLNEYVEKVDLVHAKGVRAIANAAVKTDQIDASTLAHLARMNYIPKAYAASKEMRDLRQLLRHREWMVNQRSKAKNRIHAVLAAYNLVSPVTDLFGVAGREYLHEMMNKELRPSARQVVEDHLAMIDHMTERIRSLEKSISLNEKQDHIVNILRSMPGVGRLIALTILAEVGDISRFHSPKALCSWAGLTPRVHNSDAVVQHGHITKEGSRYLRTAMVRAATVACRISPKWYRVHEHLALRCGRRAARVAVARRLLTVVYYMWKRDQPYQENYGQ

SEQ ID NO: 307186 - protein, 339 aa, unidentified
MSKQPSSAQTVSFCGIDVSAKTLAVAVQQQDRPLEQRQFANTAAGHKALIAWLGKREGTARVSLEATGMYSLDLALALDAAEGVELAVLNPKTANRFAQTLGRSKTDAADAAALAEYSQRMPFARWRRPGRGALELRAVSRHLATLTEERARLRNRLHAAESSAIAPRCVREDLRRSMAGLEKRILRLRKEAVALIAQDAEMRRKFQRLIGIAGIAETSAVQLLGELAALDPEMTARQWVAHSGLDPAHRISGSSVRAPSKISRHGNSQLRRALFMPALVGARFDPHMKAFYTLLQQRQKSKMQALTAVARKLLHAIYGVLKTDTPYDGSKLFPGLKQA

SEQ ID NO: 307187 - protein, 342 aa, unidentified
MLHAGIDLHKKTSVVTVVDDDGAEVVAGYRLENEEDEIREFFASFDGELDAVLEAGPSWQWMCDLLDDMEIDNVLCHPLKVKAIASARIKTDRIDSGILAQLLRMDFLPESYKPDLDTRHLRELLRYRASLVRLRTSTKNRVHALLARLNIRHGFSDLFGKAGSSFLRELQLAPVYRRALDGNLSLLEALGSLIKDAEEGLTPFYQQSADARLLSTIPGVGPILALTIASEIGDIGRFQRSKQLASFAGLVPSTSQSGAHSHHGHVTKQGSPWLRWALVEAVIHGVARPGPLKSHYLKLKAKKGNKIARVACARKLATYIYHMLKENKDFTEVTAYLKSDLG

SEQ ID NO: 307188 - protein, 351 aa, unidentified
MERYIGGDVHAASVTFEVLNETGKRLRRDVVETNGKALIGYLQQIAGHLHLCIEESEWSQWLYEILSPYVTELVVYQSGWKPGMKSDAIDAHGLAEKLRTGQIDRPVYKDVRLFTALRDHARTYTMITRDMTRVKLRLKSFFRSRGVPCTGTAVYKSEERAKQARALPPATRESVELLGRELEHLKELQAEAELAMLRESHRHRIARILETAPGFGPVRVAQMLPIVVTPHRFRTKRQFWSYCGFAVVTRTSSDWVRENRGWVRAPVVQTRGLNRNHNPMLKMLFKGAAMTMIAHAKPNPLRADYDRMLDQGIRPNLAKLTVARKIAATVLAMWKTEEAYDARKIHEIARD

SEQ ID NO: 307189 - protein, 462 aa, unidentified
MTIPTKKGSTKTTTASPTSLPVIRPRVAGLDVGSSQHWVCGPPSADGTANVRVFGTTTDQLHELATWLRDQGVQSVAMESTYIYWIPIYELLESQGIEIVLVNARQLHNVPGRKTDFSDCQWLQLLHSCGLLRGSFRPGEAITRLRALQRQLANLVAERTRCVQWMQKALDQMNVQVHRAVTDLTGVTGMAIVRAIVGGERDPVRLATHRDRRCRHSQNEIARYLTGTWREEHLFNLASALRLFDALATEIAAYDARLLREIEALQPPERHEEPVPAHPNPAKEKALKARGEQPARTTLWRFAGVDLTRVDGISAGAAQVILTEVGPQLAAFPSEDHFVSWLRLCPRTPISGGKPVKKRRNGLGANRIAGVLRMAATSLQRSKTALGASFRRIARHKGGAVAVFATARHLARLVYRMLRYGHDYVDIGEEAYDHHFQVRRLAALTETAKSLGYTLVPNVATA

SEQ ID NO: 307190 - protein, 338 aa, unidentified
MAIVMGLDQHRAQITADWLNTETGEVSRARLTPAHRDGVRRFLGRFAGQQLEVALEATTGWRFVVEELQAVGADVHLAEPAETSSMRGHKKRAKTDRADALHLRELLMVGRLPEAWVPPGHLLDLRARVRLRHTLVDQRGEWQQRIQAVLYHHGITQRRDLLTADKRQWLTELDLPVAAREQVTVALTVIDALDAQSEPLTRELRAYGRRQPGCRALMAHYGIGALTAVTILAELGDARRFSSSRHAVRYAGLDITVHQSDQRRAPGHLSRQGPPALRWALYEAAQLARRPRSPDHAYYEQAAARLGGNRACLAVARKLLKRSYHTLRELGDEALQPA

SEQ ID NO: 307191 - protein, 342 aa, unidentified
MKFYCGIDLSARDCHVCVIDEQLKIVVQQKLRNELVKICQLLGPYKAKLKIVVESTFNWYWLIDGLQAEGFDVVLAHTLGLYLITGAKVKTDRRDAYSLAKLLLVGAVPVAYIYPVETRPVRDLLRRRMHLVQVRAGEYGSLRRLLLRQGILSSKQQEIKTATEAELEQWFEHPLVRLHASQELQRIELYSQQIAELEKTILALAKTEQSYELLLKLPGVGQVIALTIMYEVGELTRFANVKVFSSYCRVVPGIAQSGNVSRRGRASKQGNHYLKAAFSQAAVHAVRCYPKVRRYYERQLKRHRGRGRQMICYNIIAHKLAQAAFHVLKEQTEYREELLFGR

SEQ ID NO: 307192 - protein, 343 aa, unidentified
MQAVKTIGLDIAKSVFQVHGVDPDGQVVIRRKLKRRYVLAFFEKVPPCLIGIEACATSHHWSRQLQALGHRVRLMPPTYVKPYVKRQKNDAADAEAICEAVTRTNMRFVETKTPEQQSCLVLHRTRHLFIRQQTSVINAIRAHLAEFGIVAPVGRKGVEQLLEAVANSKEKRIPDIARACVAALGMQLRALKAQVLEFDRQIMIWHRSHETSKRLDEIPGVGPALATALVASIADPKAFRSGRDFSAWIGLVPKQHSSGGKDRLGSISKQGDRYLRSLFTAGALAVIRYAKIYGTRHRPWLTALLARRPTKVAAIALANKLARMVWAMMARGERYKEPVALAA

SEQ ID NO: 307193 - protein, 342 aa, unidentified
MDHFAGLDVSVKETSLCIVDDAGRIVREVKVASEPEALLAVLTNPACHFKRIGLEAGPLSQWLFKALAEAGLPVICVETRHMRAALKAQINKTDRNDARGIAQMMRAGLYRPVHVKTLRQKLRMLLTHRKLLQSKAIAIENDLRATLRNFGLKVGVVGTVKFEARVKQLVDNTPDLAVLVEPLLIVRRVLREQIGILHRRLLAIVRNDAVCRRLMTVPGVGPVVALTYRATVDVPYRFRNSKAVGAVFGLTPSKHQSGESNRTGGISRCGDEMMRMMLYEAAHIMLVRSAKWSWLKAWAMKIARHRGLKKAIVALARRLAVIMHRIWVDGTEFRWTREVAAA

SEQ ID NO: 307194 - protein, 357 aa, unidentified
MIYVGIDVAKDKHDCFITNSDGEVLFKPFTITNNLDGFNELYQKIESVTEDATKVKVGLETTGHYSYNLLGYLIDKGLAAYVINPLHTNLYRKSLSLRQTKTDKVDARTIASMLMSDVNLKSYSDISYHNEELKSLTRYRFDKVKERAKLKSSVSRLVCILFPELEKLVPTLHMASVYSMLSEFPGAKHVASAHLTRLTNLLSEASKGRYSKDTAITFREAARASIGSNMPAKSLELKHTIKLIQELDSEIDEIENEIKVIMDEINSPILSIPGINYRMGAMIIAEIGDFSRFDSPDKILAYAGFSPSTYQSGQLDGAYAHMEKRGSRYLRYALYNAAKYVCHWDPTFAGYLSQETS

SEQ ID NO: 307195 - protein, 460 aa, unidentified
MRTESTPGARGPVFCGVDTHADSHWLYVLDWRGRKVLSRQFPADAAGYEALAGAIAAAGEPACVAMEGTSSYGAGLTRHLASLGMPVREALSPARTQRRRPGQGKCDEADAERAARAAMSGSKLGTPKSQDGWVDGVRCMLAARSGAVKARTSAINTARSLLTTAPEGLRSRFRGVAGPRLMEVLPSVRAEGALGAALGALADLWAAARDAALDMERAIEASLEENCPALLAMYGCGPVSAAKLAVAAGDNPGRLRSEASFAAICGACPIPASSGKTVRHRLNRGGDRQANSALHEIARQRVMRDPETAEYAERARARGKSDREVMRCLKRYVAREAYRALMHPHEIRRPEDASELVAARRAAKVSQVRAASILGTSEKYISMLERGQRELKPIRRAYEAWVEAGLPLDWDRQAFEAERKMDSKKTPCQIGASLHVRGRSGGKPPSRPRIPGGSSRPCRP

SEQ ID NO: 307196 - protein, 289 aa, unidentified
MKKFIIGIDFSKETVDASIVQKEQPETLIAYKKFRNNLKGVDGLIAWAKSKVAQDGEIIFCGENTGTYSTLFSDELTDRGFIIWIEHGMNIVRGMGDVRGKDDKTDSLRIASYAARFYDKMKPYVRPKDETRVLKTLLAKRDRLKSFLKAEITNTKENPLMLQDSNIASSINEFFKRLEESLRKELKELERMILDVVMSSSEYAKNFNILTSMKGIGLINAVALIVYTDNFTKFNFNHRKIATYWGVVPFKNESGTSVRRGTHVSPKCNSWLKALLTEATLCAINASSG

SEQ ID NO: 307197 - protein, 388 aa, unidentified
MLQPLDASKSLTAFEQDSTVIAVIEMSQSKWLVAAVVPGIERQPLKKIEANEETLLKVLHRWRAEAGQAGRVIKRVAIAYEAGRDGFWLARWLRARNIEAYVIHPASIAVSREHRRAKTDRLDTELLMRAFLGWLRGERRHCSIVAIPTVAEEDARRPNRERENLVTERTRIVNRMKATLTRFGIRNFKPTLRKAAEKLDNLRTAEAMPLPENTRAELRRHLARLRVVREQIREIEHERLRMLKAAPVTEKGPHAMVRLLARVLSVGIETADMLVNEVLSRHLRDHRAVARYAGLTGSPDESGRRRREKGLARAGNARVRCGMIQLAWRFLRFQKDSALTKWFDARTADGRAGTRKTMIVALARKLLIALWRLVTTGEVPQGVVLRPA

SEQ ID NO: 307198 - protein, 321 aa, unidentified
MTYIGIDVSKDTFVVAYSSDKNSKTKVFKNTTKGIHEFITTISKDEHHCVMEATGNYSALLVYLLSEAGITTSLENPLKVKNFARAMLSTVKTDEIDARLIVLYGEKMQPAPYRLRSDAILTLKQKRTVIRQLKKQLIATRNLKGSMEVMPFFDAKCKKSIEKTIAFLEKQVKELEENLTTLARSEYKKQMDLLTSIKGIGVTLAAALIMATGGFTYFDNAKQLTRYLGLSPTYQQSGTSVNFKGHINRNGDSSLRGQLYVAAFASLRCNTECKACYDRLRSNGKPGKVAVIAVANKLIRQVFAVVTQEKPYVDGYVSSKK

SEQ ID NO: 307199 - protein, 357 aa, unidentified
MTMMAETAVTGGVDTHKDFHVAAALDQLGRLLGTEQFPTSAEGYSQLEAWLRGFGELSVVGVEGTGSWGAGLSRFLRRQGIEVREVNRPNRQRRRTGKSDPADATSAARSVQSGEASGLPKAGHGPVESIRVLRMTRRSAVKSRTQALNQVKAMIDTAPDKLREQLIVLPNRTLVTTIRRFRSSGAPELVPLKISLKLLAGRILELEQEIAQLDDLLQDLLQSTAPRLLAVRGVGPEAAGALLVAAGDNPQRVRSEPSFASLCGVSPLDASSGRQQRHRLNRGGDRQANCALFRVVLCRLAWDQRTKDYMARRVGEGKTKKEVIRCLKRYVAREIYAAFQLDLRCESPGFPAASIAA

SEQ ID NO: 307200 - protein, 343 aa, unidentified
MQTVTTIGLDIAKSVFQVHGVDAAGQVVIRRKLKRRYVPAFFQKLPPCLVGIEACASSHYWARELQALGHTVRLMPPVYVKPYVKRQKNDMADAEAICEAVTRANMRFVPIKTPEQQGGLVLHRTRHLLIRQQTAVINAIRAHLAEFGIVAPVGRKGVEELLRVVGDGNDKRVPDVVRACLGALGTQLLSLKKQILELDRMIMAWYRSNETSRRLHYIPGVGPLLATALVANVADPGVFRSGRNFSAWIGLVPKQHSSGGKDTLGSISKQGDRYLRSLFVAGALSVIRYAKAHGSKHRPWLTALLARRPAKVAAIALANKLARMAWAMMAKGERYKNPVALAA

SEQ ID NO: 307201 - protein, 385 aa, unidentified
MKEQDFVPREFDIFGGLDVDKKSIAVTFMSHEGVLQSFSMPCRAEHLLSYVRKHFEGKKIAFAYEAGPTGWGLYDKLTAEGHPCVVAAPSMIPKVPGQRVKTNRLDSQKLSQHLRGGQLKSVHVPSEPYRQLRHLTQLRDTFVKDVVAMKLRIKGLLLFEGMEFPAAPPGSQWSFLVKGKLKKLPCSASVRFKLDRLLESLEYSEKQALQTIKEIRRFYKQDPELCQVMAHLKSIPGMGEIVASHLLARIGDPKKIGNVRQLAGFIGLAPREHSSGERVARGQITHTGDGRLRSKLIQAAWSAIRQDAELREFYRSVFKRHPRDRAARKAIVGVARKLTTRIYAVLKQQRPYVVREKVHSAPLTQEETSPQGTTRRRAEPGELLS

SEQ ID NO: 307202 - protein, 400 aa, unidentified
MTGAFNDLRGRIGEWERSTVQALPQTKRRKAMKRRVDVGVDLHKGQFTVYWLREGEEKGKFERYLTDGEGYEVFEGKLKAAAEAGSEVRVAVETTGSARYFKNRIERQGIGVKVINTLKFKVVNESVKKTDRHDAATIAEFLAKDMLPEARLCSEESEALRRLVKSRKVLVRAVVSIKNQIHGLLLGFGIELAARTLQSKKNRRKILGVLEEQGLAGGAVEPLFETIDRLEEEVKKIERLIEERTKGDRTVELLKTIPGAGAITAATVRAFVDDIGRFEGYKHLCSYAGLAPWVQDSNRRERHGRITKRGPEELRTALVQIVVGMVRNKRRTGAYRIMERYAAMKPVKGSGKTIIATARKLAKVIFYMLKNNEPFDPGRMTDPDLKKAAREMSLAVVSVA

SEQ ID NO: 307203 - protein, 387 aa, unidentified
MPKHNDLSRCLVTLEQASTLIAVVEMGQSSWLVAGIAPGLDRYPLKKLGPDRDALLQLLHRWRNEAAKVGHAINRIAVAYEAGRDGFWLARWLRSQSIEAYVIHPSSVPVSREHRRAKTDRLDTELLKRAFLGWLRGEPKHCSMAAIPTLEDEDARRPGRERQILVGERTRILNRLKANLARFGVHGFRPNLARAPSQLGALRTPEGVAIPTNTLAEMRRDLDRLRFVKQQIKEIEKTRAERLAKAPDERRHAAARLLTRVVGVGIETADMLVQEVFSREIRDRRALARYAGLTGAPDESGQRRRERGLAKAGNARVRRGMIELAWGHLVHQKGSSLSTWYRRRTVDARGGARKTMIVALARKLLIVLWRFATTGEMPAGLLLRPAA

SEQ ID NO: 307204 - protein, 453 aa, unidentified
MPKTRSSASQNLTRVNPGAAAIDIGSTMHMAAVNPDSDDMPIRAFGTFTHDLHDLANWFRSCGVTSVAMESTGVYWIPAFEILEQHGFEVILVNARYAKNVPGRKTDVNDAAWLRQLHSYGLLRGSFRPNAQVATLRAYLRQRERLVEYAAAHIQHMQKALMEMNLQLHHVVSDITGVTGMKIIRAIVSGERDPGALASLRDVRCHSSVETIRASLIGNDRDEHVFALSQSLELYDFYQVKMFECDRKLEAAIVSMTGELEAPLAPLPKIRTKTKQTSAPSFDVRAALYGLTGTDLTQIHGLGSSLALKLIGECGTDLRAWPTAKHFTSWLCLAPGNKISGGRLLSSRTRRSSSRAAALLRLAATTIGRSDTALGAFYRRLAGRIGKQKAVTATARKIAVLFFNALRFGMAYRDPGAAAYDERHRGRVLANLQRRARSLGYQLDPILDAESVS

SEQ ID NO: 307205 - protein, 420 aa, unidentified
MKAWQDLTHYAGFDWAKDHHAVVIVNSEGRIVADFQFDHSLEGWKIFAEKTSTCPNLAVAIETSQGAAVDQLLQREYTLYPVHPVAAQSYRERKAPSGTKTDHLDAWGLADALRVDGHGWKALQPMDPLTQQLRLLCRDEVTLIEQRTALVNQLQQALAEYYPAALEAFDDWTDDFTWEFVLAFPTPPLLVTAGKRRWEKFLHTHKLWRPETVEKRLKLFAEADQFKASEPIVRAKSQLAVSLCKLLCTLGKQLALYRKQIEALFRDHPDHDLFGSLPGAKKMLAPRLLAAVGADPSRYGSHEVLQGIAGTAPVSYQSGKLNKVHVRWACDKFLRHTMHLWAECFRRASAWGQTYYEQKRKQGMTHACALRCLGQRLLKILFRMLTDKKPYDAELHARNQKKHGSWVLKLNNKPVAYLSE

SEQ ID NO: 307206 - protein, 409 aa, unidentified
MLLVGDDWAEDHHDVELMDSAGRVLARARLPEGAAGMARLHAMIGEQLGEDAEAAGVRVGIETDRGLWVMALAAAGYAVFGINPLQVARYRERHGVSGAKSDAADAHTLADMMRTDAHQLRPVAADSPAAQAVKVVARAHKTLIWERTRQVQRLRHQLRDYFPAALEAYPDLAAPGTLELLAKAPDPASAAQLTTAQVSAALKRARRRDITARAAAIRAALRGEQLAQPPAVTAACAAVARALAAVITALNTQIKVMEGQVEAHFLQHPDAEIILSQPGLGPILGARVLGEFGDDPHRYASGKARKNYAATSPITRASGKRKTVMARYVHNDRLRDALDGQAFAALSASPGARAYYDRQRARGLSHRPALRQLANRLVGILHGCLKTRTLYDEATAWPHHASQEIKPAA

SEQ ID NO: 307207 - protein, 338 aa, unidentified
MELSVIGMDIAKNVFQLHCVDRQTGEIERIKLRRNEVLPYFARRTPALVAMEACGGAHWWARQLQQLGHTVRLLPAKAVRPFVLRNKTDAADARAIWTAVQQPEMKTVAIKTEYQQSILALHRMRAQLLKFRHMQTNAIRGLLMEFGHPLPESYLALRKAFPTVMATLDKQLPGILIETLREQWARVQSLDNEIALIEGRLKRALAETPTCQMISDIPGVGLMTATAAVATMGDPASFKTGREFAAWLGLVPRQTGTGGRIRQLGISKRGDAYLRTLLMHGARAIIARRTYSDWVAGLIARRPYSVVIAAIANKLARTIWAVLATGKRYDGAAFAAAI

SEQ ID NO: 307208 - protein, 406 aa, unidentified
MADIFALDVSMGKSYCVWYRGKHCLKEFSLVHTKAGFNALRDMIKKAQKPIIYFEATGIYSRVIEHFCETNGLRFCRLNPLELHLKSESLRRVKTDQKDAHRIALTVQENAFRLTVPWKKDYLQLHELSRFYNQLNADWNYRLNHLHTALEQVFPELKQLFVNRTSKLALNIVELFPHPALVRPYSRVKLKNILMASTDKRISKMKAYKYADRLIDLAQKSYPAVSGDAIQVDEVRYYARQLIALTRKKEEVIKRMESIAQRLPEYILYCSFPGIGKQTAAQLMGELGDISRFDNANQLNAFVGIDIRRYQSGTYLGQDHINKRGNPIARKLLYFTVGNMIRQQHANSNHIVDYYYRLKEKRPHPKLNKVAMVACMNKTLKCLLSMIKHHEKYHYRYTDSIVPVKA

SEQ ID NO: 307209 - protein, 400 aa, unidentified
MDKDRIVAGLDVHKDTIYLCVMDNTEAVIFAKVYGTLTPDLELMCSDMVSHGVTEAAMESTSTYWVPVWNALCESMSLKLVNPYFIKQLPGRKSDVKDAQWIAECLLKNLIRGSFVPDKTVQDMRKYNRRIFDLNEDLTYNSNKQDAALQRCGFRLSNYVSRVNGKSYQKCVRAIITGITDPEELVKLIHGKTLRKYGRNIIKDAVTGDFHQADICLLKQYAELIGVIERQIEECRNALIAMCQEHFPKQFKRLQSIPGVKERAASAIIAETGADMKPFEKATNLVGWCGLKPRNDISNNKVKSNRTTHGNRFLRQILIEISWVASRTRNCFFSNFSYVQCTQRHKNKMKIQVAIARKLLVVVWHMLTKDEDFIDVYLKRLEKQAEWQNDIQALESLLVG

SEQ ID NO: 307210 - protein, 357 aa, unidentified
MRRYRLAVDKRKGEEGEQIFIGIDLHKIQWHVTIRSEEVELFNGSIPGNWDALKRVLDRYEGCRKQVVYEAGYFGFWLYDHLVDYGVDCVVTPPSLVPQEYGNHVKTDRRDSRKLAHLLAKGLLKRVWVPSPEQRYERQVIRRRKQLIGDRVRTQNRIKAELRFYGIDLPDPTGQWSKAYFGNLQHLRFDNRWMQESFARLLEEYQFLTQQIERQTKLLRAMAETDQYQERVKILRSTPGIGLISSMEYLLELQDVERFRRGNRLAAYVGLTPSQYSSGEKLRMGRITAIGKNDLRGTLVEVAWRLIAKDPAMREKYERIKIRAGSKRAIIAIARTLLLRTRRMLLDRQPYVVGLAA

SEQ ID NO: 307211 - protein, 416 aa, unidentified
MEVLYVYCAGLDVHKKTVVACRLSVNAAGQKVKVIETFGTTTSELLRLSDWLTAGHCTHVAMESTGEFWKPVWNILEGSFELWLVNAHHVKRVPGRKTDVQDAEWLAELLQHGLITASFIPPVEQRDRRDLTRQRTQLVRERAGVVNRLQKVLEGANLKLSAVLSNVAGLSGRAILDALVQEHLDPTNLGDLVHGRVRDKLPALEQALTGRVRPHHRFLLRHHLAQIDFLDEQIAAYSAEIERLTQPCEDLVALLDTIPGVARTTAELILAEVGADLSRFPSAAHLASWAGLSPGNNESAGKRLSGKTRKGSQWLRTGLTQAAHAAARQKDTYLAALYHRLTARRGKKRATLAVAHAMLVIAYHVIQRKEPYRELGGNYFDERRRTGVVNRLTRRLAKLGYTVTLLAPPSEAAATA

SEQ ID NO: 307212 - protein, 357 aa, unidentified
MVKLQERADFSGKKIFVGMDVHSKNWRNSIYYEGQLLRCLHQPPKVEALVKLLKRDYPGAEYLCAYEAGFCGFWVQRELEKQGVKCIVVHAADVPQTDKRKHQKTDPNDSKGIGTALQAGLLKGIYVPEEVTEGDRKLIRYRQQVRKDLTRCRSRIKSLIHNIGIPLPSQFSIKNWSRAFIKWLQELQIEHHYVRYALDRLIAQEANLKTEIFLLNKELKNLLQTDRYQKNGELLTSIPGIGTTTAITILVEVGDIKRFVSFPQFNSFIGLYPSEFSSGEHERKGSIMPRHHRELRSLIIEAAWISVRHDPALTLAFGELKKRMTAKRAIIRIARKLLNRIWHVWNKQEGYEKGLVA

SEQ ID NO: 307213 - protein, 337 aa, unidentified
MIHVGVDLHQRFCYVTVMDARGKILQQRAVGNEAGELRRWAGSLPGPAQVVMEACSFWPGFQKNLSGEVEKMVLVHPARVKAIAAAGLKNDRVDSEMLAHLSRCGLLPEAWMADEGTQQARQRTRLRVALGRQRARAKNLLQAVLHQEGQQKPVTDLFGKRGRAWLGEVELSAAGRESVDTYCELVDHYDRLIGERQKGLEQAGRESAEARWLATIPGIGLYLAMVILAEIGDIRRFSDKKALCNYAGLVPRVRESAGKRQVGGLTYQGSKLLRWAMIQAAHGATRSSPAVWAWYETRRQRKRPQVARVALARKLLTCVWALLRHGVGFEESVFATG

SEQ ID NO: 307214 - protein, 351 aa, unidentified
MKVLIGVDPHKGSVAVAALDEAEAEASGELVERAAFSFSQDRAGLRSLKRWAKRFPERRWAVENASGLGRHLALRLAAGESVVDVPPKLSARVRVLSTGNDRKNDGLDALATALAASRNERLAAIDPEAASEALRLLSERREDLVAERTRALNRLHGLLRDLLPGGASGTLSARRAARILRGIKPKGASARLRRRLASEVLRDVRTLDGKIADLNGRIEAEVEASGTTLTEIFGVGPILAAKIIGTVGNVARFPSKSHFASYSGTAPVEASSGDVVRHRLSLAGNRRLNYALHMVAVCQARSDARGGAYYRKKIAEGKSRKEALRCLKRRISDAVFRSFVADSQAHSRSAA

SEQ ID NO: 307215 - protein, 414 aa, unidentified
MEQIHDRVAGLDVHRDVIAACVRTAGPRGGTIVEKERFETTTAALARLAGWLADRRVSLVAMEATGVYWKPVYYALESSFELWLCNAHHVKNVPGRKSDMADAEWLADVAAHGMVRPSFVPPPAIRELRELTRYRKTQIDARVAEIQRLEKVLQDAGIKLTSVASKVLTQSGRLMVEALIVGRREPADLAELAKGRLRPKIPALRQALTGHFGDHHAVVARRILDHIDFLDATIEALTEQIDIRTEPYQAARELLLPVPGFHRLVIDTVIAETGADMSRFPSAGHLAKWAGLCPGNHESAGKRRKVGVTPGNRWLRRALIEAARAAARTKGSYFGAQYRQIAKRRGPNKAAVAVAHSLIDLIWHMLTTGECFHDLGDDYFQRRRDPGRETRRLVAQLENLGYVVTLTATQDPAA

SEQ ID NO: 307216 - protein, 373 aa, unidentified
MSTNLRNVGLDVHAETIAVAVAEPGGEVRPLGIIPNRPEAVAKLVRKLSPREHLRVCYEAGPCGYVLYWQLTKLGVHCDVVAPTLVPTKPGDRVKTDRRDAAKLARCYRAGDLTPVWVPDAAHEALRDLVRAREAAKQDQLRARHRLGKFLLRQGVRPPLGLKPWTQRHRRWLDAVDFPLAAHQATLADHLYEIDHAAARVARLEGALDDAVQAAPAPMRAVIAALQTLRGIRQVIAATIVSEVGSLSRFPHPRELMGYSGTVPSEHSSGASVHRGAITKTGNAHLRRVLVEAAWAYRFPPKCGKALRTRQRGQPEGITALAWKAQQRLCTRYRRLLARGKPTPHVITAVARELVGFIWAIGVAVERQPALAA

SEQ ID NO: 307217 - protein, 398 aa, unidentified
MLHVGIDIAKHTHWVGAVGDDGRRAARPMPFRNSREGFGELLAYIEGLGGGPSSAQVGMEATGHYWLACFCALREAGYEVAVINPMQTNAVRRLRNLGKVKTDAVDCELVAETVRIGAFEPSRLADDDLLSLRQLVRLRQSMCESASDLKRQLLCVLDQVFPEYAALFSDPFGESSLALLRRWGTPDALARARESTLAAELRRASHGRLGEERARQVREAAKGTCGVKLALGAFSLEVSMLVAQLDFISGQCDELEGRIGALLREIEPLVLTVPGVGVLTGAQIVAEVGDVSRFRNAKALVSYAGLNPSVSQSGRFEGSDAHITKQGSPYLRRALYLVAMSSLRVPGPFRDFYDKKRSEGKRHREALVATARKAAAVVYAVLRNQEPYDGSRVGARPA

SEQ ID NO: 307218 - protein, 430 aa, unidentified
MGFIVPTDMHPERDDQPMPYEWFVGIDWGSQQHQVCVLDGARRRVGERAVDHDGASLAQLAAWLWTLSAGQPQRVAVAIEVPRGAIVEGLLERGFHVFAINPKQLDRFRDRHSVAGAKDDRRDAFVLADSVRTDQPSFRRLHLDEPQLLRLRELSRAEETLLEDFRRSANRFRDQLHRFYPQMLELCSAADEPWLWDLIDLAPTPAHVALLSEEQVQRVLQAHRIRRVKAKEVLTCLQALALPVAPGAAEAAQAHCQFLLPCLRVLAEQLQACSQQVSALLHTLAEEPGDGEGPSDVAIVLSLPGVGRKITAWLFAEAAQPLAERDYQVLRTHGGVAPVTKQSGKRRQVVMRHGCNPRLRHALYHMARVAMQRDAHFSGVYAALRAKGQRHGQALRNIGGRLLRILMAMLRHRTCYDASRMRREPVVQMG

SEQ ID NO: 307219 - protein, 319 aa, unidentified
MSPTIAALRPAAVDYERTLILSIEVSNQNWVLAAQVPGLPHTKAKRTVDPEAEALMAAIAGYRSRAAAMGRSIERVIAVYEAGWSGFWLARWLTRHKVEVYVIQPSSVPVDRRMRRAKSDGIDAELLLRTLLAWLRGEPRVCSMVPVPDEADEDARRCIRERTELISERVGLTNRIGAVLATLGVTDYNPLLRNRHHRLAELRTGLGEPLPPNAHAKIARLLARLELVLAQITELERERDAVVETETPDHASKMIQQLISLRGIGVQSATVLVREAFVRRFANGKALGSYAGLTSSPYSSGGIDREQGIGKAATGGSEQ

SEQ ID NO: 307220 - protein, 337 aa, unidentified
MLFCGIDLHSNNSFVVISDDTDKVLYSKRLPNSLPEICAALSPYQPEMFGIVVESTYNWYWLVDGLMESGYSIHLANTTAIKQYDGLKHRGDESDARHLAHVLRLGLLPEGHIMPKATRAVRDLARKRMQLVQQRTTQIVSIETCLAQQTGARISSNDVKQLTNEEIDKMPMGCHEAMGMKANVAVMQALQLQIDSIEKELAAYCRRDPGYRLLNTVSGIGPILATVILLETGNIDRFADVGNYASYCRCVGSIHVSNGKKKGEGNTKNGNSYLAWAYVEAANFAIRYCEPARKFYQRKKAKRNSIVAIKAVAHKLARACFHILKTGEDFSVERCFT

SEQ ID NO: 307221 - protein, 479 aa, unidentified
MTPSKDAFPEPCPPVPTIPEPSVLRPSFSLPLYNPHAAGIDIGEAEHWVAVPPDRAPQPVRRFGTFTADLDALADWLLDCGITTVAMESTGVYWIPVFELLEARGLQVFLIDPRQAKRAPGRPKTDRLDCQWLQRLHAYGLLAAAFRPDDQVCVLRSSLRHRQMLLTYGAHHIQHMHKALQQMNLKLSQVVSDLTGATGMAILKAIIAGERDPLTLAKLRNPHCQHREDEIAKALQGTWRAEHLFALQQAVELYQFYHQQLTVCDQHLQTHLGTFADQSAGQPLPPKPRRHKKANEPHFDARTPLYRLAGVDLTTIEGIEEGTALVILAEIGTDMSRWPSVKHFCSWLGLAPQHKISGGKVLSRHVRPGAHRVAVALRLAARTVHHARTALGAFYRRMRSRLGAPKAITATAHKLARLVYSLLKHGSAYVKQGLDDYESQYRERKVKAMARQAKALGYTLVALGTPEVQSLDAVAAPTS

SEQ ID NO: 307222 - protein, 410 aa, unidentified
MWEEELEVVCLLAYRGLRAVVARRATSRTPAGVICIRGFRRQTMTNDITTFVGMDVHKDSIAVAVADVGRAAPRFVGTCGPTVGTLIKTLSHLGQPAHTLCAYEAGPTGFALARELARHGWACEVIAVSKTPRRPGERVKTDRRDALSLASYLRSGELTPVTVPDERDEAIRDLSRAREDAVRARLKARQQLKAMLLRHGKPYTGKTSWGPTHELFLARIAFDHPAQQIAWAEYRSAVLEADQRVERITTALREQVGEWRFSAVVQALMCFKGIDLVSAVTLVSELGDLHRFEHPKQLMAYLGLVPSEFSSGQTRSQGCITKTGNAHVRRALIEAAWCYRYSARMSRPITERQQGQPRNVCEIAWRAQLRLCTRYRRLAARGMHPNKICVAVARELAAFLWEAGRQVSPH

SEQ ID NO: 307223 - protein, 279 aa, unidentified
MDHHVGIDVSLELSSLCVLDAGGKVVREAKVASEPEALVAFVRGLGLTITRIGLEAGPLSQWLHDGLREAGFDVVLLETRHVKAALSAMAVKTDRRDARGIAQLLRMGWYRPVHRKSVPSQEVRALLAARKQLQIKAMDLEQTLRGLLRGFGLKVGDVSRGRLAARLRELVDGHAMLERIVEPMLAAREALWREFAKLHREVLAVVKEDQVCRRLMTVPGVGALVSLTYRVAVDDPGRFKKSKSVGAFFGLTPSPLAIRLRSSRWRSHRRGATNRAKRT

SEQ ID NO: 307224 - protein, 367 aa, unidentified
MRKHNTAKESEAIRRETNRELTVGIDLGDRSSRYCILDEQGEVLAEGSVATTKKGFAQVFGSKPRSRLALEVGTHSPWVSRYLANLGHEVIVANARRVRLITDSTRKDDRLDAKTLARLARIDPELLSPIRHRSAQAQADLMVIRARALLVEARTMLVNAARGLTKSYGERLGSCGTGQIREGLAEPLSEALQNALKPLLAEVESVSEHIREYDEQIENIAKSRYPETELLQQVHGVGTLTALTYVLTVDDPHRFRRSRDAGAYFGLRPRRRESGDSRPQLRITKEGDAYMRKLLVQCAHHILGPFGPDSDLRRWGLELAAHGGKNAKKRALVAVARKLAVLLHKLWVTGEVYEPLHVRAGSKTAAA

SEQ ID NO: 307225 - protein, 420 aa, unidentified
MRNAGIHANSLLEVRRMYNAVGIDVSKGKSTVAVLQPGSTVIRKPFDVSHTSQNLNELADYFSSLDGTTKIVMECTGRYHEPMVKALSEAGLFVSIVNPHLIKNFGNNSLRKVKSDLADARKIARYTLDNWTELRQYSGMDNTRTQLKTLNSQFSFFMKQKVAAKANLIALLDNTYPGVNKLFDSPTREDGSEKWVDYAYSFWHADCVRKIGLKAFTERYKSFCKKHHYIFQQDKPEKLFNASKELVAVFPKEKTYKLLIQQSIQQLNLASEHVERLRREMNELASTLPEYSTVMGIYGVGKTYDPQLIAEIGDVSRFTHREALTAFAGVDPGVDESGQHKSKSNRASKVGSARLRKTLFQIMTTLLQNAPEADPVYRFLDKKRSQGKPYYVYMTAGANKFLRIYYGKVKECLRNLEQTE

SEQ ID NO: 307226 - protein, 347 aa, unidentified
MALTIVETHVITGGVDTHADMHVAAALDPIGGLLGVEEFPVTPAGYARLLGWLGGFGTVALVGIEGTGSYGAGLARHITAAGVRVVEVDRSDRQDRRRQGKSDPLDAVSAARAAQSGRARGAPKGRDGAVEAIRALMVAKRSARSERTQTINQARSLIVTGPDDLRARFAGHTAAALVRELAALRPRPGDAVGYATRIAVRELGRRAEFLDGQLERLDELIAPLVAARAPGLLALHGVGPDTAALLLIAAGDHPERLRSEAAWAHLCAAAPIPASSGKVTRHRLNPGGDRQANHALWRIVLTRMSAHPPTLIYVERRTKEGLSKKEIIRCLKRYVAREVYRRLRAAG

SEQ ID NO: 307227 - protein, 360 aa, unidentified
MKRTIFVGIDLGDKKSVARIATERGSSERMSFVNTRSGRARLLRDLKRRSQDGGAEATIVMAYEASSCGFILHDQAQEEGLVCHVLAPTKMEKSAEQKKHKNDDRDAEDVLEKLRGHVLAGNRLPTVWIPDVETRDDREIVRARLELGEKQTQVKTQIQMLLKRHGLEKPTDLSSGTLAYRSWLKAMSVSERLRWGTRESLGSLLRQLEAIESEMKQLDSRVQQLAQQERHKPIVEALTEEKGVGLLTAMVFRTEIGQACRFRRGRHVGKYAGLTPTSHESGEQSDHKGHISRQGPPRLRKVLCQASWVHIRHDSESRQFYHRLVARNPKKKKIALVAVMRRLAVRLWHRMRQVELLLAR

SEQ ID NO: 307228 - protein, 455 aa, unidentified
MKVKKVSALRVKHGLHRVNGAEPQVVGLTPQTTDERKTDTMKTYILRPPKTVEPQKSIRSPRPKPAASATIAVFLRGPEATVKSPVLFIGLDVHNDSIAVSLAPSDSTEVRRYGIIGGEHDDVLKLAHKLQAAHPGTTLKFCYEAGPRGFALCRCLQAQGLDCILVCPSKVPRKPGERVKTDRRDADQLARLYRAGELTGLYVPEPEDEAMRDLIRARFQVGKQQHRSRQQLKMYLLRHNLRYGGQSSWTPAHLRYLAKIKMPFPVQQIVFQEMLEVISSATSQLERYDQEIERAVPNWRWEPAVRALMSLRGMALLHAATLVAELGDFNRFEHPGQLMGYLGLVPSEHTTGKDRQQGGITKMGNAPARRALVEAAWQYRIPARLSPQLKKRQEGLPKSITDIAWEAQRRLHHRYIHLTRVGKKKSQVAVTAVARELSGFVWAIARQVKPLSATP

SEQ ID NO: 307229 - protein, 399 aa, unidentified
MFVGIDWAKESHDICVVDPAGKIRGRATIAHSQEGFDELAKHLGRWAEQGEVLVGIERPEGRLVDRILEAGHPIVLIPTFAMKDLRRRYAVGGAKSDPGDAYVIADVARTDGHRLRRLEPLSEETRALRSVVRARGDLVDQRVALGNQLRACLDAYWPGAAVIFADVCSEIALVFVERYPTPESAARLAETRLGSFLKKAGYSGRRSAAELLDRLRAAPEGVVGVEAEARADAMRSMVRVTRSLNRSIKDLDRAIAAHLGEHPDAEVFTSLPRSGRINAAQMLAEWGDCREAYPEPDAVSMLGGLCPVTHASGKHRDVAFRWACNKRLREAITTFADNSRHASPWAADIYRRAIARGCDHPHAVRILARAWVRVIWRCWQDRRPYDPALHGAAVLLEAA

SEQ ID NO: 307230 - protein, 402 aa, unidentified
MNCVGIDVSKGKSMIAVMRPFGEVVVSPFEVCHTASELSELARLLKSLDGETRVVMESTGNYHAPVAWLLHGAGLYVSVVNAMLVHDYGNNSLRRGKTDKKDAVKLANYGLDHWLTLPRYVPEEDTRLMLKTCYRQYQQYSKVQTMLKNNLISLLDTAFPDANRLFTSPPRADGSEKWVDFVATFWHCECVCGLSKKAFTAKYQKWCRKHGYNFSQDKALDIYASACGRFGVMPKTNTAKLLVEQAISQLQTTSAALAALKQEMQSLAASLPEYPVVMEMFGVGPTLGPQLIAEIGDVRRFHSKKALVAFAGIDAPPYQSGQIDVRSRSISKRGSASLRRTLFLVMGILLQCAPMDEPVYQFMNKKRSEGKPYRVYMMASANKFLRIYYASVKAYLDSLEHD

SEQ ID NO: 307231 - protein, 319 aa, unidentified
MFIGIDVAKAELVVGVRPTGTGWTAVNDDQGVRDLVTRIQALGPTLIVLEATGGYELLCVAALAAAHLPVVVVNPRQVRDFARATGQLAKTDRIDAEILARFADTVRPEIRTLPTVEAQALDALLTRRRQLLEMLGAERNRLGQVFGSGKKPVTKSLTAHIAFLEKALARADAELDAAIAQSAIWKAQDALLRSVPGVGPILSRTLLADLPELGRLSRREIAKLAGVAPLSRDSGTMRGRRFVQGGRAPVRAVLYMAAMVAARRNPVIKAFYARLVAAGKPKKLALVACMRKLLTVLNVMVRTTTPWNPEFATMSVATA

SEQ ID NO: 307232 - protein, 317 aa, unidentified
MEGVKFNQVVLRGCGIDIHRDSAVATISGEGITTETRSYKTFSSSLTELKEWLIANGVTHVAMESTGVYWKPVYKVLECPELKVWIVNARHIKYVPGHKTDKKDSAWICKLLLAGLLKPSYIPPKEQRELRDLTRYRNKLIQHIASEKNRIIRVLEECNVKLDSVLSSMSGVTATKLIDKLIENGVVTMEDIDEVYHQRIHASKEDLYLACEGVIDEHQKYLLQVIRKDIEQTQALIEDLSDRIKAILAPYDNAIERLKEIPGLSTKVVEDLIAEIGLDMSSFPTEKNLASWAGMSPGNNESAGKKKAPEPTTETNG

SEQ ID NO: 307233 - protein, 412 aa, unidentified
MLYLGIDVGKKWHEAALVDEADEVLWRQRFRSNRTGLLSLAERLAGVGPEDLTVGLEATGVYWITLHQWLVGWGAAKVLVLNPLQTRAFRNANLRGSKTDRIDAVSIARLIRWAGRTLSSHAVPEERQAAAREISRVRSEMIRLRAKQLVKLDTILERLFPEFRQAFRDLGTKSAQAVLSRWPTPRLLRTASLAEITAVLHEASRGKVREAKAEEILRLAAESVGIDDPLDASAAAIQALVAHVRHLEEQIESLGKRLDTLLEPDAVLRRLLETIPGIGGETARTWLAEALPVGQFQGKDAAQRLVAAVGIDAQPRESGQYAGKVKMSKRGNRHLRRAILLAARTASRTDPQFRAMLTRQLQRGKHYNVAVSHVARKLVHVIYAVLRDQRPYELPPEYRLGIIEPELSPTGA

SEQ ID NO: 307234 - protein, 393 aa, unidentified
MVCVGIDVAKDKHDCFIISSEGEILADVFTIPNNAEGFDTLLQAIRRSTRPEDKIKVGLEATGHYSYNILGFLLDKGLPTYVINPLHTNLYRKSLSLRKTKTDRVDARTIAAMLMSDVDLKSYTDTAYHNEELKSLTRYRFDKVRERAKLKQSVSRLVTILFPELEKLVPSLHMASVYALLSEFPGAKQVAGAHLTHLKAVLYDASKGRYGRDMTTTLREAARCSVGSVMPTKSLELQHTIRLIRELDAEIEDIEAAIQSMMDEMQSPIMTIPGIGVRMGAMILAEIGDFSRFDSPDKILAYAGMSPSTYQSGQLSLSGAYSHMEKRGSRYLRYALYNATKYVCLWDPVFAAYLAKKRTEGKHYNVALSHAAKKLVRLIYAMEKSRQSYRNAA

SEQ ID NO: 307235 - protein, 390 aa, unidentified
MYSPGSARYSPDKRIVMKGASLGGAFEWTLEGVKPNHKEAWKIMLHAGLDLSRRRLDVCLLGADGSRLQELQVPPDRDGLRWLALSIYDRHGQQPVQAAIESMTGARFVHDQLELAGWEVEIADAVKAKGLAPLACKTDRVDAWVLAELSRRDLVPAIWLPDPSQRAERERARWRLHLVKHRSALKNRIGSTLMTFGHPRAMSDLFGLRGRQLLEAIELPQPWRGDVAAAVELIDDLDRRIDECAAELQRLGADHPYVPLLLTLPGVAWVLAYTIAAEIGDIHRFGSATKLCGYTGLCPRVRQSGEHDERGPLAKNGPRYLRWALIEAARHAARTPYFRAKYERTCQRLGKRGTKIGAVEIARQLAQAIWHMLTRNQPFAPAGAPLPLVA

SEQ ID NO: 307236 - protein, 377 aa, unidentified
MKTINAHVGLDVHKNSIYIAFRGRGAGETQAIGSIPNDLKRLRKKLEPLGDPALVQICYEAGPTGYDLCRRLRELGYDCQVVAPAKTPSVGGNQVKADRRDALRLAEFLATGHLTFIRIPTPEEEALRDLVRAREDLKIKETNTKRQLTSMMLRHSRIFSKENGGGKCHWTLLHLEWVDRQTFEYEASNIAKESYVEEVRRLGERIAELDKRVAEVSETMERSPLIHALQAFKGIKVLTAATVVAEIGDLRRFPTAKKFASFLGLTPSECSSGETRNRGSITKAGNRRVRRMLVESAWAYWRSPHMSRELSARSEGTSEAVRSIAWKTQQRLHRRLRALQHRHVPMKKALIAVTRELACAIWAIGQEETLTTHSAKS

SEQ ID NO: 307237 - protein, 347 aa, unidentified
MMIIGCDFHPRFQQIASVDTETGECAERRLMHTAEAEKFYGSLVGRGVRVGVEATGNFAWFRRLLGELGHELVLGDAAAIRASNPRNPRTDKRDARHILRLLMEDRFPRVWQPGVENERLRQLLLHRSSLVRMRTRIENQLDSMGKNEGLVGSRRWTGRRRREVEGLKLEGWYGERRRDLLALLDGLEERIRPLDEAVRAAAEADPQARLLMTHPGVGPVVSLAYVLTIGDWQRFPRGKQVGSYLGLIPCEESSGDKRRLGHISKQGNPMLRWLLVQAATVAQKHDADWHRQYLRLSLAKHHGVAKLAIAHKLAVRLYWMLRSGQEYPQVRERGSHAGQSVCPNGAA

SEQ ID NO: 307238 - protein, 427 aa, unidentified
MNKIEKLLLVHGSDLIFVGIDVAKKSHYARIIDHIGLEPVKPFKFNNSKDGYFRLVSKILEAKEKSKATRVIIGLEPSGHYWKPLTCFFKEQGYQVVLVNPYHVKKRKEEEDNSPTKNDQKDALIIAKLVKEGKFLNCLLPEGIYADLRNLSVARKQLINKLNSAKNKLISILDEYFPEFEEVFKNILGKAALWVLRHCPFPSMIVNHTKGELAENMKNAANKRVGIKRAEKLIEAAQKSVGVKQGLKGAYIRLQSYLDEVEFLKGQLETIEKTMGELLKEIDISQYLLSIPGIGIVTVAGFLAEVGDLVNYSHYKQIQKLAGLNIAENQSGKHKGKAKISKRGRPELRNLLFKASLVLVAKNKEFKALYNYFLKRPQNPLKSKQALVSISVKLIRVMFALGKKRENYDSQKVLGEYRMMQINKLAA

SEQ ID NO: 307239 - protein, 343 aa, unidentified
MYYIGLDVHKKTISYCVKDAAGQVHQEGKIGATRLDLDNWIKTLPQPRMMAMEATIFTGWIYDHLLPHAEKVKVAHPLMLRAIAAAKKKNDRIDAGKIADCLRCDFLPECHMASTEIRDRRRTLRYRNLVLRQTVQMKNRVSGLLMESGVTYDKQRLHKMGYFTELFSTNEEISDSIRPLLRLGREHILRGQRLDRALTSSLERDPLLSERLRRLRTIPGVGPITALTWALEIGDYTRFPSVKEAISYCGLCGDERSSADKVMRMPLSKQRNKHIQRVLIEAAKLAPRECHELAMVRERQLQKGNPNRATLAVARKMVSYMLAVERRKQDFVPAEQFRSTAAA

SEQ ID NO: 307240 - protein, 351 aa, unidentified
MPKRTSAAAISTIGIDTGKNTLHMIGLDEKGAIVLREKISRHRIAARLVNVPPCLVGIEAGMATHYIARELVTLGHEVKQVPPAFAKPFRQGHKNDFRDAHAIAEAVQRPSTRCVPIKTEDQLDLQALHRVRSRLIGDRTAVINQLRGFLLEHGITVRQGHRFLRQQLPQILATRSDVLSPRMIRIIGDLVEDWARLDERIETVTDEIEGLARADVSCGRLMTVPGIGPIIASAMVAAIGNGTAFAKGRDFAAWLGLVPRQMSTGDRTILGRITKRGNRYLRMLFIQGARAIQLHPASWAKHSFGPWLTAVARRLHCNVLTVALANKLARISLTVLVQGREYETRIETVAA

SEQ ID NO: 307241 - protein, 420 aa, unidentified
MEEVTDEPAELVERVAALDIGKASLVCCVRVPHESRPGARRQEVRTYDTVTPALLELRDWLICQGVTRVVMEATSAYWKPPFYLLEDDIECWVVNARDVKNVPGRPKTDKIDSVWLCKLAERGMLRASFIPARPQRQLRDLTRYRRTLTQERSREKQRAEKLLEDAQVKLSSVISDIFGVSGRDMLAALIAGQRDPHALANLARKTMRAKIGVLRQALTGHFTEHHAFLLAMMLDRVDALTAQIDTLTARIEEAIAPLAAQVAQLDEIPGIGVTTAQEIIAEIGTDMTRFPTPGHLVSWAKFAPKARQSAGRSKAATTGKGNPWLGGTIGEAAAGAARTSTFLAGRYKRIVKRRGKKRALVAVGNSILTICWHLLSDPGAHFTDLGPDWHDRLAPQRRKHQLIAELERLSGKKVTLHDAA

SEQ ID NO: 307242 - protein, 388 aa, unidentified
MAKTIRIGIDTSKSVFQLHAVDEAEKPVLRKQLRRSQMLEFFSKLEPTKIGLEACGASHYWARELTGLGHQVLLVPPQYAKKYVKRNKNDAADAEAICEAMSRPTMRFVPVKTAEQQAALMLVGTREALIRRRTQLSNSIRGYAAEFGLVAAKGLDKIEPLLARIAADTALPSLAKEMFATLGKEYERLKADIGQIDAKQMAWHKGNECSRRLVKVPAIGPITASVMVMKVPDPGAFGSGRDFSAWIGLTPKDHSTAGKKRLGVITRAGDDYLRSLLVAGATSVIKQVLAGKRQPSPWLAALLGRKPVKLAAVALANKNARVAWKLMISGEHYDPSRYHAGEAAELGAREVRAPALCTGSGSRTSLERRGKSLGQRSKSPAKTTMANA

SEQ ID NO: 307243 - protein, 354 aa, unidentified
MRIIGCDFHSRYQQIAMLDTETGEVVERRLEHENGEARAFYASLPRPVRVGIEATGYTQWFERLLQELRHELWVGDAAEIRARAVRKQKYDQRDAQHILGLMEQNNFPRIWMPSLSERDLRQLLIHRVRLVQWRTRIQNQLHAVAMGQGLCRKKKLWTTRGRQELESLPLDRWASRRRRELLELYDRLNQPIEELNQAVQREAHGNASAVRLMTHPGVGPLTSLAFVLTMGPASRFARGKKVASYLGLNPSENSSGGHRRTGAISKQGSSLLRWLLVEAGQTAARRDADLHRMYQRVKYRRGSQIAKVAVARKLAVRLYWMLRNQSDYAPGKSAAVPMPGSSGSAVMSGSASGR

SEQ ID NO: 307244 - protein, 423 aa, unidentified
MEVIHERVAGLDVHKDSVVACVRIMSGGKAKRECRTFGTTTAELEALRDWITSWECTLVAMEATGVYWLPIWKILLGGAFEMNIANARHIKAVPGRKTDMNDAMWIADLAAYGLIRASFVPDEEFHELRTLTRTRKQLVRDQTSHVQRIQKTLTEANIRLDSVISDIMGVNGRRMIEAIIEGVRDPGKLAALGDRRLKATRKELHDALHGRLTDHHRFLLKLHLDQHDALEKTIRVIDAEVERRIARLDKQAKPAETPLSRLIELLVSIPGVSYLSAITIISEIGSNMSRFPTAGHLIAWAGLCPGQNESAGKRKRSRLRKGAPWLKTMLVQCAWAAKRQKNSYYRAQFYRLQARRGPQKAICAVAASILTAIYHILKDGVPHQDLGIDYFDKRKPEAKVKRLVAQIAKLGFEATLHPIAKAA

SEQ ID NO: 307245 - protein, 422 aa, unidentified
MLQEIQDHEEIIARVAALDIGKAELVCCLRLPGPGGSGRRVQEVSTYSTMTRSLQGLADRLRELGVTRVVMEATSDYWKPPYYLLEAHGFEVWLVNAKDVKHLPGRPKTDRLDAVWLCKVAERQMLRPSFVPPKPIRRLRDLTRYRVALVTDVGAEKNRVEKLLEDAQIKLSVVASDIFGVSGRDMMAALVTGERDPKVLAQLARTRMRVRIPQLEEAFVGHFDDHHAFLLTQMLDRIDAMTANIDTLDARIEEQIAPFADAVARLDQIPGVGATAAAVIIAEVGVDMTRFPTPAHLASWARFAPGVKESAGRKKGNGATGHGNRYLARVLGEAAVSASKTDTFLGERYRRIARRRGKKKAIVAVGRSILVIAWHLLSNPDTLFHDLGSDYYENRNGTRAATLNHVRRLQALGYRVTLEPVA

SEQ ID NO: 307246 - protein, 441 aa, unidentified
MGSYAGVDWASEKHDVLVADAAGEELLAATFAHDEQGLRSLCRQLVRLGVELVAVERPDGLLVERLLDAGLRVLALHPNQVAAARDRFRVSGGKSDRFDAFVLCELARTDQHRFRVLEPDSDETKALRALTRAREDLVGTRTALTNQLRAELERFWPGPLGLFTDLNSQISLAFLERYPSPADARGLGEARLRSFLERERYSGRQEPAQLLAKLRRAAHGRVGELELATRRRLVLTSVAMIKAVNQQIKELERQIAAAIRAHPDGAIFLSLFKQRYSVITAAELLAEIGDCRGRYPSRDALAGDAGQSAVAIESGKRKAACFRWGCNKRLRSAFCTLADSTRHWHPWAQDLYAQARARGHDHPRALRTLGRAWCRIVWQCWQDGVPYDPARHRALQRHVTVTIPTSSGPAPDLAATQRMAGAAVTRRAARRDERAALDRQP

SEQ ID NO: 307247 - protein, 335 aa, unidentified
MQIYGIDLAKEKFDVSFFDLTSKKVSNQPSHKVVKNNFKSIGRFLETLPSDAVLVAEHTGVYGDTLLKCCMDSNVKIAFVGGYVIHRYRATPDRAKTDVLDCALLREFGERYPDKLKYRKFPEEALYELRQLARHREMLVEQRKQLMTADKSEDCRPIRSLAVKQSMNRIKEMLDTEIAETEKEMLKVINGHDSIHHNYEIVKSVNGVGLVTAVELLVKTDNFTKITTARQYSAYAGTAPYEKSSGKMDKGAHISKIGNRRSKTLLYICAESARLHNKEIKLYYERRTLIDKKPRHYVLNAIANKLLRIIFTLVEKGEVYDVNYIRQDPRLVKHN

SEQ ID NO: 307248 - protein, 373 aa, unidentified
MKESIRFVGLDVHAATIAVAVAEADGEVRSLGIIPNTPEAIRRLLKKLGRGAQLRVCYEAGPTGYVVYWQLTQLGIPCEVVAPTLIPVRPGDRVKTDRRDAMKLARSYRSGDLTAVWVPDAAHEALRDLVRAREAAKRDQLRARHRLGQFLLRHGRRPPAHQTAWGVKHRAWLETVRFDEPAQAATLLDYVTEVDHATERIVRLDRAIATAAAAAPAALRALIAGLQALRGVAKVGAVTLAAELGTLTRFARPRQLMGYSGAVASEHSSGPRTRRAGITKTGNAHVRRIIIEAAWAYRHRPSLGGTLRTRQAGLSAEVTAIAWKAQHRLHTRYQRLLAKGKPKPQVVTAVARELLGFIWAIGVHIEQELRRAA

SEQ ID NO: 307249 - protein, 390 aa, unidentified
MLRKNIVQTLDAATSWKVFGLDLAKHDLAVVAIPADGSDVQYVKRYSYADFLEFTAQIPSATMVFEPGNGANHFALRLQAQGHTPKMVSGASVKSWITLHMSGQKTDLNDAYALARLSEDPDLKTVRIKSVDQNRLQSLQAMRKQLVEQRTKTIVSIKGIFQCWGILFKKDSRSLKKFKEAANNNKELLGEEVVEAMILQIDRIADLDKDIKHVEELLKKVTMQDPRAQPMLDIPCVGLQTVSRLCAIMGDIKDFETPRSFVAFIGLVPKNMISGNKTTTPSGYEQVGQGKVNRRGDKMARSLIIQCASSMYMNFHKDNFPECALKDWIQKQKDAHKPYGKIMVSLAAKLLRIIYAVLKHGEAFGYEKAGISRSALAALKAAQPAEVGNA

SEQ ID NO: 307250 - protein, 349 aa, unidentified
MSMYVGMDVHRKRSQIAIIDAAGDQQRNRNVPNDPAELTPILATLAAGTPVAFEAAYGWGWLVELLEELGLEPHLVHPSRCKAIASARLKNDKVDARTLAQLLRADLLPEAWIAPQPVRDLRALLRHRASLVRLSTTLKNRAHAVLADRGIRERPSLWTVPGRAWLATLDLPGTQRAIVDDCCTLLDALTAPIARLEGEIGKLAKPDPRVAALMALPGIGQLTAMTLVAEIGDISRFPSARKLCAWAGLTPAVRNSDRKVRHGHITKQGSVWVRWILQEAAQRGQDPAAVRPHLRPDRPPPRQADRHRGNRPAAAGPLVPHPHRAGGAHHRGGHHRARSHFRMSLQYGR

SEQ ID NO: 307251 - protein, 458 aa, unidentified
MLHCKGYCGLVFNPYHTMVYERLQPQSLCKFVDQLDTARRFMWNEVTSAKSSVVPSSIESILRRRYAMICVGIDVAKDNHDCFIMSLDGEVLNDVFTIPNSMDGFNDLFQKIRNTSGTLSKVKVGLEATGHYSYNLLGFLLDKGLATFVINPLHTALYRKSLSLRKTKTDKVDARTIAAMLMSDVNLKSYTDTAYHNEELKSLTRYRFDKVKERAKLKSSVSRLVSILFPELEALVPTLHLASVYALLSEYPGAQQIADAHLTHLKTILYDASRGHYDRDTAIAIRDAARHSIGSRMPAKSLELRHTIKLIGELSTEIDEIEAAIKAIMDEIGSPILTIPGISYRMGAMILAEIGDFSRFDSPDKILAYAGLSPSTYQSGQITSSYSHMEKRGSRYLRYALFNATKYVCHWEPTFATYLAKKRSEGKHYNVAVSHAAKKLVRLIYALEKSGQSFTRAV

SEQ ID NO: 307252 - protein, 463 aa, unidentified
MAQKKFKKSADRKEKVIEGLPIMSRNRAGGDLGSESHWICAPTAEGSEREIAEFGCTTAELQRMAEWLKQRKVESIAIESTGVYWIPVHEVLEAAGLEVLLVNTRQLSQVPGRDKKSDPEDCQWIQRLHSCGLLRGSYRPKEEICKLRTLMRDKANLVSEAGDWIRRIQKNLDQMNVRVHRAVSDVHGVTGMAMIKAIVAGERDPNKLAQLRDGRCHKSEEEMVEQLTGHWREDHLFSLGQSVKMYETIQERIGDYNKEILRKLAEMERSELHGKQAADLNNKNKARMIRQRGQDQMRQAFYRMSGVDLATIDAIGVEALAVVLSEYGPDLSRFPDEKQFASHVMLVPRKPTSGGKPVKKHQRKQTSSRTAAVLRMAALSQRHANTALGAMYRRIKRNKGADIADFATARKLAHLIYRALRWGQPYVDEGVEAYEERFRQSQINTLKARAREIGAQLVMPASA

SEQ ID NO: 307253 - protein, 344 aa, unidentified
MANLFVGVDVSKAELVCRVLDEKGQERGQGTFRNGPSGFRKIRQFLLELDGEGTFFVAMEATGVYYRNFVRFVFRSNDRFVPAVFNPASVKAFAQSRLSRTKTDGQDALFIARYGLELFRDGTFHPWRPEDPSVAQLRQLVTRRGQLVAARSLAINQRHTLREDEQTMPYVLESVERELSHLKEQIEEIDRMIADHMKRHDNLREDRELLTSIPGIGDTTAASWLAHLGDLSRFDKPSQIVAHIGIAPQERQSGSSVRGKPRICRTGLKEVRKALFFPVIVAATRTDSVLKDYYQHLLARGKQKKVALIACMNKLIRIIWAILKSRKPYDPCFAAPSLETQPKG

SEQ ID NO: 307254 - protein, 353 aa, unidentified
MSKAKYVGMDVHKATIVIVVLNAVGQVVMQTIIATDAQVIREFFQGLSGTVTVALEEGTQSAWLYALLRPLVTEVVVCNPRYNKLIETGNKGDLIDAEKLASLLRLGALKAVYKGNPEQRQLKDLARAYQNLVSDATRVMNRIKAIYRGRGLKCDGHHIYKPEQRQAWLERLEEDGARFRSRLLFEQLEQLQALRRAAKQELLTQGKRQPEYRILCGLPGIGPLRASVLLAFVGTPHRFRTKRQFWPYCGLAVITRSSADHQLVNGTISQRRTRVATRGLNPMHVPELKQVFKDAALSAARREPCQSWYQARIEKGMRPEMARLSLARRLAAVTLTLWQRQEPFDADKFSTLI

SEQ ID NO: 307255 - protein, 389 aa, unidentified
MNGQTDFTVKAEPEDFKNTLFLAMELSRATWLVATFAPRLGDKISVHAIPGGDTKRLLELIGRLQAKLRGKGVSRVRTVCCYEAGYDGFWLHRVLVNHGIENHVLDAASLPIDRRAKRIKTDNIDAKRLLRAIVGFVQGDPQSCRVVRAPTPEEEDARRLHRERQRLVRERTGHLNRIKALLITHGIRALRITDAKWCERLAKMQTGDGRPIPARLKIEIEREWKRLKMVAEQVREVEAERDRPVKGGEPSGDACTEKMRRLVKLHGIGAEFATVLTREVFYRPFQNRRQVASYVGLTPAPYDSGDTKHDQGINKAGNTRARVIAVQMAWLWLRYQSKSELSLWYYSRVGDLKGRVRRIMIIALARKLVIALWRYVETGKVPTGAIVAA

SEQ ID NO: 307256 - protein, 317 aa, unidentified
MTESVRVNVGIDVSKDFLDVHVGDMALRRVPNRSSGLSVLKRILSRYTVSLVLLESSGGYENLAVTYFQSLGYDVCAINPRQARDFARSMGRLAKTDKIDAQMLCRLADVIDASPERARFVKPLTDERRQRLVSMVRRRRQLCDLMIAERNRRAKTDAYGSESISTVLDFLTDEVARIDRDIAAHVGSCFSDISSLLQSFTGIGPVTASTLLGELPELGKLNRRQITALVGVAPFNRDSGYMRGRRRISGGRSGVRNVLFMAALSAVRFNPVLKAFFARLVSAGKPKKVALVACMRRMVCILNAMLRDGSRFEVSHT

SEQ ID NO: 307257 - protein, 500 aa, unidentified
MKTNHSKPAAKAVSPDKVAVPAQRRQRRKKTLNRRDAVLDGLEQINLHAAGIDVGAGENFVCVPRPSVKAGESPVRSFGVFTQDQDALVEWLKACQVTTVAMEATGIYWMSLFDKIEAAGMEVILVDPHSVRQVPGRKSDVMDCQWLQQLHTYGLLRGAFRPEASVRRLRVLCRHRADLVCEGASHLQQAQKALVQMNVQLHWVVSDINGETGLRIIDAILAGQRDPAGLAKLRDPRIKKSTVPQMEAGLTGHYTEEHLFALRQNMEAWRFFQRQLAECDLQIEVALKAMASAEKAGVPPLPAKLVPAAVPGSEGAKKKRARPLHGNNALRLDFSEQMRRICGVDLMKVCGLNLLSVLMIVAEIGVDMSRWRSAKAFSSWLGLCPGTKISGGKTLSRRTRHVVNRASILLRLAALAAGQTDTWVGRFYRRKRAHLGAPKAITATAHKLACVIHHMLKYQEEFLPLDVAIYDLKAQEHRMRYLRKQAQALGFELVARKEAA

SEQ ID NO: 307258 - protein, 412 aa, unidentified
MKADMEVVYERACGIDVHKKVLVVCLIMGQRKAETRTYGTLTKNLREMVAWLKEEKCQMVAMESTGSYWKPLYNIFELEGIEAMVVNAQHMKSIPGRKTDVNDAQWIAKLLRHGLLRASFIPDKEQREYRELTRYRNSRIEERAREINRLQKMLEGANIKLSSMVSNIIGQSGSNLIKLAVRYKELTLDQVADVRSDRCKSSAQELFDSLTGIISPLQRELFSEVLQIIEEQTQQIERIETMIQKYTTESYDTAAKAIDEIPGVGRSSAEQIIAEIGTDMSRFPTANHLCSWAGICPGNNESAGKRKRGKTCKGNKTLKKTLVQCATSAIKNKESFFNAQYQRLVVRLGGKKAIVAVGHSMLIAIYHVLSGKAYRDLGGEYYTQFNREKKIRSHLRHLIKLGWEPPCPAVAS

SEQ ID NO: 307259 - protein, 343 aa, unidentified
MHYIGMDCHITTLDFVVVDEAGKVTKTGKVVTSAKNFMEFIKSVRQPRAVYMEEGTLAAWALEVCVRFGEKLVITDPRKNHWIGSSGQKDDPIDALKLAQLARGGYIKEIHHPVGQRRRFRELMTAYHDTNRSITRIKNKIKAKFRQNGIQCTGQTVYSKVHREEWRRKLPQDPTLLVILDSLWLQMDQTEQTERNILSTAKAQGKQYPEIRLFEEIPGIGFISAATISAILETPHRFADKRKVWMYAGLGIVRRSSGGKLYTEKLTKEYNRLLKYTAKQAAQAAIQAKDNPFRRTYLEMTLIKGIVPHRAILTIARDILSTMWAMWRNGEKYNPSIDKKVKT

SEQ ID NO: 307260 - protein, 443 aa, unidentified
MALMVEARVASAVFLFSEIIAEKAMGLKPLYRCVVGMDVHQAKVTVCVLHEDGDGVLQVELREFGGFKRDRREMAEWIATFDPEEVVMESTGIYWKSPYAALERCGICASVVNARHVKQVPGRKTDIGDAQWLAIFARSGLLRGGFVPPANFRELRLTSRQMQKLTGILAAEKNRLHKVLTDAGIRLPVVVSDIHGQSARAMVKGLIAGESPEQVLTYASKRLKASEEELLDALAGELTDEHRFVLGELMDHIEDLQRRIARFSEHLLQGLAPQQGLLQALQTIPGLDERGAAMLLVEIGDDMDAFGSGEKLASWAGVCPGNHESAGKRKSGKKRKGNPYVRRILCEAANAAARTRSALAELFKSLLIRRGRKRAIFALAHKILKIVFVLISRGDYYRDATVNYEAISVERNAPRWMRMLRKYGYLGAASGTAAASRPQPALP

SEQ ID NO: 307261 - protein, 414 aa, unidentified
MVEIVNKACGLDIHKRFSIATILSRSGGKKQQRFSRDEEGILALKNWVISEQCDVVACESTSDFWVPIYDSLIRHLPVIVGNARDMKAFTHKKTDKIDSEFIAQLALNNMIQPSRVFAKNQREFRSCIRLRIKLVEKRTDIKNEAHAILASEMLHLKGVLTDIFGKSGIVILSGISSGKTIDQIMESLAPNVRKKSIQIRDILDREISPSAAFRLQICLKLIKHLDDEIEVLEKEIFNYAYSNYSHEMGILMSVPGIGELSASILIGEIGNFKDFSSGNKLASWVGIVPNVYQSADKFYNGRITKRGSKVARWILTQIANAAARKKNSKLKEFFKRKKKSIGHAKAIIALARKIATIIWHLIINDEMYEDGTGYEKGETQKRKIVETEIFSVDERIRILSGIIAIMGKEEGEST

SEQ ID NO: 307262 - protein, 302 aa, unidentified
MNGIGIDVCKAMLDVAVHHGPFARFHNTPAGHRKLVSWLAAQQAGQIVLEASGGYEQRLLDTLFEAGHRVVRANAHRCHAFAAAIGLSAKTDRLDATNLACMAAKLELRAYRPMEPWRRRLREFVRARQQLMGLAISAQNQLEQVTNAALRRTLQANIAQLKKTCARLDAQIAEQVGQQPQLEAMRAFKGVGATLQAVMASYLPELGTLSGKAIAKLVGVAPIARDSGTLRGIRRICGGRVEVRNVLYMACLSAIQHEPRIREFYRALRARGKPGKVAVVAAMRKMLVILNARARDAQAATT

SEQ ID NO: 307263 - protein, 346 aa, unidentified
MPIVGGLDIHRKQITFDYLDTETGQVCRGQVSPADRAHLRAWLARFAGRDDVAFAAEGCTGWRYVAEELAAAGITVHLAEPADTAFARGRKRHAKTDKTDCRHLRTLLAEGRLPECWIPPGHILESRALLETYHDLRREHTAWVQRIRAVLFHQGAPALGEGALRGEQGLAALRAAAAAHLSPAGQLQVATALEVLDALEARLHELRHQLLDAARHLAGAKVLAGRLYGVGPVTALAMTCWLGGEGRFSSSRKAVRFAGLDVTVYSSDRKGSPGRLPRQGPPVLRWALYEAGKTHARSSAPDHRYYAQVKERCNGKRAALSEARKILRQACHILTELGDDALVLAA

SEQ ID NO: 307264 - protein, 342 aa, unidentified
MRTEVFTGIDISKPRLDVFNLATGEVLEFANTPSGIQAFVKFAKMAKPTLLVCESTGGLKQPLLLGCSEAKLPLAVVNPRQVRDFSRRTGPVGASMSKTAMGKHAKTDAIDAVMLAEFAIRMRPEITTPAPEAMSALEAIVTRRSQILEMLTMERNRLGSTRDDSARASLEAVIAFLESQVEGMNAQMFELVQANPELRALDTLLRSVPGVGPVVSATLLSSLPELAGSSRESISALVGVAPMNHDSGQAREVPLCPRRGSHRGVRFVRGGRANVRNVLLMSVQSEVRWNPALRVVYDRLVGAGKAKKVALVACMRKLLVILNAIVHDRKPWVDMTQLAVGT

SEQ ID NO: 307265 - protein, 386 aa, unidentified
MKAGSSRLAERGVIKSHVQPTNRAYQCEWCPNSVQEDPDVKILAIDVAQQKSVAGLYTSTSGQIGYRTVPTTPQALHELILETSPDRIVIEVGPQAGWICDLVRAMEIELQVANPCHEAWRWRKVKSKTDRKDALKLARLSAMNQLPLVHVPSPEVRQWRELIQYRSSLVARRTAVKNSIRAILIRRGLTMPGGKSGWTKRSLEQLHELATDDDGASWRTILAEELRQLEQVQDAITRIERELDRTANADHRVRQLQSIPGVGPRLSETIVAVLDDPHRFRRGREVASYVGLTPRQFQSGTMDRQGRITGAGHRLLRSLLVQVAWLGVRTNPWMRAVYERVCSGSATRRKIAIVAVARRLLIRCWAMLRDGTRWKEPAQAVLRLAA

SEQ ID NO: 307266 - protein, 350 aa, unidentified
MRKPQFYVGIDIASTSFFAAAGRNNKGKWQLAIKPKEFENEYDSLPKFLSWLQENQILPNNSIVCMEATGVYNEILAHFLFINQYRLSIQSPLDVKRAFKPIGHKTDPVDSCQIAEYAYRFYDELNQWRPREEILEQIKTLLATREQFIKQKTAQKNALHAIKRKVVRTPLAEKLHEDGILRLEENIKAIENEIERLIDQDPTYKQMIGLLMSIPGIGFMLASHLLIVFKSSPEPFNARKMAAFIGICPYQHRSGSSVNRPASSRHYGPPGLRRLLYLAAMSVRMHNPYFRQYFARKVLDGKPKKLVLNNIANKLLRIVCAVARTRTPFIPGYRSVHPRLLVCKKVLTMS

SEQ ID NO: 307267 - protein, 363 aa, unidentified
MDRPPISQDSIKSAASAAARVYEVRLERAAHTNSPLLKHERRFRMHCIGVDVSKQELVTFDGRTERIFPNDRGLPEFRRFVKRAKDVFIVFEPTSTYSRKLETLCRTNHILCCQLNPRVVPHLRQVGRGRSKTDSSDAELLYRYGIERGHNEASELSRDSLSESIQARLACYRVAQKARVAYQGLHEALENDPATPTTLLAEIKAEISELKNREERYLVAAQRNAEEDEQMGRQLIALLSIPGIGPITALTLLALFRKYPAATRSQIVALAGLDPIQFQSGTSVHGKTRISKRGNRELRKRLYQATLSAARYNPSVKALHQRLKEQGKPDKVARIAAARKLLLIAHAIYKSGEEFRSPTKEVT

SEQ ID NO: 307268 - protein, 333 aa, unidentified
MKSPIAIAAAALGIDIAKLKFDVCLIKPNGKAKHKVFVNTRHGFQQLIRWLDSHQVTNLHACLEATGTYGEPLALFLFEAGRLVSLVNPAAVRAFANAGLSRTKTDKADAELIARFCLAQQPKAWQPPAPEVRQLQALVRRLESLVEMRVAEENRLSSGVSAAAVRQSLEEHIAYLIEQIKQTEALIRQHINHHPDLKEQSDLLDSIPGIGETTAALLLAEIVNIKQYTSARQVAAYAGLVPRERRSGTSVRGRVCLSKIGNARLRKALYFPAITALRCSDFFKAWAEPLRTRGKSKMSVIGAAMRKLIHLAYGVIKTGKPFDPNWAKAIEIA

SEQ ID NO: 307269 - protein, 470 aa, unidentified
MAAVMIGVDPHKASHTAVVISAAEEPLGELRVRACVAQAERLLAWAAAWPQRTWAVEGAGGTGHLLAQQLVSAGERVLDVQPKLGARVRLLAAGDVNKNDPNDARSVAVAALRSAGVREVRADDHAAVLKIWSKRYRDLGRSRTQVVCRLHAVLGELIPGGVPKAITAARAARVLKAIRAEGAVQAARWELAAAFLEDLRRIDAGIRETRKKLAAAVAAAGTSLTGLFGVGPVIAAAVIGDVRDVSRFPGRDHFAAYNGTAPIEVSSGRRKVYRLSRRGNRRLNHAIHMAAITQIRHRRSQGRAYYDKKLAEGKTPKEALRALKRQVSNAIFACLQADARRAAARLGGPGGQQGNDSAASAAGSHPRHRLFGQATPGPGHHPTTVTGGPPPGPARSRDRAGHSSIAATLPPATPQVQVERPQRSEDERPGGAARRRPHSAARKAAGQTAQVKTQRPKGTSQAAERTDGTS

SEQ ID NO: 307270 - protein, 411 aa, unidentified
MSVASQAGPAPAFAGIDWAENSHVACLIDGEGEVTERVTVSHDKAGIARLVVVLTGREVAGVGIERGDGPLVTALLAAGVPVFMIAPSQVKNLRGRYGSAGNKDDRFDAFVLADVVRTDRRRLNPLRPDRADTQTLRALVRARKDLVGHRLAVASQLRAHLLTVLPGVVGLFSELDAVTSRAFIAEFGTQDAIDALTAERLQPWLAERHYHVKTAAVLLHRLREAAPGITGAAGQALAGITQAYLAALNTVMAQIEALETQIADALAAHPDAAIFTSLPRAGTVRAARLLAEIGDCRGRFPTAASLAGLAGVTPSTRQSGHTRVVAFRWAVDKQLRDAVCNFAGDSRLSNAWAADLYQRARARGKNHNHAVRILARAWLNVIWKCWTTNTTYQPAEHRALQHLLTHHQPTG

SEQ ID NO: 307271 - protein, 391 aa, unidentified
MIYVGIDIAKLNHFAAAVSSDGEILIEPFKFTNDADGFQLLVSKLESFDKNSIIIGLESTAHYGDNLVRYLVAGNYKVCVLNPIKTCQMRKNNVRKTKTDKVDTFVIAKTLMMQDDLRFITFFDLDMMDLKALGRFRQKTIKQRTRLKIQLTTYVDQVFPEIQYFFKSGLHQNAVYALLKEAPSPKEIASMHMTHLANLLKVNSHGHFTKEQAKELRVLAQKSVGANDSAISIQITQTIQQIELLDSQLEKIEAEMTDIMRFNDSVIMTIPGIGYINGGMILGEIGDIHRFSNPSKLLAFAGCSPSTYQSGQIYSTHAKMEKRGSRYLRWALLNAAKFVCKWEPTFAIYLRKKREEGKHYNVAVSHAAKKLVRLLYHLETTGEKYIPQTLS

SEQ ID NO: 307272 - protein, 365 aa, unidentified
MIGNEEYRNESSGTVAEVVLGVDTHLDVHLAVVLDHLGRRLGTFSVPTTKNGYESLLARAESFGPVRCAGVEGTSSYGAGLARHLRAMAIPVMEVERPKRRHLRRKGKSDPIDAEAAARAVLAGEAAGVAKSGDGRVEMIRTLRSARHSAVKARSQAANQLQGFVVTAPEELRHRLRELTTKKLVTVAARMRPGKDLDDVEAATKFALRSVARRYEALSREIAELDVQLDRLVAEAAPELISLPAIGTDHAATLLLTVGDNPERLGSEASFASLCGVSPVEASSGKVVRHRLNRGGNRDANRALHLICVVRMRIDERTRRYVARRTAEGKSRREIMRCLKRYIAREVYRVLVSATSPTQIGVSTT

SEQ ID NO: 307273 - protein, 355 aa, unidentified
MNDAKYIGMDVHQATISAAVRDSTGDLVMEAIFETKAETILQFIRGLRGNLSVTFEEGTWAAWLCDLLQPHVARVLACDPRKNALLKAGNKSDRIDARKLSELLYLNKLNPVYHGEAGIRTLKELARSYITMTRDLTRVMSRLKAIYRSWGIPCAGQQVYAPRYRAEWLAKISEAGVRRRGELYYQQFDALAALRQGLRRELLAEGRKHLNTRLLQQIPSIGPIRAVLLLALMQTPNRFRTKRQLWAYCGLALRTYGSGEYRIVGGQFKRAKKVLAVRGLNLNHNHDLKNIFKGAATRAASTAGPFQDVYQACVARGVKPHLARLTLARKIAAITLLVWKKGVRFDAEHLKQQAA

SEQ ID NO: 307274 - protein, 392 aa, unidentified
MYIIGIDIGKNHHEASIVSPEGKQIGHSLRFATTHKGADSLMSFIFNNIGNSSCIFGMEATGHYWYPIYSFLKARGYTIYVINPIQSDSLRKMYIWQTKNDSIDSFLIAEVIRFGQFTTTSMADENILAMRQLCRYRDSVISSRTEIKLRISTIMEQIFPEYEKQFSSLWLSTSMGILEKYLTPENIENAPIDELFEIIKDKSHNKLTMKKAISIREAAADTFGIKIAQDAFSFQLKQLIDRMNFLDKQIEALDCQILEYYEKFDCYLHTIPGIGMIAAATILAEIGDINRFKSSSALVAFAGIDPTVRQSGEFSSTHNHMSKRGSPYLRHAIFLAATTCSFHNSPLNAYYKKKRDQGKHHLTATGAVARKLTSVIYAVLRDSKPYEPKSFC

SEQ ID NO: 307275 - protein, 361 aa, unidentified
MKTNVLEYVCQEQDSSNRAAVETAVTVKLGLDVHAADIVVCRQDGGQLPKPSRRLSWDQLLRFAQELAASGARVVSCYEAGPTGYGLHRRLESLGVRNLVVVPQRWSRDGARVKTDKRDARELCDALDRYLRGNTGAFSIVRVPTVEQEQQRSIGRQRGRLLKERQRCVVRGHGLMLAQGIQAPPEWWRPRQWEGLREQLPPWVREQVADWQAQACRLDAEVERWSDRVEEQCRGPVPKGMGVLSTSLISMEVLDWSRFKNRRQVASYTGLCPSEASTGRKRRQGCINKHGNPRLRHQLVEAVWRLMVHQKQYPPVKKLLATPSGRARKRLAVAAARRLAIDLWRIQTGRCSAEKLGLKLR

SEQ ID NO: 307276 - protein, 413 aa, unidentified
MDVLCERCAGVDVSKRDAKVCVRVTGPGGKVSVETTTWTSMTNQVRELAQYLLAEHVQLVIIEATSDYWRQFYFLLEDAGLTVELVNARDARNLPGRKTDVSDAAWLAQLGAYGLVRGCFVPPADIRRIRDLTRARTAITDERSREIQRLEKMLEDSGIKLSSVATDITGASGRAMLEALISGQDDPEVLADLAKTRMRPKIPALIEALTGRFNDHHAFMARLFLDRIDAHTKDLQRVDARIEELMAPFQGARKLLTSIPGVSGLVADVIIAETGADMSVFATPGHLASWGGTAPGANESAGRVKSAKTRPGNRYLKRALGTAAMAVSRSQTTYLGAKYRRIKSRRGPMKALVAVEHSILTAAWHMLTTGEFYRDPGPDYFAKRQPARTRARAVQQLEELGYTVTLEPHPQAS

SEQ ID NO: 307277 - protein, 453 aa, unidentified
MARKHKKDSKANNATLPVMRPDAGGIDIGATEIFVAVPADRAAENVRSFPTFTQDLYALADWLKQCGVKTVAMESTGVYWIPLFQILEDCGLEVCLVNARHVKNVPGRRTDVCDCQWLQFLHSVGLLRASYRPEQEVCAIRSLLRHRESLVQMAATHVHHMQKALDQMNLQLHHVISDVTGQTGLAIVEAILAGERNPYVLAKLRHDRIKASEAVIAKSLVGDYRPEHLFTLRQSLVAYHHYGKLIDDCEREIRRFLEEFKPPHLPDAFQGESQKAQPPTASTDGVLRSELRRVFGIDLTKIPGIRIGIAQTLFGEIGPDFTKFRSASAFASWMGLCPDNEISGGKVLGVGTRKVKCRAATALRMAAQSLHHSKSALGDFYRRMRAKLGAPKAITAAAHKLARIIFHLVTTGQEFDDSRFAADQLRHQKRQEAKLRAKAKALGFQLIPIEQTG

SEQ ID NO: 307278 - protein, 343 aa, unidentified
MKITTIGLDLAKNVFQVHGVDERGKAVLRKRLRRDQVAAFFANLPRCLVGMEACASAHHWARTIEQWGHVVKLMAPQFVKPYVKTNKNDVADAEAICEAVSRPQMRFVPIKNAEQQAVLALHRARQAFVKARTAQANQIRGLLGEYGIILPQGMSHIAKRLPAILEDGENELPGSFRALLCRLGEHLKELDRQVGELEVQIHSWHRENEASRRLEQIPGIGPIAASALVATIGDARSFKNARQLAAWLGLVPRQHSSGGKPLLLGISKRGDSYLRTLLILGARAVLRVVERKVSPVQSWLVQLTERRHTNVAAVALANKNARIVWALLAHDRYYQPDYSPSAF

SEQ ID NO: 307279 - protein, 351 aa, unidentified
MSHKTAATVALTIGIDTGKNTLHLIGLDDKGAIVLREKVARGRITARLANVPGCLIGIEAGMATHYVARELSALGHDVKQVPPAYAKPFRQGHKNDFRDAHAIAEAVQRPSTRCVPVKTDDQLDLQALHRVRSRLVGQRTAVINQIRGFLLEHGIAVRQGLRFLRQQLPDILAKRSDVLSPRMIRIMEDLSGDWRRLDERIEHVTEEIEVLAHGSESCRQLMTVPGIGPLIASAMVAAIGNGAAFAKGRDFAAWLGLVPKQMSTGDRTILGRISKRGNRYLRTMIMQGARVILLRPANWAKHSFGPWLTAAANRLHHNVLATALANKLARIAWTVLMQARSYEARVEPRTA

SEQ ID NO: 307280 - protein, 332 aa, unidentified
MKKNLFFIGIDVSKATLDIFIYGIKYSFIVDNSPQGFVILLETCCKITNCKKECLFFCFENTGKYSRMLSVFFDTNSLKFAMEPALRIKKSLGMTRGKNDKVDAQRIALYAYEKRDRLVPTKLPGLKIDQIKSLLSLREKLIKHRTAYKNGLTDLHDCYIEGENDLIKEVQQGLISNLNKELEKIEKQIYGIIKTDENMLKNFKLILSVKGIGKIIGFYLIAFTANFTLFASARAFACYAGIAPFEHSSGTVNGAPRVHPYANKQLKTLLNLAAQSLIQVRGECSQYYHHRVNDLGKSKMSTLNIIRNKIVFRVFAVVQRQTPYVDLYKFAA

SEQ ID NO: 307281 - protein, 344 aa, unidentified
MERMYVGVDYHQKTSYLAVMTEAGRVIKEGQVVNRKEAVAEFLAQAGRNGRSEAVLEATRNWTVMHDWLEEIVDEVHLAHPVKVKAIAEAKIKTDKIDARVLAHLLRTDLLPEAHVASPEAREVRSVLRQRMFLVRVRTMVKNRVVGLLDRYPELSEGRPCKEVFSREGKEWLKQISLKETDRRMVDEDLRLLEELEGHIDQSEGLVEKLAEGDWRVDLLQTIPGIGKFFSVLIAYEVDDIGRFAHEKKFFSYMGLIPSTYSSGGRTFHGRLTKQGNKYLRWALVEAVWPAIRTDRELRAYYERIKARSGANPAKVATARRLATIVYRVLSQRRSYRVSGSRLP

SEQ ID NO: 307282 - protein, 342 aa, unidentified
MAIVAGFDVHRAQITFDALDTATGELMRGRIDATPAAVARWVARFAGRRIDVAVEACTGWLFVCDALAAAGAVPHLAEPVETRALRGRKRRAKTDREDARWLRELLADGRLPEAWIPPEHVRQWRSRARLRHTLLNERTQWFQRIRATLFHHGIDGTPENLRTGHGRAFLQRLELPADARERIQIALAMIDAIDAQMAPLERELRQLARRQTGCRALMGLYGMGELTSLVTLCELGDVQRLSASRKAVRMAGIDIGVHRSDRRSRVGKLNRQGSPHLRWALYEAALAACRPSSPDHADYLALKARGLSHTRASLTIARKLARRSFHVLRELGPAALEPIRIS

SEQ ID NO: 307283 - protein, 432 aa, unidentified
MVAVMIGVDPHKASHTAVAIGATEEPLAELRVRASESQAERLLAWAQAWPERTWAVEGAGGVGHLLAQQLLAAGERVLDVPPKLAARVRLLQAGDTNKNDPNDARSVAVAALRSPGVREASRDDHAVVLKIWSKRYKDLGRTRTQVACRLHQVLCELIPGGVARQITAGQAARILESVTPADAVAVARCELAAEFTQDLRGIDAAIRDTRKKLAIAVRAAGTSLTGLFGVGPVIAAAVIGDVRAVSRFPGRDHFAAYNGTAPIEVSSGGRKIYRLSRRGNRRLNHAIHMAAVTQIRYPHSQGRAYYERKLAEGKTPKEALRCLKRQISDAIYACLQADARRAAGAKSPGGQRGNDSLTSAAGSHPQHRLFGKATPGPATHPTTPADAAGDPASAAFPWPPSRASGRPGPGPGKARPRSGARRASLTQPPASR

SEQ ID NO: 307284 - protein, 375 aa, unidentified
MREKLRFLGMDVHAETIAAAIAEPDGEVRSLGTIPNRMESVRKLLKKLGPVEKLRVCYEAGPTGYVLYWQLAELGVQCEVIAPSLVPMKAGDRVKTDRRDAERLARSYRSGDLTAVWVPDEGSEALRDLVRAREAAKQDELRARHRLGKFLLRSGQRPPTGVRSWTHLHLIWVSQIRFAQMAQEATRLDYLHEVEHMRERVLRLEQAIAEAVKLASPALQEVITDLQALRGIAHISAVTIAAELGQVSRFAGARELMGYCGVVPSENSSGERTRRGSITKTGNAHLRRIVVEAAWSYHRPPAIWAGLRKRQQSASEEAKEIAWKAQHRLHKRYARLAAAGKDKRKIVTAVGRELLGFIWAIGTKAEATVSQRIAA

SEQ ID NO: 307285 - protein, 335 aa, unidentified
MLYAAIDIHKRLFQAAVLDVETGETVERRFGATREELSDWAMPLQGKLAAVAIEATNGWRWVWRELSARGFDVRLVDPAQAKALRGRIKRAKTDRLDARWLCVLLAKEMLPESWLPPAEIQALRDQTRLRKALAEDRTRWAQRLHALLAHEGWPCQRARLLTVEGRRWVNALSLSPAARSQVERLLRLIEAVESELRSLETELRRFARSDRRCIALQTIYGVGPILACHLLAELGEASRFRRARQAVRAAGLDPVVDESGETRRRGRLAKHGAPALRWALVEAAQHAQRANSPDRGLYTQAATRVGGKRAVLTVARKIGRRAYHVLNELETQAAA

SEQ ID NO: 307286 - protein, 350 aa, unidentified
MLIIGCDYHPSFQQIAFVDTDTGELQERRLEHREEAEKFYRGLGVQGMRVRVGMEASGHARWFERLLGELNFELWIGDATEIARKRERKQKTDRQDAQHILRLLLKDDFPRIWIPSWENRDLRQLLWHRHRMVQARTRILNQLQAVALNEGLRSKKRLWREHGREQLESFRLAPWASRRRQDLLALLDRLNPTIAELSQAIEHEAEKFPEARWLMTHPGVGPLTALAFVLIIGRADRFQCGKQIASYLGLVPLEDSSGNRRRLGHITKQGSSMLRFLMVEASQVTVRSLPEWRSKYFHLMMRRGRKIAKVAMARRLAIRLYWMWRKGWDYEQVKKFGSHAGQLGTGDGVQ

SEQ ID NO: 307287 - protein, 340 aa, unidentified
MRRFEYNSRGVRKLIKYLTSLNPFIVSMEYTAGLERNLIFALQQHNIPCCCINPYNLKNFTKTMNVRAKTDLISAKLIAQYTKLYKTSPMQKIDKNLIYLKDLVKRHIQLVNILSSEKNRLSGSSLNKKHIMRFIKGVEKSIDENYEEIKKMVESNNEVKKKAEILKTMPGVGEYSSIVLAILLPELGYTTRRQISSLCGVAPYVNQSGKYKGKSYIRGGRKDVRNLVYMVTMAAIRYNPVIKDYYYSLISKGKPKKVAIVACMRKVICILNAMVRDNKVFMADYNKLQKKENKNESKIIEKVENQEKQNENIKQSEPLDFNKDLKDAVLVVKSDPNMIT

SEQ ID NO: 307288 - protein, 307 aa, unidentified
MPQTVIGCDLARGWIDTHALPTKVAVRVNNNPDSIARWAASLPTNSLVVFEATSGCDTFLITALCDRGLRFARVNPRQAREFARATGVLAKTDRVDARILADMGRLLPLEVTAPPHPDRARLSDFLRRRRQLVEMRKAEKVRRHSAGQPAILREIETMIALLDRRIVTMDRKIAALIEDSPELIEQAELLRAVPGIGPTVLATLLGELPELGTLCRRRIASLAGLAPHARESGTWRGTRRIWGGRRKVREALYIAALSASRRVPPLIAMRDRMKAAGKAPKTVLIAVARQLLVILNAMIRNRQPIRL

SEQ ID NO: 307289 - protein, 405 aa, unidentified
MYYVGVDIAKEKHYVCILDDAKELACKPFWIYSDILGLRELLKRLAELSLDMDDFIIGIESTGAFSENFYSYITDADYKVILLNSYQTSKYRDFSTLKKIKNDSIDAYVIAELLANGKYKASYISNEAYHDLTVLNRLKKSLDDKIKTIKREISTVVATVNPEIEKVFPNIFTKSAIAIIKAYPTTMDIQKATPEKLTKIFRHIKGNSFNLEKAKYLIELAKSSIYTGRANESRALMIKTNIKILELYIQERDEVEEQIQILIDNQLDDDSSNIENLKSIPGVSNKTVTAILGECGDLRRFESAKAFIGFLGLYPTLYQSGKSLSTGTLAKRGIPIAKHALYMAAVSSVRHNTELNKIFRDKVSAGKSKKEALIIIAKKLASIIYSLFKYDQPYNPNRVLIQHKR

SEQ ID NO: 307290 - protein, 343 aa, unidentified
MDIVVLGIDLGKNSCSLAGLDASGRVILRRRMRRSSVESFVKGLGRCIVAMEACCGAHHLGRVFAAQGHETRLMSPEYVRPYVKAQKNDELDAEVIAEAATRPTMRFVAVKSQYQSDVQALHRARERLVSERTALINHLRALLLERGIVAPQGRRKLQEELAVFADEDGIEALSPRIRLLIEDLRSEWRALDERIAAFDAEFVRMAREDEAVRRLTTIPGIGTINATALAAAVGNARAFRRGRDMAAWLGLTPRQMTTGGKPRLLGISKRGNRYLRKNLIHGARAVLPYLVERETPLGRWARGLLARAHKNIVVVALANKLARIAWAVLARGCTYEAAGEAAA

SEQ ID NO: 307291 - protein, 455 aa, unidentified
MKDLAKKKEVISNDEFRLAIIQQQSGAIDVGSTLMMVSYADQYGEHHLLETSAYTDDLEQLARTLQTAGVQKVAMEATGVYWMALYELLEHYAIEVTLVNPHHFKNVAGQKTDVKDCQWLHQLHAHGLLRASHIAPDVYRELKEYIHERNILQKHKSDTLNRIQRLLTQMNIKVQHLISDMEGVSGLLLLRGIADGINDAEQLLSLIDIRKLKADKTDLIRSLKGNYKKQYISILKNTLKQYDFYKAQMKQYEELIEEVLIKMLPDDGKYEGSKVKGKTSHVRKNQYTINVKEYLRLITGIDLTKIDGLDEISVLIIISITGIDMNKWPTANHFVSWLNLSPRPKKSGGKIIGYQQRFTKNEATQCFRLAAQSLWQNKGPLGQLFRRLSYQKGSKKAIKALARKLAVIFYCMLKNKREYEVNKLQIDSEKQTQIKIARLRKEAAKYGLSLEKSVA

SEQ ID NO: 307292 - protein, 371 aa, unidentified
MKKSISSSKDRFWVGIDDHAATMVVAVLGNEEVAPVERFTVGTDEKGQKELIKRLKALKGEVRIVYEAGPCGYGLQRRLTKAGFVCDVAAPSLTPQRAGQRVKTDRRDALKLAEMLRGKMLTMVTIPDIEREALRDLVRAREDAGEDLLRARNRLSGLLLRHGLQYREGNRWTRAYWRWINAIRLEQGHTQEALNNYITVVNSCNDRVEALTKLLKTASEEYPQVIGRYSALRGVDWLTAVTVYSEFGDLRRYGTASSFMSAVGLVPSEDSSGPRHRRGAITKTGNAHARRVLVEAAWHARRPLKVSETLKKRRKNVSAEAVRIAEKADGRLHQKFTRMIYRNKRSTVAAVAVARELAGFFWAIGQLSSNR

SEQ ID NO: 307293 - protein, 409 aa, unidentified
MQVLYPRCGGLDIHKKFVVVCVMHTHDDGSVEKEIRTFSTMTQDLLALGDWLHALGCTHIAMESTSSYWRPVYNLLEGHFELVVGNAYHMKTVPGRKTDVKDAEWIAELLRHGLIRASFIPAPAQRQLRDLTRYRTHVVEERARLTNRLQVVLEDANVKLASVVTDIRGVSARAILEALIAGETDPTTLAELARGRLRTKRELLAQAVVGRFTAHHAFMLTEQLSHLDYLEETLERISTEIAQRLHEEQAALELLDTVPGLGQRAAEILLAELGADLTRFPSAKHLASWAGMCPGNKESGGKRLSGKTRKANPWLRQVLIEIAHVASKTKDTYLAAQYRRIAARRGKKRALVAVGHSILVIVYHILTRRQPYQDLGATYFDERDRQRVEQRLVHRLERLGYVVNLQRAA

SEQ ID NO: 307294 - protein, 338 aa, unidentified
MKKYIGIDLHSNNSVVVVTDEEDRIIYQKRLANNLNEILAALAPHRDETVGVVVESTYNWYWLVDGLMDAGYQVHLANPSAIKKYEGLKYSGDYADAAYLAQLLRLELLPEGYIFPRELRAVRDLARKRMQLVRFRTTQILSIGGILVRETGGRMSCHKIKVMTTDTVEALGFTPEVTLAMESNRVVYEALQQQIELIEKRLETMVKLQPGYRLLKTIPGIGEILATIIMLEAGPMTRFANVGNFSSYCRCVDSLRESNGKKKGEGNTKNGNKYLAWAFMEAANFALRFCPEAKRFYERKKNRTNRIVALKSVAHKLARACYYILRDQQPFDVKRCFV

SEQ ID NO: 307295 - protein, 365 aa, unidentified
MSSLAASAGAIHLGMDTSKNTIVVAVLMPGEEVPVIDRMWNEEGSVRHLVGRFPDRAALRACYEAGPCGFELHRLLASMGVACEVVAPSLIPRRAGDRVKTDRRDAGRLARLHRAGELTAIRVPTEAEEAVRDLVRARAALLADRKRAQQRITAMLLRHGRAWRGTYWTAAHEQWLAAQRFGEPALASALAHYSAALDTRRAELEAVEDELAVWAARPPLAAAVARLGCYRGIAELNGLTLAAEVVDWRRFGSARAFMCFTGLVPAEYSSGERTRRGSITKAGSAAARTALIEAAWSYRFRPAIGVTLRRRQHDADPQTLARSWRAQRRLHTRYKAMTARGKPAAVAVTAMARELAGFAWAEMTS

SEQ ID NO: 307296 - protein, 367 aa, unidentified
MEKSSTVFVGMDVHKESIDITLAEAGGEVRRLGQIGGDRGSLRKMVRRQHSKGRKLVFVYEAGPCGFWIYREITALGHACMVVSPSLVPKRAGDHVKTDRRDSARLASLARAGELEAIHVPDIRDEAIRDLVRARDDAVIAQRRVRQQLKALLLRNDIRYVGRTSWTGAHRRWLSELKLPEPAQRIVFEEYVDAIVVATARIERLTRAIQTEVAGWRFAPVVGALQAMRGIQFVHAVTLIAELGDLTRFASARQLMGYLGLVPREDSSGEHRHQGSITKAGNSYARRALIEAAWAYRHPARVTRIIATRQTGIPKAVCDIAWRAQLRLSAKYRRMNARHVNHNKIVVALARELSGFVWAIGQSVKPQ

SEQ ID NO: 307297 - protein, 458 aa, unidentified
MKLLYRRCAGLDVHKSSVTVCVRRRVSGSSQVEMEEAVFATFTQDLRRLGAWLKQHKVKHVAMESTGVYWIPVWNALEGQSLSLTLVNPATVRALQGRKTDRIDARRIAEYMQYGLLGGSFVPPRAVRQWRELTRMRVHVQQDRNRAINRIARQLETVNIKLPSVASNIVGKSGRAILAALAAGRSTPEQMANQALSRLRDKRAALVLALDGKPDAHFRWMLSRLLRKLESLDMELAEIDAQLDQQMSEQADLIERLSTIPGVDRTTAQAVIAELGTDMSVFPDAAHLASWAGLCPGNAESAGKRFSGRTRKGDRYLRRVLVQSAWAAARTRNCFLRALFFRIAGKRGLKKAAVAVAHRVLTIIWRIIRDGGAYEERGGDYFDQRDPQRTARKLTRRLEHIGFEVEIKRRPIDPVPNDQAVPASVCGKCHRWHLAHCIHHNPRPLRNRRPPKSLESQR

SEQ ID NO: 307298 - protein, 315 aa, unidentified
MRSTITQSVGVDISKDALDVAVHPAGESFRIPNDPQGHRALIKKLKGFDIARIVFEATGAYHRLFQHALDAAGLPWVKVNPRQARRFAQAAGKLAKTDRCDALILARMGAALGLEPSAPLSQTVEAMKELVNARNALVKDRVAALNRQAITVSPLIKRQLAQRLRQVDSQIEAINKRLKSLRGADPDLGRRFDILVSTPGVGETTANALMAETPELGRLGHAQAASLAGLAPIAKDSGQAHGKRSICGGRPRARQALYMPALNAIRFNPQFKAKYQAMVKAGKPAKVAIVAIMRKLLILANALIRDQRKWSPPSP

SEQ ID NO: 307299 - protein, 412 aa, unidentified
MFYVGVDIAKRSHVACVMTEDNRLLVQPFAFPSSKDGFKKLLIHLQSLACCPSDIIIGMEATGLLFENLYRYLNALMYRVVLLNPYQTSKFREMDTMKRVKTDNIDAVMIAALIKSGRFSEGYVSGEQLQSLREFYRHRASLEDQLKAIKRQTSTLLTVVFPELEHVISDPFNVTGLTLLEKYPTARHYDYASSERILKTFRGIKGNNFNEDKANRLLALAKESIYSGVAKEARAVSIRTNVEHIRLLNKQIEHIDTAVMELFEGQEIPKSEQAQMRELIDNLRTIPGVGDRTILSLLAECGDLNRFHSPKALTGYLGLYPTLEQSGGSAKHGRLAKRGARLAKKAIYLAAIAAVRHNAQMQQVYRNYRSKGRAKKECIIIVARKLLQIIYILYTKNIPYDPSRVFVAQPTP

SEQ ID NO: 307300 - protein, 316 aa, unidentified
MKDPPSTVVGIDVAKKSFDVFVLSERTSCSLAYDEDGLEQLLRRLPAPAECLVVMEPTGGYERRLVAKLIEAGYQVAVVNARQVRDYAKSLGILAKTDRIDAKVIARFGEHARPRPLDKSRKNQDELDQLVARRRQLIDLRTRESNRLETTTSKLVRKSLKKMIGQLEKEIKQIAAEIANLIESDEQWSEKATLLKSVPGVGDVTAASLLAELPELGKLNRQEIAALVGLAPFNRDSGRFRGRRSIYGGRASVRKVLYMAAFVAKQFNPVIRAFAQRLEEAGKPFKVVVTACMRKLLVILNTMLKTNTFGNLKNAA

SEQ ID NO: 307301 - protein, 363 aa, unidentified
METYVGLDVHSKKSVFVISDARGQVTARGEVPTTPEGLGRLRTEYGLAAGTPIALETGTMAFYAARALQALELAPVVIDAHEVRLKAHRPMHKSDRRDAFELCDGLRRDIYRTRVHVPPPAIVELRETVSRRRHFVRVQTAQVNAVKRLLRAHGSGQACRTLTTDAAWTRLFGALPAGTALADFIADHHTVWRAARAQVTRLEARLVDQQRPLAASLARLQTVPGVGPIVALTALAVFSDVQRFPSAKHAASYVGIVPTTHQSGSRDRHGPLTKRGSGELRAMLCEAAHQARHRTSPLHPYFTTLCARQGYKRAVIALAHRLCRILFALLRDGTDFDARRLGIEEGPFTQTVTRRYRLKRLHR

SEQ ID NO: 307302 - protein, 421 aa, unidentified
MIEHETFTWFAAIDWGTEKHQACVVDVRGGIAGERAFSHDGAGLALLCDWILSIVGNAAIVAVAVEVPHGPVVDALLDRGLAVYAINPKQLDRLRDRFSVSGAKDDRRDAHVAADGLRTDRHLFRRLQIADPRLIQLREWSRLAEELQQERVRLSNRLYSQLWRYYPQMLGLSDDLAAGWVLDLWTMAPTPAKAMHLRKTSVAQLLKRNRIRRINAETVLRALREPAINVADGVAEAATIHIGSLITRLRVVGRELHDAVRKLDELCACLDEPSPTAAEHGGSGRHDVKILKSMPGIGKIILAILLAEASGPLSRRDYQALRTLSGVAPVTKQSGKSRIVVRRYAAHVRLRDAVYHWARVAIQHDPTSRSRYVALRQRGHSHGRAIRGVADRLLALACTLLQRQTVFDRDFSRAEELTAVP

SEQ ID NO: 307303 - protein, 455 aa, unidentified
MLRDAIGIDPDSKGCQCALVKPGECQTQQRGYLAIEEGMERFIRWVKKQGDVIVAIEGSNGLSKPMEKALRSAGIVFYSFKPSDVDKFRKAVLGQNKNNKKDAESTARYAMALEAQGKLENWRMVWSPDEELQSLTRSYAQRTKESTREVNRLWKLLRAASVDLYLALGGDHPDIDITENLLQHEGILALLAAKPDIYEWKTLSETDFLAVMGDYNYKGHDKLIRELKKVSRSFKPISQTISLMIKNSTEQIVLLKKQLTEIKRMIEKLTKDNKAVKTLVRYKGIGIMTASTLISEIVDIRRFVKEDNLASYAGLCKREYKTGNNEKEVPNCFFNRRLKNAFMTAARNYVLFNPDSHLAGYYRNLVKSGMKQTEARKRVARALVRVFFRDLYSLVEPDNSDNIKDEKRGKESDMANGLSRSDKDHSNISLSFPIENNTKEYGKIKVEKTKKAVLL

SEQ ID NO: 307304 - protein, 391 aa, unidentified
MIYVGIDIAKDKHDCVIVDDEGEILVDHFSFSNNLSGFELLIQNIHSVSHDFENIKIGLEATGHYSYNILGFLTENKYATYVLNPLHTNLYRKGLSLRKTKTDKVDAYVIALMIMSKQFLKSYSNLSYHNEDLKSLTRYRFDLVAQRAKLKQSVTRLINVLFPELESLVSGLHLKAIYALLSEYPNAHQIANAHLTKLTNLLHENSRGHFSKAFAIKLRETAQNSIGSNMSAKSFELKHTISRIQALNELIDETDTQIKHVLKQTESTILSIPGISHTLGAMIISEIGDMDRFDSPDKILAYAGLSPSTYQSGKLDSAYAKMEKRGSKYLRYALFNAAKFVCNWDPTFGAYLTKKRDEGKHYNVAISHVTKKLVRLIFALHKSGQTYIPKA

SEQ ID NO: 307305 - protein, 348 aa, unidentified
MEAYDGPQIVGMDLHRRRSVLVRMTEDGRKLSTARITNSPARLAAEIKRAGPHPKVVLEACNGWYWAADTLAAAGAEVHLAHPLGVKAFRNRRVKNDELDARDLADLLRMGRLAEAWIAPQEIRELREVTRYRGKLISLRTSCKDQVHAVLAKLGIEVTCSDIFGAWGSQWLDELPLPQPYAWKVASLRQLIGWLSDDIAVLEQVTAGLLAGHDGYRAVQALPGIGPVLGAVIVAEIGDITRFPHPARLCSWAGLTPRHYESDTKVVRGHITKQGSPALRWALIEAIQRTPDGTPVRDARDAIITRRGPQARNIAKVAAARKLLTFVFYAMRDGHVRSLTARAAQEAG

SEQ ID NO: 307306 - protein, 394 aa, unidentified
MRFVGIDIAAETHVVAVVDEPGTVVAKPTPFTEDAPGYARLLALLGDPADTLVAMEATGHYWQNLFATLVTRGFAVALLNPLRTRRFAGEELARTKTDAIDALGLARFAAQKRPAPARLPDPATEELRELVRLRDRLVQDFGDRVRQLHRLVDLGFPEFTRYVRGLDSELATAILHDSPTAAAFQGVSVARLARLRYDGRHKVGEALARQLVEAAKVSVGRHHGKAYRIQVRYACEDLDLLRRRLRTLTGDIERLLSQHEVGTLLTSIDGIGPQTAARLVAELGDPAQFRDAGALAAYVGVIPATRQSGKHTATRAGLTPIGHAALRAALWLPTLTAVRKNPWLRAYYERLRARGKLPKVALVAAMRKLLVAVYTVAKHRRPFIPHVMPQETPA

SEQ ID NO: 307307 - protein, 315 aa, unidentified
MSSQVFVGIDVAKAQLDIALRPTGERWAVTNDDPGIAALVAQLQAVQPTLMVLEATGGYQRAVVAALAAAGLPVVVVNPRQARDFAKATGQLAKTDVLEARALAHVADAVRPAPRPRPDAQTEELRALLARRRPLIARRTAEQNRLSGASQRLRVDIQAHMTWLDTRLAALDDDLDTTLRASPVWREHETLLRSVPGIGPVCTRTLLLDLPELGTLSRQRIAALVGVAPFNRDSGTLRGSRTVWGGRAPVRATLYMSTLVAVRYNPVLKGFYERLRAAGKAAKVALTACMRKLLTILNAMVKHHTPWQPQAVASA

SEQ ID NO: 307308 - protein, 343 aa, unidentified
MQVSTIGVDLAKNVFQVHGVDNAGKVVITRQLRRKQVIDFFSKIPACLVGMEACGTAHHWAREVSKLGHTVRLMPPSYVKGYVKRSKNDAADAAAICEAVTRPSMRFVPIKSADQQALLMLHRTRDLLIRQRTQLINALRAHLAESGLVAETGREGLAQLAEIITDESNREALPSAMKQALQAIVDQLAALELPIGALDRAIHAHHRANDMSCRIETVPGIGVIAATAIASTVTDPSNFKSGRDFAAWIGLVPRQHSTGGKERLGGISKQGDRYLRRLLVIGATSVVQHARRHPQKHPWIIRLLARKPAKLVAVAVANKMARIAWAIMAKGGYYRRPELAAAT

SEQ ID NO: 307309 - protein, 379 aa, unidentified
MSQYSTLFVGLDVHKDSIAVAYAPEVSGSEVTFLGPIGVRQGDIDKLIRQLHSKAPRLRFVYEAGPCGYWLYRNLQKLGEECLVVAPSLIPRRSGDRVKTDRRDAQQLARLLRSGDLNPVYVPGLADESIRDLCRLREDRMNDLRAARQRVKSFLLRHDVRYGGRASWSPAHMRWLAQVASLPTPAQQIVFQEQLNEATHLAERLAAADEQLSQHISGWRLAPYVRAYQALRGVQFHVASTVAAELGDITRFDRPRQLAAYVGLHPREHSSGESRRLGGIAKTGNGHVRRVLVEAAWSYRYAARISRQIQERQEELPEQIRDIAWKDQLRLCKRFRRLSAKGKHHSIIVTAIARELVAFLWAIAKQVPAVESDQAALAS

SEQ ID NO: 307310 - protein, 411 aa, unidentified
MRVHHTICCGIDVHKKSVTACLMWGPADREPQFEIRRFGTMTSELKALAEWLKQAHCEVAAMESTGAYWKPVWNVLEGEIPLILANAKHVRALPGEKTDNKDGKRLAGYLRHGLIRASFVPSRDIRELRDLTRYRKKLLGNGAAERNRIQKVLEDANIKLGSVLSDVFGVSGQRMLHALVEKPSVDIEGVAALAHWRLEPKMEALKLALEGRITTHHRFMIDLSLGHMQYIEQQILRLDEEIARHVAKYHKEFQLLQTIPGIAENASAVVLAEIGPDMSPFDDDGKLTSWSGICPGNNESAGKKFSTNTRKGNPHLVSTLVESAWAATHTKNSQFKARYHRIKARRGSQRAVVAVAHTLLRTIYVVLKTGQPYQEPIRPPLTEIQRTRKAQRLTRELLNLGFEVTLKTKTA

SEQ ID NO: 307311 - protein, 365 aa, unidentified
MKKIVKQVFGVDVAQNELVGSLGRSFDDCTTEIYARSKFPNNAKGFGQLVSWVQKNSDPAVSVIYVMEATGVYHESFAYFLAERTLKVAIVLPNKIANYMRSLTIKTVNDQTAANGICQFGLERQLDYWEQPDPTYRQMKQLTRERDQIVDERTMCKNQLHAEKSGAFPNSRSIKRLQERIKLLDKHVAQIASELKTLVSGNDKITEDVRLLCTIPGLGHLTACTILAETNGFELIRNKKQLTSYAGLDIREKQSGTSIKGKPRISKRGNRFLRKALYLPALAAIRHNLRYKAVFSRLVQKHGIKMKGAVAVQRKLLELSYILHKTRKAFDPELFSKSAVEEGQSPEMEKGGIETPSAPLQSSLC

SEQ ID NO: 307312 - protein, 421 aa, unidentified
MYNTRIKHHKRNFVNDKALISTVDIAKDELMVYIRCPFGEEVKPFKVTNNYQGLREYWAMIMLYQKRYRLQNIIVGFESTGIYSEPLKNFMSDKAVKLVQINPMHTKKMKDITDNSPGQTDRKDTRVIADIIQLGHYLSLVVPEGAAAQLRELAHARENQMVHQTRLINQLEALMFKLFPEFVQIIKNLSTKTAQYLMSKYPTPQRLREVSLEQLTLEIKKVSRGQLGEDLAQRIYQASRESLGTKEAQESILLEVNYLLGQLIQTAQFIKVLEKKMATALDQIPYAGNLLSIKGIGVVLLGGVIGEVGDFRRYRRQSDIVKLAGLDLYEMSSGKYHGLRRISKRGRWFLRKLLFYGALNTVRTGGILRDYYQGLIGRGMKKIKALIAVSRKLLRIMFALVRDNTYYHQKEERINSIKVPA

SEQ ID NO: 307313 - protein, 344 aa, unidentified
MDHFAGLDVSVKETSICIVDDTGRIVREVKVASEPEALLAVLKNPAYHFKQIGLEAGPLSQWLYGALAEAELPVVCVETRHMRAVLKAQINKTDRNDARGMAQMMRVGLYRPVHVKTLRSQQLRMLLTHRKLLQSKAIAIENDLRATLRNFGLKVGMVGTVKFEARIKELVENLPDLAVLVEPLLTVRRVLREQTAILHRRLLAIVRDDDVCRRLMTIPGIGPVVALTYRATVDVPARFKNSRAVGAVFGLTPSKYQSGESDRTGRISRCGDDMMRSMLYEAAQSLLFRSAKWSWLKAWAMKIARHRGMKKAIVALARRLAVIMHRIWVDGTEFRWTREEAAAA

SEQ ID NO: 307314 - protein, 409 aa, unidentified
MDGLIERCAGLDIHQATIVATVRVPGEGGGRAVVTHTFGTMTMDLLALHEWLQAYGVTHVAMESTGVYWKPIYYVLEAHVTVLLVNMQHLKQVPGRKSDVKDSEWLAQLLECGLLRGSLVPPAPIRDLRDLTRYRKKQIEDRTQEINRLYRVLEEAGVKLASVMSDIMGRSGRAMLEALLAGTTDPTVLAELARGRLRPKIPALRAALRGQFRSHHAFLIGQILTKVDFLEEAIAQLTEEIDRQLAPFAATVERLMTIPGWGRRTATTVFVETSGEMAAFPTAAHLCSWGAMCPGLDESAGKRRTGKTRDGNRFLRGALIESALAATRAKGTALQARYQRVKRHRGHKKAIVAVGHQMLEIAYYIMRDGTTYHELGADYFARRDRERTIRRSVTQLEALGYRVTLEEAA

SEQ ID NO: 307315 - protein, 340 aa, unidentified
MEYGAIDLHKRRSQIRIIGEDGGVVLDRRVDTSRAEFDRVFVGRPALRVVMESSTESEWVAQHLETRGHEVIVVDPNYAPTYGARTRKVKTDKRDAAALAEACRTGVYRRAHRASAAARALRRTLRVRQQLVRQRAGLITLLRALLRQDGIAVASGSAERMLTRLDRVSLPPALVAMVAPLRAVLTQLNATLAAIEETLEARATDDAVTQHLMTTPGVGPVVALTFQAVLDDPARFGGSAARASAFIGLVPSEDSSAERHHKGAITKAGPRDLRALLVQASWVIWRGKRPGGAALRAWAHALAERRGRRVAIVALARRVSRILLALWRDRQDFCAPPARA

SEQ ID NO: 307316 - protein, 351 aa, unidentified
MLRQSTPSTVATIGIDIGKNIFHLVGLDQRGHVVLQLKTSRGQLDRRLANVPCCLIGMEACSGAHHIGRRLEALGHDVRLIPAQYVKPFLKGHKNDYRDAEAIAEAVQRPTMHFVRLKTPDQMDLLALHRVRSRLVGLRTGVINQIRGFLIERGITVRQGPAPLRKALRDILSSSSGGLSQRIVRLMIDLTEDWRRLDARIAAVSDDIEALAEQDAPCQRLMTVPGIGPIISSAVVAAIGKGTGFRQGRDFAAWLGLIPRQESTGDRTILGKISKRGNKYLRTLFVQAAHVVLARRPSAAMQGLWPWIEQASTRLHRNLLAIALANKLARIAWAVLARGGEYQPKVVAHAA

SEQ ID NO: 307317 - protein, 373 aa, unidentified
MPKYSTAFGMDVHLRSTTVCALDADTGEAVTRRFPGNPWGEIAGWMDGFPGPSLAAYESGYPGFAPQRELAGLGVECVVAAVSKIPRSAADSASKNDRNDAARMAKAILAHDISPVWVPSPEVEGIRDLAGAYDGATARLATAKQRLLAFLARRGFVYGGTTPAGNPRKYWTYDFLRWLDKVRPEDDGGVRALAALRNEVEAAAEARADLLSEYRAAVDASPIAAEAAALQSIKGCAFALAAAFSAEVGDFTRFRSGRQVTAYFGLAPSQRSSGDSVRLGGISGAGNALVRKLAVEGSWCYAAARHQPKLMPRDTGVPLEIRMHGRKGSERLLRRREEMLARGMPAAKANAATAAELVRWLWALGMMCREGAE

SEQ ID NO: 307318 - protein, 425 aa, unidentified
MNNTQNKKITQVTDDTLIVGVDIGSESHWARAILARGYEVSKKPFNFDNSEVGFEKFITWNYGLAADNNLKKIIIACEPTGHYWFNLYDFLKKYDVKLVLVAPQHVKHSKEMDDNTQRKDDRKDPLVIAKLVPEGRYMEPYIPEGIYAELRAAFNRRCDLSEALTRSSNRMTRWFDVYFPEYRTVFKGSDALSGNMVLKRAPLPADILELGVKGICQIWREAKLRGAGEKRAQKLVDAATQSIGLKGGPAVRQELWQLIEERELLDKQHSDIMALIEEILKQIPGADRLLSVPGAGVVTVAGFLSEVGDINRFSDPKQIQKLAGLAVVENSSGKRKGLPGISRRGRSRLRWVLYLAAMSMVKNNKEMKTYHRYYTTRKKNPLKKIQSLMAIAGRIARIFYGILKNGTDYDPMIVMRDFNKEKATA

SEQ ID NO: 307319 - protein, 337 aa, unidentified
MKRYLGVDLHRTQFTVCTRLENGRTYLRQWPMRELKLFAAQLRRDDELAVEATGNTRLFHDAVAQQVARVAVVNPGQFRVISQSVKKTDRNDAELLALYLSKDLLPEVRMKEPNQRNMAHLAQTRDLLVKQRSALKAKINNLLSGEGINLKKEALSSNKALDRVLAVPLSPLMSAELRVLVTQIRSLTDSIAELEDLIEEEGPKLAGHENLMSIKGIGPVSAAVLLSAIGNIDDFDDPGKLAAYFGLVPRVQNSNETERSGHITKQGNKLARTALVQCALIAKRYSSFLQQFYQRIQRRRGGGKANIALARKFLGVIYHTLKNNWVFEDFPNFVLAS

SEQ ID NO: 307320 - protein, 357 aa, unidentified
MKQHKNNKKISFKGKDFFIGIDVHKKTWYISIRHNGLLIKSFAMDPIPEILVNFLNKNYPCANFFVAYETGRFGFWIYRKFKKLGINCMVVNPADIPSTHKEKDKKSDKIDSIKLARELENNNLKPIYVPPPEAQHLRSLVRLYLNYTKNITRTKNQIKSFLDYNGITLPKHTSSWSNNFINHLYSITIDNGPGDKTLHSLLNTLCFSRKEQNDILKQIRKFINNSYFKEVFYLLKTVPGIGSKIAFIILSEIIDMKRFKNFDQLKSYVGLTPSVYSSGDTYYEQGLTYRKNSRLKYALIEASWVAIRKDPALLESYNKLITRMKKQQAIIRIAKKLLSRIRHVWLNKQPYVTGIVE

SEQ ID NO: 307321 - protein, 414 aa, unidentified
MAEAMITWYVGVDWGSEKHQACILDAQGTIVGKREFSHSAAGLAELGGWILAIAVAASAVAVAIEVPHGPVVDSLIDRGFVVYAINPKQLDRLRDRFSIAGAKDDRRDAYVLADGLRTDRHLFRRVHVADPRFIELRAWSRLAEELQEERARLSNRLYHQLWRYYPQMLELTDDFAATWFLELWERVPIPAKAAGLRKSAIERLLRKHRIRRVDAETVLQTLRQSAIKVADGVAEAASAHIRSLVARLHVVNRELRHAYRKLDELCAAIGEAGPTATERVGLRDVTILKSLPGIGRINLATLLAEASGPLSRRDYQALRTLSGVAPVTKRSGKSHIVVMRYAAHVRLRNAVYHWARVATQHDHKSRTRYAALRKRGHSHGRAIRGVADRLLGLACVLLQRQILFDPNFDQATAA

SEQ ID NO: 307322 - protein, 340 aa, unidentified
MEQVVTIGFDIAKSVFQVHGIDAQGAVVVRQRLQRSRVLPFFAKRGPCLVGIEACGSAHHWARELARLGHEVRLIPPSYVKPYVKRQKNDMADAEAICEAVTRPTMRFVPVKSPEQQSVMVLHRTRLILTRQRTQLSNAIRGHMSEFGLIAPVGRNGLKTLMEIVADREDARVPDDARGCLTMLANQLDLISEQILESDRRILANARSTDVGRRLMEIPGVGPVLASALVATVADPAAFKSGRNLAAWVGLVPRQNSSGGKERLGGITKQGDRYLRQLLVIGALAVVRFAVRNGTRRPWLVQLLSRRTPKVAAVALANKNARMMWAIMTSGERYREPLAA

SEQ ID NO: 307323 - protein, 312 aa, unidentified
METKFVGIDVSKLTLDFDCLPVDAPQQFANDSVGVEALVALLKGSGVERIVVEATGGYETAVVSALAVAGLPVVVVNPKQVRDFAKAKGHFAKTDKLDAKVLALFGERMKPPLRAFQDAAQRALADVLNRRLQLVTMRAQEKTRLASVPTVAKKDIELHIAWLDKRIAKLETDLGDRLKTSPVWCHKAELLESVPGVGDVTTFSLLADLPELGTLNRQEISALVGLAPFPDDSGTRKGKRYIRGGRAEIRCVLYMATLSAKTYNPPIKAMFERLTKAGKPFKLAMTACMRKLLTILNAMLKKDQAWKIQPSA

SEQ ID NO: 307324 - protein, 402 aa, unidentified
MNAVGIDVSKGKSMVAIMRPFGEIVSAPFEIKHTASDINSLVERINSVEGESRIVMEHTGRYYEVLAHQLSEANLFVSAINPKLIKDFDNDSLRKVKSDKADSVKIARYALDKWNNLKQYSVMDELRNQLKTMNRQFSFYMKHKTAMKNNLIGILDQTYPGVNAYFDSPARNNGSQKWVDFASTYWHVDCVRKMSLNAFTCHYQNWCKRKKYNFSQSKAEEIYGKAKELVPVLPKDDLTKLIIKQAVDQLNSASTTVESLRTLMNETASKLPEYPIVMGMKGVGPSLGPQLMAEIGDVSRFTHKGAITAFAGVDPGVNESGTYEQKSVPTSKRGSSDLRKTLFQVMDALIKTKPQDDPVYRFLDKKRAQGKPYYVYMTAGANKFLRIYYGRVKEYLATLPES

SEQ ID NO: 307325 - protein, 341 aa, unidentified
MKQFIRIGVDLAKNYFQVHALAHEGGPAVTRKLKRSKMHEFFAQIESCLIGMEACGSAHYWARELKTIGHEVLLMPPAYTKPYVKRGKNDAVDAEAICEAVSRPGMRFVPVKSAEQQATLMLHKTRELLVKQQTMSVNALRGHLSEFGIVVAKGIGRVDELLELAESDTMLPEAAKAAVKVLAQHLEGLNRSIDDLEKQIGRAHAQSEMSQLLSEVPGVGKIIASVITASVPDPSVFKSGRDFAAWLGLTPRQNSSGGKQTLGGITKQGNRYIRKQLVLGATSLLNVVNKRKGALRDWIVALLAKKPARVVTVALANKLARILWAMMKTGEFFRAEMFAKA

SEQ ID NO: 307326 - protein, 463 aa, unidentified
MATRNRAFNRKGLELTHPNAAGIDIGSASHYVAVPADRDDEPVREFASFTADLHRLADWLRDCGVDTVAMKSTGVYWIPLFELLDARGFTVLLVNARHVKNVSGRKSDVLDCQWLQQLMTYGLLRGAFRPSDQVCVLRVLARQRATLLRTQSRSVQHMQKALVQMNIQLVNVIADVAGASGLASLRAIVAGERDPCALARLKNSRVHASDEEIARTLQGTWRAEHLFALRQALDAFDFCGGQLQQCDQEIEAKLQRLHITEIEPDKAKKRSKARNAPKFDLRTRLYQMCGVDLTRIDGIDVTTALVVVSETGTDMSKFPSDKHFASWLGLCPGTKITGGKVMSGKTKRCANRAAQALRLRLAAAALRTSQSALGTYYRRICSRMDKAKAVRAAAHKLARLIYSMLTKGEEYTDQGQAYYEERYRQRVLHNLNRRAQQLGMTLVPTAPASGAACLKNPLCVSYL

SEQ ID NO: 307327 - protein, 352 aa, unidentified
MVTVGIDPHKHVHVAVAVDADGRRLTRPLTVKNDANLIGVLLKWIRTIADGTPVTWAIEDGRGFARRLADGLLLTGHEVVWVPTRLMAAHRKLHAATGSKSDPVDAVAVAHAAIATPGLDHHRIDDRVRELRVLVDSRADLVRRRTMVINQLKAYTHLWLDHTPGDLTRRPGMTSLMALVDTTDMSDHVRRVLTEMITEIDGLNKRVRGLETTIRELVTPLAPALLEITGISHVSAAVLLAEIGDITRFTSSAKLARYTGTAPIPVYSSDKERYRLHRGGNRRLNSVLYTTSIVQQRFHPGARALLARHEPAKGARGARRILKRHLIDVIHRAMTQDRATWQHHIAQHQIAA

SEQ ID NO: 307328 - protein, 320 aa, unidentified
MAKRTTICAGIDTGKRKLDVALDCSSEQLQVENTAEGYKTLLEWLGRHKVKRVGIEASGGYEQAVVAELRRKRLVVVVFQPAQVRAYAKYRGQRAKNDRIDAALIAACTAAVNELHPAPDARFSALAVHLTLIEQIGEDIARCKNRLESCRDVRIQKLWKEDITRLVKRKRAEFKALVEAIREHRDLAERLDLIYSVGGAGLPTAVAILVRMPEIGQLSREQAAALAGLAPYDDDSGEHTGARHIEGGRKRLRRALYAAALAGSFRWNPQLMALYKRLIAAGKGHKCALVACARKLLIFINAVVTRGTPWQADAPAAQAA

SEQ ID NO: 307329 - protein, 359 aa, unidentified
MIVERTSVGLDVHARSVVAAGLDSRTGEVFKQRLVPASEVVIEWLRGLPGPVAATYEAGPTGFGLHRAITAAGIRCEVAAPSKLTRPAGDRVKTDAKDALLLAQLLQVGQIVPVRVPTVTEEAARDLVRAREDIRGDLMRARHRVSKLLLRHGYVYYGGSAWTGKHTQWLTSIRFDQPGTQAAYDADREAVDFAVARRDRLDEAISAMAADSEFTATTRRLCCLRGISTLTGFALAVELGDWGRFTGSSIGAYLGLVPSEHSSGDSRRQGGITKTGNTHARRLLVEAAWHHKPRYTVGKVLQARWDQATPAARVRGHAGNQRLHRQWARYAARGKKRTIANTAIARELAGWCWSLATLE

SEQ ID NO: 307330 - protein, 464 aa, unidentified
MGNEQRKTRKLEQREEGLPVIRPNVAGIDLGSKQHWVCAPAIDGKGREIVEFGATTAELEQLGQWLKRRNVESVAMESTGVYWIPPYEILERYGFEIVLANTRDLNRVPGRKKTDRVDCEWIQRLHSCGLLKGSFRPPAGICQLRTLMRDKATLVAESGDWLRRMQKSLDQMNVRVHRAVSDINGVTGMAILRAIVKGERDGRKLAKLRDRRCRKSEEEIAEQLSGHWRQDHLFSLQQSLKMYDALQERITAYEKEILRLMADMEREECREQPAPKNKNPQKAKAIHKRGEEQVRQALYRMSGVDLTEIDAIGVGTAQVVISEYGPDLSKFPTEAEFVSHLTLAPRRAITGGKPIKGKKKKRGSASTRVAAALRMAALSLRHNQSALGAYYRQKAQHLGGNVAVFATARKLAILIYRMLRWGQEYVDEGAEAYELRYQQARFQQLRAKARQMGYELQPVAESAA

SEQ ID NO: 307331 - protein, 341 aa, unidentified
MSVMIGIDPAKGSHAAAAVDACEEALAELEVRATRRQSRELLAWAERFPQRSWAIESANGHGYLLAQQLIVAGEHVVDVPSTLAARVRVLDSTRSQKNDANDARSVAIVALRHPDLRVVTVEDHVTVLRMLAKHHKQLSSLKTQAAARLHAVLAVLIPGGLGKEMVVRQAAGLLRRVQPTSMVETERKRIAHQHLAEVRRLEKELKTSKARLREAVDASGTSLMEIYGVGPVVAGLLIGYSGDISRFPTRHHYATYNGTAPIDTSSGAKKRHRLNPRGNRMLNHALHLIAITQLRYPNTEGRLFYERKLTEGKTKKEAIRSLKRRLSDVVYRHLIADQQPR

SEQ ID NO: 307332 - protein, 289 aa, unidentified
MPKLKQYVGLDVSLEETSIAVIDETDNLVWRGSVASTPEAIAAALRKHAPRAERIGFEAGQLSSWLYHGLKAKGCPVICIDARHAKAVLSLKVNKTDPNDALGLAQIMRVGWYREVTVKGHDCQALRALLVARAQIVSQITTVKNCVRGILKTFGHVLPKKLRATYIASAREIIEGHATLEPILMPMLRTLAATMEQLQVYDRAINRFARHSETARHLMTAPGVGTVVALAYITGVEAPARFSRSSAVGAYFGMTPRRYQSGEVDHAERVSNAATGWFVPSSTRQRKPC

SEQ ID NO: 307333 - protein, 458 aa, unidentified
MGRNKSKDEDRRAMSVVYPNAAAIDVGATMHMAAVNAGRTPEPVRSFGTFTTDLHRLVDWFAECGVDTVVMESTSVYWIPIFELLDARGFAVFLVNARDAKHVPGRKTDVSDAQWLQRLHSFGLLRASFRPKGQIAELRAYLRQRERLLEYGASHIQHMQKALTEMNVQLHHVVTDITGATGLRIIRAILGGERNPAVLARMRDRRCHATVETIEKALAGNYRAEHLFALEQALALYDTYQQKAYACHARIEAVLKELGARRGREAGPLPSPRQNRSRQQNSLLFDVRTALFALLGKDLTQINGLGPYLALKLIAECGDDLSAWPSAKHFTSWLCLAPSNKISGGKVLSSRTRRSGSRAASLLRLAAVTVGRTDTALGAFYRRLSARIGKAKAVTATARKIAVLFYNALRHGMDYVDPGASSYEIRYRARVIDNLHRRAKAFGFMLQPMAPTPAMAVS

SEQ ID NO: 307334 - protein, 386 aa, unidentified
MRTDVAPTPQPATVAQPATILVSLELSQKSWVITVQPPDVEKMSRHGIEAGDTEKLLSLLHHHRTRTAARTGATPHIVSIQEAGLDGFWLHRWLEAAGIESHVVDAASIAAPRRKRRAKTDGIDGETLVRTLAAWRRREPHVCSMVAVPTVEQEDRRRLSRERERLMKERIGLTNRIYGLLASQGAGAYDALKTDRWPALAALRTGDGGELPPQLAAEIRRMLVRLDLIMEQIKAVEAERDAMLAAEAAEHGPVVALLCRLYGIGPQFAAVLVLECLYRTFGNRRQLAAFAGLAPTPWRSGSINREQGISGGGNPRLRKTLIEMAWMWLRWQPGSALSQWFQQRAAGANGRTRRILAVALARKLLIALWRYVQDGVVPQGAVLKAA

SEQ ID NO: 307335 - protein, 344 aa, unidentified
MRVYVGMDVHRKRSQVALVDEHGGQLANRNLPNNSAELTSILGCLEPGTPVAFEAAYGWGWLAELLNELELEPHLVHPSRCKAIASARLKNDRVDARTLAQLLRAELLPEAWIAPQAVRDQRALLRHRAALVRMATALKCRVHAILADRGVRVEEPLWGPAGRVLLAELPLPAVQRAIVTDCLALIDAISPLVTRLERDLVARARPDPRVQALQALPGIGPITAMTLVAEIGDIARFPTARKLCAWAGLTPAVRNSDRKVRHGHITKMGSPWVRFVLQEAAQRAKTRPPFAAFYAKTAARRGKHIATVAVARKLLARSFHVLTDLQPTAGEGQPAGCARPIACA

SEQ ID NO: 307336 - protein, 390 aa, unidentified
MDVLYQSCAGIDVHQANIVVCILHGPLTSTRPKREMATFDTTTKGLRACHDFLSQFHVEAVGMESTGVYWRPVWHALCDDFKLILAQPAHMKAIPGQKTDKKDAHWIAKITRIGLLPRSFVPNEIIQELRELTRQRKHYVESRNRETNRIHKILQSGGIKLTTYIEDIMGLSGRNLLQLLVDGTPIIPRIVHQSVYTSLKKKVPQLLEALDGYFSDHHRFMLKQSLEIYDFYQKQIELLEERMNVYLSQYEKHVEILDSIPGIDVITASVIISEVGVDMSQFPTAGHLASWAGLCPGNNESAGKKRSTKIRHGNSYLKKCLCQAAFAVKKQKGSPLADRFYQIQSRRGSQKATIALAHQLLKIAYILLKEQITYPEFLAQKKTTRDELVA

SEQ ID NO: 307337 - protein, 341 aa, unidentified
MAIMTIGIDLAKNVFAVHGVDENGKAALIKPRVTREQLPALIAQLPPCLIGMEACTGAHHWARLFRQHGHTVRLIAPKFVTPYRMSGKRGKNDAADAAAICEAVTRPNMRFVPVKEEHQQIILTLHRTRQGFVEERTALYNRLRGLIAEFGIVLPQKVSCLRREIGQHLENLPGYANQCVGDMLTHADRLDERIAEYDRLIAQAAREDARSKRLMQLPGIGPTTASALLASLGGAHEFDNGRQVAAWIGLTPGQYSSGGKARLGRITKAGDAYLRSLLVMGARAILSGLGDKQDRFSRWARNLVERRGYWKAVVAIAAKNARLAWASLKYGEDFRLNREAA

SEQ ID NO: 307338 - protein, 341 aa, unidentified
MNIKRIGIDLAKQVFQVHGVDGQDKVVLRKQLRRAQLLDFFKKLPPCLIGMEACGGAHYWARELQKLGHTVKLMAPQFVKPYVKSNKNDANDAEAICEAVARPNMRFVAIKTIVQQDIQAMHRIRSELVQQRTAKVNQIRGLLAEYGIVVERRVEVLRHALPQLLEDAENGLTADFRVLLDGLKQDLVTLDERVDDLDKKIKTLANNNPDAKRLQQIPGIGPMIATALICAIGDGKQFKRGRDMAAWLGLTPRQHSSGGKERLLGISKRGDAYLRTLLIHGARSVLKVADKKDDPRSRWLQNLSSRRNKNIAAVALANKNARIAWALLSKETDYLPEGEPA

SEQ ID NO: 307339 - protein, 355 aa, unidentified
MLYVGIDYHKRYSQVNAVDERGKARAHSRLANDFCTIETFFRTLNEPCKAVLEAGWNWGVMYDWLEQIENVEEVQLAHPQRVQAIAAAQVKTDSIDASTLSQLLRADLIPRAYIPGTETRRLREIVRQRLFLVRLRTMMKNRIHALLERHHVSLPSVTDLFGKKGRQYLSRVVLSVSAQQLLTQDLKLLDSLDEEIKQTEQWLKSNLGEDRRMEILLTVPGLGQLLGAVVALEIDTIERFSQSSKLVAYAGLAPSTYASGGRVTHGGLMKQSNKWLRWALVEAAWAAVRCDPYFRSQFSLRCKSKGSQTAIVAVARRLAEVVWHVLRESRPYEDRSVFKESRNHVQLSSAALVQD

SEQ ID NO: 307340 - protein, 489 aa, unidentified
MSTARKQQGKKKDPMLNARAPQRKVRGSHCQQGKGHQRGSELTITNPDAAGIDVGSQVHYVAVPEGRAQESVRSFGAYTGQLDELVQWLKDCRIKTVAMESTGVYWIPLYQKLEEAGFEVLLVDARQAKHVPGRKSDVQDCQWLEQLHRYGLLRAAFRPEDSVCRLRTLQRHRKDLVESAAMWIQHMQKALNEMNLHLHHVLSDISGHSGLAILDAILAGERDPRKLASLAHYRVQKSQAQIAAALTGDYRPELLFVLRQSLQNYRQIQQQITQCDLSIEKQLAKMTDCQNPNQASEPTPPSPDLGGGKPRKRKSPVILEISLAGHLKRILGVDLTTIPGLNVLAILTLVSEIGTNMTKWRNEKAFVSWLGLSPNNKISGQRVLSSRTRKVVNRAATILRLAAMIVGKTNTPLGSFYRRKRAQLGGPKAVTATARKLGSLIYRLIKNGQGYHEPDLHTYELKYKDQILNSLRKRANTFGFDLVELPKAA

SEQ ID NO: 307341 - protein, 325 aa, unidentified
MQGKEASEQETRKCSAGIDVSKSWLDTHVRPAKQSLRVANSAEGIRQLKRWLLRYKVTLVVVEATGKWHREAYRSISASPIAVAVVDPYRVRMFAKAHGIFAKTDRLDAEVLAMFAEMMAPACRAPTPKALEALQELVTARDSAVAEHVSLKNQLGTAEGSFLRRQLTKRIAQLAAHIKAIENECKTQIKADEGLARRFDILTSIPGVGDVVATTLVACLSELGSLTNKQIGALAGLAPVADDSGERQGARVIWGGRSAVRRMLYLAALTAAQRSTDLKAFYNRLLANGKAHKAALIAVARKIVLLANTLIAQDRPWQPIAPKNA

SEQ ID NO: 307342 - protein, 350 aa, unidentified
MLYIGLDVHSKWMTVKGFNPETGELVEIKKQPNDEQSLRESFGKFTEPLHGVMETGTNSWAVYRILKPYFEKLIVVDPSTVWGKEIRRGAKTDARDAMTLALKMQKGELTALYVPDEKTQDLRTLARAKINASRHVTKLVNEIGSQLRSWGIVLSCSLLTKKGQTLLEESKARLPEYSLIVLESWLEILKKAQEAEDRLDALIRVEAANDEDCKILMSIPDVGCLTALVVRAEIGDINRFSSAEQLVSYCGLAPSVKQSSDNIYYGKLSKFCNKFLKYVLILRAQNVGKCGKEHPFTQTYWRIIIRGKNHAKIAVARQLLRVIFSMLKNKKCWDASKITNRRGSPTAAAA

SEQ ID NO: 307343 - protein, 351 aa, unidentified
MFIIGVDYHPSFQQIAFMDEKTGEFEERPLNHSDGEAEKFYRELKQRGVSVRVGMEATGYSRWFERLLAELGFEVWIGDAAEIKRLRVRKQKTDRLDAQLLLKLLLENRFPRIWVPSPENRDLRQLLWHRHRLVQMRTRIMNQLQAVAMNEGYRWKKKLFSEKGRALLEKLSLAPWASRRRKELLELLDQLDPKIVELTAAVEQEAQQRPEVLRLMTHPGVGPITGLVYVLVIGTPERFPCGKQIGSYIGLIPSEDSSAGRQRLGHISKQGNALLRYLLGEAAQAAVRTNADWRRRYVHLAMRRQKSIAKVAMARKLGVRLYWMWRNGWDYSQLIEFGSNAGKLVIGHGVK

SEQ ID NO: 307344 - protein, 383 aa, unidentified
MVEAQYTIVPHHYDLFVGLDVDKSRMAVTLMNQEQWLQSLQMPHSSEHLLHYLDKHFAGSKIALVYEVGPTGFGLYDELTAAGHRCLVVAPAMVPRAPGKRVKTNRLDSRQLSQGLRGGELESIHIPSLPYRQLRHLVQLRDSHVRQMTAAKCRIKALLLYEGIEFPDPGRSWSARVLKAVGRVPCNDSVRFKLDSLIASLQFHRLQAAAAQKQIRHFCQQEPELRQSIRWLRTLPGLGWITASHLVARLGDWRQLSQVGQIASFLGLVCSEHSTGEDVQRGSITRSGDSRLRNKLIQAAWSAIRKDTELREFYRRIYGRQPRPLAARKAIVAVARKLTTWIYAVLKQQRPFQMRPPKDSAPLTPEETVGSRGGLDGAQNEQG

SEQ ID NO: 307345 - protein, 349 aa, unidentified
MKALNAELFAGQEVFVGMDVHKNSWAVTELYGGNQTNTYSMKPDPLELAKHLNREYPGATFKSVYEAGFCGFWIHHELIKLNIQNMVVNAADIPTSNKEKLYKNDARDSKKLARELANGSLHPIYIPSKEQLSLRDLVRRETQIINNTTRSKNRIKSYLHLRGEKIQSWSANNLKWLHNNTKTDKDMTLFFLVDELMAELARKLAIVREQKRLIHQLGKDKLLTCLMSIPGIGIRTGILMIAEIWDMNRFKKKDKLCAYVGFAPRLVGSGEKERMKGGGSRKHRQLQSKLIEAAWRAIGVDIELRATYCQFTSRGSAQRAISVVGKKLLLRARSVWLHEKIYKLNSIPK

SEQ ID NO: 307346 - protein, 422 aa, unidentified
MLAESRDEEQIIARVAALDMGKAELVCCVRVPAEPGGRKRLQEVSTHSTMTRSLTGLANHLVELGVERVVMEATSDYWKPVFYLLEAHGLDPWLVNARDVKHLPGRPKTDVLDSVWLCKVAERQMLRPSFVPPRPIRRLRDLTRYRIDLVGVRTAEKNRVEKLLEDACIKLSVVASDIFGVSGREMMAALIAGERDPKVLAQMARSRMRAKISQLEEAFNGHFDDHHRFLLSRMLSRVDGIDADIAAVDAQIEVVLAPFVAAAAVLDEIPGTGRVAAAIVVAEVGVDMSRFPTAGHLCSWAKFSPGISASAGKTKGNGSTGHGNRYLARVLGEAAVVAGKTDTFLGARYRRIAKRRGKKRAIIAIGRSILVIGWHLLANPGTHFHDLGADHFTRHVNPDTQKRSHVRQLEALGYTVSLTPAA

SEQ ID NO: 307347 - protein, 472 aa, unidentified
MIQHETKKKRRSPCQERRPCQEPAQEVPVVHPNAAGIDIGSRSHWVAVPADRDAKPVCEFSSFTGDLHRLADWLASCGIKTVAMESTGVYWIPVFEVLEERGFEVLLVNAAHLRNVPGRRKSDVLDCQWIQRLHSFGLLRGSVRPDEQIVELRAYVRQRARIVQDAGRHIQHMEKALLEMNIQIQHVVSDITGVTGMRILKAILAGERDGNKLAALRDPRCRQPRERIAAALQGNYKREHLFVLEQALTAYELHQSLLAQCDQRIEALLAELPARSEVPEEPCPPRRRGNPTHNQPRFEIQSPLHRLCGNVDLTQIPGLAPATALTVVSEIGTDVSRWPTEKHFTSWLNLAPGTKITGGKLISSRRAPSKNRAGQALRQAAVSVGRTQTALGAFYRRIAFHRGAAKAAVATARKLGVLVYRALKYGMAFVESGLEAYEREQNARLIQHLQKRAAGLGYQLLPVPAEAPAGAG

SEQ ID NO: 307348 - protein, 410 aa, unidentified
MIKENYMYVGIDLHKETHTAVIIDCYNQKLGEITFPNRPADFPKLVAKVKKCNTAGKEVVYGLENAYGYGRALAVWLIDKGYFVKDVNTAISHRQAKHRGAMYRKSDSDDAGAIALATLNMLDKLPDACPNDAYWSLGQLVHRRDNIMKQRTRLVNQLHEQLCIAYPSYKQFFNDISRPTALYFWENYPSRKYLKGKSVEDLRAELVPVSHNKCSTKTCEKILDAVASDKVKNNAYQDARDMVTLSIVSDLQHYDIQLAEVDKMLEQMYKMLGCTLTTIPGVNVITAVKILAEIGDIKRFSNANKLAQFAGIAPLHLSSSGKGKDLATKQGNRRLQATIYFLAIQMVQISSKGTPRNPVVRAYYEKRKAEGKTSQQALICISRRLISVIYGMLKNGTEYRMPVVENAGEK

SEQ ID NO: 307349 - protein, 362 aa, unidentified
MPSIALKRGDVIVGVDTHKDAHVAVAIDGLGGIVSAPKIIAANREGYLELLAWAKSLGQLHAFGVEGCGSYGSGLAKCRRRHDVKVYEVARPAKKGLRRLAGKSDAIDAEHAARTVLSGTGMATPKLANGQVEAIRLLKIARDTAVKAHSSTLIPLKTVLVTASDELRGQLEALTDHKLVIACAGLHATGNMAEPNVATRHALSHLARRWLALHEEIKVHSTQLKALTSAAAPDMLERFGVGFDTAAEMLITAGDNANRIRSEAAFAKLCGVCPIPTGSGKTSGRHRLNRGGNRQANAALYRVVIVRFRWHPPTIEYVARRTAEGLSKKDIIRCLKRFVAREFYHLLPQSPVEDAAGIPLPT

SEQ ID NO: 307350 - protein, 422 aa, unidentified
MPMKVVYQTCCGVDVHKSFLVATIIKTTSGVQPSYQKKRFSTFNNSILEFKKWLLDNSCRDICMESTGKYWIPVFNLLEDEINVTIANPKWVKAVKGNKDDTKDSKWIGDLFRLGLVPGSYIPCKEIRILREFTRYRYKLTSCRSSEKNRFQNALTVCNVALDSVVSDIFGKSATSVIDYLLEQSDNSINHEEISSRLLRSLKKKSESVIESIEGYQMTDSQKYRMRLVHAHMDYITSTISDIDSMINSLVEPYDNAVKLLCTIPGVDRNSAITIISEIGTDMTQFSNSKRLCCWAGLTPGNNESAGKKKSVRITRAGVYLKPALVQVAHAAVKSDKSPYYKAKYERIMKRRGKKRAIIAIARMILTAAYQMLSTGEVWNPIDLYKIDMPAPLREKQKEKAIKQAKKLLIAEGIVTEEQLAS

SEQ ID NO: 307351 - protein, 461 aa, unidentified
MGRNKSKDKDRRTMLVVHPNAAAIDVGATMHMAAVNADCTPEPVRSFGTFTTDLHRLVDWFAECGVNTVVMESTSVYWIPIFELLDARGFAVFLVNARDAKHVPGRKTDISDAQWLQRLHSFGLLRASFRPKGQIAELRAYVRQRERLLEYGASHIQHMQKALTEMNVQLHHVVTDITGATGLRIIRAILGGERNPAVLARMRDRRCHATVETIEKALAGNYRAEHLFALEHALALYDTYQEKASACDSRIEAVLKELSICRGREAGPLPSPRQRMRRQPNGMDFDVRAALYALLGKDLTQINGLGPHLALRLIAECGDDLSAWPSAKHFTSWLCLAPSNKISGGKVLSSRTRRSGSRAAALLRLAAATVGRTDTALGAFYRRLSARIGKAKAVTATARKIAVLFYNAVRHGMEYVDPGASSYETRYRTRVINNLQRRAKAFGFVLQPTEVTPGPAVSAVS

SEQ ID NO: 307352 - protein, 479 aa, unidentified
MSKASQQILATGGCGPVAVSGNKAKQRKKPGQPDGPLFQPNAAGIDIGAREIFVAIPADRDDHPVRKCATFTVDLHQMAEWLVSCGVTTAAMESTGVYWIPVYDVLEKHGIQPCLVNPRNMKNVPGKRTDFHECQWIQHLHSMGLLHAAFRPGGEVCAVRSLMRHRNDLVEMTSQHIQHMQKALTQMNVQFQHVISDITGLTGLAILDAIVEGERDPAVLARLRDPRIKADEETIRKSLEGNWRAEHIFALRQRLSLYRSHCSLIADCDREIEKLVAAFEPKADPEEKPLPEDRKQKQRKRKRKGGNPDFDMRTEAYKLFGVDLTQIPGLMMLVIMLFSELGRDMSRWPDASHFVSWLGLCPDNDISGGKVLWRGARHTKNRAGTLFRMAAYSLHRDQSPIGDYLRRMKAKLGPAAATTATAHKIAIIFYTMVSRQVEYDPSIWAQRDAMREKRLEARLHKQAAQRGYKLVPLEEKPAA

SEQ ID NO: 307353 - protein, 304 aa, unidentified
MNNTTAGHAELLRWLTDRELPPGTPVVLEATGPYSEAVAIALSDAGWAVSVVNPARIAGFAKSELSRNKTDKADAKLLARFAQRAELANWEPPSRAVRELRALVDRLQALIDMRQQELNRLEALGQGTVSNVTGMVQEHVAWLDEQIRKIQSSIDDHIDGNPELKRDAQLMQSIPGIGTRSTAQFLAYLGDVRRFRNAKALAAFVGLTPKQKQSGTSVKGRTMISRTGHAAARKALFMPGMVAKRHNPVIIALAKRLELKGLPPKAIIGASMRKLVHLIYGVIKSGQPFRAEIPMRGLEIQEGI

SEQ ID NO: 307354 - protein, 339 aa, unidentified
MSIIGCDLHSRYQVIALVETETGEMVTRRLEHENGEARAFYATLPKPSLIGMEATGYTQWFERLVAELGHELWVGDPAAIRARAVRRQKTDTRDAEHLLDLLLTKRFPRVWVPTPEERDARQLLKHRNKLVRMQTSVRNQLHFLAMSQGVCRKKKLWSARGRAELEGLSLGPWASQRRKELLELLDQLGPRIAELDQAVKTEAERRPEAVELMKHKGVGPVTALAFVLTIGPIERFRNSRALVSYLGLNPREDSSGGHQRLGHISKQGNQMLRWLLVEAGHSAAQFDPELRRKYQRLVFRRGRNVAKVALARHLTVRLYWTLRQASSATPPAHTPGSPR

SEQ ID NO: 307355 - protein, 342 aa, unidentified
MTISSPPSYDLFVGIDIAAATASVAWKIPDQKVSRALTIDQTPQGFHSLQQRLLATNHPANCILVVMEATGSYWMTLATTLAQAGFAISVINPAQAHHFAKALLKQAKTDAIDAQTLAQLAALLQPAVWNPPPAIFVELYQRLTERESLMQMRQQLRNQLHALTHCPTVIASVQTRMEHLMESLTKQILEVEAELDEALSLDPLWAASATRLQTITGIGPLTAAWLLVTTLNFTLCSTVEELTAYAGLAPHPFQSGTSLHGRASIGHTGNAALRTAVYLATLSAAQYNPVIKAFYDRLRAAGKPMKVARCAAARKLLHIAFAVVTNKEDFDPLYAAKPRKAA

SEQ ID NO: 307356 - protein, 340 aa, unidentified
MSISHEPEQLNDRQRSYTSPGTPLLYGEEEQMATSSHVGIDVSKDRLDVAVLGERQETQVENSREGIARLVEQMQDLQPELIVVEATGGYQRSVVDALFHAGLCVAVVNPARVRQFAKACGLLAKTDKLDAQMLAVFGQRVQPKLYTGKSEAEKQLSALLVRRKQVEEMLKAEQNRLRTVFPSLRSSLERMIAILKEEKKRLDEEIRGLMNDQKAWQEQMEILESAPGVGPVTTATLLAELPELGKMDRKKIAALVGVAPMNYDSGKKRGYRKTKGGRGEVRSVLYMSTLVATRYNPVIQTQYQQLLKRGKLKKVALTACMRKFLTILNAMMRDQQPFRL

SEQ ID NO: 307357 - protein, 310 aa, unidentified
MRTTFEEYWGIDVSKNWLDIAIGDKAFRVEQNKKSIKEFVNFHKKVNTLAVLESTGGYEKPMARYLEKSGVVVHIAHPNKVVAFAKAKGRLAKTDKIDAHLLKEYGKFINPNEIKKYITEKQEELELLGARLEQLKELHHQEICRAGIALSPLIKKSLKKTTMLIESQIKTIGKAIIAIIDSDPGLKEKYNLLRSMKGVGDVLSIALMTSLPELGEANKKEIAALVGVAPITKESGQKIGKASIRYGRPNVRRVLYMGALTACRYNLKFKDFYEKLVKAGKPKKVAIVAVMRKMIVTLNAMAQTKTYFNT

SEQ ID NO: 307358 - protein, 318 aa, unidentified
MNTSTLQNINVGVDTGKSQLDFYIRPLDIYFTVSNDDKGIKEAIKTIKKYSPERIVIEATGRLEMPFIIACAEANLPFVIANPIHVKRFAGATGRRAKNDRLDAELIAHYSEAIKPTLTQLRPENMRAMSDLVARRNQLLNMQTMEKNRLQILPKSLASTINPILTAFKNQITKIELKIAKMIEESPEYQAKNMILQSMPGVGKIVAASIISNVPELGYITNKQAASLIGVAPITKESGRFKGKRTIQGGRSQVRTVLYMAMMSAMQCNPIFKRNYQRLLQQGKPKKVAIIACVRKMVVILNSMLRDGVMWDETVAKN

SEQ ID NO: 307359 - protein, 312 aa, unidentified
MYYIGIDVSKKDLSVFDGKKDLKFINKEGLRSFKKYLKKKVNFSDLVIIFEPTGVYSLYLKEFCAENNIKAYIVNPKKSHNFTRALGRRSKTDKIDAQILYQFHKLIEAKDIKIPRIDQQAKTLASYLTSYEFALKQRISLSNHLESLRDKSLIALLKKDLKRAKKLEDKIFNDILEYVSKNQNLKEDYQRLLTISGVGDKTAIALLTLFKTYQGTNRAQITALAGLDPVRRESGTSVKGKVKISKNGKGIYRKIFYLPTVCATVHNQKIRVFYQRLLAHHKIKKLAVIASMRKILLIAHAMYRDKTEYVAV

SEQ ID NO: 307360 - protein, 355 aa, unidentified
MNAIKYIGMDVHLATISIAVLDGNGKLIMEVTIATHAGALLDFIRGLSGSLNVTFEEGTAAHWLYSLLEPHVARVVVCDPRQNPRRLGEKKSDRLDARKLAELLRLGSLKPIYHGNALGPALRELWRSYDTLVRDTTRVMSRLKALYRARGIRCAGTRVYSPRFRDQWLEQLDEPGVRGRAERLYKQLDALLPLRQEARAALVAESRKHPAQKILYSIPVLGPVRVALLLALLQTPYRFRGKRQLWTYAGLALVTRTSADYQMVDGQVKRARKPALVLGLNANHNHTLKGLFKDAAASALAHPGPFKDFYTTRVAQGMKPELARLTLARKIAAIVLTLWKKGEYFNAEHVRAQAA

SEQ ID NO: 307361 - protein, 354 aa, unidentified
MDSRKYIGMDVHQASISIAVRDANGKLVMESVIETKAATILECIRGIRGNLWVAFEEGTSAAWLYDLLKPHVAQVIVCDPRKNALLTGNKNDRVDARKLSDLLRAGLLTPVYHGESGVRTLRELSRSYLTVTKDLTRVMNRLKALYRSWAIPCAGEKVYSPRHRSAWLEKLSEVGVRRRAEQLYQQLDMLLQIRREARRELLRESRKHPAQELLRQIPRLGPIRVALVIALVQTPHRFRTKRQLWAYCGLALQTRSSGEYRFTGGQLQPSQKLPALRGLNINHNHDLKNLFKSLATHVSTSSGPLGDFYQSLLAKGMKPAMARLTLARKMAAIVLTIWKKGERFDPEQLKRQAA

SEQ ID NO: 307362 - protein, 338 aa, unidentified
MAILYVGIDLAKNVFAVHGIDEGGKPALVRPAVPRARLHELIASLPPCTVAMEACSGAHHWARLFAARGHTVRLIAPKFVTPYRMSGARGKNDAADAAAICEAVQRPAMRFVPMKSLEQQSQLMVHRARQGFVEARTACINRIRGLLSEFGQVLPLKADTVRRQAGALLEDLPGWANTVIGDLLSELHRLDERIAAYDRHIAQIGREDERAKRLMRLAGIGATTATAVVAMIGNGHEFKCGRQFAAWLGLTPGQYSSGGKTRLGRITKAGDAYVRTLLILGARAVLAAAKGNSDGISSWALTLRERRGYWKAVVAIAAKNARLAWAVLARGEAFKMPA

SEQ ID NO: 307363 - protein, 422 aa, unidentified
MLPEGPSVVAWICLDWADQRHEVRLQAVDSSQVESFSVAQTPEALDAWVCQLRRRFPLGFLAVAVEQSRGPLIYALMKYDFLLLYPVPPKMAADYRKVFSGSGAKSDPQDANLLLDLLRCHRDRLRVWRPDDAQTRQLGLLAEHRRNFVDQRTRLTNQLTSLLKQSYPQALAWAGELGRPAAARFLQQWPSLAAAQQADRSDLRRFYQANGRWDPTALEERLDQVRQAMPLTTDTAVLESSTLMITLLAQQLLVLLSAITQVEKAIAELFPPHPDHALWDSFPGAGAALAPRLLAAFGADRQRFASAVEVQQFAGIAPVTESSGQNRCVHWRWACPQFLRQTLHEFAGCSIPQSAWARAYYQQQRDRGKGHHAAARALAFKWIRILYRCWKDRTAYDEHRYLEALARRGSPLLARVTATTQA

SEQ ID NO: 307364 - protein, 425 aa, unidentified
MNYKQNEKINQVKESALVVGIDIGSTTQYARAFDRRGIELGKVFPFSNSREGFESFKAWMQHLQDKYKKLDAIVGIEPTGHYWFDLGAYLEDEGILLVMVNPYAVKQTKELDDNSQSKNDRKDPKVIAKLVTEGRYSAPYTPDGVYADLRIMVTNRKRLIREMAQIKNRFARWFAIYFPEYTDVFGDYEAQSSMLLLKKACTPEAIVELRAEKINQIWRDAKLRAVGMKRATTLCETAKRSIGLKKGSSAARYEMKLLLEDYEYKKAQLDAVMEEIEKLCRKIPESEQMLAIKGIGVITVAGFLAEVGDVRRFESPRQIQKLAGLSLRENSSGKHKGQTTISKRGRSKLRAVLFNAAIPLIAKNPEFKSLHEYYTTRANNPLKKKQSVIAISCKLIRVFYAILANGVTYDPQNMLSDIHRQPQAA

SEQ ID NO: 307365 - protein, 356 aa, unidentified
MSEGSWVGLDVHARSVVAGVIDGVSGEVRSLRVPPGPAETVAWLKRLPAPVRVVYEAGPTGYGLARACAGAGINCVVAAPSRIRPAADRVKTDRRDAERLARLLRLGEITPVRVPEPEEEAARDLVRAREDARGDLMRARHRLSKLLLRHGMVYDATAWTRAHDAWLRRQRFQSGPLAIVFDECYGRMLDAKTRRDTLDRAITELAGAPPYVDVVERLVCLRGVSTLTAFALTVELGDWNRFRPTSLGPFLGLTPSENSSGERRRQGAITKAGNSHARRLLVEAAWHQRRPPRLSVTLERRRTGKSLAVRAQADRSARRLHGRWHALEGRGKPRTIVVVAVARELAGHCWALATME

SEQ ID NO: 307366 - protein, 401 aa, unidentified
MDPHLCVGIDVGCRTHRVGIAHPDGSILEEFDISHCDTGFRELLRRIENRRQKLSLPVAVAMEGYNGYARPLDRLVQEKGYRLFNVNNLKLARFKEVFPGAAKTDSIDARKILELFRLKDQLPLAKDAIQEVVGVPAVNEKLKRLSRRRRHLVIEKMRVLNRMQADLQAVCPELLAATNDADNLWFLRLLTFRDDLQQLARLHHSTILQISGVGQKYAKRVREWQAKAKFSGEVEYVGPMIIQDAQRILELRTQIHTLDEVMADLAEQSEIACRLSTIPGFGKTSIAELAGEIGTLERFASEASLALYLGMCPLTRQSGQMCTARAPRQVNTRCKAAMMTTVARHIGCVPQSRAYYDRKRAEGKTHNQAIRSLGRHLVRVIWAMLRDQRDYETRHDIHPAT

SEQ ID NO: 307367 - protein, 312 aa, unidentified
MMTNNSIGIDISKDFLDAHRQCNGAAARFPNTPTGFRALSTWLGEDMPSLVVFEATGPYHGHFERTFSGKLPLVKVNPLQARRFAQACGTRVKTDAVDARMLANMGSSLALEPDHPLDEKQYELKELFSSRGGLMKDRTRLINRLQTQSLALVKRQTKARIDQITRQLKVLQQDINTRVKDCPNRARANTILRSIPGIGEVAAATILIEMPEIGRLDKKRAASLTGLAPMTRQSGKWRGKATIQGGRKHLRDALYMPALVAARHNPDMRDKYKAMIKQGKPQKVALTAIMRKLIELANTLVKADREWVQNST

SEQ ID NO: 307368 - protein, 421 aa, unidentified
MAMVQQVHRWLGRAIGLDLHRVFCEIAICESGQTYGGGRVKMTDEGIEALASSLEPTDRVVMEVSSAAWEVARRLEGHCQQVVVVSPDDTGIAHARTKTDKIDARTLASLLWKGELDAVWSPDDRVRVLRRRLSRREQLVRARTRAKNEVHGVLMRTLQGKPPCSDVFGTKGRRWLAHLQQQLAVEEAETLGSAVRQIDFLDAEIEQVERSVAQQMLAWPEAKRLLTVPGVNLIAAATFLAAVGDIKRFRDSRTLVAYLGLDPRVRQSGEQPARPGRISKRGSSSARWALVEAAWTVVNQPGPLRGFYLRIKARRGHGKAIVATARKLAVLFWCLLSRGEDYAHQQPSLTALKLRRLEVAAGAPTRKGKPSGTWATREQMRHAEKQLAAQAQASYERTVRDWQTAAPKKKAVGASVTAERA

SEQ ID NO: 307369 - protein, 467 aa, unidentified
MSQPLNKSAPRTPASKTKPARKRAKVSILSIAYPNACGIDIGATSHFVAVPSDRDDEPVREFPAFTADLERLVQWLRRCRVTAVAMESTGVYWIPLFEMLDAAGFEVHLVNARHVKNVPGRKSDVLDCQWLQQLMSYGLLRGGFRPAEEVCALRAVWRHRDMLLSYQARHVQHLQKAMTQMNVQLHHVISDIMGVTGQAIVRAIVAGERDAATLAKLRDRRIKADEAEVAAALQGNWRDEHLFALKQALALIDAYAAQITECDGKLQQLLGALKGHALPEAGLGTPKRGTPAKNSVRFDARTSLFEASGVDLTRIPGIDTSTALKVISEIGVDLARFPTVKHFTSWLGLCPGTKISGGKVLSSATKPCANRAAQALRMAAQALRKSQTALGAHHRRLCSRMDKPKAITASAHKLARLVYFMLTKGQAFVEAGQDEYEERYRQRVVQNLTRRAHQLGFLLTPQETSSA

SEQ ID NO: 307370 - protein, 467 aa, unidentified
MKLYLGGDVSKGYTDWVILSDKKQTVLENFQLDDTYEGHCKLYLTIEAYFDKYPGLEMYAAVESTGGYENNWVHTLKSYQKVFNLKVARVNPAGVNYNRRAGMKRNVTDAISALSIAEYMINHPENIIYDQDEKWKTLCRHWNFVEMQKKQRVQTINQLETILYCANPTLLRFKKNKLPNWLLELIIKCPTAGKLAHSKPEKLAKISFLTLKKAQGLVAEATQNIASATDRNSEILVRQIARQIKAFDENIKSQMKLIEKEFICPGIEILKSFQGIDTTSAIGILLEIGTIERFPTVKGCSCFYGLHPKFKQSGDKIIGVRMSKQGSKNMRKILFNIAKGAITSNPLIRDLYQKKLSEGMSKMAAIGVCMHKILRIIYGMLKNNQAFDPSIDKHNNERSKSKQQEKKQQESANIDKSRRYQKFDATAPISRKQIKKRKEHDLSQCEISSQSTGSICPSDTKILKVKH

SEQ ID NO: 307371 - protein, 358 aa, unidentified
MNNHMIQGYVVKGKEVFVGLEDSKKTWKLAVRCDRMLIRQASMEARYPVLLSYLRNNFPECTINLIYEAGFKGFTLHDRLTEDGITCVVIPPHLVTEPKVNRVKTDKRDAGRLALILENGDMPSLCCVPDRERREDRQVSRTLIAVVRDIIRTRNRIHKLLDFHGIGVPFEMKAKWGEKEFGILRELPMSAPLRASLDVLLDLLEHLWRHRETLTAYLKGLCDKERYRKAFAIAESLPGIGWKTAIRFVLEFGEDFSRFTSGKKIAAFAGLTSREHSTGETERRGKITGLGQGFIRSTLIENSWAAIRKDQALLAKFTRVWRNSGSKKKAIVAVARTLVIRLRACMVSGTPYATGIVR

SEQ ID NO: 307372 - protein, 342 aa, unidentified
MEAIVTIGLDIAKSVFQVHGVDADGAVVVRRRLTRAKVLSFFERLPPCLVGLEACATAHYWGRELRKLGHDVRLMPPSYVKPYVKRQKNDAADAEAICEAVTRTSMRFVEIKGPDQQSVMSLHRVRQMLMRQRTQVSNAIRGHLGEFGRVAPIGRNGLAQLIAIVADPNDNTLPDDARVAVAMLAAQISIVNEQILELDRRVRASARATDVGRRLMEVPGVGPVLASALVATVQDPRAFKSGRNLAAWIGLVPRQNSSGGKERLGGITKQGDRYLRQMLVVGALAVIRYAQRHGTRRPWLVRLLARRTTKIAAVALANKTARMIWAIMTSGEPYREPVPRAA

SEQ ID NO: 307373 - protein, 358 aa, unidentified
MRIIGVDLHTRQQTVAMLDTETGELVEKTLQHDGDEVRKFYSALPSRVLVGMEATGSMHWFLELLDELGIDHQVGHPSEIRKAETRKQKHDRRDAALLLKLQVQNRFPSIWMPSTALRDLRTLLLHRHQWVRMRTRIQNTLQAIALSRGLRRGKTLWSQLGQHTIASLPLPPYAAHRRTELLALYGKLQAQIDELDEQVRDQALQRPGAKLLMTHPGVGPVTALATDVFLGDPARFEDGKAVVSYVGMIPSEYSSGGQQRLGGLSKQGNPFLRFLWCEAAVHAVRRDPELQRFYRRKLAQKGLGKAKVAAARKLGIRLWIMLRDQIDYQEFCRRGQLRQKNGGACAGMPEVGHSPVMQ

SEQ ID NO: 307374 - protein, 355 aa, unidentified
MSSEKYIGLDVHQATISVAVMDSQGKVVMESILETKASTLLEFFAGLRGSLFVTFEEGTWAAWLYDLLKPHVTEVLVCNPRKIPLLKQGNKSDKIDARKLAERLRLHDLKPVHHGETGIRMLRELARSYLTIVKDLSRVMNRLKALYRSWAIPCAGRDVYYTRHRSQWLEKIPEAGTRRRAEQLYQQLDMLQHLRQQARRELLAESRQHAITAKLRQIPSLGPIRSALAVALIQTPHRFRSKRQLWTYSGLGLETRDSGEYHFVQGQVRRRKKQATIRGLNKDYNHDLKGLFKGAATRASVQPGPFQDFYQRSLAKGIKPTMVRLTLARKLAAITLTLWKKGEDFDLNKLNSQAA

SEQ ID NO: 307375 - protein, 412 aa, unidentified
MDVIVERCAGLDVHRDSVVATVRVPGKGKSRRRRAQQTRTFGTTIAQLEQLGNWLEGFAVTLVGMEATGVYWKPVFFVLERRFECWLINAEHLHNVPGRKSDVIDSRWLCELLEFGLVRPSFVPPPEIRRLRDLTRLRSTQAEERTRAIQRLEKVLQDAGIKLTSVASGTYSVSARAMLEALLGGVSDPACLAELAKGRLRAKIPQLQEALANRFDIAHHGVLVAGLLAHIDALDQAVAALDARIAAATDAELIERLSTIPGVKRHIAEVLIAECGVDMSVFGSAQRLVSWAAICPGTNQSGHRRRSGKTRRGNPWPRTALTQAARAAARSKNTYLASHYWQIRGRRGEAKAIGATRHDILIAYYHIVHERVPFRELGPDWLARRHSPEHRTRRLVKQLEALGHNVTLEAAA

SEQ ID NO: 307376 - protein, 356 aa, unidentified
MGKNTKVDFTGQDIYVGIDTGKKSWKVSIQTKEIEHKTFSQPPIPGVLVQYLRRCFPGAKYQCVYEAGYFGFWIHDALREQGVECLVTHAADVPTKDKERRNRNDRVDARKLARSLRNGELSPLYVPTRSALENRSLVRTRMSMVKKQTRCKNQIKAFLSFYGYAIPDELVRSHWSRRLIHWLESLSFEGDSGNQSLQTYLEELKHLRDSIAHLTKEIRTLARQEPYRTQVELLDSIPGISTLSAMILLTEIVDINRFRNLDHLASYVGLIPGEDSSGDQERSTGISHRRNAHLRSMLIECSWVAAREDPALLMAFSKLSKRMAKNQAIVRIARKLLNRIRYVLKHQKPYETSVVI

SEQ ID NO: 307377 - protein, 317 aa, unidentified
MTAPSLCIGIDVAKGELVVAQWPDPAPWVVANDESGVRTLVDQLRALGPALVVLEATGGYERAAVAAVAAAGLPVVVANPRQVRDFARATGQLAKTDRIDAVLLALFAARVQPEPRPLPDAARQALDGLLTRRRQVLDMLTAERNRLAQALPPIRRDIAQHIRWLERRLHDVDQDLDRTIQASPVWRAQENLLRTMPGIGPVVSRTLLGALPELGTLSRKQIAALVGVAPLARDSGTRAGKRLVWGGRAPVRAALYMAALVATRRNPAIGRFYQRLLRAGKPKKLALVACMRKLLTILNAMMRTNTPWQPLAAPEYP

SEQ ID NO: 307378 - protein, 421 aa, unidentified
MLGVGIDWAEEFHLVALGRPGEGVFDIARVEHDPRSIDALIARIALLEPDPAEVRVVLETSYGMLVERLVDAGYAVVPVNPDLVARRRGPAKKKDDTEDARIACLIALDRFERLRVLVPHGDEAAELRAVTRDDERASRDERRLLNRLRADLIATFPAALAIAGDDMGSPTFLRLLERWPTANALAAASRGDLVSFARAGKHGWPDRFADKVQAALAEDRFVARGWLVRAKADTIRLLATQLLALGAQRRTLERRMGELLLGAPRHGRAKQPKDDQRGPAAPGGEIYLSFPGLGDRLAARVAGEIGDIGNFASPNGLQCYAGKAPVTRRSGKSELVVANRLACNGHLRDAVQQWAFCSLRGSMWAREFYDSQRARGKGHHAALRALGNRWLEVLWHCLHRGVAYNEATHAANRNRALQRAA

SEQ ID NO: 307379 - protein, 412 aa, unidentified
MKQIRDSVAGLDVHRDTVVACCRVAGPNRSVEVTKRSFSTTAKGLGVLAAWLSEAGVATVAMEATGVYWKPVYYALEGLFDELWLCNAQHVKNVPGRKTDLTDAEWLADVAAHGMVRPSFVPPPEIRELREVTRYRKTQVEARGKEIQRLEKVLQDAGIKLTSVASAVWSVSSRAMIEAMIDGERDPKVLAEMAKSRLRVKIPQLEEAFSGHFGAHHALVCRAIIDHIDFLDHTIASLTAEITTRIAPFEAAVTILCSITGVSRTTAEVMIAEMGVDMTRFPTAGHLCAWAGVAPASNESAGKKRPAGTRHGSTWLQRSLIEAARAAARTKGSYFSAQYSRIARRRGPNKAAVAVAHSILAVAWHLLTNGALYDDPGARYFELRHDPAIEAKRLQRRIESLGYTVTVSEKAA

SEQ ID NO: 307380 - protein, 403 aa, unidentified
MNAVGIDVSKNKSTVAIFQPGENVVLQPRDFRHIRSDMNALIQIIKGLDGETKVCMEHTGRYYEPVATWLSDADIFVSAVNPILIKEYSTDSLHAPKTDKADAQKIARYTLDRWAKLKQYGHMDKTRNQLKTMNRQFEFYMGQKTAMKNNLIALLDQTYPGANTFFESPARSDGSQKWVDFVYTYWHVDCVRGKSLKAFTDHYMNWCRRKGYLFSSDKAKKIYDSSADLIAVFPKNATTKMLIHQSVEVLNTISETVESLREDMDHLAATLPEYPVVMAMNGVGPTLGPQLMAEIGDVTRFDKRGALTAFAGVDPGKNESGQHIPKSAPTSKKGSPHLRRTLFQIMESLIQRSPEDDPVYAFMDKKRAQGKPYYVYMTAGANKFLRIYYGRVNEYLSNLSESE

SEQ ID NO: 307381 - protein, 345 aa, unidentified
MYTTQHPLYCGIDLHARTMDVCVLSQSGDVLVPRHMKTDPETFLKAIAPYRQGLVVAVACMCTWYWLADLWADAGLPCVLGHALSMQALHGGKAKNDQSDSHKIATLLRGGMLPQAYVYPAKMRATRDLLRRRMHLAHKRAELLAHVQNTNSQYNLPAIGKKIAYKANREGVAERFADAAVQKSIEVDLALITYYDALLRDVELTIVHTARHHDANTLHLLQTVPGIGKILSLVLLYEIHDVHRFPRVQDFVSYCRLVKCARESAGKRYGTSGAKIGNAHLKWAFAEAAVLFLRDHPAAQKYLARLEKKHDKGKALTILAQKLARAVYHMLTRKVAFDTETFFQR

SEQ ID NO: 307382 - protein, 348 aa, unidentified
MDKITAVGLDLAKQIIQVHAIDAAGRVVLRKAVRRERLLALLAQLPCCVVGMEAGSGAHHWARELKKLGHEPRIMAAEFVRPFRKSLAAKNDANDAEAICTAVVQPNMRFVSIKSVEQQALLSLHRVRQGLIEERTASINRLRGVLAEFGVVLPQSAAVLQRALPALLADDGRLPPLVQRSLQALLEHRRDLDARIAGFDRAIAQHARSSASAQRLGALSGVGPLTASAVVATVGNAQDYRNGRQFAAWLGLVPRQYSSGGKRKLGSITRRGDAYLRALLIQGARSTLQAALRRAPARHDRLSAWVVQLAQRVGYHKTLVAIANKHARIIWALLAREQSLDLARASTP

SEQ ID NO: 307383 - protein, 454 aa, unidentified
MRKPQVVPDEDHEVVYERVAAVDVAKASGVVCMRTPDPARPGRFVNRIWDDVPATRARIAELGRELLRCQVQMVTLESTSDYWRVWYYVLESIGLAVQLVSASQARNLKGRPKTDRLDAMWLARLTQWGMLRPSLVPPAAIRRVRDFTRARTDLVRERTRCLQRLEKLLEDAMVKITSVAKDGLKAKSVVAMVAALIAGERDPRTIADLAKGPLRGKRDALAEALDGMFDSHHGVIAQMLLDQVAFLDQRITAMEDQAIAALAQVEESWGVDATGETGPGCGTGPDSQVLAAAYRLAEIPGISVWLAIVIIAEITLDMTLFPTAAHLVSWIGLCRSATQSGARHGKGKQKKGNSYARAAAGQAALGAAGTDTFLGERYRRIARRRGKAIAQVAVARSIMIIVWHLLSDPQARYRDLGPDWHARRTNRDKKIRTHIQGLQALGVTVAITDDDHAA

SEQ ID NO: 307384 - protein, 392 aa, unidentified
MRFVGIDIGAERHSVAIVDDGGRVVGKSVSFEEGAAGYRRLGELLGSPADCLIAMEATGHYWKNLFASLAAEGFQIVLLNPLRTRRFAEEELQRTKTDKVDAVSIARFAAQKRPTATTLHGPAIEELKQLVRLREQSVQHLGDRVRHLHKAIDLTFPEFTRHVRGLDTELATAILLRYPTAKALRTISVRKLAGLCYDGRRGIGDDLARALIEAAKISVGHFSSEPYQLQVRYACEDIVSLRTRVRGLETDIELRLNTHEVGKLLTTIPGVSTLTAARIIAETGDPARFRSAAAFASYIGAVPRLHQSGKKRYSGKPAIPLGNARLRRALWMPVLVGIRLNPWLRTYYLRLRAAGKRPKVAIIAAMHKLLIAIYSVAKHRTPFVLQLPATLT

SEQ ID NO: 307385 - protein, 349 aa, unidentified
MTQFSRIGLDTSKALFTLHCVDAAGKPLLRVNLRRSQLLGFFKRHAPTVVAMEACGGSHHWARKLMALGHEVRLIPPQYVKPYLKRGKNDRNDAEAICEAAGRPGMRFVPVKSEEQQAEAMVLKVRATLVEQRTQLINAMRGHAAEFGVISGRGTGKVTALLAAIAADTAIPPVAQEMLALLGEQIAHLDCRIKALEAKLEAMHKANAISQLLATVPGIGPIIGLSFALEVDPVAFISGRHLAAWLGLTPQEHSTGGKQRMGGISRAGNERLRALLVSGAMAVIRAAERAGSKLATEWLLKLLARRPKKVAAVALANKMARMIWAMMTTGEAYRRPAAPAAARLSAAIS

SEQ ID NO: 307386 - protein, 344 aa, unidentified
MEVGTMVVGIDSHKETVAACVVDELGGELATAIFPNTGAGHDSLLSWARSRGEVSLFGIEGSGGVGYALARRLATLGEGVVEVPPFLTVRERKHLRQRGKSDPADALAIARVVAREADLPRFLIHDRARQLGQILNYRDQLVEERTRGANRLHSELTRRHPGYQAEIKNLVSRRSLRRVQALIEAGASIETALLLRRLSSLRLLSSEIADLNVHINRLVEQSRTGLIDITGVGALVAARILAEVGDVQRIASESRFAALNGTAPVPASSGTIQRHRLNRGGNRRLNRALHTIAVIQAHLDPRARAYLQRRRAEGKTQREAIRCLKRQLSNVVYRQLVADRGRLR

SEQ ID NO: 307387 - protein, 413 aa, unidentified
MEAIYERVAGMDVHRMEHVVTILVAQQDGTLSQETRRFGGFKRDMRALVGWLRSQGIQLVVMESTGIYWKSVFAHLEAAGIPALVVNAFHVKNVPGRKTDVSDSEWLAQLARFGLLRGSFIPPKDLRELRVVSRYRRKLAQTLAGEKNRLHKVLDDAGIKLGGVVSDIDGVCARKMIEGLIAGRTPAELAALGRGKLKSSDQVLQAAMDGELSPRHRLVLSTAFNHLRYLEQQLAQLDRYLFEAIKPYAWAWHLLQTIPGIDKISAAMILIEIGVDMQRFGSASRLASWTALCPGNHETAGKRKSGKIRHGNPIVRYLLCEAANAARRTKTVFRAKYTSLTIRRGHKKTIIALAHKLLRTIYFVLVRRQPYHDTTVDYEAAIVAKNAPRWIRALKKYGYWPKPAAANPATATA

SEQ ID NO: 307388 - protein, 342 aa, unidentified
MTIAVLGIDLGKNSCSLVGLDAGGRVVLRRRMRRETVIAFGAKLTPCVVAMEACCGAHHMGRALAAQGHTVRLMSPEYVRPYVKAHKNDDRDAEAIAEAATRPTMRFVALKSEAQLDMQTLHRVRDRLVGERTALMNQIRSILLERGHVVPQGRAKLAGFLTSLLEAEEGVILTPRMQALVADVCERWQLLDQRIAALDAEFAEQARTDEAARRLTTIPGIGALNATALVAAIGDVATFARGRDLAAWLGLVPRQVTTGGRPKLVGITKRGSKYLRKMLIQGARATMPTLRQSDTRLGQWLRGLLARAHANTAVVALAAKMARIVWALLRHERVYEATAVAA

SEQ ID NO: 307389 - protein, 338 aa, unidentified
MLHSGIDLHKRDLVIATVDSDGRHVREARLPTTRAAVASYFAALPGPHRAVVESTSNWYWLRDFCGSMGVDLRLGHSKYIKAISYAKVKTDAVDAATLAQLLRSDLIPDAHMVSTERREARDLLRARLQLVVQQTRAKNTITGLLAQYNVTTPKALPAFGQLRVRFLTEQLTLMATQVKMLERELVPLLVPDEDVQRLLWIPGVGKIAAFTLLLEIDGIERFPSARDFVSYCRLVPGAGNSGGKTRHKRSKDGNRYLKLIFTHMAVRAIQYYPEVSAFYQRTARRKKKIVARALVAKELARLVYYVLHNQEPYNGTFKGKQLSRTKKPKWPRLTNPSV

SEQ ID NO: 307390 - protein, 348 aa, unidentified
MAHFVGLDVSVKETSVCVVDDAGKVILEQKVPTEPSDIIALLTSLGVTYGRIGIEAGPLSQWLFNALTAAELPVICVETRHMKALLTAQQVNKTDRNDARGIAQMMRVGLFKPVHVKTLVAQEQRMLLTSRKLLQRKLLDLESDLRGTLRNFGLKVGVVSGGRYEARVRELVAGFARLAAIAEPLLNVRRVMRQQLAVLHKMLLDTVRDDPVCRRLMTAPGVGAVVALTYRATVDQPQRFVHSRAVGAHVGLTPKRYQSGEIDYDGRVSKCGDALLRTMLYEAAHSLLTQNRKWSWLKAWGVRVAQRRGMRRAIVAVARRLAVVLHRMWIDGSEFRWRKDSAAAPAAA

SEQ ID NO: 307391 - protein, 326 aa, unidentified
MVYVGIDVAKDKHDCFIANSDGEVLYDVFTIQNNMDGFEDLFFKIKTASRDLSKVKVGLEATGHYSCNILEFLHNKGLTTIVINPLHTNAYRKSLSLRKTKTDKADARAIASMIMSDVSLKPYSDTVYHNEDLKSLSRYRFDKVSDRSKLKQSVSRLVNILFPELEKLVSTLHTKAVYELLSEFPGAHQVASANLKHLTALLSTASKGHFGREKANEIREAARRSISTYLPAKSLELRHTIKLIRELNAEIAEIETEIKKIMDSIDSPILSIPGISYGIGSMIVSEIGDFSRFDSPDKILAYAGCSPTTYQSGQLYSSLPARSDDE

SEQ ID NO: 307392 - protein, 434 aa, unidentified
MKEITEDYFEKDILHPVCCGIDVHKTWNFAAIVINDVEHHVAHYKTERFSNFAKGQKALTEWLKMNHCTIACMESTGQYWYPVFDAIEDAGLHPVVAHPKYTKPQHGKKSDPSDAIWIGKSYASGRVIPSFIPPRKFRNLRGLVRCYVKLSYTANSNKNRVLNCLTDAGIKLDDTFSDVFGKSSRAIVNHIIQHPRELFDVTPFIDKSCKTPIPKIQEAIAKVPEMSDAILKKMEIALEIVDKHEEYRKEIQETVEKELGEYQHILDLIRTVPGFNTNSFTAVRVLVEIGLDIHVFPTAKHFCSWAGVGANHDSSAKKVKSRKISKGGQYLKPLLVNIAKAVVRSKNHPEITRRFNRIKNRRGYMRAIIAICKMFLTAIWNILSKDEPYRADGYMTKNNKAKKIMTTSQALALLRSRGYTIIDHNSEPLTTTGS

SEQ ID NO: 307393 - protein, 318 aa, unidentified
MSKTAQWIGIDVSQQTLDVYIRPLGQAIRIPNSPTEIAQLVESWKGEPIKRVVVEATGKLERELVIQLQEAGFPVSVINPRQGRDFAKATGRLAKTDAIDAQTLAYYGSALKPPVLESSSAESRQLQELMSRRRQLTEMQTAEKNRSSRARGKALADIKAHLEYLKGRLEQLDAEIEELTHSCEEWSSKVELLKTMPGIGQRIATTLVSDLPELGQLNAKKIARLVGVAPLNFDSGKYKGQRRIQGGRASVRAMLYMGAVVAMRHNPAIKVFYERLVKKGKPKKLALTACLRKLLVMLNAMVRDHRPWQYSERPVAHP

SEQ ID NO: 307394 - protein, 404 aa, unidentified
MVKYHIGIDVSKRRHRACIHNLAQDSYSGIFSIEVNRQGFEKLIKTLEKLSTNEEDFLIGIEATGSYGDTLSYYLLSRGYKVVGINPYQANQFRKAQGKIAKTDSIDARSLAAQLALGNHKALAIPDPVLDNLRELTRFRADMVKDRSALVNQLHETLSSIFPELATVFSQLDSPSSIALLIAYPGPEYISRAGEAKIAESLRVASRGKMGETLAKSLVETAQSSIGVLQRQPALATKVSILGERLVSLSAAIGRVEKEIADLFHKLPYKPEDFPVGDISSLATLLSEIEDIHRFPTLKQFLSHFGWCPQSFQTGSYNREHPRMSHAGNGYVRRIIWMLSIVAIRTVPRYRDYFQRRVNEGKSKMHVIVAVARKLLSVLYAILKNGIPYDPDWEVNRHFAMARH

SEQ ID NO: 307395 - protein, 343 aa, unidentified
MSFTNTFDYIKTFIGIDVSKQWLDCIIRPSGDWTRCENQPNGFDQLDRWLRERDVDPQTSVICMENTGVYDDRVLQALTEKGWICCLEKTTILEKVTPDHHRKDDRFDAAGLAEYAERYLDKLNVWEPVDEEIELLRQLFSERRRLVTQRAAVKSKCTQSLHHTQTSSVVAQSWQQQLTFYTEHIDQIESRIRTIIKGHQGMTTYDDLIKSIPGIGEVTSWLWLILFYGQTDLDYKKIASRFGYAPHSKRSGTSVKGKTRSSGHGASEVRQCLCMAVRSASTHCEKFKKYKQKKLDEDKIWPIVRNNLANKLIKTICAIWNSEQPYDPNHTSRFDRQKKLLNT

SEQ ID NO: 307396 - protein, 353 aa, unidentified
MEFTMIARSDAACFVGIDLHKDTLTACTIVAKDREVAYRKISCVAREKVREFLAGLPRPSVLAIETVGFYRWLWMEAEPIVDQVVLADARGCRALAGRRIKTDREDALNVAELLMTGRLPMAWAPPGNIQRVRNLTRHRVGLSRDHAKTLHRVKSIMNRLNRPGPARMDAAGLQRYLLASVDRIEADDLTVLWQHQRRLVEVEQDRSAIDRRIIDLMRADGFRRLRTILESIPGVGLVVSATAIAEIGDFSRFPDSKAIGRYAGLTPTGYASADKNRLGRICKTGSPDLRWALQQAAWTAIRCDPDIKKTWLKISKTAGKKAAAVAIARKILVLMWTLVRKDELYKAREPVAA

SEQ ID NO: 307397 - protein, 416 aa, unidentified
MFKIIRFNCCGLDVHKTWIFACIGITDANFRTEYFEARFSSFPKDLRRLAAWLQEHNCKEVCMESASRYWIPVFNALETTCKVTLAHPKYTKPQKGNKTDRKDARWICDLFMCNMIKPSFIPPPDIRHLRDLIRYRTKLTNMLISEKNRAQNCLTVSSLKLDDVFTDVFGKSARSITEYILAHPGEKFNVAPFIDKRCKTPIDQIQDAVDGAICPEQAVKLRECLNHIDELNTHRDRIEQEILTLVKPYSVHLDLICTVPGMNKDPMTAILILSEIGSDMSVFPTAKNLVSWAGCCPRNDKSCKHVKSTRISQAGSCLKPRLVQVANALLKSKNHPEITERYRRIKSHRGHKKAIIAVCKMLLTAIWSILSTGEAYNASGYLIQTPRPTDETKILTQKQALELLRLRGYVIKEESA

SEQ ID NO: 307398 - protein, 350 aa, unidentified
MDHIGIDVHKKESQIYILAEDGEIIERRIRTEGERFAAVLGARPRARILIEASTDSEWVARCLEALGHEVIVADPNFAPMYATRSRKVKTDRRDARALAEACLLGACRPAHRLSDAQRHVRGRLGVRDALVRTRTRYIALIRALLRQHGYRVASGSAEGFTQRVRDLPLPGRLLSVVAPLLAVMRPLNQQLAYSDATIEHLAAQDPRVPRLRSVPCIGPVTAAAFLAAVDDAQRFRHAHQLEAYLGLVPREYTSGETQRRGPITKAGHSRTRWLLIQAAVSILRRHPPLAEELRTWALRIAARRGKQVAVVALARRLAGILYALLRDGSVFAPHHVRAPRPTTAAALVNM

SEQ ID NO: 307399 - protein, 408 aa, unidentified
MRIIGLDIHRAFAEAVAWKDGKLSRLGRIIMRREPLEEFANQLSSSDVVVIEATGNAGSVAAVIGPHVSRVVIANPKQVRLIAHAKIKTDKIDAGVLAQLYASGFLPEVWIADGPTQALRRQVTRRNQIVRQRSRLKNIMQSILHAHLIPSCPHQDLCGPMGRAWLSEQILPGDERLAVERHLREFDRLTDDLKVIERDLAQSALADERVKHLMTIPGINMVVALALIAAIGDIERFAKPEQLVGYLGLNPSVRQSGPGPAYHGRITKQGRGHARGMLVEAGWAAARCPGPLRSFFLRIQSRRGQHVAAVATARKLAVLIWHLLTKNENYLWARPALHARKLRDLELKAGHRAARGQKGTAHAYNLKSHRDQERRWVEQAEAAYTRFVAGWNARGPKARTGAAKEERQ

SEQ ID NO: 307400 - protein, 427 aa, unidentified
MYRIAGIDVHKKKLAVVVSDVEVHGEYQFERCWFGANPEQLRFLSQWLAEHQVEEVVMESTALYWKPVWGALERYWQPICQKREGAGATSGILHLAQAQSNRGPRGRKKDFRDAERLVKRLVADELKLSFVPDWEQRLWRTLTRRRYQLTRARVQLQNQLEALLEEAHLKLSSLVSDLLGVSARRMLQAIADGETNPEALAGLADRRLRATPAQLRDSLGACTELHAVYRRLIKMMLGELKVIEEHTAELNQELATLLRPHQDAVERLAEVPGLGVDSAQQILAEVGANAVVFASDKNLCSWVGVCPGDEESAGESSSHRSPQGNRQMRRLLNQAANAAVKTKGSIFEIMYRRLVPRLGHNQTIGAVAHRLCRLIWLLLRKGVRYEERGPAVSQRSRQNRTSKMIRELRTLGYRVEFLNAVPSNPMP

SEQ ID NO: 307401 - protein, 340 aa, unidentified
MVKENYFVGLDVHKNSTAVCIVDSNGKIVKEKNISGHSKEVCDFLKQNVVGKFDVVFEACDGYGLWYEKLGKLANRVQVAHPNHLKVIWNTKRKTDRIDAKKLARLLFMDLIPGVHVPDISVRDWRMLITHRKKLVQKRTAFKNQVRAILRRNHIKAPKNLWSKKNMLWLANVDLPSHGEILQRDMLIDDLEHVNKQVARVEVELDARAARHPGVSLLKTIPQVGNRTAEAVVAWVDDVKRFSRSKQIGAYFGFAVYEDSSGGKRKQGHITCEGPGIIRHLLVETVWRMKRSNKSVQSWFEKYMHGDPRRKNIAAVAAAHKLSRCMFAMLQGGEHWREAA

SEQ ID NO: 307402 - protein, 319 aa, unidentified
MFNLGIDVAKAKLDCALRLPNGKHRNKVVENNHKGFAVLKEWLLKHDASNPRVCMEATGTYWEGVAEYLAELGMVVSVINPAQIKAFGASRLVRTKTDKVDAQLIADFSHERQPEPWIAPSPATQALRAMVLRLEALQAMRLQETNRLDVAREAVRQGIEDHIAWLDRQIKELIEAIKRHIDDDPDLHDKRELLDTIPGLGERTIPVLLSYYADTERFDNAKQAVAFAGLDPRQHESGSSVRGKPRMSKIGHSFLRKALYMPAMVAVHRTEWGKRFGQRLNAAGKAPKLIIGAMMRKLVHVAFGVLRSGKIFDPTLHAA

SEQ ID NO: 307403 - protein, 412 aa, unidentified
MKKYVLAIDIGKGTSKIGLYGLNTENMRTIKIMKPRNFKHSIEGLDGIGKALSGIPMDQIGVMMESTYVYQMPVVEYFKRKGFDEITVVNPLKIKRTCGDIQKVKTDMVDCDRISAYYFFSQWEKPLTVSKEQREARELSRYIDFLQKEATRVGNKIRQNLSNVFPELERIGDSKGSLFKAGFLNLIEKTPHPLSIRKKTKAGIISTMAGKGRRDSSYAEYASLIIEAAKESLFSATEGGIEASLILPDLARRLRELSKQIEDAEDKLESMTKEMPLFKVLKSFKGIGKGIASHLTAEIWSTEQYATPQKLIASAGINPSRSQSAASIDRYGRIVKAGNRYIRHWLFTAVGCILQQNGLGRGDKRLAEYYIKKHSSERDHHYVATIACANKLLRQVFYRSRDLAKTGQLIVK

SEQ ID NO: 307404 - protein, 449 aa, unidentified
MSNGSGVSRGDRNRNVRLACLREAVPVTNAVVGIDLADRKQVLVVCDHDSKVLARRTFRCKAWDLGVALDWAGERARLAGFSGVTVSCEPTGHRWRVLGQLAADRGMSFVCVQPAASAYARRTEDLTSDKTDDKDAVLIARLTAQLRCYLPEPVDPTWGRLRHLGARREQLLETHTRCVQQIRDLLECVWPAVLDAAAQPVKSTTWVAALAVVVARDDGNLARTRRLGLDRFTRLVRAEVVRRGRAKPCLRIVRKVFAALSETAGVVEHRQAALERIGWILTDWERARADQIVVEARMVAVLGQLELTDLVCSIDGLSPVGAAAILAETGDLSRFTSARAVVKLAGLAPRERLSGTFAGKARLSGAGRPRLRAAAWRAVWGCLQNNRVYAARYRHLTSRETNRLTPTQTVVAAAILRQLHAVVTTGQAWDPDIAAHGLRLANHVGVVAA

SEQ ID NO: 307405 - protein, 341 aa, unidentified
MSASAPLLCVGVDIAARTLAIVFAPTDAPPLPALTLPNDRVGWLALIDRLTANGATRATTLIVMEATGAYWQGLATALHTADWPVSVVSPGRVRAFAHARMRRAKTDAVDAALIADFGHRMTPERWSPPPPEITALQLLLRERDDLIAIRTQLSNQRHAMAHLPQGASALGMARGVVAQVVEEQIAVIERAIKQHASATTTLATEIARLTTISGVGALTAAIVLTEIRPLRGSATPAEVVAFAGLDPAPQESGTSVRGARHISKTGNARVRQAVYMAALSAVRCNPVLKPFYERLLARGKKKKVALVAVARKLLVLMVTLLTHERDFDPTWAIRHVATHPR

SEQ ID NO: 307406 - protein, 389 aa, unidentified
MKIFVGIDIAKLNHFAAAISSDGEILLEPFKFTNDADGFQLLVSKLESFDKNSIIIGLESTAHYGDNLVRYLVAEFYQVCVLNPIKTCQMRKNNVRKTKTDKVDTFVIAKTLMMQDDLRFVSFYDLDMMDLKALGRFRQKTIKQRTRLKIQLTTYVDQVFPEIQYFFKSGLHQHAVYALLKEAPSPKEIASMHMTHLANLLKVNSHGHFTKEQAKELRVLAQKSVGANDSSISIQITQTIQQIELLDSQLEKIEAEMTDIMRFNDSVIMTIPGIGYINGGMILGEIGDIHRFSNPNKLLAFAGLDPSVYQSGNFQAKTTRMSKRGSRVLRYALVNAAWNVVRNNATFKAYYDAKRAEGRSHYNALGHCAGKLVRVIWKMLTGEVEFNLE

SEQ ID NO: 307407 - protein, 345 aa, unidentified
MELHTIGIDLGKTVFHLVGLNLGGEVVVRKKCSRKQLLHFTANLKVERIGMEACGGSHFLGRALREQGHEVRLIPAQYVKPYVKTNKSDYIDAEAIAEAVGRPRMRFVPIKTDDQLDLQSLHRVRERWVMRRTAVINQIRGLLLEHGITLRKGRCHVDAALPGILEDADAKLSGALRVLLAQLKLELDHLEMRIDEADAVIKKTAGENEACQRLVAIPGIGPVTATAAIAAIGSGAAFRKGREFAAWLGVVPGEHTTGGKQKLLGISKRGNSYLRRLFVHGARAVLQQSAKQSSGLSAWLAQLTSRTHRNVAAVALANKLARMAWAVLASNEPYRPPMLAGAATT

SEQ ID NO: 307408 - protein, 414 aa, unidentified
MEQLVERCAGLDVHQAEITACARIPGEHGGVVEIVQEFGTTTPDLLALLDWLVALGVTEVAMESTGVFWKSPYYVMEGHFDRVLVVNAAHIKHVPGRKTDVIDAAWIAQLLAHGLLRGSFVPPPAIRELRDLTRYRKALTEERNREVNRIHKILEDAGVKLAVVAADVMGVSGRAMMRALIEGQADPEALAELAKGRLRAKLPELRKALTSRFRGHHAFLLERMLAHVVDLESDIEAVQERIEEAVAPFGRQVEILDSIPGVGRIAAQAILAEIGTDMRVFPTAEHCASWAGMCPGQNESAGKRKSGKTRKGSRWLKTILLECAHAAGRSKGTYLSERYRQLARRRGKKKALVAIGHDILTIAYHLLSTDQLYQDSGPDRVTSEAEDLAKRRAIRQLTALGYRVSLTPLPGRAA

SEQ ID NO: 307409 - protein, 386 aa, unidentified
MLQPKDDLSRSLVALEQDKTLIAVVELSLATWLVGAIVPGLQRDPLKKLPPDQEGLLGLLRRWRGEAAKAGREISRVVVAFEAGRDGFWLARWLRARGVEAYVIHPTSIPVSREQRRAKTDRLDIGLLKRALLGWLRGEKKHCTMAAIPSLEEEDAKRPTREREHLVGARTSIVNRLKAALVRLGIRGFNPKLRGAQGKLAALRTPEGCAIPPNTLAELERDVVHLRFINEQIKEIEDERQKRLEQSPQLGSNATIRQLQQIAGLGIETADMLANEIISRDLRDEKAVARYAGLTGSPDESGKRRREKGLAKTGNPRVRRGMIQLAWRFLLHQKDSALVKWYRASIAAGKRPKTMIVAFARKLLITLWRFAKTGVVPAGVVLHAAP

SEQ ID NO: 307410 - protein, 328 aa, unidentified
MNSLYLSSEQFALPVLGLDVAKASVQAELRTQERKVRFGFANNAKGFAELAGALVQQGAPKIWAGLEATGPYSQALALWLHAQGHRVSLLNPRRVKQYAQSTGRRNKTDLLDAAIIADFVCAMKPAPWQPPTVEVAQLQALIRRREELCVMLQAEKNRLEGVADNVRPSLQRIIVTLSAQKRRLERLIRQQIRSHQQLCRDHQLLCTIKGIGSLTAAILLAEMARPGQVERARQAAAHAGLAPRREESGSSVRRNRGLGKEGNRYLRKALYMPALVAIKYNAPLSHFACRLRSAGKPKMSIVCAVMRKLIHIAFGVLKHQKPFNPSLA

SEQ ID NO: 307411 - protein, 465 aa, unidentified
MCGGLEEKSASMTKEVIPVKLRRTYRIQEVKGVNVSRLASGREGMALAVGLDVSKAELIVGLCWEDGTYGGPWRTANPGGIRELISLLQKLGQGRQLIVAMEPTGTYGDPIRQALTDAGVTVHRVNGKAVHDYAEVFDGVPSQHDGKDALMVAELAAMGKSSAWPYEESSVEDRERRYWVDRMDSQAQLGQLWTGRLEGLLARHWPEVTELLPLNSVTLQELLAHYGGPGGLAADQEGAQRLSAWGGAALKGEKIAAVMSSARETLGVRQGEFEARQVRECATQLLRACREQQAAMKEVKRLCRGHAVLEAQSVAIGPGAASVLWVLLGDPREYHSGEAYRKAMGLNLKERSSGKDRGQLKITKRGPGAVRRWLFMAALREVQEVGVREWYEAKKARDGGRGGRALVGVMRKLALALYRMAVKGEAYDRSKLFPGHPLEKGKISARARQKGPPHRAFAATSTQPE

SEQ ID NO: 307412 - protein, 404 aa, unidentified
MNNVAGIDVSKGKSMVSVLRPFGEVVTKPFSVGHTGSELKELADYLKSLDGETRVVMEHTGRYYEPVARFLHQEGIFVSAVNPKLIKDYGNNTLRKVKTDKADARKIARYGLDNWVELRQHTPMDTIRMQLKTLNRQQGLYSKTKTMMKNNLIALLDQTYPGVNALFDSPVREDGSQKWVDFATAFWHVECVRNMSLTAFTERYRKWCKRHGYNFRQSRAIEIHTEAQDLIAMLPKDALTKTMVRQAIDALNAVSASLERLKAEMRTLAAQLPEYPVVMAMHGVGDSLGPQLMAELGDVTRFTHRNAITAFAGVDPGADQSGTHEAKSTRTSKSGPPELRKALFLVMDCLLKTRPEDDPVYRFMDKKRAEGKPYLVYMTAGANKFLRIYYGRVKEYLASLENVD

SEQ ID NO: 307413 - protein, 355 aa, unidentified
MSQEKYIGMDVHQATISVAVMDAGGKLIMECLLETKAATIVEFIEGLHGTLWLTFEEGTSAAWLHDLLKPHVNRLVVCDPRKNALLKDGNKSDRMDARKLAELLRTNQVKPVYHGEHGVRTLKELGRSYLTITKDVTRVMNRIKALYRSWAIPCAGTTVYAPRHRAEWLAKIAEPGVRVRAERLYQQLDLLQPVRLEARRELLVESHKHSAVKLLRQIPSIGPIRAALLVALLQTPHRFRTKRQLWAYIGFAVETHDSGEYRYVRGKLQRNRERITVRGLNDNHNNDLKNLFKGAAISASTRPGPLRDFYVARVEKGMRPTMARLTLARKIAAISLTIWKKGVEFDPQQLHRQAA

SEQ ID NO: 307414 - protein, 385 aa, unidentified
MKGKTFKPTDYEVFGGLDVDKRSISVTFTNHQGFIRSLRMPYSVEHLVNHVRKHFGDQKVAFAYEAGPTGYGLYDGLVAKAYPCLIASPSMIPKAPGQRVKTNRLDSRGLSENLRGGQLRSIHVPSALYRELRHLTQLRDTFVSEMVGMKQRIKSLLLFEGIEFPPAPAGRQWSFRVKDKLRKLECSKTVRFKLDQLLDSLEFSEKQVLKATREIRRFCRNDAELSQCIEYLMTIPGIGWIVASQLVARIGDWRELKNIRQLGGFLGLVPTENSTGERTDRGSITHTGDGRLRSKLIQASWSAIRQDGELREFFRSVCRTHARHLASRVAIVAVARKLSVRISVVLMKQRPYEVRQKVRSTPLTQGETSPQGTTRRQAEPGEKNS

SEQ ID NO: 307415 - protein, 430 aa, unidentified
MKSNTQNAKIEAITEKTLVLGIDVGSETHYARAFDYRGIEYSKKPFKFSNTEAGFATFKEWILDLKERHEKDKVVPGMEPTGHYWFNLGKFLQDNEMKPVLVNPHHVKKSKELDDNNPTKNDRKDPKVIAGLVREGRYMIPYLPEGVYADLRTASNIRFQLQAELTRIQNRISRWFNIYFPEYKTVYGKPDAKSGMLILKAAPLPEDILTLGIDGVNQIWRDAKLRAVGKARAKTLIEAAEHSVGSKEGSVSARMEIRMLLEDYESRNTRLQEVMVLIEELVRKIPMAEKLLEIKGVGIRTVSGFLAEVGDISRFNNPKELQKLAGLALVENSSGKHKGETTISRRGRKRLRYLLFEVAMSLVSKNQEFRELHNYYTTRRLNPLKKMQSLMAIAAKLIRVFYAMLTKGVDYDPKKMVSDIKRPAVYLQAA

SEQ ID NO: 307416 - protein, 339 aa, unidentified
MQVVIGVDPHKASHTAVAIDEAEDEVSRVKVRATRRQVEQLVRWAEPFEKRRWAIESAGGMGYLSAQQLVARGEEVLDVPATLASRIRVLATGRSNKNDPNDAHSIAVAAFRAPGLRNVEVADHSQVLGLLAKRNVDLGSHRTRVVCRLHALLAELAPGGIAKEMYVSDAERLLANITPESPAVQGRYDMALELLDDVRRLDEQTKVSHRRIGIAIKASGTSLTELYGVGPIIAAQLIGYAGDVRRFANRDAFASYNGTAPVEFASGGRVVHRVSQRGNRRLNHALHMVAVTQIRNPGTMGRIYFERKVAEGKTKKEALRSLKRQVSNAVYRQLLLDAQ

SEQ ID NO: 307417 - protein, 420 aa, unidentified
MKLEKADYAAWVGIDWGSDKHAVCLQAADSGRLESSTLEQKAHALHAWFMSLRVRFGGRQVAVAIEQSKGAVINFLIGLDFVHIFRIHPKSLKNYRDALYPSGAKDDPTDAELLVQFARLHQNKIQPWVPDEVESRLIIRLVECRRKAVNKRVRLTNELTQLLKEYFPQALGWAGKLSCVMACDFLLKWPTLQKLQKSKPETIRRFYKDHGCRRRQLIADRIEEIRSAQPLTTDQAIIESSILMIQTIVPQLRMLIEAVARFDKRIEEVYEKQPDSEIFNSFPGAGPVLGPRLQAAMGSDRKRFDSSREVAEYSGIAPVTERSGKKMWTHRRLACSRFVKQSFHEFAGQSIEQSDWARAFYDKKKADGKGHHAALRALAYKWIRIIFRCWKDHVPYDEQKYLDSLKRKRPAWLALMPTAA

SEQ ID NO: 307418 - protein, 374 aa, unidentified
MAYDCVIGMDVGKYFHHACVLDPQDRQVLSKRINQHEGSLRKLFGTYLADNASVLVVVDQPNNIGRLTVAVAQAMGADVRYLPGLAMRQLSRIHVGNSKTDVRDAYVIAHAGLNLPDALRSVDRVEEVFLQLKVLNGIDEDLARAYTRLINQMRSALVGTYPAFEHVLHGQMIHRKWILHLLAKYGGPTKIRRIGKARLAAFARGHRARNPEPVIDAMLAAIHSQTVSIAGAEYAELGVAMSAKDALAKLEHRKEIEAQVLELIQDIPQTEILLSMPGIGPRSAAQILMTVGDMSDFPDAAHLASYAGLSPRTNQSGTSIMSNSPNRAGNKKLKNALWQSSFASIRFHERSRQFYERKRKEGKRHNAAVVALAR

SEQ ID NO: 307419 - protein, 366 aa, unidentified
MREPTTFVGMDVHKRDIAVAMLVEGQPGPVEWRVANEPTAVKRLARKLQHEGGGTVRCVYEAGPCGYALQRQLEGQRLACDVVAPSMIPIRPGEKIKTDRRDARKLAELARAGLLTVVRPPSEDEEAVRDLCRGRDDARLDLMRARHRLGKFLLRRGRVFGTASRAWSQAHRWWLGTQTFERTAERVMFEDYLLAVEQTEARKRSLELHLEDLAREPLYAERVGWLRCFRGIDTVTAITLIAELHDFRRFRSPSQLMAYLGLVPSEYSSGPHQQRGGITRTGNRHVRRLLIEAAWHYRHKPRVGEKLAQRRHGQPAAMIALADKAQLRLCRRYRRMERRGKHATKIVVAVARELVGYLWAALTPTA

SEQ ID NO: 307420 - protein, 319 aa, unidentified
MDDKIVGFDVSKKFFDLAYLTDDNKWIFNKLDYNQKGLKELIKIIPQTSICVMEATGPYYLRLANFLYEKGYKVCVVNPLVIRRYSQMLMKRTKTDKADAQLIARFGKDQKPEFWKPKDKSVQKIQQINSVLESLIKERTSWTNKIEAAKQDVNFDKLSMRLMKQMIRNINRNSSRLEDELDEIIDKKYKQENRILQSIPGIGRKTSIVLLAITGGFTKFESYRQFSSYVGLSPRIFESGSSVRGKARICKLGLSRVRQLLYLCAWTAKTANKACKMLFDRLVEKGKAKKLALIAVANKLIRQAFGCINNNEFYNAELC

SEQ ID NO: 307421 - protein, 351 aa, unidentified
MGEYIAFDSHKRYTWVDRQDHSTGKSRGFRLEHAPGAVRNYLSACEPGTAVAVEATGNWYWIIDEIEQAGMQPLLVHPRKAKLMMGQVNKTDKLDAQGLNRLQRNETLPTVWIPPGKLRDLRELTRTRLVMVAERTRLKNRLSATLAKWGTPASEYSDPYGKRGRVELEKHLEGLPEQTRWVSQQLLAQLDFIGAQLKQVETRLDHLVEVTEEMQWLMSMPGVGVILAATIALEIGDVKRFPSAMHLASYSGTTPRVHASGGKIRYGSLRSDVNRYLKWAFAEAGNSVAVNHLRCPDRHVSQLYRRLRGRKGHPKAIGAVARHLSEAAFHVLQKKEAYRDLKFGRGRTSQV

SEQ ID NO: 307422 - protein, 370 aa, unidentified
MTAPGLAATVKKVCDVLPTTVLALGSVKVGIEAAGHYHRPLLAPTAWPAGWEVLELNPAHVTEQRRVQGRRRVKTDAIDLEAITELVLAGRGVPVTAREQVIGELAAWSTHRTRRVATRSATKNQLLGQLDRCFPGLTLALSDVLGTKVGRLVAAEFADPHRLASLGVSRFIRFAAHRGVHVRRPVAERILAAARNALPTLDAAVARQVLAADLALLADLDAQVATAETKMADLLPTSPFATLTSVPGWGVVRASNYGAAVGDPHRWPGPRQLYRASGLSPMQYESAGKRRDGSISREGSVELRRALIDLGIGLWLNDPAAKDYGQSMRARGKKGGVIACAMANRANRIAFALVRDHTHYDPARWNPKEA

SEQ ID NO: 307423 - protein, 456 aa, unidentified
MGHARARKIPAQLVEDEDYQLRHERVAGIDIAKAKADVCTRLPPAREGGRRASRVEEVPARAAEILALAARLLADGVELVVMESTSDYWRIWLYLLEGAGLNVQLVNSRQSRQLAGRPKTDRLDAQWIARLAEMGLLRPSFVPPPEIRALRDLTRTRLQLVRDRTREWQRLEKLLEGAAVKLSSAVHSLAKTVTARVILQALADGERDPLALAGLADPRVRGGRAAIAEALEGMTVGAHHRMLIRVHLDHIAFLDRSAAAVEDEIQAALVAIPAAQGVSADGIRCASPGPDAAVLPAAERLAEIPGVSLDLAHAIIAETGLDMARFPTAAHLVSWAGLSPVTRQSGPRSRKPQKGQGNDYLKGYGTQAATGAARTDTFLGERIRRLSRRLGPNKAKCAVARSILVIAWHLLASPDARFTDLGSSWHERKTSRDRKIRTHVRQLEALGLNVTITPAA

SEQ ID NO: 307424 - protein, 330 aa, unidentified
MNNYKIVVGVDVSKNSFTATVLYDNKKETFEVKSDPVEFEKKIKPYLKKFKQSDMLIIMEHTGVYHLKLANYLYENGYKVAVINPFSIKKFMEAKMTRVKTDKTDSYFIAQYGRTFFDGELYKPKPDVEKEIEVKLKILEDLQHQLTKLRNQRESLSHVPIPIKKLKENLEYYDELIRKIEKNIKELEKEIKELSKKNFQEEYKLLKSIPGVSDRVIGVVIAMFGGFKRFKSVKEAASYAGLNPSPYESGTSVKKSGSIKKMGNPYARKILYMAALSAIRFNKYCKELYERLVSKGKAKKLALVAVAHNLLRQAYGVLKNRRPFDENLCT

SEQ ID NO: 307425 - protein, 400 aa, unidentified
MRYTARTPHLPATVREYDISLFVALELSRSIWLLAVSAPSSDKISKYRVDAGDSGTLLSLLSRLRADAERRCGRPVKVISIHEAGLDGFWVHRLLEANGVESHVVDPASIAVDRRSRRVKTDRVDVEKLLRTLMGWARGERQVCSMVRAPSPAEEDARRLTRERGTLVTERVRHVNRIKGLLSTQGVFDFEPMHRDRRRRLEELRCWDGQALPPRLKMELTREVDRLELVIAQLREIESERDAALQATSSPAAKTAQELNPASALVGTPGGQLLRLRGIGSEIASVLSLEAFYRDFANRREVAAYSGLTPSPWKSGGIDVEQGISKAGNARLRKTVIQLAWLWLRHQPGSVLSRWFHERVGDRRGKIRRIAIVALARKLLVALWRYVTQGLLPEGAELKS

SEQ ID NO: 307426 - protein, 359 aa, unidentified
MAVIEERERRIVGGVDTHKDLHVAAVVDDQDRVIGTQSFATTRQGYRQMLAWMRSLGDLQRIGVESTGSYGAGLLRFMQQAGIAVLEVTTPDKQDRRRRGKNDDLDAQNAAHAAFAGRRTVTPRSRDGMTESLRVLMACRKTAVTARRVALQMIHNTIVCAPDGLRDQLRSMTRMQLIRTLASWRPDLTAYRDVESAYRIGLKSLARRYLELHDEIADLDAMIVAIVDELAPNLVARNSIGHTGAAQLLLTAGDNPERLRSEASFASLCGVSPVPASSGKTVRHRLNRGGDRAANSALHIIAIGRLRTEQKTKDYVARRLAEGHSKLDAIRALKRYLAREVFTLITQRRKEINATQIAA

SEQ ID NO: 307427 - protein, 369 aa, unidentified
MAKSITYIGLDVHKDTIAVALAEASLRGEVRERGKIPNSPAALKALAVKLASTGRDLRFCYEAGPCGYGIQRQLAGMGHDCAVVAPSLIPRKPGERIKTDRRDAINLAKLHRAGELTAVWVPDQAHEAIRDLVRARQAAVRTLRQARQQLSGFLLRHGYHYHRPAWTQLHRRWLASLKFEQPGHHIVLEDCIATVEAATARRDRLETHIEAALPAWSLASVVQALQALRGVGLVAAATLVAELGDITRFTNPRQLMAYLGLVPSEHSSGGTRRQGGITKAGNGAARRMLIEAAWSYRFPARISREQLLRQERLAKPIRDIAWKAQERLCRRYRKLARAGKLPTVITAAVARELAGFIWAIAKQAQPTAP

SEQ ID NO: 307428 - protein, 348 aa, unidentified
MEITTLGIDLAKSVFCVHGCDANGKAVLRKQLSRRQLLSFMANLPQCMVAMEACASAHYWAREIEKLGHQVRLIAPRLVRPYVKANKNDASDAEAICEAASRPSMRFVAVKSAAQLDIQAVHRVRQQLVKTRTGLANQVRGLLAEHGIVIARGFAPLRRAIPVILEDRDNGLSAVMRELLREIGERLRFIDGRLRQYDLTIQQLFRQDERCQRVAAVEGVGPLTATALVAAVGNATEFRSGRELAAYLGLVPSHRASGGRTVLLGISKRGNRYLRTLLIHGARSSLYRIERQRGARAIWAARLKLRRGANVAAVALANKNARVLWALLSKGQSYRPAPFPARVPQAGG

SEQ ID NO: 307429 - protein, 353 aa, unidentified
MYVGADTHKANHVLVAIDAHGRTVGTRTVPNTPEGWATALAWARQQQQQIQWGVENSGSLGKGFAQFLLAQGEGNVREVVPHRTAQYRRRGRTQDKTDTADALAMARLLRAEGEALPQVHADDSSTELRLLSDHRDNLVVDRTRLINQLHAQMLQLDPRYEEQSGPLTQAAGVRYCQDFAPPQADNLVQARLLIVRQLAARITALMTEIKELTARLEQRVAALGTPLRGLRGVGPVVAARLLGELGSTPRVHSAAALAALAGIAPIAVSSGGRHGHRVNFGGNRQLNRAIHVIALTQRRCEPLARAYYDKKRAEGKTARAAMRCLKRRLVDVLFRLLQPARSVPPVPAIAVAA

SEQ ID NO: 307430 - protein, 453 aa, unidentified
MSKRRKAGMQARPIQRKHAAGIDIGATSIYVAVPLDRDPQPVRSFQTFTEDLHRLADWLQRCRIKTVAMESTGVFWVPLFQILEQRGFEVCLVNAHHVKNVPGRKTDVSDCQWLQYLHSVGLLQASFRPAQQVCALRSLLRHRDSLVHTASTYAQRMQKALDQMNLQLHHVISDITGVSGIAILEGVLNGERDPRKLAGLRDYRIKASEETVAKSLVGDYRPEHLFTLRQSLDAWRYHRKLIADCDDEVQRHLAQFASKADPKENPLPRARKVSSSKIYSSQPDYDLRTEHYRILGVDLSEIPGVNTLLVQTLLAEVGPDLSKFRSAAAFASWLGLCPDNRVSGGKILSVRTRHVQNRAALALRIAAHTLHHNQSTLGHYYRRMRAKLGAPKAITATAHKLARVVYHLLTAGQPYQESVFAERETQHQQRSLFKLHARARALGYQLIPITASV

SEQ ID NO: 307431 - protein, 376 aa, unidentified
MSALCHVWTSGNRGRVIIIPVTAIRAECARFAGWEIIMTKYVGLDVSQKTTVLCIVDGEGHRLWRGECSSSPDQIVHTVLQHAGAGASIGVETGPMTPWLVHELRARGLDVICLDARHARAALRMQLNKTDRNDAEGLAQIMRTGWFRAVHVKSFDAHRARALLGARQQLVGMVTRLSNHIRGVLKTFGMLPGSVRGRSFAERVELLVAERLDVAPIVRPMLTAWSKLREQIAAFDKAIRAEVKQSRECRLLMSVPGIGPVTVLAYVSAIERPDRFRRSRLVGAHLGLTPRQYQSGDVDRSGHISKCGDTLARLCLYEAATVIMTRVKRPLGLKIWAMKIAKRSGTNKARVALARKLAVILHSIWRTGEAFCWGAH

SEQ ID NO: 307432 - protein, 390 aa, unidentified
MRGPGEDGRRRHEVRTFLTFTGELEALADWLTAEGVTQVVMEATGQYWKPVWYVLEDRGFELLLVNARHVKILPGRKTDVSDAAWLAELLEHGLLRGSFVPPPAIRELRDLTRYRKRLIQQHTAEDQRVQKTLEDAGIKLDSVASDVLGVSGRAMLRALVAGERDPDVLAELARGALRKKIPLLRQAMRGRFNDHHALLVRLAMDHLEYLEGTIATLDAEVDKVIAPFAEARDRLDTITGVGKRAAECIIAEIGTDMTRFPTAAHLASWAGLCPGNNITGGKRRSGKTNKGNRWLGEVLNECAWSAAHGRKTYLGAQFWQLAHRIGKKKAAVAVSHSILVIAWHLLSRDVDYNDLGGDWFTRRTDPERRKARLVKQLQDLGYAVSLRAAS

SEQ ID NO: 307433 - protein, 345 aa, unidentified
MTFYVGLDVSLKTTSICVVEADGVPVWEGKAESEPVPLLKALSRWQDKIALVGIEACPLSEWLYGALVESGLHAVCIETRHAQRFLSSRPNKTDRSDARGIADMMRLGHFRVVHVKSKESQLLRTTLITRRKCVDHMLAIEGTIRGLLRVHGLKVGLVHRVRFAARVTVLLADAPSLREAIEPLLEARNMMRRNKALLDRRLAQLARKDDICRRLMTIPGVGPIVSLSFKATIDDPKRFKDSKAVAAHLGLTPRVYQSGEIDRSGNISKCGDKLMRHALYEAANSHLRISKKWSVIRVWGVKLAKRIGAKKACVAVARKLAIIMHRMWLNGTDFRFGQPPAVQAA

SEQ ID NO: 307434 - protein, 375 aa, unidentified
MNNNNTLYVGLDVHKESITVAYAINSEPVELMGKIGTSPTDIQNLCKRLRSKSSQVSIVYEAGPCGYGLYRRLVKSGFDCMVCVPSLIPKKPGERVKTDRRDAIRLVRSLRAGDLSAVYVPGIEDEAFRDLARAWASARDDLRHARQRLKSFLLVHGVHYVGRADWGPAHRRWLSKYSFESPWRQLAFDEHRRTIEDRQAQCERLESALKEAVTEWRLYPVVEALQAMRGIQFITAVGLISELGDLTRFEHPRQLMSWFGITPSEYSSGGSRHQGSITKAGNSYARKLLVEAAWSYRHPARISPAIQKRQENLPRPVIDRAWDAQLRLCKRYRKLQAKGKNVNITIVAVARELAGFIWDMGRIAMSVAQQPQCHK

SEQ ID NO: 307435 - protein, 368 aa, unidentified
MDRKSSKLYVGMDVHKESIDLAVAEEDGEVRHHGQIGGEMNALWRAVRKLESSGRELVFVYEAGPCGFGIYRGLTGRGHSCWVVAPSNTPRRVRDRIKTDRRDSLKLAGLARAGELMPIYVPDVRDEAMRDLVRAREDAVVMQRQARQRLAALLLRNDVRYAGKTAWTAAHRRWIADLRLPQSAQRLAFEEYVQAVEEASARVQRLSQCIEQELVTWRWRSVAAALQACRGIQLIHAVRIVAELGDLSRFRHPRQLMGYLGLIPGEDSSGEHRHQGAITKAGNSSARRALVEAAWAYQFSAKVSALIARRQTDVPKAVLDIAWKAQVRLCARFRRLAARGVNRNKIVVAIARELAGFVWAIAQQVKPV

SEQ ID NO: 307436 - protein, 387 aa, unidentified
MTVCTVNHLPAATHGETARCLFAIELSKQSWVIGFITPLSAKINRRILSGGDWRGLLELIGEMRARVSRETGRAVEVISCYEAGYDGFWLHRQLEAHGIRNYVIDPASLQVDRRVRRVKTDRIDTERLLRSLMAYLRGEPKVWSVVRVPSVAEEDARRLHRERDRLVSERVQHVNRIKGLCALQGIYDYHPLRPQAMARLEQLRTAQGVALPPRLKSEIKRELHRLELVVEMIASLEAERDIIAEDKASTHVNAEKIQALHKLKAIGPEFAAVLVGEIFHRDFNNRRQLASYVGYAPSPFQSGNVAHDQGISKAGNRKGRTTGIELAWLWLRYQPDSDLSVWFRARVGTVKGRIRRIAIVALARKLLVALWRYLETGLVPRGAVLKG

SEQ ID NO: 307437 - protein, 338 aa, unidentified
MKLYGAIDLHSNNNVTVLSDEQDHVVYEKRLPNDLSLIAQQLATYRDSIQGIVVESTYNWYWLVDGLMDEGHKIHLANTAAIQQYEGLKYTDDKYDARWLAHLLRLGVLPQGHIYPKQHRPVRDLLRKRGQMVRQRTANLLSIQNLFSRNTGGSMSANRVKRLDSKEIDGLVPNTELALAIKANLAMLQCADGQIDLLEKAVLDRVKLKPEFELLKTAPGIGLILALTIMLETGDITRFPTVGDYASYCRCVGSKKISNGKKKGSGNTKNGNKYLSWAFIEAANFAVRFSAKIKSFYQSKKSKTNGIVAIKAVAHKLCRACYYIMKDQVAFDMTKAFA

SEQ ID NO: 307438 - protein, 392 aa, unidentified
MNRIVYIGMDVHTSNYTLCSLDPGYGVEKDNYFAEVQFTNDFIKNVVNYVTNLKKKLKDCEFVCGYEAGCLGYSTYKDLTKVGIKCVLMAPSTMAVQKGGKKVKNDRRDARVIAQCLAYQTYKEVYVLSEHDEAVRGYLRMRDSHNKALKRIKQQIIAFCTGHGLFSPTKSNWTVAHLKWLKDLKFNDPVEQEILNEYLSSLTFLSDKIKAMDVRIEELASEKQYCENVKKLRCIKGIETNVALTLLAEIGDFNRFSKPTDFASYLGLIPGEQSSGNKVRGTGITKAGNSTLRRKLTESAKGYWRGRIGIKSATFKKLEKELPKEVTEYALKANTRLQRKFFNMTHVKGKNMNVAASACAREMACFVWGLITKHYDKAPAVPKTDEELLDLN

SEQ ID NO: 307439 - protein, 427 aa, unidentified
MIMKTLSIDEFAAVVGLDWADKKHDICLQAMPRTAREYRVLEHRPEAIDDWANELRERFDNRPVAVCVELRKGPVIHALSKYEHLVVVPINPSMLAGLRRAFKPSGAKDDPSDAALAIDILLQHPEKLRPWRPDDPRTRQLETLVQARRHTVDQGTRVGNRLQANLKGYFPQALDCFDDIATRIACDFLTRWPSLGEAKQARTRTLTDFFQQHGARGEARIGARVAMLKEAMPLTRDSGVILPALLATRTLVAEMRAVISNIGQYDATIAKAFKQHPDAPIFASLPGAGPTFAPRLLAAFGSDRERYDSVEALQQYLGIAPVLERSGNAAWVHWRLACPTFLRQSIVEWAGMSTRYSIWADAYYRQQREKGKRHNVAIRALAFKWLRIIFRCWQDRKPYDEAHYLFALRKRNSPLLKYMAESPKIAA

SEQ ID NO: 307440 - protein, 434 aa, unidentified
MEEVTDEPLYRDRVCGTGIGKAGLVATIRVPSDRDPARRMQETRSFGTTKREVLALADWLRCWQVPAVVTEATGDYWKGPFYRLEAEGFECVLADAKQVKNLPGRPKRDPADSRWLAACFERGAITSCFVATPEFRIIRLHTRYRRDLTEERTRDKQRAEKLLESAAIKVSSVLTDLHGVTGRDIMDHLIAGERNPKVLAQLARAAARRKIGQLEEAVEGAEFFTAEHAALLKIMLARIDRLTAGIDQLTADIEQLLAPYEEQLQQAESMPGWGRRAAQDAVAETGVDMTRFRTGPHLVSWAGRAPLDHQSGKRAGRAKAKKGNRYLGAITGETAVAAGRTQTREGARHRRLARRRGTAKACVATGNTQLKASPLLADPGMRYQDLGPDYYERQRDVRRQVAHHVGKLGSPGFEVTLCRIPEPDPDGTGPAQAG

SEQ ID NO: 307441 - protein, 347 aa, unidentified
MVIIGCDFHPGFQQVAIFDNQSGEIQERRFGHRQEAEAFYRGLAGERVRVGMEACGHYPWFERLLEELGIELWLGDAGRIRAAVVRKQKTDRRDAAHLLELLRQDRFPRIWRPSLEERDMRQLLVHRHKQVQARTRVKNQLQAMALSQGVQQKRKLWSRAGRAELEKLELLPYAAQRRRQLLQSLDGLEAELVALNRQVEAEVRQRPAAVRLMTHPGVGPVTALALVLTLGPAQRFASGKQVASYLGLIPSEYSSGGGQRLGHISKQGSSFLRFLLVEAGQTAVRGDAPLGRFYRRLALRQGRARAKVAVARKLAVRLYLMLREDWTYAQLNQAVVQASPRHSVVEG

SEQ ID NO: 307442 - protein, 377 aa, unidentified
MFREEWPAAACIPRQAAGDRIEPALSRFWLPRSVIASAPSLDPDGCRNNLVRFTRQGRRKMTQTSITTAGIDTSKARLDIAVHGRIERWQVANALPGWRALAANLTRAGVTRIGIEATGGYERGVVRHLQAAGFTVLVLQPIQVRAFARVHLRRAKNDALDAVLIAACAATMNEPRIAPDRRLTELADLLTFIEQIEEDIARLKIRLEHIGEPRLRRMVLTDVARLKARRLAQLRFIAKRLRAHHDLAARLELVLSVPGIGERTALALIIRMPELGQVSREEAAALAGLAPFDDDSGKHKGQRHICGGRGRLRRSLYAAALPAAFRWNKALISLYGRLIARGKAHNAALIACARKLLIYANTVVARGTPWVENAAQL

SEQ ID NO: 307443 - protein, 361 aa, unidentified
MVSSIDRYDEVDVFNGLDVGKGAHHAIALDRAGKCLFDRALPNDEARLRAVLTQLQQHGLVLLVVDQPATIGALPVAVAQAEGALVGYLPGLAMRRIADLHPGEAKTDARDAAIIAETARTMPHTLRSIQVADEQVAELSMLCGFDDDLAGQIVQVSNRIRGLLTQIHPALERVLGPRVDHPAILDVLQRYPSPAAMRAAGEKRLGNRLLKNAPRKGRTRATEIMTALGEQTVVVTGTDAAALVLPRLAEQLAALRRQRAEIAVEVEKIVDQHPLHPVLTSMPGVGVRTAARLLTEVTTKTFPTAGHLAPYAGLVPVTRRSGSSIRRQSQQGIAACHWKVPACIAAQTTQRLPRNLLARLK

SEQ ID NO: 307444 - protein, 352 aa, unidentified
MNKLIRIGMDTSKQFFQLHGVDEEERVVLRRKLGRRAVLGFFAKLAPTVVGLEACGGSHYWARELARLGHQAKLIAPQYVKPYVKRGKNDVADAEALCEAMSRPTMRFVAVKDAESQAALMLTGVRERLLSNRVQLANAIRGYAGEFGVVAAKGLAQIEPLLTRLVADEALPELARDLFAEQAEEYAGLCARIRAIDAKLMTWHRASPMSRRLARIPSVGPLIATLLTMKTPDPRAFRSGRQFAAWLGLTPKDHSTAGKTRLGVITRAGDETLRSLLVVGATAVIWQVRRNPNSRCASPWLIELLKRKPPKLAAVALANKIARIAWKLMTSGQDYDERRAMAAYAHLTPAAA

SEQ ID NO: 307445 - protein, 363 aa, unidentified
MLTDERTTVGLDVHARSVVAEAVDWSTGQVFSDRLVPANEVVLAWVAKLPAPVAVTYEAGPTGFGLARAFAAAGIRCEVVAPSKLERPPGDRIKTDRRDARRAARLLHIGEITGIRIPTVVEEDARDLVRAREATRADLMRARHRASKLLLRHGIVYSGGKTWNGVHERWLRAQRFDLPGTRTAFEEALDAVLAATARRDRLDEQIEATAAAPGWAPIVSRLGAIRGVATLTGLGLAVEIGDWDRFTGSSIGAYLGLVPTESSSGSSRSQGSITKTGDTHARRLLVEAAWQHARPLPRVPGKALTLRRAGLPPAVRARGVAADQRLRRRWLAMEARNKPGNVVAVAVARELAGWCWSLATMRD

SEQ ID NO: 307446 - protein, 374 aa, unidentified
MDTIYIGVDFHARQQTICYLKTETGELVTCELKHQDKQKVRAFYAQFHGQVIVGLEASGYSPWFERLLEELGCEVWLGHATEIRRRARWRQKNDRRDAELILDLMLHDEFPRLHRPAVQSREVLRMLRYRQKLIKIRTMSKNSLQALALQSGLAKGSRLFTQTGQQELSAAVMSPAMHWQREHWLQLMEPLNQQLLETMAWFKVQSKGDVCITRLRTHPGIGLLTSLCIVHTLQPVSRFRNTRKVAAYAGFDPVERSSAERKCFLGISKAGSRVLRFLLVEAAHTAIRKDENLKRFYKRLAERRGRPKAKVAAARKLLIRAFIMLRDEIDYAEFRRRAVAARLARRGQGPKVPEVLIGQPASADHRDELTSESQ

SEQ ID NO: 307447 - protein, 314 aa, unidentified
MIIPLRCVGIDISKSMLDIFDDAIGKPERIVNAPQPITEQVARWRCGNVFVVFEATGVYDRALAEVLRQAGIRFARINPARARDFARASGRLAKTDAIDARMLAAFARAMGPVADPPPEPARNALASFAKRRDQLVHMRAQEKNRRSESHDHAMAECITLHIDFLSRQIEAIEARINALIKAVPEICEQARLLRSAPGIGPVACMQLIAQMPELGRVGPKQVAALAGLAPLNVDSGSYRGKRAIGGGRKRVRDALYMGALNAARRDPSLKSFYQKLRVAGKPAKLALIAVARKLLTILNAMLRDRKIYAVAGST

SEQ ID NO: 307448 - protein, 327 aa, unidentified
MFMEAKKLCCGIDVSHTTLDVCYQNNLGELFHIKVGNNNSGFAKIIEHTGQGYHFVMEATGVYYIRLAFYLHQHSCSLSVVNAIAVKRYIQMHLERNKSDKKDAQWICRYAAEQHPPYWEMPDSAYFESRQLYNAIREYTEQIKRFNNQLHSLRLLPVPSKDAIKSLEKMIVHMEKEIRILELKLESLLEQWQPAQLKNVSSIKGIGKRATAMLIVFTQGFKYTKNHRQLISFAGLSPTEYSSGSSIQGKARIYKRGGKNLRDVLYMCSMNAIKTNNACKALYERLKANGKTGKQALIAVSNKLLKQVFAVVKNNTLYQPNYCSAKL

SEQ ID NO: 307449 - protein, 408 aa, unidentified
MNAVGIDVSKGKSMVAALRPMGEVALLPQEFLHTEVGLEQMAYAILALGENTRVIMEATGRYHEPVAAALHAYGIYVCVLNPLFIKQSGGGSIRKVKTDKADAMKIAKYGLDNWVDLREYTPMDTVRQQLKLCSRQYNLYMKTVVSLQNNLISLTDKTFPGVNELFSSPERADGHQKWVDFVMTFYHCDCICRVSENAFAERYQKWCKRKGYHFSAEKAQDVYLGSCGHFTTLPKNDNTKLLITTAAQQLLAGKVTLAALRAEMTRLSKQLPEYDTVRAMYGVGETTAAQLVAEIGDVRRFPRRSSIIGFAGVDPGIDESGKHSAKSVPTTKRGSPHLRKTLYQIVCTYLRKAPTDEPVYQFLDKKRSEGKPYFVYMTAAQNKFLRIYYARVKECLEAFDAQQDTSQR

SEQ ID NO: 307450 - protein, 389 aa, unidentified
MYFAGIDISKYKHNCFILNDSGEVIVTDFVFANTHDGFQSLLILLESIDSSQNIKIGFEATGHYTSNLKRFLENAHYSFMESNPALISKFIHSQTLRKTKNDAIDSCAIARWLMTVDYKPYPTGFYHTYSLKSLTRLRDSIVRQRSQYMVTLTNVLDHIFPEFKPFFNNRFSQTSLFLLEKYHTPEKMARMNSASYEAIRCISRGKFSMQRFLMLKEFAANTIGDSNDIFEIQLISILNLYRLADSEVKRLESEITTLITELKPQTLTIPGIGPLSAAVIISEYGDINKFSSPAQMLSFAGLEPGYFQSGTMEFHGKMVKRGSSALRYALMNCTMPLIMFNMTFAEYYHKKRAEGKPHRVAQNHVAKKLIRVIYTLETRNISFDSSMLR

SEQ ID NO: 307451 - protein, 410 aa, unidentified
MLKIVYPICCGIDVHKKFVVACIASTDDRGVTTYRSSRFSTFTSGLRKLSGWLCSNSCTDVCMESTGKYWIPVYNILEDTCQITLAHPKYVRAIRGKKTDKKDARWIADLFKHDLVAASFMPPLRIRQLRDLMRYRFKLTGFGSSEKNRMQNCLTVSNIQLSNVVSDTFGKSSMKITRYLLENPYDRDFDFVPLLHGSMTGKADDIRLAIDGMITTEQRQKMNIILNHYGEVQKCKADLESLILSLAEPYARELNLVSTVPGIKNPFSVIAIISEIGVDMSVFTTAKHLCSWAGLTPQNDESAGKKHSVRISRAGVYIKPLLVQCANAVVRSDKHPEIRGRYLSIRKRRGHKRAIIAIARMLLTAIYHILLKDEPYNPELYKKADVLPKTRSITVDQAILLAKRYGYSVA

SEQ ID NO: 307452 - protein, 361 aa, unidentified
MTMSMSRVGLDVHAHETTAVVLDPSTGEIEIRRIAGRPASVLAWLETVATPFQAVYEAGPTGYGLARRAQAAGLDVVVCAPGHILKNASDRIKTDKRDALRLARLLVAGELKLVRVPSPSQEQLRDLVRAREDVRVDLMRLRHRISKFLLRRELYWDGGNSWTVRHRDWLAQRRFPDRASEIVFADALNAHDTMLERRDRLERSLAEAALDSPLAATVAGLRCLKGIDTLSALGLQAEVLDWHRFPQAKLVSSFFGLVPSEHSSGERRRQGQITKAGSKHARRLLVEAAWHYRHPPRVSAKLARRQAGQDARAIAIAWRCQRRLYGRWQELAARRGKPAPVVAVAVARELASFCWEIGTLD

SEQ ID NO: 307453 - protein, 365 aa, unidentified
MNYTKVGMDASKEKLVCAYRANGVGEMRMVTLANRKEAVKPWIEKLQTQGIVQVCYEASSVGYEIYRWVTGMGAECEVVAPSLIPKKAGNHVKTDSRDAKELLSLFEADLLTSVHVPTMSEEALRDLVRSRGDMRKTVTQHKHRLNQLMQRHGRIYPGKAHWTQKHMNWIHQETLEEQASEATKVFYLRWVEQSQGELDRVDAMILEQAPKHKATYALAQRFMGFYGIDVKSGIALASELLDVRRFQKSGELMAFVGLTGREYSSGAVFRRGSITKTGNARVRHLLIQAAWKYTRKPMWSERLRDHWKTQPAAIERIAQKAKDRLYKRYHHLVNRGKVKQKAVVAIARELAGFLWAAGQIEATAA

SEQ ID NO: 307454 - protein, 512 aa, unidentified
MRWPCLGKPHGILSPRVRAVGPEHFGIVAVDCAKASSKWMLVDFYGKVLIAPTVLDHRRDAFDHAIAQIRQAMASHQLKDLVVVVERTGRYHQPVQRAFTAAGLDVRVIHPMISRHFRHAAHPDEKTDDTDLEGIVQATCNGYGLVDPPWEPIYCQIQLWARYRRDLVQKSTQLCCQILEHLESCLPGYARCFDDVFKSGIALVIPGAYGTPQAILEAGFPGLVELAGRQGVRVQKSTLIRILAWAQDAPSPDREAILHQRLLGDLNRDRITKEEYIQASERELVALLAQTPYVRLLALPGINVVLASELAGELGPIVHYATARVITGRAGLFPRRHQSGPVDYRRGLVCQGNRRLRQVLLLAAETLCRCNNHFQVLSQRWFSHGKDPRDVYVRVAGRLSRITFQMVAGSAAFRHPACQGPPAVLEKLMEFHNEHEINLTTTRTNLQHAAAQLPGAEQARERGVWKAKQAEIRGKRGRGPKRLAAILPAVLKQLVGGELAGLIESKASGETP

SEQ ID NO: 307455 - protein, 506 aa, unidentified
MSAPTTKRQPASSSPPSDKEAQAKAAHRKAYNRRKTRAKAKSEALRQKEAAQMEALPVQHPHAAGIDIGSRSHWVCVGFTTEADSDWIQEFPAHTDGLKAIAAFLHEHQVNTIAMESTGIYWIPLFELLAAEGFEVLLVDPSYTHQLRGRPKTDRLDCQWIYRLHSVGLLAAAFRPDEKTCQLRAYLRQRANLIRSASKHVQHMQKALEQMNLKLTEILSDITGVTGRTIIRAILRGTRAPEKLAKYRDKGCKASEAEIAQALTGTYREEHLFELKLAYEAWQFTLGQVEKVDGQIALQLGRMKCDRALPPLKRKARPKRRVNSPHFDVRTALYYVVGLDLTEIEGISELTALTLISEIGPGVSPFATVKKFCSWLGLCPNWKKTGGRVKSSRTRRGGNRAAQALRLAAQSLHHSQGALGGFLRRMKGRLGKQAAITATAHKLARIVYLALKHGMTYVRKSQEEYEAQMKEKQIKALKRKARQLGLEIIEKTSGSVPPAGAASVEG

SEQ ID NO: 307456 - protein, 388 aa, unidentified
MLAAADRTDASTAIQTDLPAIFASLELSRSAWLITSLSPGAGEKMSKHSIRAGDVAGLLMRLAQLKEKARGRTGRDFPIIAIQEAGLDGFWIHRVLQSEGIESHVVDAASILTSRRRRRAKTDGIDGETLVRTLLAYKRGEPRVCAMVKAPTPEEEDRRRICRERKTLVGERVEHVNRIKGLLFAQGVSEYEPLKRNRRARLEELKTGDGRPLPAHLKAQISRELDRLELVLPQLKAVEAERDALLKPVSEGCPAPAAMLAQLKGMGPEFTAILWSEGLFRSFSNRRQLAAFAGLAPTPWQSGSVAHEQGVSKAGNPRLRTTMIQLAWLWLRHQPTSALSVWFQERVQSNGSKMRKTMIVALARKLLVALWRYSTSGVVIEGAVMKTI

SEQ ID NO: 307457 - protein, 354 aa, unidentified
MSIYVGIDVHRKRSQVAVVGEDGRVQLNRNVVNGSEPMLELLGGLPPGTLVAFEAAFGWGWLAGLLEDYGFEAHLVHPLRCKAIASARLKNDKVDAATLAQLLRADLLPEAWIAPPQVRALRALLRHRIQLVRLRTLLGNRIHAVAAEHGYDRPAGYWSGPGRAWLASLDLPPAFRRVIADDLALIDALAAPIAALDEQVHQRAKDDPAVKVLTQLPGVGEFTALVILAETGDITRFGSARKLAAWAGLTPIVRGSDHTVRHGHISKRCPAWLRWALGQAAQTAKRSPEFATTYQAIAARRGKQIATTAIARKLPTPRLHLLTDAGITGLQACPPPPFITREGAASPARARQST

SEQ ID NO: 307458 - protein, 344 aa, unidentified
MKKEEFECIGVDVSKNTLDVALFRGKVDWNEGHIKVENNCVGYKEMKKWLCLKGAEKRQLRVCMESTGLYTHNFRTWLEKEGITYYVVDSKLMHHFAPPQSIKGIRQTKNDKADAFRIAIYCSLFHDAMVPSKLPSAAYFKLKRLLAERRQYLKQSVLYKQQLHDISIYDTVSSRLRKEEELKSLKNHIKQTDAEILTVLETDEAIKRNYNLLISIVGVGLVVAVTTIVLTENFTTFTNPRKYASYIAIAPFPHESGTSVRGATRVSKQGFRQAKADLSISVLSAMSHDPELKEYWLRKKAEGKHAGTILNAIKFKIVLRMFAVVKRGTPYVNTKGYKRMKHGQ

SEQ ID NO: 307459 - protein, 341 aa, unidentified
MRYIGLDVHKDNITACVLTSTGKPKFEKDFIKGSGQWDLSELLGFGDKDGFCVMMESGTYAYQPFRFFSDLGIETHVVHAQALKVITKSDKKTDRKDAYTIARMLRLWKRGDVDLQMAFMPTREQCELKDVCRYREEISKKIGDETRRIKSHMSRNCQHLPDDFDNFQTRKARDYVRSAFPADITLMSRMADLERLIEERDSVQKEVESRLPGSREVEVLMTVPGIARQTAVQIMSMIVDIDRFDDAEKLCAYFGMVPRVRDSGGKEHHGRMTKNGDRMMRAVMERVTQSHVQYCDSSVTRYYKRKCSEMGTKKALITASRKMLSVIFAMLKSGTDFRLAA

SEQ ID NO: 307460 - protein, 325 aa, unidentified
MAVINHQKQVIESAHFENTELGLKAFQKWLKIYKVSFDENTVLVIENTGIYHRLLWAFCNRINLQIHIGNAAHIKWSFGIARGKNDKIDAIRLCKYACKESDELKMSKPLNPKLMQLKDLQTSRVRLLSQKNANQSYLKELKNINDKATQKVLEQAYKTAIEGLEKSIKSVEKLIKKLISDQDSLQKSYDLLLSIPGIGNITAIYLIVCTNNFAGNISGKQLASYAGVAPFGNSSGTSIKKPEKVHKMANKELKKILHMGAMSVIHCNPEMKHYYSRKMLEGKHALSIINAVKNKLVLRAVAVIKSQTPYVDNFVKSEQILKKAA

SEQ ID NO: 307461 - protein, 415 aa, unidentified
MKEQQLAACIGLDWADKEHSIHLQVLNGKLEHCTLEQKPDVLHEWIAQLRQRFHGQKVAIAIEQRKGAVIHALMMHDFLVLYPVNPKALARYREAFRTSGAKDDPADSELLLDLVSKHRDKLRAWVPDTLEARKLQLLCEQRRKMVNHRVALTNRITSFLKQYFPQALDWVGDVASIQCCDFLTNWPDLDAAQRVRKDTLRKFYQRHNCRKASVIDDRLAQISNAVALTDDLAIIEPLSLSVQTYAIQLLSLIRAIQKFDSRIAHVFAQHADHDLFDSFPGAGDVCAPRLAAAFGTDRSRWNSAFEMQSHSGIAPVTERSGKSLWIHHRLACPKFIKQTFHEFADQSIRFSKWARAYYDQMRARGKDHHAALRALAYKWIRILFRCWKDRTLYNEEKYLQALRRRGSSLLIEKIA

SEQ ID NO: 307462 - protein, 345 aa, unidentified
MKITTVGIDLAKNVFQVHGIDERGKAVLRKQLRRAQVAVFFGNLPPCVIGMEACASAHHWARTLQRFGHTVWLIAPQFVKPYVKTNKNDVADAEAICEAVGRPNMRFVPIKTIEQQAILSVHRVRQGFVKARTAQAKQIRGLLGEFGLVIPQGIYNVAKRVPEILEDASNELPVPFRHLIDRLTKHLKELDRQVKEFEQEIIAWHRSSELSRKLEKIPGIGPLAASALVASIADAHSFKNGRQVSAWLGLVPRQSSSGGKPTLLGMSKRGDAYLRTLLIHGARSAILAAKNKVDNTQGWLTNLLKRRHPNIAAVALANKNVRTVWAILAHGREFKVDYVPIRMAA

SEQ ID NO: 307463 - protein, 423 aa, unidentified
MKVVYPICCGVDVHKRFFVATLITSEGIIPHYEKKRFSTFNNSILQFKQWLLDNNCLDVCMESTGKYWVPVFNLIEDSINVTVANPKWVKAIKGNKDDTKDSKWIGDLFRLGLVPGSFIPKKPIRILREYLRYRFKLVSCKVSEKNRFQNAFTVCNVALDAVVSDMFGVSASSITDYLVDSNSFDPNHCVSLLQKSLKKKANAVIESIEGYQMLPEQKYRVRMIRNHLDFVENSIHELDEMINVLASPYESAIQLLCTIPGVDRVSAITIISEIGTDMSHFSSSKRLCCWAGLTPGNNESAGKKKSVRITRAGVYLKPALVQVAHAAVKSKDNSYYRIKYERIFKRRGKKRAIIAIARMILTAVYHMLSTGEVFNPCDLYKVDMPVELRDKQKEKALKKAAKLLIAQGLIQEADLPALFLKPA

SEQ ID NO: 307464 - protein, 350 aa, unidentified
MIIVGCDYHPGFQQIAFVDTDTGELQERRLGHREEAEKFYRDLAARGAQVRVGMEASGHARWFERLLAELNFELWIGDAAKIRAKWVRKQKTDRQDAQLILKLMLKDDFPQIWVASWENRDLRQLLWHRHRMVQARTRVMNQLQAVALNEGLRCKKRLWRETGREQLEAFPLAPWASRRRRDLLELLDRRSPTITELTQTIEQEAEKCPEARQLRTHPGVGSLTALAFVLIIGRAERFQCGKPIASSLGLVPAEDSSGERRRLGHISKQGNSLLRFLLGEAAQVTVRCDPRWRNQFFHLAMRRGRKIAKVAMARRLAVRLYWMWRRGWDYEQLEKFGPHAGQPGNPHGVQ

SEQ ID NO: 307465 - protein, 423 aa, unidentified
MKKRIYRRMPVNDFQPDSISSADLGGKLVFAIDIAKVDMVAAIAAADRRVLRIISWKAPHQNRAVLDMLCHFRSQGISVEAVMEPSGTYGDVLRLQLERDGFPVFMVSGKRTFDGRELFDGVPSLHDAKAATIIAKLHADGLSTRLRDEGPDRRQLRAALAIMDLYQERYLQLVHRLESWLARHWPELPTLIELTSSSLMALLARIGGPADVAAAPDKATKVLLGISHRLLADDTVAAVIASAKASVGVPLVGLERDALMAIADDAYRAHRAFTTAKTQVDALAATTPAAALAPAIGHTTAAAVFAEVGDAKSYSCARAFVKAMGLNLKEKSSGKLQGQLKITKRGPSRVRQYLWLAVFRWIQTDAIANAWYQRKKKRDGGRSSRAAVALMRKLAKALFHVGRGAVFDSRKLFDVRRLQLSEG

SEQ ID NO: 307466 - protein, 361 aa, unidentified
MIVIGVDAHKRSHTCVAVEELTGRRIQTRTATARDDGHGELLVWARELDPERVWAIEDCRHVTGRLERFLLGRGERVLRVPPKLMAGARKTAREPGKSDPVDALAVARAALREGLDELPVAQLDDRALEIRQLVDHRDRLIRQRTALINDLRWHLHDLDPSFQVPVRRLTSPGWQQKVARKLGRLGNGVSVRIARDELKRIRELTTATEKLHQELAILVTAYRPALLWLPGCGVLCAAKAIAETAGAQRFPTASKYARITGTAPIPASSGNHTRYRLDPGGNRQLNAVLHRIAITQLRWHPAARDYYHRKLTEGKTNREALRCLKRQIATTLWKLLQPDPQNIRSRQRRTPKTIICNTPLP

SEQ ID NO: 307467 - protein, 415 aa, unidentified
MNDQAKWYAGVDWASDSHFVWLTDKDGQRLGARGFKHGGEGLADMVKWLLKISGSDDAAAIHLAIEVPHGPVVETLLERGFTVWALNPKQMDRFRDRFSVAGAKDDSRDALVMASALRTDTQRFRKLALTDPIIIELREWSRIRDDLVAERTALTNRMRQQLWRYFPAFLDLGADLDAPWVLELWRAVPNPDRAKRSRIAGIEAILKRHRIRRFDAKHVLGILRQPPLSLAPGTAKAAQAHVDTLVDRLKLINRQIADACHQLHALTQALGGQQDSPGQNMQRDVVVLASLPGIGRTNLATLLAEAYDALQRRDYHALRTLMGVAPVTRQSGRSRIVLRRYACNPRLANAAYHWANTAMQHDPVSAAKYATLRGCGHSHGRALRSIADRLLNVACSMLRTATTFNPALHLQNPPC

SEQ ID NO: 307468 - protein, 353 aa, unidentified
MIHVGIDLHTTNMVNVALNDNAEVIRQAKLPTTERSLEDFFGGFGEPIQAVVECTSNWYWLSDWCRANGIELTLAHAKMVKAISYAKVKTDKVDAKTLAELLKADLIPEAYQVQHNRRELRELTRGRLRLIQWRGKLQSTLWGQAIKYNVKISGTQWRQLDKLQDWLVPQLPPAASLQAELLIGQVSQLQTQIHRIEDEIDRHVPFETTAERLMAVPGLGNVGAWTILAEIGDINRFPSAKQFVSYCRLVPGAKDSGGSYRHKSGNKDGNKYLRAAFGQAAVSAYTHYKVVRKFYRKIKRRSGRPVARAVVAKELAKGVWHMLTKDEPYKGFKGQSVRAASQTCWPQPISPNA

SEQ ID NO: 307469 - protein, 346 aa, unidentified
MEHYVGLDVSLKLTAICIVDRTGKIEREGVVTSDPETIAAFVKSHAPHVARIGLEAGATSTWLWTELDKMGLPVICIDARHAKAALKMQINKSDRNDAVGIARIMQCGWYKEVRVKDLDSHAIKALLVSRALLVKIKRDIENQIRGLLKNLGLVIGRAKMNVFAVRAAELADARPAVAAAVEPLLKAREAVGRQIADLDRKVLRLARNNAQVRRFITVPGVGPITALCFFATIDDPTRFKRSRSVGAYAGLTTRRYASGEIDWTGRISKCGDKMLRTYLYEAANVLLTRIEKWSALKAWGIRLAKRSGLRKAKIAVARKLAVILHRMWVDGTDFRWSSKEAADQTA

SEQ ID NO: 307470 - protein, 311 aa, unidentified
MENYVGIDISKRYFDIHCLPEAKQLRFENNRSGISQCLKLLSENKPKLTVMESTGGYEMALACQIQAAGLAIAVVNPRQIRNFAKAVGQIAKTDKIDAKIIAKYASIIQPPSREIINGKSRQLMNLVARREQLSKMHVEECNRMEHAVDKSVISSIRAILKVIERQIGDIDEQISDHIEQDQNLKRKSDIVSSAPGVGDTTAFMLVTKLPELGTLNRRQIAALVGLAPMNRDSGTFRGKRMTGGGRGSIRTGLFMPTLVATRYNPVIRQFYQRLIAAGKKKMTAVIAAMRKLLTILNSMVAKNEYWNPKNA

SEQ ID NO: 307471 - protein, 344 aa, unidentified
MVTFGVDAHKRTHTIVAVNDRGTPLGQTTVGTTSQDHLVLLRWAARFGAERRWAVEDCRHLSRRLERDLLAAGESIVRVPPKLMAHVRDSARTYGKSDPIDALAVARAAQREPNLPLARLDGPDREVRLLVDHRESLISERTRLICRLRWHLHELDPAWEPKARSLDAQRTLDEVRGRLQDHVGVVARLAVELTERCAELTITIKALEKEITELTTQLAPALLELPGCGALTAAKIIGETAGVDRFKSRDAYARFNGTAPLPVWSSNKARHRLSRTGNRQLNAALHRIALTQARWHAPAKEMIERRKSGGNSGREALRVLKRRLSDAVFQALLHDQTAGLTLAA

SEQ ID NO: 307472 - protein, 355 aa, unidentified
MSSEKYIGLDVHQATISVAVVDSQGKVVMESILETKASTILEFFAGLRGSLFVTFEEGTWAAWLYDLLKPHVTEVLVCNPRKIPLLKQGNKSDKIDARKLAERLRLHDLKPVYHGETGVRMLRELARSYLTVVKDLSRVMNRLKALYRSWAIPCAGRDVYYGRHRSQWLEKIPEAGPRRRAEQLYEQLDMLQHLRQQARRELLAESRKHTITAKLRRIPALGPIRSALAVALIQTPHRFRSKRQLWTYSGLGLETRDSGEYHYVGGQVRRRKKQATIRGLNKDYNHDLKGLFKGAATRASVQPGPFQEFYQRSLAKGIKPTMVRLTLARKIAAITLTLWKKGEDFDIDKLNSQAT

SEQ ID NO: 307473 - protein, 354 aa, unidentified
MGTQKIIAVDLGKFKSVFCVMDVMSRQHSFETVPTTPADVHDLLARHVTADAAATHVVIETCDTAGWVHDLCAALGVAITVIHANGEAWQWRRVKRKTDRDDALKLAKLALMDQLPAVHVPSPPQRQKRRLILHRRSVVTRRTQSRNAIRSIFSQQGLSLVPGGRQWTKAGLEQLREQARPLAACGPDDLWRGRLAIELDLMAAVDQQLKLIDATLDALADDRTKLLQTIKGVGPRVAEATVLYLDDPHRFKNANAVAGYAGLVPKQIESGTMSRHGHITRRGPSLLRSMLTEAAWMVWRHNAWAKLWVQKISHGSRARRKIAIVALARKLLTMRWAMLKTNQPFREPTAAMTG

SEQ ID NO: 307474 - protein, 393 aa, unidentified
MVCVGIDVAKDKHDCFIISSEGEILADVFTIPNNAEGFDTLLQAIRRSTRPEDKIKVGLEATGHYSYNILGFLLDKGLPSYVINPLHTNLYRKSLSLRKTKTDRVDARTIAAMLMSDVDLKSYTDTAYHNEELKSLTRYRFDKVRERAKLKQSVSRLVTILFPELEKLVSSLHSASVYALLSEFPGAKQISSTHMTHLKAVLKNASQGRYGQEMAETIRNAARSSVGSVMPAKSLELQHTIRLIRELDAEIEDIETAIQAIVDEMQSPITTIPGMGVRMGAVILAEIGDFSRFDSPDKILAYAGMSPSTYQSGQLSLSGAYSHMEKRGSRYLRYALYNATKHVCHWDPTFAAYLAKKRAEGKHYNVALSHAAKKLVRLIFAMEKSQRPYCAAA

SEQ ID NO: 307475 - protein, 360 aa, unidentified
MAQVRSWAGLDVHAAKVIAATIDGESGELRFARLSGQTSEVAAFCRALPGPARVAYEAGPTGFGLARELAGMGVGCVVAAPGKIPRAPQDRVKTDRRDAERLARLLMAGELHPVRVPATDEEALRDLVRAREDLRGDLMRMRHRVGKLLLRHDVRWAGNNWTQAHRQWLAAVALPEPVAQIVLEDSLGAIDALLVRRDSLERQMTALIAGSPWAEEVARLRCLRGIDTLSALGLCAEVGDFDRFRRPGQLMSYLGMVPSEHSTGDKRRLGSITKSGSQHARRLLVEAAWHYRRPPRVGRELARRQDGQPQAVTAISWQAQRRLHRTWQRLDAQRGKRRTIVAVAVGRELAGFCWAVTTAD

SEQ ID NO: 307476 - protein, 400 aa, unidentified
MSVKDYNSQVVKRQRIRSTTLVVGVDVGNAFNAVGFMNKQGKILSSCAKLYNSREGFEQFVKMTEALKTKYRLKDVLIGMEPTGHYWRKLAYFARERGYEVRFIRTTALKHHREIDESSSAKSDERDAITIANITREGKYIDTVIEDGTMRQLRTLAKTRERLLRYSVSAKNALHAALDDYFPELHEIFWSMGTRSLWAILERCPFPDDVVLLKISLLRDLIAKSSRKKAGADQKARALYQAAQKSIGLKRVGDADRFRVKICLEEVKRTVLMLKDIDRQMGKVLKEMPSAPYLLSIPGVGPLSAAVFLGELGDPAYFHNARQIVKYAGYDPQERDSGSWVSRKFISKKGRWLMRKYLFFMSMRVVVLSKYFQNTTRGNWRRKTGWVSSPRERRSFVQWQ

SEQ ID NO: 307477 - protein, 392 aa, unidentified
MKESIAKAIDKQTKAAQVNTADAGSYAAYIGLDVHKDTIAVAIALPGREEPVYRGEIAHEGRKVEKWLNRLSVEFDGQVLQFCYEAGPCGYGLYRRLVGAGHDCQVVAPSLIPRKAGERIKTDRRDALKLARLLRAGELTAVWVPDAEQEAMRDLTRARDDMKSQERKARQQLNAFVLRHGHHWPRGKKRWTQAHFNWLESIQFEQPWLQIVLQEYIDAVKAATRRVTDLTEQLMQALPGWSLAPVVDALVALRGVDKLAATVLLAELGDISRFDSPKQLMAYLGLVPSEHSSGGRRRQGAITLTGNGHARRMLVECAWSYRFPARQTMHLNERPRRHQNGPRRSPGGPRSVSAVAIVSSRRPARTSSWCVSRLPGNWSASSGTSYGRRCPA

SEQ ID NO: 307478 - protein, 412 aa, unidentified
MQVVYARCAGLDVHKKTVSACVSVCEPEAAKRQQTRVFGTFTCNLLALTDWLKQQGVTQVAMEATGVYWRPVWAVLEGHFEQMLVNPQHIKAVPGRKSDTKDCEWIADLLQHGLLKGSFVPPTPIQDLRDLTRYRAELRQSQTRVANRMQKLLEQANLKLSSVATDALGVSGRQILRAVIAGQQNASELAQMARGKLKRKTPQLQQALAGRVRDHHRFLIAEYLDEWEALDERIRRMEAEIDKRIRPFETAVTLWQTIPGVERVTACNLVAELGVNMNQFPSAQHLASWAALCPGNHESAGKRKSGKTRDGNKWLRRSLSQAAWAVTRKKHCYLSAQFRRLAARRGAKRAVIAVAHTILIIAFHILKSGQGYHELGGNYLEQINKDQLQRYFVKRLQRLGLKVTLEPATAVA

SEQ ID NO: 307479 - protein, 409 aa, unidentified
MSFAVAHRSEESSSAVRTDLGAIFVSMELSQSKWLLTSLSPGNGEKLSNFMMPAGDVAGMLARLMELRRKAQSRTGQSFPLIVIQEAGLDGFWIHRVLEDEGIESHVVDPASIAVSRRKRRIKTDRIDGETLVRTLLAYKRGEPRVCAMVRAPTPEEEDRRRVSRERKSLTIERIRHVNRIKGLLFGQGVSGYEPRRGDRRARLDEVKTGDGRPLPRHLKAQISRELDRLELVLTQIKECEKSRDALLVDAQTVSTVPAPDLDPGESGGETCRAMPSSTPAMLLGIKGIGPETASVLWLEGLSRQFDNRRQVAAYAGLAPSHWQSGQIDHDQGVSKAGNARLRTTLIQLAWLWVGHQPNSALTLWFKSRVAQNGGRFKKTTIVALARKLLVALWKYVTAGVVIEGAIVQ

SEQ ID NO: 307480 - protein, 343 aa, unidentified
MQTVTTIGLDIAKSVFQVHGHDGAGQVVIRRQLKRRSVLAFFQKLPPCLVGIEACASAHHWSRELQALGHKVRLIPPAYVKPYVKRQKNDAADAEAICEAVTRANMRFVPTKTPEQQSGLVLHRTRHLFIRQQTAAINAIRAHLAEFGIVAPVGRHGVEELLNVLADPNDKRVPEIARACLSAFGAQLRRIKEQVLEFDRLIRAWHRSDEMSMRLDEAPGVGPVLATAVVATVADPKSFRSGRNFSAWIGIVPKQHSSGGKNRLGSISKQGDRYLRGLFVAGALAIIRYAKIHGTKHRPWLTALLARRPTKVAAIALANKLARMVWAMMVKGERYKEPVALAA

SEQ ID NO: 307481 - protein, 418 aa, unidentified
MKKHSKSSQRSEPTLKRRKARGPVQRDAKEVLAEVLGKLTGKLDAPAVSTSAKENRRRNTVGPNRDRLTVGVDLGDRWSQYCILGLEGETLAEGQLRTTQEDVREFFQALTVARVVIEVGTHSAWVQEVITEWGHEVLVANPRLMEGSKRRKRKSDRIDAHKLARLGRVDPQSLYPIRHRSREVRQDLVVLRARDALVSVRTELINTARGLVKSMGTRLPRCSSPSFAEKVKDAIPVEVREALLPLVQLVETVKDCIARYDQKIEELGREKYGHTTLLRQVKGVGPITSLAYVLTLEDPQRFSSSREVGPYLGLVPKQEDSGDSQPQLGISKAGDRMLRRLLVGSSQYMCGAFGPDTDLRRYGLRLCERGGKNAKKRAVVAVARKLAVLLHHLWVTGDVYEPLHHTGAETRTAQATAA

SEQ ID NO: 307482 - protein, 438 aa, unidentified
MSNKVIFNLDELFISVGIDVGADFSWMSIALPNQQFVGKPYKILHSSIDSLTTAVSKIKEAEELYSLESRIFLESTGIYHYPLFCYLRDKGFNCSVINPIITKNSTNINIRKVHNDRFDSKKAALVGLKPDLKVSLMPSDLALNCRNLCREYYDLMDNRSAYVNKLQGELRMAFPQYLGIFSKVTINTSLTLLETYTSPSAFLEADKQEIIDIIKSTARFGLTYAQNKYNAIIQAATDANQFGYIIDSNIKRIRLYISFIRKYDEEINNILESLHELVDANEDADFVKQIHLIETFKGAGFLSAVSIMGEIGDFSAFSKPKQLFAYFGLDPAVKQSGKFEGTKVQMSKRGSAIARRVIHTLTLQSISISRNGEAKNPVLREYYLKKCDSKPKLVAMGAVSHKVCNMIFAILRDNKSFEIITPQEHIKQYNSAKCDIAA

SEQ ID NO: 307483 - protein, 401 aa, unidentified
MIDISDIGVYLGLDVGKGEHHAHGLRPDGKTVVDKPLPNSEPKLRAMLDKLAAKYGTVLVVVDQPASIGALPLAVARDAGRKVAYLPGLTMRRIADLYPGEGKTDTRDAAIIADAARTMPHTLRSIELDDETVAELHMIVGFDDDLAGEVTRVANRLRGLLTQIHPSLERVPGPRIQHPAVLWLLERFGSPKAIRKAGRRQLITILRPKAPRMAERLVEDIFTALDEQTVVVPGTDAAAVIVPKLAANLSALLDQRRQLASSIEELLEAHPLSKLLTSMPSIGVRTGARILIDVGDGSAFPTAGHLAAYAGLAPVTRRSGSSIRGESPTRRGNKHLKRAFFVSAFAALADPASRAYYERKKAEGKRHKQALMCLARRRVDVLFAMLRDGTFFEPHSAPQTA

SEQ ID NO: 307484 - protein, 315 aa, unidentified
MHIQQSFMVGIDVSKAHLDVAVEGKRAVVRFDNNAPGCAALTAAVAGAELVVVEATGGYEMAIVRTLMAAGIAVAVVNPRQVRDFARASGRLAKTDQVDARVTLHFARAMRPAQIPHIDDGRIALAALVTRRRQLIDMAVAEKNRLEHAPEAIAALIGETLAALKAQLARVDAAIALAIEAEPDMAERRNLLLTVPGIGEVSAAVLIAELPELGAIDDKKLAALVGVAPIAHDSGTWRGQRHIAGGRATVRCALYMATLSAIRCNPAIKTFHKRLRDAGKPPKVAIVAAMRKLIIMINTILKRRTPWNQPQQHGC

SEQ ID NO: 307485 - protein, 342 aa, unidentified
MEKVSIIGLDLAKRSFQAHGARAEGGVAFRKKLSREKVLTFLAEQPRCVVAMEACGSAHHWGRTIRDLGHEVRLIPPAYVKPFVKRQKNDAADAEAIVEAASRPTMRFVAVKTEEQQARAMLFRTRDLLVRQRTQLINALRGHLSEHGVVAAQGPANVKVLEEAVEDQGTSLPLLVVELARVFLDQIEGLWKRISGLEKVTAHEAACGETTRRLQTMPGVGPITALAIETFAPPMDVFKCGRNFAAWLGLVPRQHSTGGKQVLGKVSKMGQRDIRRLLIIGAMAVVRSALRKGSPEGSWVQRMLARKPRMLVAIALANKMARSIWAMLAKAEDYRVPMAAAA

SEQ ID NO: 307486 - protein, 347 aa, unidentified
MITIGIDPHKSSHTAVALDETGALLGEVRVPADSSTLARLQAWAASWPQRVWAIEGACGLGRLLAQRLVGSGETVLDVPAALAARTRVLQRGHGRKSDGIDARSVAVVAQHRDGLSRVAPDDHCAVLRLLSDRRDELTSERRRAVNRLHRLLRDLHPGGAPRQLSADRASRLLATIRPSGAVDIERKAMARQLIADTRRIDRALTENRRRCAQAIAASGSSLTEIFGISEVLAAKILGHTGDITRFANADHYASYAGTAPIEVSSGEQRRHRLSRAGNRSLNHALHMAARVQTMHPGPGRTHYMRKQTEHKTPAEALRSLKRQLAKVVYRHLQADHTHQTSPSPGLT

SEQ ID NO: 307487 - protein, 358 aa, unidentified
MSQPSVTHPTCIGIDLGDSHSHLFVLDLASGEVLEEGRIPCTPAAFRRRFAGQPPARIAIEVGCHSPWVSRLLAEAGHEVVVANARKLRLIYENDSKSDRVDAQYLARLAAADPQLLHPVRHRGAKAQADRAVLVARDQAVQCRTRLVNCVRGLVKSLGHRLPKCDPEGFHNRVRETIPAELLPAVEPLLDVLAILQQKIRALDKVIERLCQEQYSETARLRQIKGVGPVSALNFVLTLEDPTRFTKSRTVGSYLGLRPGRKSSGRGDPELHITKAGDTMLRRHLVNCAQYILGPFGEDSDLRRWGLKLAGHGAKSAKKRAIIAVARKLAVLLHRLWLSGATYEPLRNSREPAHATAQ

SEQ ID NO: 307488 - protein, 421 aa, unidentified
MSKILNLGIDISMRKAASCFLNQEGKYLGKVFEVENNPSGFKKLESKLLDAVSTRNYNLIRIGLEASSMYGFHLIDYFNTVSLPVETKVYQVNAKYIHRFKKAFPEKEKTDLVDAQFIAEYLRFGKLPVEYKPDKLHLPLKRLVRYRYHLVKTIERETKLYLANLFLKFPGWLQARPIKPLGKTSLDVLSEFSPDELAKMPLGELAMFVAKAGRNRSPDPQAIASEIQKAARESYRIRPELCSSVTFVLANIERTLSALKKSLKEVNKAIEDQSKGFINPLLSVKGIGPVYAAGILASIGDITRFPSHNQLARLAGLVWKRKQTGNSESENTHMARECDKYLRYYLVEATNSLRVHNETFQMHYQKKYQEVKKHKHKRALVLSARKLVRLVFALLSKNQLYDPLREIQSPRPTVLNCQRAN

SEQ ID NO: 307489 - protein, 396 aa, unidentified
MNVLYKLEKATVADVLGEPESTCTCTLLIGSGFFDQGSEERSRATMLIIGCDFHTRLQKIAMMDTTTGELVTRRLEHGTGEAERFYAALAAPVRVGIEATLATQWFEKMLRHYGHELWIGDAAEIRAAMVRKQKTDDRDALHILDLLMQNRFPRIWVPSPAERDVRQLVRHRHKLVRFRTSVMNQLHALAMGQGLCLRKKLWTTVGRQKLESLTLDPWASRRRRELLELLDQLDPSIGELDRAVISEAESRPTAVCLMQQVGVGPVTALAFVLTVGPVSRFPNSKKLVSYLGLNPSEESTGGRQRLGAISKQGNTMLRCLLVEAAQTSARLDPELRRNYQRLKLRRGNSGVAKVAIARKLAVRLYWKLREADRPNTAARMQGSPVTPVVGESLSAN

SEQ ID NO: 307490 - protein, 334 aa, unidentified
MEKTYFIGIDVSKNELDFAVVEANQLLFHQEVSNDKTGIGLFIKELRQKTQFNFGNSLFCMEFTGIYNNILLNYLTTHKASIWVENARQIKDSMGTIRAKNDKADSILIANYAYKNRENPRLWAPKRAIIQELDRLTAVRLRLKNAIKMLQTPLSDSKNFIGKTAHKNTKNDCNDSINALKKDIKSIEKQIETLIKTDPELAHLFDIIISVKGINTITAAEIIITTNEFKDIDDPKKFGSYAGCVPFERSSGKRKGKARVSSIANKKLKTLLHLAALSAIQWCKELKEYYERKVDEGKNRMLVINNVRNKLILRIFACVKKNQKYNENYNFSLA

SEQ ID NO: 307491 - protein, 317 aa, unidentified
MNDSPSYVGIDVAKDKLDVFIDNTNEFFTVENTPAGISIIRQRLSGLNVKLIVIEHSGRYERCCALDLMDAGLPVALVNPRQTRDFARSRNWLAKNDRIDARLNCEFGKANNPRISEKVPQNRAELDELVGRRRQLVAMRAAEKPRLQQVSSKSVRQSIEKVVRQLDVQIQDLERAIARLIENDDDWRGKVQLLQSVPGVGPVVASTLVAELPELGKVNREQIAALVGLAPFDHESGKFKGKRSCFGGRAKVRCTLYMAALAARRFNPILKALSERLLARGKAFKVMMVACMRKLLSILNTIAASGTTWRKNLLVNS

SEQ ID NO: 307492 - protein, 387 aa, unidentified
MYFIGIDISKFKHDCSVIDDFGEIVTPSWSFTNDSEGFAQLKILLDSLDAETRIGLESTGHYGMNLKLFLESNNFSFMEFNPLLINRFVKSKSLRKTKNDSIDCMMIARYLMTVEYKPYPPLLYHIEKLKSLTRFRDSLIRLRSRQLVELTNILDKVFPEFKPFFGGKFSVTALYILSNYSSPEKIANMNSKSYEALRKLSRGRFSTVDFAKLKQLAKNTVGNTEDYLLQEMQIVLELYSQLDSKVDETEVSIKECVSDMNPPILSVPGIGIESAAVILAEFGDFSKFKNASQMLSFAGLEPGYFQSGTSETTGKMVKHGSSYLRYTLMNCAQTVVNYEPTFAMFYAKKRAEGKPHRVALSHVVKKLLRVIYTLQTKNTAYDADFVR

SEQ ID NO: 307493 - protein, 271 aa, unidentified
MKIQRTSVGLDVHARSVFGCGLDGETGEVFTRRLGTDHREILDWVQGLPGPVAVTYEAGPTGFGLARALLDNQVQCLVAAPSKLVRPCGDRVKTDARDAAHLARLLHLGEITPVCIPSLEREAARDLVRAREDARADLMRARHRVLALLLRHNHIYTSGPAWTVAHLAWLRRQQFLEPAAQTAYETAVEAMLACVDRRDRLDRAITAMAVDSEFSAVVRRLGCLRGVSTLTAFGLAVEIGDWSRLSGRSIGAYLGLVPTEYSSGEPVKVFV

SEQ ID NO: 307494 - protein, 338 aa, unidentified
MTIVMGLDQHRAQITAEWIDTATGEVSRQRVAPAHRAGVRRFAECFRDVELEVALEATTGWRFVVEELRAVGARVHLAEPAETAARRGTKKRAKSDRADARHLRELLMVGRLPESWIPPEHLLDLRARVRLRHTLVDQRREWQQRIQAVLYHHGAPPRSWLLGAESRAWLTSLALPATAREQITVALAMIDAIDAQLAPLDRELRAYARRQAGCRALMGHYGIGPLTSITVLAELGDARRVSSSREAVRYAGIDITVHQSDARRAPGRLSRQGPSALRWALFEAAQCARRPASPDHQYYLQTAARLGANRACLAVSRKLLKRSFHTLRELGEEALQPA

SEQ ID NO: 307495 - protein, 339 aa, unidentified
MNPATVGLDLAKNVFHVHVADASGRTLDSKRLTRHELMPYFESLPSCLIGIEACATAHNWARQLQGLGHDVRLIPPGYVKPFVRRGAKNDATDAAAICEAVTRPNMRFVPIKSREDQAFLMLHRARGLLVRQRTMAACAFRAHLAEYGVIVPQGRHRVDALVAKLDELREDLPEDACFALDALVGQLHALNRQIDRIDIRLAEIHKTNSICRLLATIPGIGPITATAFAATIPDPSAFRSGREFAAWLGLTPRQNSSGGKHRLGGITKQGDRYLRHLLVLGARTVVRYPKARSRVDGPWIEALLERRRPMVVAVAVANKLARTIWAMLSTGEVFRSAQP

SEQ ID NO: 307496 - protein, 371 aa, unidentified
MNSIVYVGMDVHKEQYTLCCYSYETDKVEYKQTIPSDYKLVLKYMEQVRSRYDGEVTFVCGYEAGCLGYSLYHQLKEHAVDCKILAPSTMAVTNTHHIKTDKRDAANIARCLAFHTYSEVYVPDNDDNDVKEYIRMRDDQKLYLKKVKQQILAFVLRQGKRFEGGKTYWTIAHLKWLKNLELSALQRETLDEYLLTYEYLTEKINRFDERIEELASAKRYEEKVKHMGCLLGIKTHTALSMIVEVGDFERFEKAPKFASFLGLVPSEDSSDTRVNRYSITKAGNSHLRRLLVEAAQSYTRGNVGHKSVALKQRQKGNPPEVIAYADKANERLRRRFYKMTLNKGVNRNVATTAIARELACFIWGMMTEHVS

SEQ ID NO: 307497 - protein, 309 aa, unidentified
MKQSIVYIGIDVAKAHLDVAWQEQSRRFANDKCGQAALIKWLKQSAFPVQLICEASGGYEQALVESLEHTDITASVVQANRVRQYARAAGILAKTDKVDARVLAAFGAAMQPKPTPPLCPEQKRLRQYEAQRRHLSAVVVAEQNRLAKLSYAELRVLSRSLISKIKKQIATIDARINGLIAQDKQLCQKAQKLTSITGVGARTAALVLAQMPELGQLNRRQAAALGGLAPFNRESGTLRGKRTIFGGRRALRSGLYMAAMVAARRNPILCSFYQRLRAKGKPHKLALTAVMRKLLLVLNQNLKPITSPA

SEQ ID NO: 307498 - protein, 353 aa, unidentified
MDKYIGLDMDSKKTVACVIQEGQKDQYATIGSDVNSIRAFLLQQKSRGCRVHAAFEISGAAGYLYDQLVDGVDTLKIVSPSKATWIYRTAKKNDRIDARKIAVLLRLGELPTVHMPNREIRQWRQIILHRQKTVQKVGRVKNRIRALLKSEGYFQPAAGGGWWKRVNRQWMAALIQGQEKGGGLWQLQLGDLLAELTLLEAQRDRVTDHLDKYLEKHPGGGLLMSIPGVGPRTAEAVLAYTDDIRRFGHYKQYCAYFGLTPKLDESGSTRRLGHISKQGPSVVRWVLCESSWKVVRYCPALRAFYERVMAGQTSRKKIANVAVARKLLCIMRAMQMTGEMFNVKMVQEVLKVA

SEQ ID NO: 307499 - protein, 355 aa, unidentified
MQKYKVSFKGQNIYVGIDVHLKTWHVTTLTESGYKYSFAQHADAKELFDRLNKKFPEAHFMSAYEAGFCGFSAHYALIEQGIENIVVHAADIPTTGKEKAMKTDAVDSEKIAWALKRDELTGIYIKDKRYMDDTNLMRLRQRFIMDLSRQKNRTKHLLYTQGVTYPERFRNCRTHWSRNFMKWLREEVELLSEQKLSLLLLCEQVENTRKAILKVTREIRRLSTTDRYKENYDLLITVPGLGLITSMSMLTELDNDIMRFPNERSFVSMLGLIPTCHDSGEKKVSGEKINRGNKHLGPLIVEASWVAIYRDYQLGAYYSNCCQTMKPHKAIIKVARKLACRTYAVLKTKTKYELL

SEQ ID NO: 307500 - protein, 355 aa, unidentified
MTTQQKQNCMFVGIDVHKDTHTAIGISPYGEKLFEITVGNYKQDFEKLTEKVKEHSGVLSPYIGLEDVRGYGERLAGYLYEKYPVYHVPSILVDKARQNATHPEKSDSLDALGVARVMIQSIDTLLPYTISEDSKKAKQIKEISIDREDLVLERTQLKNQVHTLLYRIYNTEYENMFKDTFSLKALQFWSKSKVKCDPYLLKTMKRKVRRILDIHTEVSELEKDMEKLLDENYTLQTASGCGVVIASAIVGEIGDIQRFKSPASLAKYAGCAPRERSSGKKVRHVKSRSGNRRLNCAFHRMALSQISRSGNEKAREYFKRKISEGKSKSQALVCLRRQLINIVWNMMKYKTVYRT

SEQ ID NO: 307501 - protein, 334 aa, unidentified
MKDYYFIGIDVSKKNLDCCSLYNGTIIKHDVITNHQKSIENYLSTICIEQSVESEQLIICAEYTGLYIYPLVLACQTTKYKLWMEDPIQIKYSSGLQRGKNDAVDAKRIALYASRYIDRMRLYCCPSSSMESLKLLASELNMLCIDKAKYKGQLSDQKEYMPDNVYKLKSKRLTLLIKELDKAISSIESDIENIIIKDEQLSHQMKLLLTVEGIGKKTALKVILETQAFTKFTDSRKFCCHAGVAPFSYLSGSSQHSRNRVSQRANKSIKSLLHLAALSALQNKNSELRSYYDRKVAEGKNKMSVLNAIRAKLISRMFAVIRNDSLYNFNYKNP

SEQ ID NO: 307502 - protein, 463 aa, unidentified
MTLPPPAFAGLQTGNRGTRRRAPVSDRPGASLAAAGLSLPLPLQGVELSLALPEALFFTGIDWAAATHAVCVMDAAGKITAEFTIAHSADGIATLIRRLARYGDPADMPIGIERPNGQLVDLLLEAGHPVVPVSPNAIKTWREGEVLSGAKSDAGDAAVIAEYLRLRQHRLRVAAPYSDQTKALRTVVHTRDDLVEMRVASTNQLSALLEAHWPGAKAIFADVESPVSLAFLTRYPTPDAARHLGEKRIAAFCTAQGYSGKRPAAVLLARLRSAPAGTTGAALTRALRDAVLALVAVLTAQNAAIKSLSRSAAAHLSEHPDGAVFTSLPRSGQVNAAQMLAEWGDCRQAYDGPDSVAALAGCTPVTRQSGKHRDVTFRWACNKRFRRAITTFAGNSRHASPWAAKIYADARASGKDHPHAIRVLARAWVRVIWPCWLTGTPYDPARHGAAAALAERASSQFAA

SEQ ID NO: 307503 - protein, 356 aa, unidentified
MRNYKIDNDVIATTRKLWMGIDAHKRTLHVTVIDDDGEMVLSESLPHAKEHVVGLVRRLEDADFVAVYEAGPTGYKLLKWLEELGCDAFMVPPTHVRQKKGGKKIKTDERDSYDLAEQARAGMLPAVHALDEDTYCERQVVRTRGQLVEHRSQLKAQIKSLLLFHGVSAPDDLKANWSKRFMRWLEEGPTGDENLDLAIEALVGVIYSFDKQIKRLEGRLRQMEESQKWADEAELLRSVPGIGALTTMLLLLELGDVSRFDRCEEFSSWLGLVPGEWSSGDGQNKGSITRAGNKRARSALVESSWTLIGKDAGMRAVYERIKAKSGAGVAIVAVARRLALAIRAMLRDQKSTSTTR

SEQ ID NO: 307504 - protein, 443 aa, unidentified
MSEEVRHTSEPEFAALVAIDWADKKHVWRLEVIGTGQRERGELEHTPEAIEAWASHLAERFSGRAIAVGLEQSRGSLLYTLTKYAHLVLYPIQPTTLARFQAALFPSGAKDDPMDADLLLELLLHHRPFLRPLQPDTLETRRLQFLVEQRRQLVNEKTRQTNRLTARLKMYYPQILQWFEEVDSPMVGALILRWPTLQKLQRARPDTLRKFFHQHNCRGAQRIEQLLEQIGQAIPATHDAAVVETCVVAVQLLARLIATLRRGIAELDRRIEKVAASHPDFALFDSLPGAGKVMAPRLIVAFGTQRERYFSAKEIQAYSGIAPVLERSGKSTWTHFRWTCPKFLRQTFHEWAGHSLIKSHWARLYYQQQRAKGKAHHAVIRALAFKWIRIVFRCWQNRTPYDEQIYLRALQQRRSPLAATESPTVNPQWIKRGGFWKLSTDPS

SEQ ID NO: 307505 - protein, 313 aa, unidentified
MIFSPDYVGVDVSKKHLDLAITGSSRLRVSNNPAGMARLVQKISSLTRPHLVCEATGSYTRLMARSLSQHGIALSTINPRRVRDLARADGLLAKTDAIDAAAILRFAHLMHPDPDPLYDPNAVEMADLVRRRRQMVDMLAMEKQRREHPEAALAQASIDAHIGFLSSQIGEMDRAITRQIDSDATLRRRAELLTTIPGIGQTTAAVLLAEMPELGGIGNKQAAALAGVAPFNRDSGEMRGQAHIAGGRLSVRCALYMATLSAIRANPPIRDFYKRLRAQGKPGKLAIVAAMRKLITTANAVLANNTPWHTNTA

SEQ ID NO: 307506 - protein, 405 aa, unidentified
MKQPATLHYAGIDWATRTHAVCVVDQTGAVRARFQVPNTGKSFAGLCKRLAKLGVAGVAIERPDGPLVEAMLEGGLKVVVITPRQVKALRSRYAASGAKSDPADAYLLADVLRTDGHRLAPLTPDSEPTKVLRALSRTRKDLQEARVALCNQLTAQLERCFPGAIGLFADLHSPVAVAFLRRYPTSHAAAGLTQAKLAAFLRRLHYPGRTPVATLLGRIQTAPLSGIGPAEAAGRAVCVLALLDAIQITARQERELEAEIIERLEVHADAHVFTSLPKAGHGVRAAALLGELGDVRARFPDNDCLAALAGAAPVTITSGKRRVVKFRWACDKKLRNALIDFADDSRHASPWAAKVYADALARTGRHPHAVRILARAWIRVIWRIWYDGMAYDPAKHQGAVRLLAA

SEQ ID NO: 307507 - protein, 369 aa, unidentified
MLDSMFIGLDVHKATISVAVAEGERGGDVRHWGTIPHRPDHVRKLVEKLDADGVRLHFCYEAGPCGYGLHRQLVEMGHDCIVVAPSLIPVKAGDRVKTDRRDAVMLAKLHRAGELTSVWVPDAAHEAMRDLVRARATAMRVLGKARQHLQGFLLRHGRIYPGKKGWTVAYRRWLTTVRFQHPAQQIVFQDYVDAVADAEARVARLTGQIADLLPSWSLAPVVEAVQAMRGVAFIVAVTVVAEVGDFHRFDSPRQLMAYLGLTPSEHSSGTSVRRGGITKAGSGLARRALIEGAWSYRMQARVSRKLHDRIEGLPRTVRDIAWKGQLRMCQRYRHLVAAGKAKVVVTTAIAREMVGFIWAIARAVTAAPA

SEQ ID NO: 307508 - protein, 440 aa, unidentified
MKLKVVNPNAAGIDIAYGEMQVCVPEDRDGENNRCFGSFTCDYEEIASWLKACGITTVAMESTGSYWVGLYFFLEEKGFDVLLANAKDVKNVSGKKTDEADAEWIMLMHSYGLLKPSFHPDAAARSIRELARHRDNMLRSASKEVQHMQKSLVLMNIKVDTVISDILGKSGKAIIEAILRGNHDPKSLVQLVDPRCKASKETIEKSLEGTWDAVHLFELKQSYDLYKYIHTQIADCEAEMDRLLGEYTDGCGTDMQGYTATKKRVAKKNAISFDAEKHAFSMWGVNAMEIPGMSLGALAVLMGELGSGFTEKFTSAKSFCKWCNLVPNNKISGGKLLSSKVPKQKNRVGQVFRLCANSVKSVKTGLGIYFRRQKSKGGHLQAIVATANKIAKIFYTMVVTKNHYDESKVGLDEKQLLERKIIMAQRTLDRLNLKLSVAQG

SEQ ID NO: 307509 - protein, 340 aa, unidentified
MAMFAGLDVGFKRTAVCVIDGAGVVVWRGVVDTHPEMIAAALQRGRRELEKVGLESGSLSPWLARELAALGLPVVCMDARRAADAVKARRVKTDKADALALAEMLRTGWYSAVHVKSEESHRLKALLGARDQLVRTKRALGNQVRGLLRPFGIRLPSRQGTKKFDAAAHEAVRHDPVLSASVTALLEALAAVESQIARLDDRLKELARRSEVCWRLMSVPGVGPIVALAFMAAIEDVGRFRRMRDIGVYLGLTPKRYQSGETDVVLGISRQGDAMARHYLYEAANVLLTTVRRASPLKSWGLKLLKRRGPKRARVAVARKLAALLGRIWKDGTHFDAVPA

SEQ ID NO: 307510 - protein, 407 aa, unidentified
MERPAPDLQTVDYAASRERPWRRATYKWEPAVKNVRFIGLDVHAQTIAVAVAELGGEVRSLGVIPNRVESVRRLIGKLGKPEQLRVCYEAGPTGYVLYWQLSELGVKCEVIAPTLVPVKAGDRVKTDRRDAEKLARCYRAGDLTAVWVPDAAHEALRDLVRARLAAKRDQLRARHRLGKFLLRQGRRAPEGGTAWTQRYLAWVKQQHFEHAAQEATLLDYLHEVEHASERIERLERGIDVAVESMPESLRAVIAGLQCLRGVAKISAVTLVSELGQLSRFGQARQLMGYAGMVSREHSSGERVSRGSISKAGNAHLRRIVTEAAWNYRYRPALGKALAARQSGQSEAVKAIAWRAQHRLHARYRALLARGKVKQKVITALGRELLGFIWAIGRELERTHTQEVRRAA

SEQ ID NO: 307511 - protein, 362 aa, unidentified
MEKHKYVALDVDSANIVAGVYDRQGEALMQCCLRNNGQVISEFFKTMTGVVHVTFEEGTQAIWLYELIRPLVAEVIVCNPRENKLLKAGNKSDRIDVAKLGKLLRLGELRPVYQGPSAAQGLKQLVHGYQALVDDTTRVKNRLKALFRGRGLSCKGETIYGREQRQQWLGQLEGQELQRRATYLYEELDCVLRLRAEAAKVMCRAARQHEAYKWISSAPGLGAIRTAQTLATTITPHRFRGKRQFWPYCGLAVVTRSSSDYEWVDGGARRKRKPIQTRGLNQNYNRTMKAVFKGAAISALQQHPEFQEYYQRLCAQGTRPEMARLTVARKLAAIVLILWKKGELYDSKRLNQAAPGAGPAVN

SEQ ID NO: 307512 - protein, 339 aa, unidentified
MVEVYVGLDVSDKSTHLCVVDGSGNVIWSGACVTDPEVIARTLERRAPGLKRVILETGPLSAFLYHGLFEREVPVTCVCARHAKGVLSARVNKSDPHDAEGLAQMARTGWFKAVRIKAEATHMDRARLKIREQLIEAHRAMAGQLRGLLKLFGLRLGKVTTPGKRRERLVALFALKAELEPILKPLIESLEALEVQIRRSSQQLAAQAAADPVTARLMTVPGVGPITALVFKSSIEDPGRFARGEDAGAFAGLAPRRNQSGERDHKGRISKAGDPMLRGALYEAANSLLSRVKRTCALQAWGRKLAETKGPKRARVAVARKLAILLHRLWLSETDFRWA

SEQ ID NO: 307513 - protein, 419 aa, unidentified
MESEKIDYAAWIGLDWGSYKHAICLQPADSGPVERCTLEQKPEFLHGWFMNLLARFGGRKVAIAIEQTRGAVIHFLLGLDSVHIFPIHPKSLKNYRDALHPSGAKDDPTDADLLLQFLKLHQDKIKPWIPDEPEVRLLLRLVELRRKTVGKRVRLTNELTQLLKEYFPAALDCAGDLDKVMACDFLVRWPTLEKLQKSQPETIRNFYQEHNSRRRDVIEDRLKQIRSALPLTTDAPVIEPSVFLVQSLAPQLNSVIDAIAKFDQRIREVFEKHPDAPLFSSFPGAGPALAPRLLAAMGSDRCRFSSSLEVAEYSGIAPVTERSGKAKWVHRRFACSKFVMQSFHEFAAQSILYCGWARCYYDQKKTEGKHHHAAIRALAYRWIRIIYRCWKDRIPYDEDKYIEALRQRKPAWLESLAPQ

SEQ ID NO: 307514 - protein, 361 aa, unidentified
MSGRSTETVVQQDRHVHSSGEPEQLKGRERPNTSVGSTPLYGLEEQMATSSGRYVGIDVSKDRLDVAVLGEKQTSQADNTEEGIAELVTQMQELGPELIVVEATGGYQRAVVDALFRSGLAVAVVNPSRVRQFARACGLLAKTDKLDAQVLAVFGERVKPRWYEGKDEKERELSGLLVRRRQLEEMLKAEKNRQRTVQLSLQGSMQRIITCLEAEKKAVEEQIRQYVTEQEGWQGRCQILESAPGVGVVTSATLLADLPELGKLDRKKIAALVGVAPMNQDSGRKRGYRKTKAGRAEVRSVLYMATLVACRYNPLIKAQYEGLVKRGKEKKVAITACMRKFLVILNAMMRDRQPFRYSARA

SEQ ID NO: 307515 - protein, 384 aa, unidentified
MFVGIDVHKHQHAAALIDERGGELAALIVPNSPQGYRRLLDWLGEFDAGQAVVGVESPGSYGRQLVGALAAAGLEVLHVPAWRTHRERHRQGPGKTDPGDALAIADVVRRKRGELSLALEPELVRALAMLELQRRRFVRDRTQAIQRLRSDWTQQDPVAEGGVLRCNSQRELRRLKRIRFGDSLTDQIAARCVRELARDIDDLNQRIAALDREIAELLDQHDNPLVELQGAGTNLTATIIAQAGDVRRFRDAAAFARFCGAAPIPCGSGQTAGRHRLHRGGNRQLNAALYRIAIVQQRHHPQAKAFLARKHAEGKTPPRSTTRPQTPPRQRPLPPAPHLGRRHPRHERLDIGESNASSRRSLTNGPTAASTQHQPNGPRRYPPG

SEQ ID NO: 307516 - protein, 462 aa, unidentified
MEAKREDKNGQNRRRQLQGLPLMRTDVAGMDIGSERHWVCAPTPDGSGREIADFGATTPELIRMAEWLKARQVQSVAMESTGVYWIAPHEVLEAHGLNVLLVDTRQLAQVPGRDKKTDPTDCEWIQRLHSCGLLRGSFRPAEEICMLRTLVRDKATLVAESGDWVRRMQKSLDQMNVRVHRAVSDISGTTGMAIIRAIAEGERDARKLAHLRDPHCRKNEEEIAEQLTGHWREDHLFSLCQALKMYDAIEERISAYEKEILRKLGEMEQEEQGGKNAPPLKNTNKARMIKKRGQEPKRQALYRMSGVDATQIDAIGVETVEVIISEYGPDLSRFPSEEQFVSHATLAPRVPKSGGKPVKKKKRNSASTRVATALRMAAQSLRHSDTALGAYYRSTARRKGPGIATFAGARKIATLIYRLLRWGQPYIDEGAEAYEKRYQQQRIRGLESRARQLGYQLTPLTA

SEQ ID NO: 307517 - protein, 404 aa, unidentified
MMLFVGDDWAQDHHDVYVMNEAGVQVAARRLPEGLVGVGQLHDLIATHAEDPGEVIVGIEKDHGLWVGALAASGYQVYAVNPLAVARYRDRHRVSGAKSDGADAKLLADLVRTDRHNHRPIAGDSADAEAIKVLARAHQSLIWSRTRHTNALRSALREYYPTALVAFEDLAHGDALGVLDRAPTPAEGARLSLPVIQSALKRGGRQRNIAARARDIRTALRTEQLAAPAPVAAAFAATTRAAVGIITELNRQISELETSLAAHFEKHPDADIYRSLPGLGVILGARVLGEFGDDPNRYTDAKSRKNYAGTSPLTIASGKKRAVLARHVRNRRLYDALDQWAFCALTTSPGARAFYDQHRAAKQTHHQALRALGNRLVGILHGCLRHYTRYDEHIAWAHRIPAAA

SEQ ID NO: 307518 - protein, 407 aa, unidentified
MLVQHAVPVLPLTVVVAIDVGKNEFAVSVTTAARRRLLKPRLGCPMTAPSVREVVGRISRLLPTGAVVKVGIEAAGHYHLPLLAAAVWPTGWELLELNPAHVTEQRRVLGKRTIKTDVIDLEAMTELLLAGRGLPVTATEAVLVELTAWSAHRTRRIEIRSGLKNQLLGQLDRSFPGLTLALPDVLGTKVGRLVAAEFADPTRLVALGSSRLIRFGATRGVQIRKPIADKLLDAARDALPMPDAAIARQVLAADLALQSDLDRQVAQAEVELARLLPLSPFRTLTSVPGWAVVRAGNYAGALGDPDRFSNPRQVYRSAGLNPIQYESAGKRHDTRISREGSVELRRALIDLGMGLWLNEPAATARAVELRARGKKGGVIACAMAHRANRIAFAMVRDQAVYDPSRWT

SEQ ID NO: 307519 - protein, 329 aa, unidentified
MGLPTVQLNSISKCWVGIDVSQDWVDVVVLVEERKAEQLRVATSAEELERLAGRLLPYAPQGVVLEATGGLERAVITALAGAGLPVMRINPKRVRDFARAQGLLAKTDALDAYVLALFGVRMQPPLRPWPEAERLQLAAWVARQQQLILERASERTRFHQASEPQLKKSIQRVIAFLGKELARLDVQLNAWVQKSDLWKEQETLLRTAPGVGPKTARVLLAQLPELGRLNRREIAALAGLAPFACDSGHWRGKRRIRGGRSAVRAALYLASWTSIRVPGFLRDFYQRLVASGKPRQVALIAVARKLLLALNEMMRSNTPWRASENSLSA

SEQ ID NO: 307520 - protein, 393 aa, unidentified
MGKGSGNGTTRGDRKRNARRERLRGLLPRDGAVIGIDLAEDKQALAVVDHDVRVLARKTVKVKAFRLGEALDWAVAQATVKGFARVAVACEPTGARWLQVQRLCAERGLPLVCIQPLVSHIAREQQDYTTHKTDEADCVMIARLAVELHCYLPEQLDETWVHLRHLGRRRNQLITAATASVQRIRDFLSVAWPVVTETCAGPFESVTWLAAMQVVTSRCGAQPGKLAEPGLEAFTVLVRGAVPGWGGRRPSGRVCRAMFAALTDTEGAVVSHRRGLLRRCADELGDLQRTRAQLRAVEADMVAVLAELGLARLADIRGLTAVGAAAILAETGDPRRYDSSSSLVKHAGLSPSDNASGAFRGEAHISRRGRPGLRLTVWRAVWPLLIPQPRPGR

SEQ ID NO: 307521 - protein, 259 aa, unidentified
MEQSAIAPSFVGIDVSKDRLDIHVRPSGQAFAVTRDSTGLEQLVDDLRALMPALIVLEATGGFEIAVAAALVGAALPLAVVNPRQIRDFARATGRLAKTDALDAQVIALFAERIRPEPRPIASVDRQILAELIARRRQVVEMIGMETNRLHQARNPRVQRMLKATLKTLKAQLAELDRDIDDTIKRSPAWRAADDLLTSVPGVGDVTAHTLIADLPELGQLDRRRIAALVGVAPINRDSGQMRGRRTIAGGRIDVRNAL

SEQ ID NO: 307522 - protein, 292 aa, unidentified
MNYTTVGADIAKNVMQLYWVDPDSGEVINKAVKRAAFLEHFANCAPCLVGMEACGGAQHWARRLLEMGHQVKLIPAKFAKAFNIRNKNDAADARAIWMATQMPGKSVAVKTEAQQAILALHRIRQQKIKFRTMQMNCLRGLLTEYGEVMGKSRAAVDKAIPGVLERLTDRLPAMLIESLREQWNDLQNLDRQIAEIERRLRAWLKDDEACMTIAAIPGVGLLTSTAAVATMGDPKAFRSGREFAAWLGLVPKQVGTGGKTVLLGISKRGDTYLRTLLIHGARSVLSHSREPG

SEQ ID NO: 307523 - protein, 346 aa, unidentified
MEHYAGIDVSLEWSSICVVDAQGKIVKEAKISSEPATLVAFFEALGFAVKRIGLEAGPLSQWLHAGLKRAGFEAVLLETRHVKAALSAMTVKTDRKDARGLAQLIRMGWFRPVHAKSIRSQEVRALLVARKQLLGRLIDVELSIRGILRGFGLKVGPVTRKGFEARIRELVTGQATLERIAGAMLSARVALKAEYEKLHKTVLAIVRDDAVCRRLMTVPSVGPLVAITYKSAMDDPNRIPKSKAAGALFGLTPRKYQSGEKDVTSGITRAGDEMVRTALYEAANVLLSRITRFSKLKRWGIDVAKRRGSKRAKVALARKIAVILHRMWVDGSTYRWTETQPIAAQA

SEQ ID NO: 307524 - protein, 348 aa, unidentified
MAMTIVEVVRLITGGVDTHLDVHVAAALDATGGVLGVRSFPTTPAGLVELHGWLGEFGTIGRVGVEGTGAYGAGLSRHLRAQGLEVIEVDRPNRQARRVRGKSDSLDAVEAARAVLSGRACGIAKSADGNVEAIRTLLIAKRSGRETRIACLNQIRHLGFCAPDDLRERLRDLPRSHLAAVAASLRPQAGTEPVAYATKVALRTLGRRVQAINNDADLLDAHLGELVEATAPGLLALHGVGVDTDAILLVAAGDNPERLRTEGAWASLCGVAPLPASSGKITRHRLNRGGNRQANHALWRVTLTRMGSDARTRAYVARRLDEGLSKPEIMRALKRYIARETYQHLPRS

SEQ ID NO: 307525 - protein, 341 aa, unidentified
MPIVTIGLDLAKSVFQLHAIDEHGAVIMRKRLTRGQVLPVLEKIPPCLVGMEACGSAHHWAREIQALGHEVRLMPAQYVKPYVKQNKTDAADAEAICEAVQRPTMRFVATKSIEQQAVMLNHRGRELLVKQRTMLANAIRAHFAEFGMITAQGTQNLFKLKQAAEQGSLTKTAMDVLELLFDQLDALNKNIKALELRIHTWHKSNETSQRLTSIPGVGPLTASAIVASVGTACSFGTARSFAAWLGLTPREHSSGGKQMLGGISKRGDGYIRKLLVHGARAVVRMRSRKNAEPLPWLDGLLERKHRNVATVALAHKNARVVWALLNTGEVFEKGTRQVKMA

SEQ ID NO: 307526 - protein, 317 aa, unidentified
MTAKNDEIFVGIDVAKATLDIAVHGEPAVTQQPNDDDGIAAVVATLAELAPTLIVVEASGGWEMGLVAALAAAGLPVVVVNPTRVRYFAKALGQYAKTDKLAARLLAHFAERVRPEVRPLKQGEQALLSQVISRRQQLVKMLTMEKNRRATTQGEMRTQLDSHIAWLKAEIKALNDKLCQLIDASPQWQAKEKVLRSMPGVGPVTALTLLADLPELGALNRQKIAALVGLAPVNNDSGPRKGKRRIFGGRVSVRCVLYMAALSASKTNPIISEFYERLLAKGKAKKGALTACMRKLLVMLNAMIRDMKPWQIEAKAA

SEQ ID NO: 307527 - protein, 435 aa, unidentified
MEEVEDEPLFCDRVAGIDIGKATVMVTIRVPSEARAKGRQQETREFGTTRRELLALADWLRCWQVERAGMEATSDYWKPVLFTLEQEGFDCLLYQASQVKALPGRPKTDKLDSVWLARITEQGSLAGSFVPPEEIRRLRTHTRCRRKLVQMRTAQKERCEKLLEDAHLKLSSVISDIHGVSGRDMLRAIAAGERNPKVLAQMARGVMRSKIARLEQALDCSFFTGEHAFILTMMLDSIDSLTAQAGVLDARIADMCQPYQRQLEQLDEIPGFGTTTAQDLIAEIGTDMNVFPTAGHLASYARQAPRVKESAGKRKGKNATGRGNPYIGGALGEASISAGRTQTFIGEKYRRLTRRMPKRKAQVAIMRSQLVIAHALLSDPDARYQDLGPDYYERKADIRRRARNHARALERLGYKVTLEAIDPGTGELHLVATAG

SEQ ID NO: 307528 - protein, 337 aa, unidentified
MQPTVPLFVGLDYSQHKVQVCALDPQGKVLGNRAVPDSADAIDQAVRRLGAVQGAALEACTGAADLAEELADRFGWPMHLGHPGFVSRMKQSPDKSDFSDARVLADLERVGYLPRVWIAPKQLRELRTRVRDRQQLVAQRRNLKLAITALLREHRQRCEHQRWTAAWRAWVEQQAQLPEQARWVMTQRLRRLEWVVAEVHAVERRLEEVTKDDGTVRRLRTIKGLGPVTAWTVRAEVGRFDRFRTGKQRARFCGLSPCNRSSGDKAADAGLIRAADPERRRVCVEAAWVLIRCQPRGRQRAQRLRAQGKPRTVVTAAVANRFVRWLDHEGVRQQAVA

SEQ ID NO: 307529 - protein, 371 aa, unidentified
MTRILYVGMDVHKEDYTLCIYSFDDDKLQYQQKMLPDYQLILKYLEQIRKSYSEEVEFVCGYEAGGLGYTLYHQLTNHGVKCVILAPSTMAITNKNRIKTDKRDAGNIAKCLAFRTYSEVHVPTSEDEAVKEYIRMRNAQKKALKAIKQQILALVLRQGYRFDGGRNYWTIKHVGWLKMLDLGGILQESLEEYLITYDYLTDKIKRLDKRIEELAGEESYEEKVKKLSCLIGVKTYTALSVIVEIGDFNRFSEAEKMAAYLGLVPSEDSSGGKQSRGSITKAGNSHVRKLLVESAQSYTRGAIGYKSAELKRRQNGNTPQVIAYADKANERLRRKFYRMTLKNNINRNVAATAIARELACFMWGLMTDNTA

SEQ ID NO: 307530 - protein, 408 aa, unidentified
METMHRRCAGLDVRQKEIVACRRIVSGKKVRSELERFAATTPGLVALSNWLMEARVTHVAMEATGVYWKPIWHVLCGDFKLILANAAHIRNVPGRKSDANDATWIADLLAHGLVRASFVPPQPIQELRDLTRTRRELTREIVRHTQRIQAVLEEANIKLTSVISDILGMSGRRILKAMISGQSDPRRLAELGSSRLACTPEALAAALEGRVRDHHRFLMSQHLKTIEQIEATMGEFDARLEAALAPFRDAVERLKDMPGVSDNVAATLIAEIGADMSAFPSAGHLVSWAGLCPRLDESAGRKRSRRLRKGAPWLKPVLVQAASAASKAKNSSFKARYHSLKGRIGPKKALIAVAAAQLRTVYHMLKDGTFYKDLGPDYRKPRNPQRTAQNLANRIRALGFQVEFKEAA

SEQ ID NO: 307531 - protein, 423 aa, unidentified
MRHKQSAAGMQVLYARVCGLDVHKKSVMACLRVLDPKSGRVDITVRAFGTMSEDLLELRHWLKDGQVTHVAMESTGVYWQPVYNLLEDHFESWVVNAQHIKKVAGRKTDVSDAEWIAQLLQCGLLRPSLVPDRAQRELRDLSRQQTKLVQQRNAVNNRIQKVLESANIKLGSVASDVLGVSGRKMIEALISGEKDPSVLAELAQKKLRDKIPQLRRALAGELSDHHRFMLGELLVQYDFINQRIQVMAQRIDEVAPRPFVAAVQKLDAIGGVAERGAKALLAETGIDMSRFPTHKHFASWAGQCPGNHESAGKRKSGKTPAANRHLDAVLTEMAHAAVRKKNSYFKAQYHRLAGRRGKKRAIGAVKHSLLVTIYYMLRDDRPFQDLGADHFNRLNPQQRIRFHVRKLQELGQAVEISPMANAA

SEQ ID NO: 307532 - protein, 346 aa, unidentified
MKILALDLGKYKTVGCEYESESGAHQFKRELTTPAGLAKMVQAVKPDRVVIEVCSIAGWVCDLLWGMGIKVQVANTSDDAWRWRKVKQKDDRRDALKAARLSAVNQLREVYVPAIEVRQWRALITYRQHVIRRRTKIKNHIRDLLLREGRILKRGSGCWSQEGIKQLEEQARPFSECGPAELWRGELQLELEQLKEIQRQVATVSAQLDKLGAGDARVQLLRTVPGVGPRLAEAIVALLDQPQRFRKASQVSGYIGMVPKALDSGETERRGHITRQGSRLVRSLLVEVAWAGLRHNAWVRQTYQRLSGGKKARKKIAIVAVGRKLLVKCWAMLRDNRAWDWQPQIT

SEQ ID NO: 307533 - protein, 463 aa, unidentified
MAKSRKSRKQQAPKVDVTAGLEALHQHAAGIDVGSAEHYAAVPVGRDPHPVQTFGSFTADLHRLAKWLKACRIETVVMQATGVYWIALYEVLESYGLQVNVVNAKYTKTLPGRKTDVLECQWLPKLHTFGLLNNSFRPPEEIRVLRTYLRQRENLVAAAGTCIQQMQKVLTEMNVQLANVISDLSGITGMAILAAILEGERDPQQLAALAHPRIQASRKEIAQSLEGHWREDLLFVLQQVYDLYFTYLQNITVCDQRIEAHLKTMGAKVDVVAQPLAEARRKDRLPHRKHLPQFDLREELYRITGVDLTRIDGIQVQTAQVIISEVGIDMTRWPTEHHFASWLGLTPNNQITGGKVIRRGTKKVHNRAATALRLAAQTLHRSKSYLGAKYRRLRARLGAPKAITALAHHLARLIYRLIRFGIEYHDKGMEHYERKYRETQMKWLQKQATQLNMQLIPTQGVAK

SEQ ID NO: 307534 - protein, 370 aa, unidentified
MLDTTTFIGLDVHARSIKAVSLDVMTGEVRCATFGYDAGAVAEWVRSVDPRARCVYESGVTGFDLQKRLSGLGVDCVVGAVSKMIKPSADRRRKNDRNDAEFLARMLSVGNVVEVWVPDDECEAARDLTRALEDARDDLSRAKQRLSKFLLRHGLAFDERTPTGRRKGNWTRAHWSWIESIRFAEGADNDVLAYYVDAVRRAAEEKARLEGLVEAEARKPRWRRRVDSLRCLKGVDTATAADLVFEAGEFSRFGNARSFAAWVGLTPSEHSSGESDRRGAITKAGNKHLRKALVEAAWHYLTCSGRPKDLAKGQAPDRVARRHAAKGVRRLVERREALLARGVHGNKANVATARELACWVWAVGLMAEEA

SEQ ID NO: 307535 - protein, 350 aa, unidentified
MSYFVGLDWASQEHAVCVINERAQIVWHTTIPHTAVGLAELRTRLARLAPPATIPVAVERPSGLLIDSLVDGGFIVVPIHPNALKASRTRYAAAQGKSDAGDAFILADLLRTDGHRFRPLQPLSDETRALRALVRTRDDLVAQRVALANQLRALLESFWPGAAQIFADIDSPISLAFLHRYPTPHTAQRLGEQRLAAFLAQHHYCGRRPAPELLARLHQAPIAPCGEAESEAKGELVRALVAVLEPLVRQLHHLASAIEHAIAVHVDGPILMSFPRAGRINAAQLLAELGDERLRFASYEHLAAEAGVAPVTQASGKHRAVTFRWACNKRLRLALTTFADNSRHASASSS

SEQ ID NO: 307536 - protein, 468 aa, unidentified
MTPNRKRQRKNRKPGSHQGLPIINPDAGGIDIGSTEHYVALPPDREGPTVRAFGCLTPDLEAMAQWLNAHHVKTVAVESTGVYWVPVASVLEAHGIDVRLVDAHHTRGVPGRKTDVLDCQWIQELHSHGLLKAAFRLTPEMQLVRTLWRQRADLIAQCAQRVLEMHKALECMNLQLHKVIADVTGTTGLHIIRAIVQGERNPKTLAAMRNFRCKSSEETIEKALTGNWRDDHLFLLKQSLAIYDFLHEQINECDKEIDRLVKRLTDQQRADGPTTSGKESGRKRRNAPEKNILDLHRELIRITGVDLTKIEAIDAMTAFTVISEQGVDMSQFPSVKHFCSHMGLCPGNKVSGGKRLSGRTRKVQSRAAKALRIAAQTLEKSDSALGAFYRRLKFNKGAAKAITAAAHKLAQRIYAMLTNGEDYVMKGAAEYEQQYRKQRIRQVFNQAKKLGYQLLDINTGEILQTAVS

SEQ ID NO: 307537 - protein, 359 aa, unidentified
MNSNRNAKINQISGESLVIGIDIAKKTHYACAVDDRGRELQRPVGFTQSRAGFEGFHKQIKEWLHQHGKSEVIIGFEPTGHYWMNLAAFLLEEDISFVVVNPAHVKQSKEFDDNLQTKNDKKDARLIAKLMIGGNFSYPRIPEGIEAELKNGSITRWKLKDKQAMLKNQMTGLIDQYFPEFKTVIKGFGQLACAILKYTPFPEDLLNQEVEELALMYKEKAGISSPSKSKIREMKRAAENSIGISTGKEVARFEIAALVDQFLLIERQLTELNHHLEDLVTQLDEYEYLISIPGIGKHTIIDLIAETGSLKQYTHSRQLIKLAGLTLRENSSGYHKGQKKFPNGDENGSETFFFAPYCL

SEQ ID NO: 307538 - protein, 408 aa, unidentified
MSDHGHVVAGVDTHADTHYAAMISATGEHLAAAQFPATDAGYRALTGFITCQGALLRVGVEGTNSYGAGLARHLRVENIEVVEVIRPARQVRRMRGKSDEIDAYAAAHIALAGNDAVTPKTAAGPVEAIRVTHAARRSAVKARTETIQQIKSLLVTAPEPIRAEYRALTAGRLVDRLAASRPRSGDDETAACTRVALKRLAVRHQQLDAEIVGHEADLTRLVSAANPALTQAGGIGVITAAQLLATAGDNPDRIGSEAAFAMLCGAAPIPASSGKTNRHRLNRGGDRAANCALHQIAINRLATDPATRAYAAKRTAEGKTNKDILRCLKRAIAREVFHLITNPPPAEDSTDLRLTRQHLGLSMAHVAAALDCSIAKISRLERGHISNLRFLHQYRDWLTKQKPRLNAA

SEQ ID NO: 307539 - protein, 347 aa, unidentified
MSNITTIGIDLAKEVFAVCAMDTTGAVVYHKTLKREAFVMWAEQLESSYTIVMEACGSAHHWGRWFAARGHTAKLIAAEFVQPFRKSMGAKNDKNDAEAIAIASRQPTMRYVSIKSIAQQEALVWHRLREGYKEERTAHLNRIRSLLGEFGIWPPRSADKLLRLLPTFIQNIQLPPGLRTAIEQTLQYLSELHRQIAQCDQQIALHVKSHPEAQRLTAMTGIGTLTASATSAMVVDAKHYQNGRQFAAWLGLVPRQMSSGGKTKLGRTTRRGDAYLRSLLVQGAKSTLQVALRQTTDKASRLQQWIVQMYARVGYHKTLVAIANKHARMMWAILAKNEDYDVYAWQR

SEQ ID NO: 307540 - protein, 330 aa, unidentified
MTKTSTATRQGNDGGMTVGVDVSDGFSSICILDREGEVLEEGRVRTTSEGMGQRFGAMAPCRVVIEAGTHSPWLSRLLSGLGHEVVVANARKVRLIGESTQKTDRADAETLARLGRLDPKLLSPVAHRPVEMQVDLAVIRSRAALVAARSLLVNQVRGTVKAMGGRLPSCSTRSFHHKVLGAIPEPLLIAVTPVLAVIEQLSKEIDGVDARIGALIKESYPEARLLMQVDGVGPLISLTYVLTLFDPHRFQRSRQVGPFLGMTPRQRASGERSPRLGISKTGNGYLRQLLVNGAHYILGPFGKDCDLRRFGLAHAGTTGNTKKRAIVAVA

SEQ ID NO: 307541 - protein, 323 aa, unidentified
MNTNTLQNINIGVDTGKSQLDIYIRPLDVFFTVPNNEKGIKQALTTIKKHNPQRIVIEATGRLEMPFVLACTEAKLPIVRANPVHIKRFAGAIGRRAKNDRLDAQLIAHYGEAIKPDLTVIKAKNIRLMSDLVIRRNQLLAMQTMEKNRIQILPKHLHSTMTPILTAIKNQVSKIENKLVKLIEDCPEYQTKNTLLQSVPGIGNIAAASIISNVPELGYITNKQAASLIGVAPITRESGRYKGKRVIQGGRAQVRTVLYMAMMSAMQCNPVFKDTYARLLEAGKPKKVAIIACVRKMVVILNSMLRDGIMWDQNIAQNKGLTP

SEQ ID NO: 307542 - protein, 344 aa, unidentified
MKVTTVGIDLAKNIFQIHGVDAHGKAVLKKQIRRDQLMLFFTNLPACLIGMEACASAHYWARRVQECGHTVRLMAPQFVKPYVKTNKNDAADAEAICEAVARPNMRFVPIKTESQQAVLAVHRARQSFVKARTAQANQIRGLLAEFGLVIPQGIAHIAQRVPELLDSDTCALPGPFRLLVLRLMEHLKLLDQHVRELETQIQTWHRDNPASRKLAEIPGVGPITASALVASIGDAKNFENGRQLAAWLGLVPRQHSSGGKSTLLGMSKRGDSYLRTLLIHGARSAILAAQRKPDTDSWLSRLLGRRHPNIAAVALASKNARVIWALLAHNQQFRPGYATAAAVA

SEQ ID NO: 307543 - protein, 455 aa, unidentified
MGTERKVAGLSLECIEPNAAGIDVGARSIYVAVGAERVAEPVRCFATFTEDLRAMAAWLKQCGITTIAMESTGVYWVPVYEVLEDAGFKVCLVNSHHVKNVPGRKSDVSDCQWLQYLHSVGLLQASFRPERDICALRALSRHRAGLVEVAAVHVQHMQKALTQMNLQIHHVLSDITGMSGLAVVDGILQGERDPQRLAGLVQSRIHADRETVIKSLVGNYRAEHLFTLRQSVAAYRHYQKMLADCDREMEQYMGRLPDKGQGGSGQPLSGKSGKGKRRKNQFHFDMGKELYRVLGTDLTLVPGLSALTVHTLVAEVGSDLSRFANAAAFTSWLALCPGIKKSGGKVLSSKTRKTNSRLSLALRLAAQTLHRSHSYLGAFYRRLRARLGAPQAITATAHKLARIIYHLVTTRTAYDESVFRNEEEKHALRSQHRLQRQAEALGFQLVPICHQEVVH

SEQ ID NO: 307544 - protein, 344 aa, unidentified
MNILSLGIDIAKASFTAAGHGPAGEYQWGLFANSPAGFEQWRAQVQALLEAHPDWAVLVVLEPTGGYELALAGFAAQQGWPVSRPNAKRVHDWAKSQGRRAKTDRLDALTLARYGAAQPRADYKPLPSAYSQLDSLLQRQADLDTMLNQERNRQAALALKPDTAPIVARNLAGLLRALEQAQDEIAAAIQAHLQAQPALQAQVRRLRTVPGVGAQTVLHLLVLLARWDTLTDGTGRAKGLVAYTGLDPQTYTSGSSVHKPARISRMGNRQLRRRLYLAAFGGVRAKSGPLRDFYGRLVGRGKAKKLAVTAAARKILIWAWAVYRTQTDFDRQPHVHSQRQPEPA

SEQ ID NO: 307545 - protein, 365 aa, unidentified
MLENTPNQVMIAVDPHKASWTAAAVDISLRALATIRVPVGDDGYRKLRRFARQWTNAEWAVEGATGLGAPLTNRLSNDGMEVVDVPAKLASRVRLLSTGHGRKSDDADAVSVGVAALTGHGLTTARIDATVTALRAIVEHRDDLVKTRTQTVNRLHVVLTHLIPAGASRGLSADRAAEMLKQVRPRDVAGKTLRSLAADLVAEVRQLDRRIDKAARDIEAAVTESGSSLTQLCGIAALNAGKILARVGSVHRFRSAAAFASYTGTAPIEASSGDVVRHRLSRAGDRQLNYVLHTMAITQIRRDTPGRAYYHRKRAAGKSHREALRCLKRRLSDVVYRQLLRDATPAVAAGPGGQSGAALSSCAAG

SEQ ID NO: 307546 - protein, 368 aa, unidentified
MSKTITSFVGLDVHKDSTAIAEAEAGRETPRFVGTVGPDLGQLLKALKSLGKPETMLVVYEAGPCGYGLARQLRSRGYGCEVVAAGKIARRPGERIKTDRRDALTLARLARSGDLVKVMVPDERDEAMRDLSRAREDAVRARLKARQQLKALLLRHGHRYSGKSSWTLAHERYLAAVSFAHPAQDIAYAEYRQAVREGHERVERLTQALRTQSEQWRMKPLVAGLSSLRGIDFVAAVTLAAEIGDFSRFAHPSELMGFLGLVPSEYSTGDSRRQGDITKTGNSHARRVLVEAAWNYRFPARISRILQIRQEGQPKAVRDIAWRAQLRLAHRHRRLSSRKLHPNKICVAIARELAGFLWDIARQVRVPT

SEQ ID NO: 307547 - protein, 396 aa, unidentified
MTVTNQFAAHVGLDWADKKHDVCVQFKNGERVFDVIEHTAEALDAWLTELYQKVKGRIAIALELKKGPVVYALQKYPFITVFPVHALSLARYRQAFSPSGAKDDPQDAELALELMLRYPQKIKAIEPDNADIRLLQQLVEQRRQLVEDKRRFVNRIINTLKQYYPQPLEWFSHRGSLLLCELIIRWPSLQQLKRARRDTIRNFLNAKGGRAMALTEQRVASIDNAIPLTTDPSVIEANALMAAALATQIKVVSEIIKTYDERIETLFDTLPDAGLFKSLPGMGPCMGPRMLAALGDNRDRFNSAEEIQNYAGIAPVTERSGQKSWVHWRWQCAKFVRQTFVEWAAKTVNSSYWANLYYQGLREKGKSHQSAIRALAFKWIRIIYRCWKARACSQAD

SEQ ID NO: 307548 - protein, 345 aa, unidentified
MQTMYYIGLDVHKRTISYCVKDGGGTIHAEGTIPATRFDLDQWMKTLPQPWTAAMEATVFTGWIYDHLRPHAAALKVAHPLMLRAIAAAKKKNDRIDASKICDCLRCDFLPECYMATAAIRERRRTLRYRNLLVRQMVQMKNKIGMLLMEAGVRYNKQRLHKAGYFRELLATNPDIDEGLRSLLRLCRETVVRLGKTESALVRSLERDSLLMDRVERLMTIPAVGPITALTWALEVGDVQRFSSIKKAISYCGLCGAEKSSGNTVQRTPLSKQRNKHLQCTLIEAAKMAPRNSPELAMLYDREKQEGNANRATLAVARKLVAYLVAVDRGQRNFQVVETSNGIAA

SEQ ID NO: 307549 - protein, 456 aa, unidentified
MPDYFFGIDVSKGHSNFVMLDSSKRCVEDDFQLDDTFDGHQKLYSILSEFCVRHPKANIFAAVESTGGYENNWFDVLARFQAQLPIRTARLNPCGVYNNSKAALDRNITDKISAENVAKYIIEHPEKVRYQLQDPLAPLRKQWGFIKMLKKQKTQLLNQLESNLYTANPEILAYCKDSTPAWVFSLLQRYPTASKLAKARKSSVALIPYVTPQKAKNLIEAAKHSVASATDEITSQIIKATVQQIRQLSKVIDAQTKAMTDKCSIPEVELLKTFIGIGDDSAVGLILEISSIKRFKSAKHLASFFGLHPVYKKSGDGSWGYRMSKKGRIAPRQILYMVAMVAIQSNPLIREIYEKHTEKGMEKKAALGVCMHKIIRIIYGMLKHNKPFKPEIDRKNREKQNTQGEKKICRDKSRRYQTHDAKAPISRRQAKKREERKQSQSDNNAKCGIKAPVPIL

SEQ ID NO: 307550 - protein, 353 aa, unidentified
MEQFIGCDAHKKFSVFVAVNEKGQAGEALRVAHDRQLYREFLARLPAHSAIAVEASGSYSWLIDEMERSGHHPRLCNPLEAKRRMGLTNKTDKLDARGLAILLRNGTLPEVWIPPAEVRDQRELLRLRIFLVRLRTRVKNRIHGTLARHNVQGPGADLFGVAARLELVARLPEVPVHSREAVEQKLTTLDFLETQIESAERRLESIMKVSVEADLLKTLPCVGNILSMVLMLEIGRIDRFPTAAHLASYAGLVPRVRSSGGRTHMGQVCGNVNRNLKWAFVETGNLIVINQRRFAGTHVVRLYQRIKRTKNHQKAVVAIARHLAEAAWWVLTKQEVYREPPGPRQQALSSTHG

SEQ ID NO: 307551 - protein, 354 aa, unidentified
MNTNKYIGIDVHQATSVFAVMDQQGKLLGEAVLETKPQVLVDFIKSQRGTVSVTFEEGTYANWLYDVLQPQVAKVVVCDPRKNKLDGNKSDKIDARKLADLLRLNALKAVYHGQHSTRTLKELARSYVNLQQDTTRVMNRVKALFRGRGIACRGISIYKPEHRKEWLEKLNGNGPRCRAELLLKQLELLQKLQLQAKTNLLVESRKHKDYKLLKDIPGLGPIRVALILAVVVTPHRFSNKRQFWTYSGFSVIRRGSAEYEITQGTLRRTKKKPLPRGLNRNYNRVLKNVFKGAALTAAYRGPFRKLFDQRVTNGMAPNLALLTLARKIASITLAIWKKGEPFDIKRHRLSEQTA

SEQ ID NO: 307552 - protein, 405 aa, unidentified
MNAVGIDVSKGKSMVTILRPFGEIVSSPHEIRHTSDQIDILIQEIRSLDGDTRIVMEYTGRYHEPVARWLSDAGLFVSAVNPKLIKDFDNDSLRKVKTDKADSVKIARYTLDKWNNLKQYGFMDELRNQLKTMNRQFGYYTKLKTAMKNNLISLLDQAFPRANTFFDSPARSDGSQKWVDFVDTYWHVDRIRSMSLSAFTEHYQKWCKRKGYNFQPDKPAEIYESIRNIIPVLPKDEVTKFLVRQAVTQVNTASVAVEELRTRMNDIASQLPEYPAVLAMKGVGTSLGPQLMAEIGDVTRFNHKGALTAFAGVDPGKNESGSYAQKSVHTSKRGSAPLRKTLFQVMDILIRTMPQDDPVYAFMDKKRSQGKPYYVYMTAGMNKFLRIYYGRVKEYLANLSDTAEN

SEQ ID NO: 307553 - protein, 344 aa, unidentified
MITIGIDPHKSSHTAVAIDAAGHEIGQRRLRVNGGTFEALLRWCEQWPTRRFAVEEAGGLGRTLAQQLAAAGEDVVDVPSTLSARARFLATGGDRKTDPADALHVAQVALFRTDLHTVTAEDQTTILRLLTERHDDLVNERTRVINRLHALLRDLLPGGAPTWLSADKAATLMKRLRPITATECCRRDLARDLLADLRRLDQRIKSNEAQMRDALAATHTTLTSLPGLGTVLAAKILGHVGDVTRFPTEHHSASYTGSAPLDASSGKNTRHRLNTDGNRALNSTLHIIAVCQIRDSGRGQDYYQRKLAEGKTSAEARRALKRRLSNVVYRTLQRDRRRQHSAAA

SEQ ID NO: 307554 - protein, 353 aa, unidentified
MKRDKYMGMDVHQATTVVAVIDAEGKTVLETIVPTAAGPIRRLIESISGPLHVTLEETTQAEWLHDLLQGFVAEVVVCDPRRNKLLVEGSKGDKADARKLADLLRTGMVRSVWHGRQTTRGLKEMVRAYETFAIDTRRTMMRIKALYRSRGIATKGSAVYQQKQRDRWLNQLTEVGMQQRAAWLYEQLDHVRELRKRAKAAVLTEGARHRAVEFLRTIPQVGPIRAAQIVATAGTPHRFRTKRQFWSYSGLAVVTHTSAEYELRAGQVVRRNKPVATRGLNTNCNRRLKSVFISAATAGGVCHPWQQYLDNLKEKGMKSDMARLTLARKIAALTLAIWKKGESFDPKKLSWTN

SEQ ID NO: 307555 - protein, 327 aa, unidentified
MTCKVGVDISKTKLDVAWLRADGKYRSKVFPNNAGGFAQLLQWLQSNLPDGKAAAHVCMEATGVYHEPLALFLHDQAVAVSVVNPLQVKRFMELEGVRNKTDGGDAKALARFCDKTAPALWEAPSAGVRSLQALVARLDTLLELRQAESNRLEVAHDAVKSSLNAVIASLDESIKDVRMQIRKTIDDDPDLRQRGELLASIPGLGDRTIPQLLAYIGRPERFGCVKALIAYASLTPMIRQSGTSLDKRRGTHPQGHREFRNALYFPAMVAGRYNPLVAEFWQRLKAQNKPGKVIVVACMHKLLAIAYGVLKSGKPFDVNHHPKAVCG

SEQ ID NO: 307556 - protein, 425 aa, unidentified
MSEKIVVGIDVSKAFSDICILSPNNDIIKRMKISNDVIGMQLLISVLEKVENEYEDRAVIIMEATAHYHQILANFFRKHNYEVIVINPIQSGALKNINIRKIKSDKTDAYNIALLYRIKNYNETITHSDTVNSIKKLCRQHKELTDEIVEHINRLIAFLDISFTDYKKVFPDLQGKTPLSLLEKYPTVQDVLSPENKQDMIQLIKENSHKSYSYAEAKYEKLLQAAEKSIEVCIVNLSSAVLIQTTVSVIFSLQEALKAINDEIKRLSLLDEKFHKEIVLLQSIPGVGEYTACVVLSELGDVSNFSKPKELVAFFGLDPGVSQSGTYNRKNNKISKRGSPHVRLILHMLAKSNVYPNRNREYLNPVMRAYFEKKIAEKPYKVVMCAIMRKMVQIIFAVLRNQKSFELRTPEEHQKLIRENSKLVA

SEQ ID NO: 307557 - protein, 444 aa, unidentified
MARKSRKQQLKIVHPRCAGIDIGSREHWVAVDPDSDEKPVRCFSAFSDDLYAMADWLTSLDVEVVAMEATGVYWIPLYEVLDARGFQVNLVNSRATRQVSGRKSDVLDCQWIWQLMTYGLLKGAFRPANEICSLRSVVRQRAAKVQEQSRCVQHMQKALTQMNIQLDNVVSNLAGKTGLSILRQIVAGERDPDKLATLRDRRLRADEQTVARSLHGNWREEHLFALSQALAHYDFLGHQIAECDQTIGEALQSLPTLTDETSAPVKAMRNPHRTSAQQTQLHQALNEVLGVDLTRVPTLGIDTVLVLASEIGPDLSRFPSSRHFCSWLGLAPPTHISGGKTLSGPKPKVVNRAGQALRQAAVNARRSDTFIGASHRARLSRMDTAKAVKATAHQLARLIYAMLTQGQDYVEQGLEAFEARSKDRQLRALHNRAKRLGLAIVEAA

SEQ ID NO: 307558 - protein, 526 aa, unidentified
MRRRPARRRPLRRPREVHKANGIIHPRVQRVGPEHFGIVCVDPAKARSYWMLADFYGKILVDKSVMEHTRLGFDQALQVLRKAIEQHGILDLTVSIERTGNYHVPPKREFQKAGYETRMIHPYATKQFRTADQSGLKTDERDLCAHHRATINGFGLLEPPLDPHYVRLQLLTRHRRDLVTKRATLRNQIHEQLNLIMPGYAKCFEDIFDSNIALLIARHTGSAAAVRQAGLSGLTEILKRANVRFQARTLHKILVWAAGAADGLPESDMRRQIFISLEDDRQAKNREIVSLERQSAGLLAQTPYVLLMSIVGINVVSCAEFAAEMGPIPNYASGQSIKGRAGLFPSRAQSDEVDRANGPLVHCANRKLRGAIMLIADNLVSTNDHFGALAQKWEVAGRDDRAIRVGVAARFCRIAYHMVAGRMVFNHPSGQRRDWILDKLITFHRDHYTSFNHANNDVHSAALQLSSAASSTEEPLLASELAKLVVKRNSKARCANTRGPQQLGDILLDVLIQRGFTPVESSSSGE

SEQ ID NO: 307559 - protein, 399 aa, unidentified
MFLGGVIMTCFIGLDLSKFKHDCFIMNEHGEVVRNSFSFTNDREGFNTLLNVLNDLDPSQEKRIGFESTGHYGSNLKLFLEANGYSFMEFNPLLVNRFFKSESLRKTKTDKVDAQKIALYLYSRDYKPNPNSSYHLQCLKSLTRLRESLVDERSLQLVRITNIMDKMFPEFKPIFGKQGLKAATAMYLLENYGSPSRMANLTLASYHKMASKLKRTISYAKFCKIKELAKSTVGNENEILSFELEVCLELFKELDLKVLQLDNKITFELSLLNTHIPSVKGIGNVLAAGILAEFENIDKFDNPAQLAAFAGIEPSENQSGTHEGGGRMVKHGSPHLRRYLIQAANNMLAHNPVLYEYYLKKRSEGKSHNVAISHVARRLTRIIFYLEKNNIDFDINKMR

SEQ ID NO: 307560 - protein, 317 aa, unidentified
MANVTFPQLIQRACGIDVHSKVVVATINGDGLQRETRNFNTFTSSLKELKEWLLTNEVTHVAMESTGVYWKPVYKVLEGSIPHVWIVNARHIKNVPGHKTDKMDSEWICKLLLAGLLKPSYIPPKEQRQLRDLTRYRNKLIQQIASEKNRMMRVLEDCNIKLSCVVSDTSGSTATSLINMICDGKTLTLEDIKNVYHGKLSASPEELLEACTGFVEEHHIYLLQMIRKDMAKTQELVDELSDRIKTILSKYENAIELLKEIPGFSTKVVEDLVAEIGFDMSHFPSEKHLASWAGVCPGNNESAGKKKAEESLTETSK

SEQ ID NO: 307561 - protein, 344 aa, unidentified
MSIVGVTGGVDTHADTHVAAAIDHNGGLLGIESFPVDPAGYESLLGWLVGFGPLEQVGVEGTGSWGVGLTRFLHSQDVMVVEVDRPNRQKRRKVGKSDPTDALAAARAALSGEASVTPKTRNGPVEQIRVLMVARRSARQQRIQTLNQLRHLVFTAPEEIRVRFKDRYKTGLVTEAANMRPNKGSDPVTFTTNLMIRNLARRVKALNTEIREIDGMLAGLIEQAAPSLLELHGLGTDTAASLLVAAGDNPERLSSEGSWAHLCGTTPLPANSGKVTNRYRLNRGGDRQANAALYRIVLTRMSSDPETRRYVTRRRAQGRNTAEIMRCLKRYVARQTFKHLPTTT

SEQ ID NO: 307562 - protein, 351 aa, unidentified
MGEYIAFDSHKRYTWVDRQDHSTGEETCHRLLHAPGAVRSYLSGCAPGTGVAVEATGNWYWIIEEIEQAGLRPLLVHPRKAKLMMGLTNKTDKLDAQGLNRLQRNGTLPTVWIPPGPLRDLRELTRTRLVLVAQRTRLKNRFTATLAKYGAPPSESSDPYGKRGRVELEKNLERLPEQTRWVSGQLLAQLDFVSAQIRELEQRLDALVEVTPEMQRLMSLPGVGVILAATIALEIGDVQRFPSARHLASYAGTTPRVHASGGKVRYGALRSDVNRYLKWAFAEAGNSVAVNHARCPERHVSQLYRRLRQRKGHPKAIGAVARHLAEAAFHVLQGEEGYRDPVFGRGRTSEV

SEQ ID NO: 307563 - protein, 350 aa, unidentified
MKYYAGLDVSVKETSVCIVDESGKLCREKKVVTHPDDLVAVLSDPAFNFERIGLEAGPLSQWLFEGLAKAGFAVVCIETRHTKAFLKAQQLNKSDRNDARGIAHMMRVGLFKDVHVKTLTSQKRRALLTARKLLQEKAIAMENDMRGLLRNFGLKVGTIRAFKFDERIRELVEAAPDLAEIIESLLAARQKLREEFVKLDRKIRGEARVDPVCRQLMTVPGVGPIVALAYTSTIDIPSRFRHLRAVGAVLGLTPVLNQSGESSRIGHVSLCGDGMLRGLLYEAAQVLLIRVKKWSWLKAWAMNVAKRHGIKKAIVALARRLAVVLHRMWVDGSEFRWTREATPTTTDATA

SEQ ID NO: 307564 - protein, 422 aa, unidentified
MSYCPVAGIDVSKRFSDMCILSPGNKIFAQEKIYHDETSINRANALLQKVEQLFFSKPVIVMESTSHYHLILFQFFSEHGYDVIVVNPLQSNSMKDFSIRKRKTDRVDAFKLAMMYRTKTLRPSQIPQTATRALRQLCRHRAELLNDVSSYKNRLTALLDQTFPGYDKVFSDVGGVTSCAVLVRFPTPTILLVEEESELVEVIAAASKSGYSFAKKKARLLISAAQKAQTLGIHSCADETLIVCTIQMLRTLSESVLQIETAIDNLLAQIKEMRNNVSLLQSIPGVGSHSAALLLGEIGDILLFKKPKQLAAYFGLDPTERQSGSFRGTKNKLSKRGSPYARAALHMGVVNSICKRGKDSAANPVLLSYYEKKCKNKPAKVAQAASMHKLVFIVFAVLRDQKPFELKTPEQHAVEQGFVKAA

SEQ ID NO: 307565 - protein, 414 aa, unidentified
MQEGGRIAGIDVHKQMLAVVVGERSGEGPLRFERAKFGTVDSELRRLSEWLRQRNVVEVVMESTAQYWKPVWQQLEQQCQLYLAQAQSNRAPRGRKRDFVDAERLVRRQMAGELILSFVPDGEQRLWRIMSRTKYQLRRDRVRLQNQLENFLEEARIKLSSLVSDLLGISSRRMLTALSLKESDPVKLAELAEGNLRATPEQLQDALQPARQMSDTQRQILGLFLARLELIEQQIEELDRSLGQGLSQYNDAVVRLAQVPGLGPDSAQQVIAEVGPKAATFHSPQELCSWVGTCPGKEESAEKSKSDRTPKGNRMMRRLLNQAANAAVKTKGSVFQNLYRRWVPRLGHNKAIWAVANRLCRLVWKILHQQQSYIEYGNRADPNATKNRARRMIRELKALGYQVQILPPTEPLTQ

SEQ ID NO: 307566 - protein, 415 aa, unidentified
MIFVGVDWAEAHHDVHVEDAEGRRLGGGRLPEGVEGIARFHELVGAHVEDPSEVIVGIETDRGLFVAALVAAGYLVFAVNPMSTSRYRDRHSSSGAKSDPGDAKVLADMVRTDRHNHRPVAGDSEVVTAVKVLARAHQSMIWSRRRQANALRSALREFYPAALSAFDDLASADATEVLKVAPTPSLGAALSLAKIASALRRGGRQRRIDERAREIQAALRAPQLRGSALVASAIGASVQASVAVISMMNVEITKLAQQLEAGFEQHPAAKVVRSLPGLGTVLGARVLGEFGDDPDRYASAKSRKNYAGTSPITRASGTKRVVLARYARNMRLADAIYLWAFASLTASPGARAFYDAHRKAGDTHHAALRALGNRLVGILHGCLVNGSFYDEHTAWGHRQRANSPRPLDIFGPWDI

SEQ ID NO: 307567 - protein, 332 aa, unidentified
MTEYIGIDVSKQTLAVWDGTQEEEVPNEKGLKTLKKLLKKRYGGEWNETVRFIYEPTGPYSNYLRVFAAEHEVRVYEVNPKKSANFAKVLGNRSKTDTVDAKMLEAFHALLTEEDFCIPVMDEIAEQLGAELGSYEIIQKTRTMLSNHLQSLEYKSGVAKKLKDSLERELKYLSTMEDQLENEMEAVAEDHEETREDLGNLLSMNGIGVISAINLLYLFRKYPGANRNEITALAGLDPIQRQSGSSLNGGRKISRAGDPMLRKVLYLACMNSIQHNECIRTFYKHLVADNHKKPKVALVACMRKLLLIAHHLYTTKSQYRTLEHDANPCLTS

SEQ ID NO: 307568 - protein, 356 aa, unidentified
MDNRKYIGMDVHQASISIAVSDAAGKVLMECIIETKAATVLEFIQGLRGSLWVTFEEGTSAAWLYDLLKPHVTKVVVCDPRKNALLKAGNKNDRVDARKLSDLLRAGLLTPVYHGESGARTLRELSRSYLAASKDLTRVMNRLKAIYRSWAIPCAGQQVYSPRHRAAWLEKLREAGVRRRAERTYQQLDFLMEIRKETRKELLAESRKHPARQLLEQIPRLGPIRVALLIALIQTPHRFRTKRQLWNYCGLGLRTRSSGEYRYTGGQLQHARKPPALRGLNVNHNHDLKNLFKSAATQAGTCKDDPLGEFYQNLLARGMEPPMARLTLARKIAAIALKIWKKGERFDPAKLKQQAA

SEQ ID NO: 307569 - protein, 343 aa, unidentified
MQTITTIGLDLAKSVFQVHGVDAGGQVIVRRQLKRRYVLTFFQKLSPCLVGIEACASAHHWSRELQALGHTVRLMPPAYVKPYVKRQKNDATDAEAICEAVTRANMRFVPTKTPGQQSGLLLHRARHLFIRQQTSVINAIRAHLAEFGIVAPVGRHGVEELLNVVADPNDKRVPEIARACLSAFGAQLRRIKEQVLEFDRLIRAWHRSNELSMRLDEVPGVGPVLATALVAAVADPKSFRSGRNFSAWIGLVPKQHSSGGKNRLGNISKQGDRYLRGLFVAGALAVIRYAKIHGTTHRPWLTALLARRPTKVAAIALANKIARMVWAMMARGERYKEPFALAR

SEQ ID NO: 307570 - protein, 344 aa, unidentified
MDHFAGLDVSVKETSICIVDDAGKIVREVKVASDPEALLAVLKNPAYHFKRIGLEAGPLSQWLFSALAEAGLPVICVETRHMQAVLKAQINKTDRNDARGIAQMMRAGLYRPVHVKTLRSQKLRMLLTHRKLLQSKAIAIENDLRGTLRNFGLKVGMVGKVKFEARIKELVENLPDLAELVEPLLIVRRVLREQIVILHRRLLAIVRDDEVCRRLMTTPGVGPVVALTYRATVDVPARFRKSKAVGAVFGLTCAKYQSGEVDRNGRISRCGDEMMRVMLYEAAQSMLHSKKWSWLKAWAMQIARRRGMKKAIVALARRLAVIMHRIWVDGTEFRWTRERATAAA

SEQ ID NO: 307571 - protein, 357 aa, unidentified
MLSSNVKYIGLDVHKEAIAIAVLNSAGKLVMESIVETKASTLLDFLHGLRGELHVTLEEGTWAAWLYDVLKPHVAELVVCNPRRNALLKEGSKSDKIDVRKLAELLRSGMLRAVYHGEHGLGTLRELARSYLTIGKDQRRVMSRLKALYRSWGIPCSGRQVYTPRHREQWLNKIMQPGVRRRAELMYQQLDGLSVVRHTVRGELLAESRKHQAVKILRQIPLIGPLRATLLLALMQTPHRFRSKRQLWTYSGLAVETHDSAQHRYVDGQLQRSQKPQQVRGLNQNHNHEMKEIFKSTAMSASRCAGPLQDFYEGLLAKGMKPDMARLTLARKIAAITLTLWKKGERFDAEHLKPQAA

SEQ ID NO: 307572 - protein, 419 aa, unidentified
MDLTDLTSTDTEPASPAPPPGLVAGVDTHQDTHTLAVLTAQGAVIATSSFPADQQGYDDLTAHLDRLGPLMAVGVEGTSSYGAGLTRTLRQAGYDTVEVLRPSRRVRRHHGKSDPIDAIAAARTVLSGDGVSQAKDTTGPAEQLRLLLAARTRLISAATAITNSIHSLLTTAPEPLRERYRRLDTPALITHLARTRPTRTITTPQQAATSALHHMARTHQDLHHRAERLNQQMHHILTTHYPGLLAVYGAGTTVAAQLTVTAGGNPGRIHNEAAFAHLCATAPIPASSGKTTRHRLNPGGDRRANAALHRIALVRLRHDPTTKNYANRRTQEGKTTKEIIRCLKRAIAREVYRALTQPPPTDTTSTLAAHRKRHHLTQTDVAHALNTYPARISDIENHRRPLPQLTHRYHQYLTTLDTQ

SEQ ID NO: 307573 - protein, 355 aa, unidentified
MDSVKYIGMDVHKESISIAVMNGAGKIVMECVIETKASMILQFIDGLRGNLHLTFEEGTSAAWLYDLLKPHVTKLLVCDPRKNASMREGNQSDKIDARRLAELLRLNHLSPVYHGEHGLRSLKELVRSYLTITKDIVRVMTRVKAIYRSWAIPCSGKQVYAPRHRAEWLGKISEPGVRRRAEFYYQQLDALRTVRQEVRRELLAEGKKHQAWKRLCQIPSIGPIRSAVLLGILQTPHRFRTKRQLWTYSGFGIETQSSADHRSVDGQLQRAKKQSSIRGLNRNHNHDLKNLFKGAAIVASSKPGPFQEFYTALLTKGLRPEMARLTLARKIATIVLIVWKRGACFDAQHLKPQTA

SEQ ID NO: 307574 - protein, 340 aa, unidentified
MTITTIGIDLAKNVFAVHGVDQNGKTVLVKSRVTRAALPGLIASLPPCVIGMEACSGAYYWARLFLQYGHEPRLMAAKFVSPYRMAGKSGKNDAADAQAICEAVRRPHMRFVPVKDESQQAMQCLHRNRQGFIEEKTATYNRLRELISEFGVIAPQSTDALRHMVSAQKSSLPLQVQQCVDDLLEHVDRIEANITEYDRILSRIAKTDHRSQRLMKLKGVGPTTACALVACIGNAHDFKNGRQLAAWLGLTPSQYSSGGKSKLGRITKAGDSYLRTLLVQGARSVLIGAEKRTDLFSRWVCSLVERRGYWRAVVAIAAKNARLCWASLHYGDDFRLYSAS

SEQ ID NO: 307575 - protein, 415 aa, unidentified
MPLPSGWKEQLLVFVGIDWSEKHHDICVVDREGEILAKGRVAEGVEGIARLHELVAEHAEEPEDAIVGIETDRGLLVGALVTAGYQVFAINPLSVDRYRDRHSTSGAKSDPGDAKVLADIVRTDRHNHRPVAGDSELAEAIKLLARTHQGFVWERQRHVNRLHSSLREFYPQALEAFGTGLASRDAVAVLSIAPTPDLGRRLSRSKIASGLRRAGRQRNIETRAEQIQAALRSEQLQAPQTVTRAYGSIVSSLVTLIVGLNDQIAGLEQELEEAFEDHPDAKILRSLPGLGTVLGARVLAEFGDDRTRYLDARGRKNYAGTSPITKASGTKRVVLARFARNEQLFDACFLWAFSSLTKSPGARAYYDLQRARGKTNNQALRSLANRLVGILHGCLRHRQPYDESVAWPSLMERAA

SEQ ID NO: 307576 - protein, 411 aa, unidentified
MDKIYDKCCGIDGHKKLIVACFRKGNKQEVREFGATTRELLVLADWLKDGGCEMVAMESTASYWKPLYNILESSDLNAMVVNARHMKAVPGRKTDVKDAEWIADLLQHGLLQASYIPDKDQRELRELVRYRKSLVGERTRELNRLQKMLEGANIKLSGTVADINGKSARSILEYMLTGEPIDSVKYDEMYEQKVIAHNLKASKDQIIDDLNGVMSPLQRRMMRELLDHLDELNVHIKNLDDEIDNFMKPEEKKASAAIQSITGIGNTSAQAIIAVIGTDMERFPDDAHMASWAGLCPGDNESAKKRKSGRTRKGNALLRTTLITCAHSAVKNKKSYFYAQFMRISAHRGKKRAYVAVAHSMLIAIYHILKDGVVFKDLGAEYYNQFNKERKINAYLKKLKALGWEAPAVAA

SEQ ID NO: 307577 - protein, 382 aa, unidentified
MYKTITGVRRFVGLDVHAETITAAMAERDQVARDVGTIPNREESIRKLAKKLSEGGAWAACYEAGPTGYALYWQLTKLGIPCVVIAPTLVPTRAGDRVKTDRRDAQRLASSFRAGELTPVWVPDAEHEALRDLVRAREAAKQDQLRARHRLGKYLLRHGKRPPQQMRAWTENYLQWIKGKVSFDQRCQQVTLEDYLNEVDHAGARVTRLEKAIDEAVEQAPETMRELIQALQALRGVAKIGAVTIVAEVGTLTRFEHPRQLMGYSGAVSSEHSSGGKIRRGAITKTGNAHLRRVIVEAAWSQRYKPVLSPAMRKRQEGVSAEVQELASKARHRLHHRYMHLLGKGKTKQEVVTAVAREMLGFIWAIGVSVEHAQAQRGKGAA

SEQ ID NO: 307578 - protein, 410 aa, unidentified
MEVLHPRCAALDLGKDVLVAAIRLQQGTHVTRECRTFGTRRRVLLELRAWLEELGITHVVMEATGSYWRSVWQVLEGRLELTLANPAHIKNLPGRKSDVNDATWMADLHAHGLIRGSFVPTAEITALRELTRTRKQFVREVARHTLRIQKILDVGGLKITGPISQILGVSGRRIIKALIAGQSNPERLADLVDPHVRASRSELVEALHGDLTDQQRGLLRMHLQLVESLEAAIAEIDRDIGKAVTPFRELINRLNQVPGLSNVSAPALVAEIGIDMTRFATYRHLLSWARVCPRLDESAGKVHSRRTMKSSAWVKTLLVQAAWCAAKKKDSYLRAQFLRLRPRCGPKKAIMAVASSLLTAVYHMIRDGTPYRDLGFAYLQQQDKDRVVRRTVARLKQLGFEVTLTARGAA

SEQ ID NO: 307579 - protein, 392 aa, unidentified
MLLSASSAKTSKQVRTFATTTAGLQELAAWLASQGVSHVAMESTGIYWRPVFNLLEGRFEVILVNAQHMKAVPGHKTDIKDSEWIADLLRHGLLSASFIPPKAIRDLRDLVRARKTLVRQRAQAITRVQKVLETANIKLSSVATDVLGKSGRDMLEAMLSGVSDAESLAELARGRLRKKLPALREALEGRVEATHRVLLRQLLEQIDFLQGQIDALSADIDHLLRPYEPLLARLMQITGIGRLAASAILAEIGTDMSRFPSAKHLASWAGVAPGNKQSGGKRLKAHTNKGNTHLRAVLAEVVWVISHTHDTYLSAQYHRLARRIGKKKAIVAVSHSVLVIIYHLLRDEQDYHDLGPHFFATLDSTRQRDSAVRRLQALGYQVTLEELKEVRG

SEQ ID NO: 307580 - protein, 319 aa, unidentified
MTRISTPALESMLPKPLSMPIAFPRTYHGSSPAREGWKQFLQWIKDEPPTLVLCEATGGYERHFVLALADAEVPFRVVNPARVRDFAKSCGILAKTDKLDAKVLATFAAERKLEPQKLQDETQRKLKELIGWRRQLVKAKTMHRNQLEHASYKTVVKGTKSLIEQIDKQIEKVEAELNQLIDDDPQLSNLNDILQSIPGFGPEVARTLIVELPDLGTGDPAKLCSLAGVVPFNCDSGLFRGKRRIYGGRGTLRTVLYMAALTAVKCVKADNLFKQLYLRITATKPHKVGIVAVMHKMLIIAHSLVKNNQKWKNKMIKNC

SEQ ID NO: 307581 - protein, 323 aa, unidentified
MEDVHMSEVHVLAIDLAKRSFQLCGTDRGGAVLFNRTVSRSKLEQILRAQPPCIVAMEACATSHYWGRMGVACGHEVRLIQPIYVKPFVKRQKNDAADAAAIAEAALRPNMHCVAVKSAEHQARAVAFRAHQCFVGQRTQLINALRGHLAEFGLVVAKGPANLKSLVDMMKDESVDVPEAVRDVVQLFLDQIEAITSKIEDLALRLKKATKENDEMRRLCTVPGVGPVTAGAVLAFAPDLRAFSSGRNFAAWLGLVPRQHSTGGKTRLGAVSKMGQNDIRRLLIVGAMSRIRWIVRKGVLPDNWLGRILGRKPRMSMAGTKCA

SEQ ID NO: 307582 - protein, 339 aa, unidentified
MEGNKNLSYKHYISIDWSQQEVCLARMRAESNEPITKYFPADIKKIKEYLNELRGKKILTVEETTGSHWLYVELLESVDKLLICDPYRNSLLNEGPKNDKIDAKKLCLLLRSGMLKEVYHTSNEDYKIRKLASAYIALVKSGVRIKNQNSALYRAEGLRYKKDKIKKEDEILSFIEEHQMRAISFYEEEKGRYENVFKQLKRKNEIIKMLCRVSGIKETSAVKIYSVVIDAKRFENKYKYWGMCGLVKYNRESGGKNYGKKAPRFSRILKNVYRSAALAAIGGNNDIREYYESLLKKGYSISEAKNQIARYIAKVTYAIMKNREPYRAYQYRENQKQKT

SEQ ID NO: 307583 - protein, 322 aa, unidentified
MTRIICGVDIASSSLAARIGQDGALASFANNPEGIAALAAFCQQHQVELVAMEATGGYEQQAFAQLCEQGLAVAIVNPRAVRQFAHSMGALEKTDAIDAGMIAWYAETRNSQPLCLAPQTQLELRARVLRLRQLTDLRTTQLNQQRLVINRAVQATFRKMLRFLASQIEELQQAIAGLIQADPLWRQLDQAFRSIKGVADRTVARIMADLPEIGTLSNKTISKLAGLAPLANDSGKHKGKRAVRGGRASVREILYVVASVVGRYQPDFITFQQRLRTAGKPPKVVRIAVAHKLLIRLNAKAREVRQRMAPVLDHSRLAPVTT

SEQ ID NO: 307584 - protein, 368 aa, unidentified
MSEPTTFVGIDAHKRELQIAMLIGNQVRPVHWTSSTDARAIDRLRQTLERDAPGAVECCYEAGPTGYVLQRRLTAGRVRCRVIAPSLIPRKPGDRVKTNRRDAQKLALLLRGGLLTDVHPPTPAQEAVRDLCRARDDARQDLLRSRHRLGKLLLRRGLIFAGRNWGKRHRDWLQQLHWPHAAERHVVRDYQLAIAQLEARINELDRAMEQIASEPPYAAAAAALRCFRGVDTLIALTLLAEIHDVRRFRHPRALMAFVGLVPSEDSTGDRHRRGAITKTGNRLVRRLLTQAAWHYHHEPRLGLPLRRRRLGQPVAFLAIAEKAEQRLCRRYRRLCARLKPKPIVITAIARELVGFLWATLQLPEARMS

SEQ ID NO: 307585 - protein, 347 aa, unidentified
MKNTVIGIDISKKSTDWCLMQGAEVVSYHHVDNEIVAIESQLQELMDMYLIDRCELMVCAEYTGHYIYPLAVACQNKQIDLWLESGYNIKCEARKERGKNDKEDSRRIAEYGYKNRLDARYYNIPAQEFTILNSLLAEREDYVLARGKYEGQLKDQKSYSDPILYKAKAKRLGKLIRQYDKLIYETEQELEKLMKENETMGHQAALLETIPGVGRLTAMKMIAATKGFTLFENGRQFCCYAGTAPFAYTSGTSIHSRHKVSQRADKSLKAMLHICAVTVARRCKSNHFTEYYQRKVDEGKNPMTVLNAIRSKLVLTMFAVIRTGQPYSSEIVHNYVEKFSLKPIATS

SEQ ID NO: 307586 - protein, 343 aa, unidentified
MQITTIGLDLAKHWFQVHGVDAAGKVVVKRRLRRAEVVAFFKTLEPCLVGIEACATAHHWARELIALGHEVKLMPPAYVKAYVKRNKNDAADAEAICEAVTRPSMRFVPVKDIDQQSVLMMHRARNLLVRQRTMLVNALRAHLAEFGVIAPQGLRHVEQLIAAIEAESTALPELARSILRLIVNQLNDTQAKIQQVEATLAQWHRNSRLSKLLATIPGVGIMGASAIAATVCDPNLFRSGREFAAWLGMTPRQNSSGGKERLGRTSKRGDKYIRCLLVAGAVAILRHARTRATKDAEWVRGMLARKPAKVVAVALANRTARIVWAVMKRGDGYKAKEIVGQAA

SEQ ID NO: 307587 - protein, 426 aa, unidentified
MCAMQVVYERCCGLDIHKRTVVACMILPGAGVGAGAKGQPHRSNQPIKEVRSFSTMTEDLLKLSDWLSANRVTHVAMESTGVYWKPVYNLLEGQFELLLVNAAHIKAVPGRKTDVRDCAWIADLLRHGLLTNSFVPDRPQRELRELTRYRTQLIRERASEVNRMQKVLEGANIKLASVATDITGVSGHQILQAIIGGETDPQLMAQLAKRRLREKIPELEAALRGKVGPHQRFMLAHQLAHIDFLDASIEELNTEIEERMAPFEWALDLLTTIRGVGQRTAQILIAEIGVDMNRFPTHRHLASWAGMCPGNNESAGKRRSGRTRKGNVWLRTALVEGAQAAARCKDGYLAAQYRRIARQGGSKKAAVAVGHSILVIVYEMLKHQTTYNDLGTNYFDERDRQAKERRLIHSLEQLGYRVSLEPVPAA

SEQ ID NO: 307588 - protein, 359 aa, unidentified
MSVTMTYVGLDVHARSIHAAAIDVGSGELRRARFGGGSEEVIAWLGGLPQPLRGCYEAGPTGFALYRAAEAAGVAVEVIAPSKTPRAPGDRIKSDRKDAELLARLLLAGQLKTVAVPPPAFEAARHLARAREQVRGDLMRCRHRVSKLLLLHGRVYDGSAWTKRHRGWLEQQRFDQVATELAYLDTLAAVDGLVARKAALDERLSRLAREGEWWPTVARLRCFRGIDTLTAFVLALEIGDFARFQRPAQLASWLGLVPSLDQSGESRRQGAITKTGSGYARRLLVEAAWHYLRQPGAGVALAERRAGQPDHVLQIVLRAQRRLHRLHQRLRERGKPANVTTVAVARELACFLWAAAVAD

SEQ ID NO: 307589 - protein, 343 aa, unidentified
MDHFAGLDVSVKETSLCIVDDAGRIVREVKVASEPEALLQALQKPYYHLKRIGLEAGPLSQWLFNALADAGLPVICVETRHMRAALKAQINKTDRNDARGIAQMMRAGLYRPAHVKTLRSQKLRMLLTHRKLLQSKAIAIENDLRATLRNFGLKVGVVGTVKFEERVKELVDNTPDLVVLVEPLLIVRRVLREQIGILHRRLLAIVRNDAVCRRLMTVPGVGPVVALTYRATVDVPSRFRNSKAVGAVFGLTPSKHQSGESSRTGGISRCGDEMMRMMLYEAAHIMLVRSAKWSWLKAWAMKIARHRGLKKAIVALARRLAVIMHRIWVDGTEFRWTREVTAA

SEQ ID NO: 307590 - protein, 431 aa, unidentified
MDIVHPRVAGIDVHKKVIWVAVRLPGQAPGERTVATKRFKAFWRSLQKMAAWLAELGVRDAAMESTGIYWWPVYHALAQAGIEVCVCNAAHMRNVPGRKTDLKDCQWIAELHEHGLLRPSFIPVAEVAALRQRTRYRKRLIEARTAEGQRLSKVLEDAGIKIDSVASSLTTASARDMIEALAGGERDPVVLARLARGVMRKKIPELEMACDGRFTASHAQMCRLHLAAYDRLTRQIAELDELVVAAAAPFEALIARLVTIPGIGQRTAEVIVAETGGDMSRFATASRLAAWAGLAPGDNESAGKRKKAAARQGGRHLRPVMVESAWSVSRTTTRPGARFRRLARRFGKGNEKKAAVAVAHTLICIAWAVLSRGQDYAEAGEDYYEQRDRRDREHLIRHHQQALARLGYQVTLIPPGDGSPPPSATSQHPAA

SEQ ID NO: 307591 - protein, 345 aa, unidentified
MDQFAGLDVSVKETSVCVVDDTGRIVREVKVASDPEALLPLLTNPIYRFKRIGLEAGPLSQWLFSALAEAGLPVICVETRHMRAVLQAQINKTDRNDARGIAQMMRAGLYRPVHVKTLRSQKLRMLLTHRKLLQSKAIALDNDLRGTLRNFGLKVGVVGASKFEARIRELVENLPDLAELVEPLLIVRRTLREQIGILHARLLAIVRTDDVCRRLMTVPGVGPVVALTYRATVDVPARFRNSKAVGAVFGLTPARYQSGEIDRSGTISRCGDEMMRAMLYEAAHIMLVRVAKWSWLKAWAMKIAKNRGMKKATVALARRLAVILHRIWVDGSEFRWTREQAAAAA

SEQ ID NO: 307592 - protein, 337 aa, unidentified
MNYCGIDLHSNNCVVIVSDENDRIVYQKRLPNELAQIAAALEPYRHELAGVVVESTYNWYWLVDGLMDSGYRVHLAHPAAIRKYDGLKHSGDFADATYLAQLLRLGLLPEGYVYPRAERGARDLARKRMQLVRYRTAQILSIEGILMRQTGGRINGEAVKRLTAGQVDEFAFTPDVALAVEANRAVSQALGQQIEALEKRLRERVSLRAEYHLLRTVPGIGDTLATTIMLETGSISRFAQVGNFSSYCRCVDSLRESNGRKKGEGNTRNGNKYLAWAFIEAANFAMRYCPQARSFYDRKKSRTNRVLAIKALAHKLARACYHMLRDQKPFDVHLCFG

SEQ ID NO: 307593 - protein, 315 aa, unidentified
MSHNSIPTAGIDTAKNKLDVAIHGQANTIGVANTPDGWGKLVSHFASHGIRRVGIEATGGYERGVVRHLQAAGVAVIVFQPLQVKAFAALRLQRAKHDRLDATLIAACAFTLDAARTLAPDARFDALADQLTFIEQVEEDIVRCKTRLEHTPPGRLARMVAADIKRLKTRRVAQLRHLRAALDTQADLAHRLQLLLSIPGIGERTAMALLVRMPELGQVSREQAAALAGLAPFVRQSGTSDGKRHIGGGRVRLRRSLYAAALPAAFHWNRPLKAFYARLIDAGKTHKVAMVACARKLLLIANAVLARGTTWYPQA

SEQ ID NO: 307594 - protein, 324 aa, unidentified
MANRITICAGIDTGKRKLDVAIDGSSLQLQVENTAEGHRVLLEWLRRHKVKRIGIEASGGYELPVVTELRRKRFVVVVFQPAQVRAYAKFHSQLAKNDKIDAALIAACTAAVKKIHDAPDPRLQPFAEHLTLIEQIGEDIKLYKNRIEACRDPRIQRLWKEEIARLAKRVRAELKALVAVIRQYCDLAQRLDLICSVSGAGMPTAVAILVRMPEIGKLSREQVAALAGLAPYDDDSGERSGARHIAGGRERLRRALYTAALPASFFWNPHLIALYRRLRAAGKVHKSALIACARKLLIFVNTVVARGTPWQEEQLVRATNPAPA

SEQ ID NO: 307595 - protein, 410 aa, unidentified
MNPLYVGIDVSSKNNVAYLMKPDGAKHSSFSVQNNRGGAKLMSERIVSALTTMQLSDVVIGLEATSIYGDSLVYALREDSGLGRFQRKIHILNPKLVRKFKEAYPDLPKNDFVDAFVIADHLRFGRIASEVYMDDYRYKALQTLTRARFYAVQNLTREKQRFANYLFMKCSGLAQGKVLSQNTSATTIALMEQFETVDDLAYIDLNELTVFITKSGRGRFSDPASTAKAVQTAAKGSYRLPKTVNDSVNQAMSVSIAAMRALESQIKTLDKAIEQQFEIIPNTLTSIPGIGKVYSAGIIAEIGDIHRFQSQASLAKFAGLVWSQHQSGDYEAEDTHLIKSGNRFLRYYLLEAANSMRRCDSEFRRYYDLKFKEVNKFQHKRALAFTARKLVRLVFRLLKDNRLYIPQEEY

SEQ ID NO: 307596 - protein, 418 aa, unidentified
MKIVYPTCCGVDVHKSFLVATIIDTPKGSLQPSYQMRRFSTFNSDLNRFADWLLTHNCLDVCMESTGKYWVPVFNILEKRGLRVVIANPKWVKAVKGNKDDKKDSKWIGELFRLGLVNTSFIPDREIRILRELTRYRYKLVSMRSSEKNRFQNAFTVCNVALDSVVSDMFGKSASAITEYLISDAEFDAGYCVSLLRGTLKKKAEAVVESIDGYEIAPEQKVRIAIVRDHMNHIDTLIDRVDTCVESMLTSDEKYEGAISLLCTIPGVDRRSAITIISEIGTDMGQFHSSKQLCCWAGLTPGNNESAGKKKSVKISRAGVYLKPALVQVAHAAVKDKRSSYYAVKYERIAKRRGKKRAIIAIARMILTAIYSILSNGEVWNPVDLYKIDMPEHLKEKQLAKAVKQAIAFLEKQGLKVS

SEQ ID NO: 307597 - protein, 336 aa, unidentified
MEHVAIDLGGQDSQICVRSSDGTVLEERRCPTILLSEYLRARPQSRVVVETCSEAFRVADAAVEAGHEVRVVSATLVRSLGVGARRTKTDRRDARALSEVSCRIELPSVHIPSASSRERKALCSMRDALVRARTQVSNGVRGWLRTQGVRLRSGSVDTLPARVRAQVRNVPSYVTRQLDTLDALTRSLVAADHDVRYAAKTDPTCRRLMSVPGVGANTALRFVTALDEIGRFPNAHKVEAYLGLTPGERSSSQKQHRTGITKAGSPAVRHTLVQAAWAARRCRRQDPLHHWATAVQKRRGKRVAAVALARKLAGILYAIWRDGTCYEPAPGRAAMR

SEQ ID NO: 307598 - protein, 449 aa, unidentified
MRIWSEEAFASEVSRCIVTQAFYLHLTICNDEYRVPDIGQSKMAIPRSADSGHCRCHSRMAAMGRAAPNTRGLDGGHRVIAATNLSSHDAAIRALTPGGLHLGGASMARFVGLDVSQKLTSICVVDDTGRRVWRGQCATDPEQIARLISQHAGIAAGIGIETGPMTPWLVHELRARGLNVTCLDARHASAALKMQMNKTDQNDAEGLAQIMRTGWYRSVHVKSLDAHRARALLGARAQLVGMTTRLSNHIRGVLKTFGLLPGAIRGLPFDRRVETLLADRGDLASIVRPMLLAWRQLREQIAAFDKEVRGLAKKDPICRQLMSVPGIGVVSVLAYVSTVEDPKRFARSRSVGAHMGLTPRQYQSGEVDRSGRISRCGDTLARTLMYEAAVVILTRVKRACSLKDWALAIAKRSGPGKARVALARKLSVILHSIWRSGEAFRWSEQPAVR

SEQ ID NO: 307599 - protein, 372 aa, unidentified
MKRTIIYVDLDVDDTQYHGSALDRVTGEAIDLRCRPTLKGLLAQLNKLGKHFPRCLLKLCYESSYIGYTLQRDLAQKGYHCDVVAPTSIPSPRGKQIKTDRIDAGQLAQFYANGLVTIVHIPEVELEQDRDLMRSRQNLLQQQTELRKHLQALLRRNGLHYKAQTQNKTHWTKHHYCWLERTIEASSGSLKVNLDLLLRQLKGLNTILAEYGQQIEVLAKSPRYEKPVQALTCYQGIKNIFALTMITEIGDVKRFSHPRQLVSWIGMDIREYSSGGKHHRFGITKHGNRYLRTAFVEANQRGYRSARLSQAIKARRAHTGAEFIDIADRCLRRLNKKGNRLLLAGKHPNKVKVACAREMVGFVWESLHQAAA

SEQ ID NO: 307600 - protein, 395 aa, unidentified
MQKISTMRTSGKNIFQGQLTMGVDLGDRSSAYCVLSEAGAIVLEHKLATTPETMKQVFGSMPRCRIAMETGTHSPWVSRLLTALGHEVIVGHAQKVRLITKSRRKDDRLDARTLARLARIDPELLSPVKHRSAQAQLHLTEIRARAGLVSARTALVNAARGLVKSYGERLRKCGTQQFTREITSGLSAGLREALQPLLREVESLNEGIKEYDRRIAKMAKQTYPETALLKQVKGVGDVIATAYVLTVEDPHRFRKSRDAGCFVGLQPGRRNSGDSEPQMHISKEGNEYLRTLLVQGAHYILGPFGEDSDLRRWGQKLAARGGKNGKKRAVVAVARKLAVLLHRLWVSGEAAFAVFGAEAYGRVLAENSSVMVVGQPIQTIRRPIRVVSKSRQISL

SEQ ID NO: 307601 - protein, 371 aa, unidentified
MSMMHHRYIGLDVHRATISVAIADPDQAPASYGKIPNDPTAIHKLLQRLGGPERILHVAYEAGPTGYVVHRQLSELRIECVVAAPSLIPARAGDRVKTDRRDALKLARLLRSGDLTPVWVPDREHEALRNLVRARGAAKGDELRAKHRLGKFLLCQGARPPIGVRNWCKRYFQWLQQLTFEHVADRVVFADYLAEVVAAGERVKRLEAALRECAQSTPQAVLIQALQAFRGIGFLSAVTIVAESGDLRRFPTAPQFMGYTGAVPSEASSGGKQSRGRITRTGNSALRHMLGEAAQHARHAPSISDELKRRQKHAPQPVIELAWRAQLRLHARYRHLSGRLGAHKAIMAVARELAGFVWAAGALLAEGTPAA

SEQ ID NO: 307602 - protein, 354 aa, unidentified
MPVGPWWIGLDVGERETRLCAQGMRKEDCIEKVVPSTGRAIAAAVEGLLLGSLREVVLESGSPPALVRQLRQIGLPLTVLDAGKASKFLAIRQNKTDVNDARGLAEIARTGQSRVLAVHIKSPEIQLLRSSLVLRDQMIKQKGALSSALRSLLRVHGSSLTRLPSPTRVKTEVSLELARLRSELEIDLAEQVSPILQLYETFAGVLHAEDKRIARLAAANPVTSRLMQVPGVGSVTSLSFYTAIEDPWRFERAGDVGAYLGLTPRVKQSGGTALRLRITKAGNKLTRGHLVMAANVILCHAASHCALADWGRSLAKRVGHSKAKVAVARKLAVLLLILWRSGDDFQPYPWPSRR

SEQ ID NO: 307603 - protein, 376 aa, unidentified
MREKLRFLGLDVHAETIAVAVAEPNGEVRSLGTIANREDSIRKFIKRVGPPEQLRACYEAGPTGFVLYWQLTQLGVDCAVVAPSLVPKKPGDRVKTDRRDALKLARCHRNGDLTAVWVPDAASEALRDLVRQREAAKQDQLRARHRLTKLLLRTGQRPPLGLKAWTERYWRWLAQVHYTQPAQAVTLRDCLNEVEHMSDRIKRLEEAILEVVKLAPQATQELVRGLQALRGIAHISAVTIASELGNISSRFQCARNLMGYSGAFPGEDSSGNRIRRGGITKAGNAHLRRIVVESAWCYRHLPRVGARLRKRQEGIPAEIIEIAWKAQNRLHKRYMKLSMAGKDQRKIMTAVARELLGFIWAIGVKVEQACQQPIAA

SEQ ID NO: 307604 - protein, 353 aa, unidentified
MKKVDFSGQHIYVGMDIGKKSWKVCMLTEELEHGLIAQPPRVDILVNYLRRNFPGAKYHCTYEAGYCGYWIYEQLREEGIECVIVNPADVPTTHKEKTRKTDRIDARKLARSLRNGELSGIYVPEHSTLEDRSLVRTRHSLVKKQTRCKNQIKGLLNFYGVNIPEELVNSHWSRRYIGWLEQLVIGRPSVTQAVRTLLEELKYLRQMIAEVTKEIRRMSREEEYRTNARYMVTVPGISMLSAMIFLTELGKIDRFERLDKLASYVGIVPGEQSSGEREVITGITCRRNPYLRGLIIESAWVAAKKDPAMLLAFNQLCKRMPRNQAIVRIARKLLNRIRYVLIHQEPYVPAVVS

SEQ ID NO: 307605 - protein, 480 aa, unidentified
MNVKGKKTKKQVNQENFIENFLSDDEIIKKVRVIEAELKASTWRELEARGKFVKNDKISFISEEMLIVGCDIGSETHYIRAIDLRGRELSKAAFEFSNSEGGFESAKAWMLNLAAISGKNQIVFGLEPTGHYWFALASWMISKGISVVQVNPYAVKQSKEIEDNSQRKDDRKDPKIIANLVKDGNYGMPYLPTEVYADMRRLAMFRDQLVEDRIRNINRLHREMKIYFPEYMDAFGKIDGAFTLELLRVAPIPTDMIRLGAEGLRNIWHEAKLRGRGYSRASEIINYAKTSIGITDGVNAGGESVRWFAEQIMKLDEQLTEIEERLHKKCNEIPHAENVLEIRGIGENILAGILSEMGDIRRFDDAKEIQKLSGLGLVACSSGKHKGQTKISHRGRKKLRYWLFQAAKSAVSHADEFKQLHAYYTTRADNPLKKMQSLIAIACKLLRVIYTILKTGTKYDPKKLLQDIKRPEQLKTQAAA

SEQ ID NO: 307606 - protein, 488 aa, unidentified
MKATKTPSVFDSQNLELRKLYEDAASPRAILCVALDYAKSKHLALCCDGNGDILKAPFPVRNNAEGIDFLVEQIEASARRRNIPKKHIFIGGEDEAPYVSNFISALRARGYLVVRVNAFEAQHNRNGRLASTDAIDLSGIARTMVSRRARTTTPPDDAVYVELREAARFRRILVRDLTAASNRIHAVVDQLFPGFLDHSRSRLTPFTEASLDLMAERFSTMEIARRKPAALAKFLHLRRVHDPEETAAAIIALAREALPPDPTRIAGLQRTLTGLVELHRCLKRNALDLRAESARMLATTPYALLTSLPGIGFVLAAGIAGELGPPEQLRSIESLCAYAGIVPRSYQTGGPDKPAVQGHVSNRCNRILKDWTVQSAQKLHLYGTPEIKDRITRWNANGQHGIYAAAKRYLRLVRALTRNGVPYLEPAARTAAADPQDITAGATAAWTILTRKWRTIPGGLDLIADSAHPIGFWRTTVTELHGIKLHVR

SEQ ID NO: 307607 - protein, 350 aa, unidentified
MKKLSKTQKQMPQETIGIDLGDKMSRYCIVNQDGEAVEEGSFRNQVSSLETHFAGEPRRIALEAGGQSAWISRELTRLGHEVIVANARELKWITASDTKNDPVDARKLALLARADVHLLAPVEHRTAEQQAELAVVRTRDAILRARTLLINSARGIAKGFGVRLPKSITSTFGKRALVDLPVTLRTPLEGLLGQIDALTQQIGNYDQQVSQLAGQHPEVNRLTSIPGVGPLTAVTFVLTLGRPERFPHSRDVAGFLGLRPKQRQSGARDPQLGISKSGDPYLRKLLVQCAHHVLGHWGKDSALRRWGLAKTEGGKKATLRAIVAVARKLSVLLHRLWVSGEFYKPFPEMG

SEQ ID NO: 307608 - protein, 340 aa, unidentified
MTQHKIIGIDLAKNIFFLFEINHKGKNLCRKKLQRSKLLSYIANKAPCTIAMEACSGAHYWAREFSQFGHEVILYAPQHVKTQRRKQKNDYNDAEAIAEVALYKRPHPVPHKSVEQQDIQSLIRMRRLLVTERTRIVNQVRGLISEYGIIMPKGAAAFRKAIPEILEKDENKLSCILRELLSHQYERYLYIDKQVKWFDDKLNQTIKQFESAKRLMSIPGFGPLTSQAVAVWLGSGQQFKTGRDASAAMGLVPKQDTSGDKVILLGITKRGNTYIRSLLVHGARAALRRAKFKSDNLSKWMLELQERRGPNRAAVALANKLMRIAWAVITKNEEYQPTRS

SEQ ID NO: 307609 - protein, 360 aa, unidentified
MQTQVLFVDDKDTRKTLMELHAVGIDSGKTLFHLVGVDASGRVVVRKRCSRTQLLTYTANVRVQVIGMEACSGAHFLGRALQQQGHDVRLMPAQYVKPYVKTNKSDYIDAEAIAEAVQRPTMRFVPIKTEEQLDLQAVHRVRERWVMRRTAVINQIRGLLLERGLTLPKGRRHLEEALPEILADATSKLSDSFRVLLAQLKIELDQLTARIEEMDVVMQQTAKDNEACQRLTTIPGIGPVTATALVAAIGNGTAFRKGRDLAAWVGMVPREYTTGGRQKLLGISKRGNSYLRRLFVQCARSLMQHRNKQPAALSNWLAQLVARAHQNVVIVALANKLLRMAGAVLRKNETYRIPALVPNC

SEQ ID NO: 307610 - protein, 376 aa, unidentified
MEHDSTVYVGLDVHKESITAAYAVGISEVELLGKIGTTKTDIDHLCKRLQSKARHVNVVYEAGPSGYGLYRDLVQKGFECMVCAPSLIPKKPGERVKTDRRDAVKLVRALRAGDLSAVHVPDVEDEAFRDLARAWAAAKMDLRQARQRLKSFFLAHGVRYAGHADWGAAHRRWVSTFAFPNHWQQLTFDEFRRTIEDRLAQCDRLEATLHEAVVSWRFYPAILGLQAMRGIQFITAVGMLSELGDLSRFEHPRQLMAWLGVTPSEHSSGDRRRQGSITKAGNSYARKLLVEAAWSYRYPARVSPDIQRRHEGIPKPIIDRAWDAQVRLCRRYRKLAARGKNVNIAVVAVARELAGFIWDIGRLAMSLSVAYEAQAA

SEQ ID NO: 307611 - protein, 349 aa, unidentified
MDHKTPVTTFVGLDISLAETHICILDQDGTRLYQGAVASDPDALADTIGRKAPNCERIGMETGATTPWLWRALRARGLPVICIDARHANRALSMRKNKTDKNDAQGLAELMRIGWFKEANVRSPQTQYVRSLLTARYQLRVSRKDVLNQMRGVVKSFGLFSGSTATRRFPAMVQEIIQDNPQFGPLLAPLLAVHEALTRQIAVYEEELKKIAERDPDARRIMTVPGIGYLVALAFMTAVDDPARFSSSNKLGPYLGLAPRVRQSGEASWSAGIGHAPDKMMRSYLYQAATVVLTKTASWSALKAWGLRVYKRSGFKRAAVAVARKLAIIMHAIWINGTEFEFSQKGKAA

SEQ ID NO: 307612 - protein, 398 aa, unidentified
MGGVAVGIDVAKDFHWVRAIDRRDSDVIFAGRVDNRPAALADLVAALEGLRDRGPVTVGIDVVGGIASLLCAMLLEAGIEVVHVSGLAVNRAREGTSGGEHKSDPRDAAVIADQVRHRHDLRAIDPLSELDAEIRLLVARRRELVAEQTRRINRLRDLLASIHPGLEHVVDPTTKAGQRLLSRYVTPAEIRRAGRRRLLEHILSAGRIPRRVAEELADQALAAAHEQTLAISGERVAAELVRELAAEAARTRTRLAVLDRDLQAALARHPDAALIQSLPGMGVTLAAEFIAEAGSIDRFPTPDKLAAAAGLAPVLKQSGKVRYLKRAHGGNKTLKRVFFQSAFCSLTHPDSKAFYRRKRDERKTHHQAVLALARRRVDVLHAMLRNRTPYELRHAKAA

SEQ ID NO: 307613 - protein, 343 aa, unidentified
MKIIRVGVDLAKNVFQVHGVDRCEKVVWRKKLGRAEWLKALLEKIEPGCEIGMEACGGAHHWARQLQKHGFKVKLIAPQFVKPYVKSNKNDANDAEAICEAMSRPNMRFVAIKSVEQQDLQAIHRIRSELCSQRTAKGNQIRGLCAEYGLVAPREMIQLRAAIPCWLEDIENGLTRRFRRLLQGLWFDLLKLELRVKELDQEIEVMAATDPVTLRLQQLRGVGPIIATALVASVGDAKQFRNGRQMAASLGLTPRQNSSGGKERLLGITKRGDAHLRTLLIHGARAVLRTAANKEDRMSRWVTHIAQTRHHNVAAVALANKTARIAWAMMTKGTDYQPGLVAV

SEQ ID NO: 307614 - protein, 339 aa, unidentified
MVIIGIDPHKATHTAVAVDENEAVLSKLEVRAARDQRDRLLRWAARFEERTWAVESAGGLGELLARELVDAGETVIDVPATLAARVRLLGSGKSHKNDPNDARSTAIAALRQPRLRAAGVDSDATTVRLVVGRHHDLGRLRTQSVCRLHRLLCTIVPGGHPRRMSADQAERMLAGIAARTVVDATRKEMALELLADVRRLDADIAISRQRVVAAVNATGTSLTDLYGVGPVVAAIIIGHVGDVRRFPTRDHFASYNATAPIEASSGPKKRHRLNPRGNRMVNYALHMAAVTQIRNDTPGRAYFDRKLAEGKTKKEALRALKRRISDAVYRQLILDLERR

SEQ ID NO: 307615 - protein, 427 aa, unidentified
MEVIHPRCAGIDVSKKDAKVCVRIQGRGRKATSSTVTTWTSMTGSILALREHLLAERVTCVVIESTAAYWKPFYFLLDEALNVMLVNARHARNVPGRKTDVSDAAWLAELGAHGLVRASFVPPEPIRVLRDLSRARTTIAQARTKEIARLETLLEDAGIKLSSVACEITGVSGRAMLEALIEGQHDPGELADLAKRQLRKKIPALTEALQGRFTAHHGFMVRLYLDRIDAHEADIARLDARIEEAIGPFRAARELLVSIPGWSQVVADVFIAETGADMSVYPTAEHLASWVGVTPRANESAGRIKSAKTMPGNRHLKAALGVAALSASRSTNTYFGARFRRIAGRRPVRPGTKKSRRQSAAGQTAIVALEHKMLTCAWHMLVNGTFYQDPGPDYYTRNHPAQTKAKAIKQLQALGYDVTLQPHTDAA

SEQ ID NO: 307616 - protein, 430 aa, unidentified
MDTVNGIRLQQFCQFKNEIRGSTEYLVVGLDIAKEKHNAFFGTATGTTLYKGMFFDNTQEGFQKLLAQAEKLSVENSLSKVVFGLEPTANYHRPLAEHLIKCGHLVVLVSPLSTVKNRQLMDGRWDKHDTKDAGNVADLVAQGKCLYYDYPEEAIRDIRNLLSFKKRLKKEEQALQVRIRNQLLAQYFPEMDRHFRTAVGLSVVQRCLDPAMIAGMEYDEFCRTVAPGKLTLKQQRVLQRIWQSAHQSIGCRVGETVSFEAQAMVMSIHHVREIIKAVNEKIEALCLPFPEYSCLLSIPGFGPEVSSTVMGAIGDPYRFSCGRQVLKMAGFDLSASRSGKNAPNIVPVISKRGKVDLRFALYQAALVASNMNHYFIKYYGRKYLRRQHEQGAGTKLRVKLAAKLLIIAWTLMKKKEMFDPNCINLGDAKV

SEQ ID NO: 307617 - protein, 347 aa, unidentified
MEGYAGRQFVGMDLHRRRSVLVRMTGGGDVLERVRIVNDVDGLAAVIARAGESPEVVLEATYGWYWAVDALREQGAVVHLAHPLGVKAFEYRRVKNDERDAADLADLLRMGRLPEAWIAPPATRELRELVRHRAKLVGLRSHCKAEVHAVLAKCGVQVAMSDLFGVDGTALLDRLELAAPYAARIGSLRRIMDGLDFEIDHVAGMVRGRLALDPGYIAVQQIPGIGPTLAAVLVAEIGDIDRFTRPEQLTCWAGLTPTHHESDAHVHRGRITKQGSRLVRWAVVESVQILPDTTLVGRFRDRVAARRGHNIGVVAAGRRQLEYVFYALRDHHVRALDARPHKHTVAA

SEQ ID NO: 307618 - protein, 344 aa, unidentified
MNGTTIAIDVAKSVFEVAISEHPGHVRERHRLTRERFHRFLAEQPAALVLMEACGSAHHWARHAQACGHRAILVPPHVVRPYVLRNKTDRSDAKGLLEACRNEDLRPVPVKSETQQALAALHRLRSTWLATRTARINTVRGLLREFGLVIPTGARQVVPHVWTLLEDADSGVPGLLRPALAAAAREIREIEERLHAVERQLETAAAETLIVKQLRTIPGVGLLTATALVATVGDVQRFPSGRHFASYLGLTPRESSTGQRRRLGAISKRGDTYLRMLLIHGARSVLCRAKTRTAPPADRLRIWALQVERLRGHNKAAVALANKLARIAWGVWRHGTDYVETPAV

SEQ ID NO: 307619 - protein, 467 aa, unidentified
MTLTLGIDIAVRAAHQATLSRDGKTVWRGRKFMTRPDELERVWADVGAEDPAELTVVLEPTRNAWIVIAEWFRRRGAKVVMVPTTQSADLRKYYSKHAKNDRIDSELLARLPLLHPEGLREYSGQGPADPLRRLVKQRSTMVTRRTAVYARLDALIELLGPAWYAVLGSNYGNAALEFLARYADPHAVIRLGQARLARFLIARSGGNWRDEHAAGLIAAARETLALWNVKGADGMDFAELSADVAHEAEQALFLTRQIKEIDERIANLYADADPHGIVASAPGVGPTISAVIAGRLGDPHRFTSLAAIRADTGLVPRVSQSGVVKTESSITKAGDPLLREMLYAAADQARKVDPQFAAKYHRLMAGDRHHDSAICHLATMLITRIAACMRNGTPYQLRDIDGTAITESEGRTIVKHRHQLDPRQRDHVRHKLMRERRKKAGQESQKSPSAPTSQPAKPKPTTSPQVA

SEQ ID NO: 307620 - protein, 339 aa, unidentified
MVLIGVDPHKGSHTAVVVDGDEHELGRLTVRADRRQLERLLTFASPFGERRWAIESAGGLGFLLAQQLVAVGEAVVDVPPTLAARVRLLGSGRSSKNDPNDALSTAIAALRDPQLRTVVAEDHAMVLRMLADRYQDLTRLRTQAVCRLHALLAALVPGGMQKRLSAKSAAAVLRRVHPANAVETERRRLALELVADIRGLDRAAVAVKARVKVAVAASGTTVTDIHGVGPIVAAILVGHCGDISRFPTAGHFASYNGTAPIEASSGPKVRHRLNPRGNRQLNHALHVAAIAQTRHDTAGRAYYQRKIAEGKTPREALRALKRRISDTVYKRLRDDHRRA

SEQ ID NO: 307621 - protein, 344 aa, unidentified
MNKLSRVGIDLAKNVFQLHGVDRHGKVVWRRRLTRNNWLKVLLEKIEPGCTIGMEACTGAHHWARELQAKGFTVKLIAPQFVKPYVKSNKNDANDAEAVCEAMSRPNMRFVAVKTVEQQDIQAAHRIRSELLGQRTSKANQIRGLLAEYGLVAPQHLARLRAAVPDWLEDAENGLTSRFRGLLNGLWDDLKRLDQRIAELDREITSMAQNDPVAKRLQQLRGVGPLIATALVAAVGHAEQFANGRQMAASLGLTPRQHSSGGKDRLLGISKRGDAYLRSILIHGARSVIRTAKHKDDRLSQWVTSLAVRRHANVAAAALANKTVRIAWAMLRHGTDYQPDRIAA

SEQ ID NO: 307622 - protein, 357 aa, unidentified
MLVIGCDYHPSVQHIAWIDRETGECGERQLRHRDGEAEKFYRDLQAKGVNVRVGIEATGHARWFECLLAELKFELWVGDPAQIKAARVRKQKNDRQDAEHILKLMMEDRFPRVWVPGAENRDLRQLLWHRHRLVQMRTRIMNQLQAVAMNEGVRGKKGLWSQSGRKQLESFQRAPWATRRRQDLLQLLDQLTPSIAELTTAIEQQAEQSPDAQRLMTHPGVGPITALAYVLIIGSPGRFGCGKQIGSYLGLIPCEDSSAGRQRLGHISKQGNTLLRFLLVEAAQAAVRGDADWRRQFLHLAMRREHKIAKVAMARKLAVRLYWMWRKGWDYQQLLQFGSQGRKLLFSHSVGTTDSTR

SEQ ID NO: 307623 - protein, 344 aa, unidentified
MSKVITIGLDIAKNVFHAHGADERGAMVFSRKLTRGKLLEFFAGQPPCTVALEACGGAHHWARQLQALGHDVRLLPPAYVKPFVKRNKNDAVDAEAICEAAQRPGMRFVAVKSEEQQAAGLVFRTRDLVVRQRTQLINAIRGHLAEYGWVAPRGTASMSMLADLLEDGDMATSLPEAARPMFKLMIDLLAELDKQIATLDREIARRAKDDEAARRLMTIPGIGPIAATAIIALAPPIETFRKGRDFAAWLGLAPRQHSTGGKQRLGSITKMGERTIRRLLIIGASSVVLQASRRGAPNGSWLERMLARKPRMLASVALANKMARMVWALLTKEEDYRAPAAVSA

SEQ ID NO: 307624 - protein, 315 aa, unidentified
MSQSPGSYVGIDVSKASLEVAVRPAGDSWSAANTPQGIARLIQRLAQVCPGLVVVESTGGLERPLLAELCFAHLPVALVNPGRVRDFAKSTGTLAKTDKLDAGVLAHFAEAVKPAVVVLPSEQEQLLSALMTRRRQLVEMLTAEKNHLLSTPGAIRNWVERNIASLEQQLAELNREIDDFIKHDPAFRDKEQILRSAPGVGPITAAILLSDLPELGKLDRKKIAALVGVAPFNRDSGPRSGKRQVKGGRAAVRTVLYMATVCAVRFNPVLKAFYSRLLQNGKLKKVALVACMRKLLTFLNAMVRDSRAWTSGSIT

SEQ ID NO: 307625 - protein, 459 aa, unidentified
MNTIGLDLAVEAAHKAVVIDEQGRFITPVFTLRTRPSDLEQLLARARHGDQDAALQVVMEPTGMAWFPIAVYLVRHDVTAYLVNSQEVADLRRYYQRHAKSDRIDARVLARLPLVNPEKLHRLHLPSATTLACQRSCKQLDRLSTLITAIQNRVQAIDRFAWPGLEEQVFADPFAPAARWMRTHWYDPQRVLEAGAATIREQWEGSSEAAESAGAWCETLVALAAQVLALYGSENQYLDFAQLQAEVCREQAWLATLEQQHQTLRKQTVRPLYRQIHPSRNLETLKGVGQDSAAVYASFIGDTKRFSSSRLFRGWSGMVPESAQSGDTEAKGLHMSQAGPDLVKKYAYLDAEIARRWDPQIAAIYYDQMVHKGKHHKQAVCACATHLLDRVLAVLRQDQPYQLRAVDGTPVTVEQAQRLIAERYRVSPEVRRRTTKHQRKERAERQAEHNSKGKAVSAS

SEQ ID NO: 307626 - protein, 415 aa, unidentified
MLKIVYPICCGIDVHKTFVIATIATTDHENITTYQTKRFSTFTRDLKALAAWLSEHQCVDVCMESTGKYWIPVRNVLEPSCQITLAHPKYVRAIRGKKTDKKDSIWIADLFKHGLVPGSFIPPADIREIRELLRYRSKLVSFKSSEKNRVQNSLTVSNIMLSSVVSDTFGKSALAILEHLLKNPDEKDFDFLPLLHGSMLKKEADIALAIDGTITKIQADKITLCLCHMNNLKSYIADIESKAMQLARPYSGSLAIIQSVPGVSELSALIILSEIGADMSVFHSAKHLCSWAGLTPSNDQSAGKKKSVRISRAGIYIKPILVQCANAAIKDKSFIHYRTRYEAIKHRRGHKRAIIAIARMILTAVYYMLSSGEFFNPGLYEKAQCKPGFVASSEAHAVKLLQRLGYVVVKEPESA

SEQ ID NO: 307627 - protein, 495 aa, unidentified
MIGEYPVLAGQHPVCNTFTISVATCWRLFFLNKRVMSKVNKKKTQDKFAQMPIVHLHAAGIDVGSRSHFVAVGQNKEDVKEYGVYTEDLHQLCQDLVKSGITDVALESTGSYWQPLFVLLQQYNLNPILVNGKFTKNVKGKKTDVKDSQWIQKLHTMGMLEGSFIPDLFTETVRQYNRHRECLIESAASYINKMQKALRLTNIRLDAVLRDVMGMSGKAIIEAILGGERNPAVLASLAHPSVKTPKAEIKAALTGDWREEYIFELRHCYEFYKYYHQKIDECDTEIKKLLTAEIERKQREEGLAKVADIKVKKKKVHKNSPNIDMQRTMIEMTGGIDISAIKGVGLGLLLCLIAETGIDLKAFATDKQFASWLRLSPDTKVTGGKIISDKTRKGKNRLAHAFMHCANTIGNMKEGDHLVHFFKRIARKKDRIVAMVATARKLAVIVWNMLVKKKPYNPEPPVEYLNKIRSNQVKNLQRKIRQLNVQEHELSFATT

SEQ ID NO: 307628 - protein, 350 aa, unidentified
MIVIGSDPHKRSYTCSAVGAGTGELRSSETVQATSAGHERLLGWARGLDRERVWALEDCRHVSGKLERFLLARGERVVRVPPKLMAGRRRGSRLAGKSDPIDALAVARAALEEGIDTLPAAQLAGPAREVKLLLDHREDLVAERTRTQSRLRWLLHDRWPELELPAGCLDRVVWLDRLAGRLARGPQDADVRVMRAQVRRVKELTREANALERELLLLVRGLQPRLLALPGIGTLTAAKLIAEIAGIERFRSEAKLARLAGIAPIPASSGNSTRVRLDRGGNRQLNAAFHRIAVTQMRCHAPARDYIARRISEGKTKTEAIRCLKRHLVRSVYNTMTPTANALDSALALT

SEQ ID NO: 307629 - protein, 458 aa, unidentified
MYRELQPLRRALSAELKAHLPPAQPGIEAEHLLQTYLDRLTMYVGCDVADQTFTLMALDAAGEELGHLLKAPNNPQGFERAWEWLENLRCRHHLRIILLALECSGVYYWAWWDFLADRPNLARVLYNPRTTEHMTEVLSKKVRNELVDAYALAEQVRLGSTPEVVLSEDTDLLTARFCSRAARDLAQQINDKKNQLRSLLRAYNPALGQVFPRAKLHHPAVYALLKRYLFPDEIAAAGVEEITAVLKKHCRTAFGPEEAEQLVTLCRQTLTREIGREVIRQRVHHLIEDIQTAQKRKKWFLKTGYGLIEDRMETKLLRAVVGAGISNTLALVSEVGSVQRFPTGKHVASFLGLTTSKHISGTTLFQSKHITKQGSPNGRYAAVNLALHLSQRVPKYQQMYQRIVRRKPPHKGHFIALVAIARDFVTNVLYDMWRYQRPFFLEVEDYRAYRREHPRSDD

SEQ ID NO: 307630 - protein, 383 aa, unidentified
MSMFFVGIDVSKDYSSVQGLDQDGKKLFYVEFGMNGEGFSRLLNMLKTHCGILSEVTVGMESTGCYHINLFAFLCSEGIVCVVINPLLISNFARLSLRKTKTDKKDALTIAQFLLAHRGELSQVPYSQSSQDLKDLARERESLAVMIAGLKNDVRRLLQMTFPELEHRCKLFTETMLRFLIKISKALIYAEGKRKRVFISAEEIISLAKASVASDSVAKEWILSEKIETLLYLEGKKGRITEALVEACRSMRVDELDILTSVDGISAITGSTFLAELGDIERFGSYKHLIAFAGLDPSIHQSGQYEGISRISKRGNRHLRRVIFLMTLCAVRSHNIFREYFLRRKEEGLPPKKAILATAHKLLRVLFAMLTRKSYFRREVVEV

SEQ ID NO: 307631 - protein, 451 aa, unidentified
MAERNRKLAGKPKEPSAPINITHPNAAGIDIGNASHFVAVPPDRDDYPVREFPSFTSDLYALADWLAACGVDTVAMESTGVYWIPLFELLESRGFTVFLVNARHVKNVSGRKSDVLDCQWLQQLMSYGLLAGAFRPAEAVCVLRALWRQRAMLLYGQGRQVQHIQKALTQMNIQLANVISDVVGVTGQQILRAILDGERDGQVLAALRNGRIHASVDDIARSLQGNWRVEHLFALRQAVEMFDFIGTQLAQCDREVDQQLQAMQAHDGPLGKGKRSGSRNAPGFDLRTRLFHMCGIDLTRIDGINITTALTVIAETGTDLSRFKTVGHFTSWLGLCPGTKISGGKKLSAKTKRVVNRAAQALRLAAASLRASKSALGAYYRRMCARMDKPKAVTAAAHKLARLIYTMLTRGEEYTDQGQEQYERQHRERVLRNLTKRAEQMGMKLTPAEPA

SEQ ID NO: 307632 - protein, 360 aa, unidentified
MRHLVQESPDAFAGQVLFVGIDVHKKQWTCSVRTNRISLDKPIVIEANAKALSSFLNRRYPGGTFRAVYEAGYSGFWPARELSKEAIATMVVNPADVPSKNKELANKTDRVDSVKLARALENGELQSIYIPNREAEEFRALNRYRNQLIKDQTRLKNRLKAMLAQFNYRPPAELEGRQSKALQAWLEGIRFETPYAQLAFNERLRQLAESRQRQARILRQMRHMASQDTEIAQVIVLLQSIPGIGLLTAVLLVTELIDIRRFKTADDLVAFVGLVPRVHQSDETSYQRGLSNRRNAELRSRLIEAAWIAARKDPALTLKFGQFTQRMHRNKAIIRIAKLLVKRIRHVWKTKTPYAIDIIA

SEQ ID NO: 307633 - protein, 318 aa, unidentified
MQVPLNSFIGVDVSKAELVIATYGQDDCLSVPNECTAILQWLRTLAAGSLLAMESTGRYHQLLANLAAGAGRPVFVLNARDVYFYAKGLGARGKTDRVDARVIARYLAEHHDRLHPYHAPSASQAELEQLLGQRWTIVTKRIALRESLQACGASIAQAASQLDAAFAALLRTIDGRITELIKADPQLHRARTLLQSIVGVGPQSSALLASLLARVPFASSDALVAYSGLDPRANDSGRCRGRRRLSKRGDPALRHQMFMAAMSACHTSTFAATYQALRARGLKTTEALVILARKLMRIAFAVWRSGQPFQAHRVTHNA

SEQ ID NO: 307634 - protein, 367 aa, unidentified
MKNHSSIDQSLSSSDLSACTTLAVDLAKQVFQVAGEDVLGQVRYEQRIKSREAFYEFLQKMPPHVVVLMETGPGAQAWARQLQDQGNLARILPAGLVATHRSGPKNDRNDALAILRAGRDEKICAVPVKSVAALAMQALHRARQGYVRRRTAVSNQMRGLLLEHGVALAQGDVAISQKIPRVLEDATQPVPGLLRELIDELLAEWRHLGERIRVLTGRLEVAANADMTAKRLMTVRGIGPVTATALVAKETKPERFPNARKFAAYFGMVPDQHSSGETVRLGGMTKRGDVYLRSLMIQGAHAVLQQLRPDSQQPDDRRLLRWMSRLGRKEAAIRLANRNLRIVWVLLQNDQTYRRHAGDDQQATMSH

SEQ ID NO: 307635 - protein, 450 aa, unidentified
MATRNRALNRKGLELTHPNAAGIDIGSASHYVAVPADRDDEPVREFASFTADLHRLADWLRDCGVDTVAMESTGVYWIPLFELLDARGFTVLLVNARHVKNVSGRKSDVLDCQWLQQLMTYGLLRGAFRPSDQVCVLRALARQRATLLRTQARSVQHMQKALVQMNIQLANVIADVAGASGQAILRAIVAGERHPYALARLKNSRVHASNEEIARSLQGTWRAEHLFALRQALDAFDFCGGQLQQCDQEIEAQLQRLHITEVEPDKGKKRSKARNAPKFDLRTRLYQMCGVDLTRIDGIDVTTALMVVSETGTDMSKFPSDKHFASWLGLCPGTKITGGKVMSGKTKRCANRAAQALRLAAAALRASQSALGAYYRRICSRMDKAKAVTAAAHKLARLIYSMLTKGEEYTDQGQAYYEERYRQRVLHNLNRRAQQLGMTLVPTTPAAQAA

SEQ ID NO: 307636 - protein, 368 aa, unidentified
MNNNTLEAARTAGAKELKNQKAAKAKRIVIGTDVHKNSYQAARKIDNGAIGAVAKFRSQEELLLYVEKPKEQAEEVVVVYEAGPLGYVLYRALKAREVRCYVCAPDSREQKRKRRKNNTIDTRTLTSNLFNYLHGNERALQLARVPTEEQEQARLQSRQHDQLVEERKRLGAKGNALLLSRGFGSWANWWRPKAFSRLSQLVPGWLLELLETWVDLLRKLDEKIRRAKVALAQRWSGPRPKGAGAPSLVQLQSEVLDWGRYSNPRKIGCLAGMVPSEWSTGDRQWQGSITKVGVPAIRRVITEMVWRIILFQPQYRPVQKWQEVLRGSTRGLKKKAVVAIGRQLMVDLWRLQTGRVSAQELNLVMIGG

SEQ ID NO: 307637 - protein, 314 aa, unidentified
MTALPVPNRFVGIDVAKAHLDIHLLPKRRSWRIEYTPAALQKLLKDLGEDTSVLVVMEATGGYERLCADTLANAGYAVAVVNPRQARRFAGALGTLAKTDRIDAAMLAQYGAALNPQNRHKPDAERNTLTALMVRRRQLVAMAAMEKQRADPKHIDDHARQSIARVGAFLDSEIADLDAQITNTIAQHPAWRVLSSALQKVKGVGPRTTVALLTQMPELGTLGRRQLAALAGLAPVNRDSGTSRGRRFTQGGRTNLKTALYMAALSAARHNPDLKTFYAKLKEAGKPAKVALIAVARKLLIILNAIARNTLKPA

SEQ ID NO: 307638 - protein, 343 aa, unidentified
MLTGHSIIGLDLAKKAFQARGASADGAVLFRRKLSRAQLLKFLGEQPPCMVAMEACASAHHWGRAIGDLGHEVRLIAPAYVKPFVKRQKNDMADAEAIAEAASRPTMRFVAAKSEEKQAAAMLYRTRDLLVRQRTQTINALRAHLAEQGIVAPVGPAHVGRLAAAVDGDDGALPAAVRDLARLLLDQIAGLSEKIAGLDGELRRRASADDTARRLTTIPGVGPITAAAITSFAPPMESFSKGRDFAAWVGLTPRQHSSGGKERLGRASKMGQRDIRKLLIVDAVAVVRWAARKDTPEGSWLARMLARKPKMLVTVALANHMARTAWVLMCKGEDYREPAISAA

SEQ ID NO: 307639 - protein, 411 aa, unidentified
MRRVIGMDIHRTFAEVVVWEDGRLRHHGRVDMTRSGLEGFGRSLRRTDEIVVEATGNAMAVVRVLSPYVDRVIVANPMQVKAIAHARIKTDKIDAGVLAQLHASGFLPEVWIPDERTERLRRLVARRNQVVRHRTRVKNEVHGILQAHLVPKCPHADLFNRRGRAWLERQVLPDDERAAIARHIREIDRLAEDLADLDREIAREAVDDVQVRRLQTITGVNAIVASGIIAAVGDIRRFREPQKLVSYFGLNPRVRQSGLGLAQYGRISKHGRSHARAMLVEAAWAAAKAPGPLRAFFLRIRNKRGHQVAAVAVARKLAVLIWHLLTKEQDYFWARPALVAAKQRQLALKAGAPGERGVGRRGSAYAYNVKELRNSEKAAAENAERAYELMVRHWRPRGPKRRTDATNEERL

SEQ ID NO: 307640 - protein, 351 aa, unidentified
MTIVGGFDVHRHQITFDYVDDEGLVHWGQIRPATRNTLRGWLVRHCPDGNGEFALEGCTGWRYVCEELAAAGVGMHLGDPAETAALRGPKKRAKTDRADARLLRTLLVEGRFPESWIPPAHVVEIRALGRLYCALMDERRAWQQRIHAQLFHQGCPPITALLSQAGRHALAAAELSLAGRQYVDSALRRIDDLGAEIEPLRAQLIGFARRQAGCQALQRHYGIGWLCAAIIWAEIGDARRFRSSDQLVRFAGLDVTVYSSDGKRSPGHLSRQGSPELRWAAFEAAKCAARRGSPDHSYYRALAAKHDGHNGKNPTLAVERKLLRRCYHTLRELGDAALAIPLTETRQKMAA

SEQ ID NO: 307641 - protein, 409 aa, unidentified
MNSGIITSVGIDISKHKSTVAVRRPGGEIVLMPFDICHNVDGITSLIKILKSLDGEIRVVMEHTGAYWRPIALSLKQAGFFVSVVNAILIHNFSDNSLRKVKTDKADSLKIANYGLTFWSDLREYTSEDETRQLLKMQSRLYERTTNIGIMLRNALISLLDQTFPGANKLFRDESRNTKGHVKWVDFVMRFWHKECVATLSLNAFADKFLKWCKRTGYRFNPSDAQRIHTIARNTVATLPKNNSTKLLIVQAVISLNTVYDSLQVIRTEMNHLASLLPEYEIIMNLDGVGKITGSQLIAEIGDVRRFSHKGALVAYAGVDAPPFQSGTFDSKNRHVSKRGSPYLRKILFQIVSMILVNEKMDNSVFCFMDKKRAEGKHFYVYTVAGAAKFLRIYYAKVKEYLNKQNCLT

SEQ ID NO: 307642 - protein, 410 aa, unidentified
MRVVYERCCGLDVHKKTVVACVLITETSSEMQRHIRTFSTMTAGLLALADWLESMHVPVVAMESTGVYWRPVFNLIEEGRTIILVNAQHMKAVPGRKTDVKDAEWLADLLRHGLLKASFIPPAPIREIRDLVRYRKSLVQERAQEVNRVQKVLETANVKLSSVATDVLGKSGRDMLQAIIEGTTDAEVLANLARGLLRKKLPQLQEALDGRVQTHHRILLKHILAHVAFLEQELEQLQQEIEQRLPPFEEEMGLLMSIPGIQALSAAAILAEIGADMSRFPSAKHLASWAGVCPGNKQSGGKRLSGKTRKGNATLRAALAEVVWVISHTKDNYLAAQYHRLARRIGKNKAAMAVAHSVLVIIYHVLHTREPYSDLGADYFQKQDANRVAQRSLRQLEALGYEVTLTPKVA

SEQ ID NO: 307643 - protein, 281 aa, unidentified
MEITTIGLDLAKSVFQVHAVDAEGKVIVRKALRRAQVLPFFKTAPPCLVGIEACGTSHHWARELRRLGHEVRLMPPAYVKPYVKRGKTDANDAEAICEAVTRPTMRFVAIKSEQQQAALALHRTRDLLVKQRTQLVNMIRGLLAEFGIEMARGLHHALDLAARVAQGAAPDVPELAARVITGLAGQIGDLQVRLTALEKELLTWHRTNELSQRLSTIPGVGLISATALAASVTDASRFRSGRQFAASLGLTPLQNSSGGKERMGRISRMGDRYLRRDLPPS

SEQ ID NO: 307644 - protein, 391 aa, unidentified
MSRMRKNNKKKVSAPTLYCLNPNAAGVDVGATQIYIAVPVDRDPQPVRHFSTFTEDLHAAADWLKACNIETVAMESTGVYWIPFFQILEARGFTVLLVNARHVKNVPGRKSDVSDCQWLQYLHSVGLLRGSFRPEQEVCTVRSILRHRDSLVQMASSHVQHMQKALDQMNLQLHHVISDITGVTGIRIIEAILAGERNPHTLAALRDGRIKATADTIAKSLVGDYRREHLFTLSQSLTAFRHYQELIGACDSEIAQLLGAFESKVDSPEGSATESQDGQKPSGDAPRFDLQSHLYRIFGVDLTRIPGINVLTTQTLLAEIGPDLSCFDCAPAFTSWLGLCPDNRVTGGKVVSVKTRQVKNRAATALRMAAQSLHRIQSYLGNFYRRMRWSD

SEQ ID NO: 307645 - protein, 424 aa, unidentified
MATRLRFVESKGIFGPQPIKQFRAENMYLNIGIDIAKNVHEVCFVDENGKQIGNFMKLKNSRKSLDKFRNKIESISKELNAKPRIGIEATGIYWYSLYSELSKYYEIQVYNPSQISGFRSVNIRVSHNDKIDSRTIANMLRFGEAPKTDYSDKQILEMREYCRFHFKLITIKTNLKKRFRRNLHLIFPGYDMVFKNVFTKTSRGILVQSPTPDDILDMGTEKLRDLMKDLSRNHINPDKANELMEKARDTIPSEIIKESALFELQMLLYLIETLEKQIEEVESKILIIWDSVKDRYYTQTITGIGDIRVATICAEIGNFDHFSHPDKILAFAGLDPKVTQSGNKEIVRGPNKRGSKMLRWALGWAAEEAKRNNPVIGSFFQKKLDEGKHYNTARCATAKKLVRIIWSVENNKKPFQIPPNYLSS

SEQ ID NO: 307646 - protein, 329 aa, unidentified
MTKLSKKVIGVDVGSKFLTVSLNDSNNQDQVLNIENNQRSILSFLKKISSDDYCFVIEATGNYSSRVLHLSLEKGFASSLVNCMSIKHFARMKNIIAKTDAEDAKLIRLYGEMFRPENYIPKSIEIEHLDQEIKLLNDLEEEKRRYTVKLKALRFNPYLNPNTEKHYERRLKQLEKEIKEVELRLPKLQNAEFKEVKDLIQSVSGIGEKTSLQLMTATSGFKNFDSAKSLVKYFGLAPRIYQSGKKSYSPGKCRTSKTHIRSLLYVCSWTAMKHNVHCKELYLRLLAKGKPKKLALIAVCNKLLRICFGVVKNKTVYQPDYQKNFKILT

SEQ ID NO: 307647 - protein, 336 aa, unidentified
MSKVTNFVGLDYHDETIRVCVMAEDGEMLLNSDLKNDARAVAELIGEFGTPAAVAIEACCGSSNFATELRRISGWDVRQAHPGYVAQLKQCKDKTDFGDARLLADLLRVGFLPEVWLADVDTRQLRKLVRFRQGLVRDRKDVKLRLRSVLRDDRIKCEDARPWTKSWMEWVTTVELPEQSRWVTDRLLKQLERLNEDVSEVERQLADVTADDEVVQKLLTFNGIGLITAVTLRAEIGHFERFGSGKKLARFCGVTPRNASSGKRQADAGLVCESNDALRALLIQVAKTLPRCDERWKEMKQRLGKTKPANVVTAAIANRWLRWLYYQVIIPVEMTA

SEQ ID NO: 307648 - protein, 312 aa, unidentified
MDATVIGIDVAKDQLDVCVRPSGESFVVARTGAGIEDLAERLRKIAPRVVAVEATGGFETVVAAGLAAAGVPLLIVNPAQVRAFAQALGKRAKTDPIDAAVIAHFVEATKAQPRPLPDETTRLLADLVTRRRQIIDMMIAEGQRDRRLVNKRLKSSIARLRRALEKELAEIDSELDDHVRGSPAWAAKEDLLASVPGVGPIIARTLIAELPELGSLDRRKIAALVGLAPWTRQSGQWRGKSFIGGGRKSVRTALFMAAMVAARHNPVLKTFRDKLVAAGKPKLVALIAVARKLLTILNALLRDNQRWQPKTA

SEQ ID NO: 307649 - protein, 419 aa, unidentified
MAKVHSIAQEAVLVAIDISKKRNDVLIQIPGSTRRRRLTVLNQRAEHDRFIDQLKSFERPVLAGFEATGNYHRALAWRLVDAGIETRLISSMALARQREAIHNGWDKNDPKDAQVILHMLATGVSQTYQDPLAAGLADIQELSKTHEAVSRAKTQTIHRILTHYLPLYFPEIERFLHSSRRDWFFALLEKFPTPASITALSPEDFSTAVWDIVGKKTAKARLIADIYETAKESIGLPIPINSKAIAMFRMVLAEARSLNRQRDAIEAEAEALLGGTRDYEALKQIPGIGPIISLTILAEAGDLRRFGHHRQFLKFCGLDLSTHQSGTFRGQTKLSKFGNARLRKALWMAGQVAIRQRENSFRDKYTRYIARDPDNADLKRKALSAVTAKMARTVHAVIKSGKAYRPFYEGPVPGGRTSL

SEQ ID NO: 307650 - protein, 343 aa, unidentified
MYVGLDVHKRYCYYAMVDGRGTVVKKDRFRTTGEELEEFASALPEESEVAIEASASGSFVYEQLDGQGINVHLAHPTMVRPFAKQHVKTDKIDAIVLAQLLRMEYLPESYVPNEEMRDLRTLVRHRANLVRTRTSLKNRVHALLTMEGVQPPAVSDLFGKRGREFLEAVKLRETRRVALDDCLEVLDVLSERIAAVEEILEEKAEVTKGVEWLRSIPGIGVQTAVLIQSEVGEMRRFSRPQGFVCYTGLAPKVAQSGDQIRYGHINRQSNGFLRWALIQSAWAAVRSSTPNRFQRIYRKVKARRGSKVAIVATARHLAESVYWVLIKEEAYREIKAGEASSLS

SEQ ID NO: 307651 - protein, 305 aa, unidentified
MFNRFIGVDVAKAKVDVFLSETGELMQIKNDEKSLHKFVQFLERTEETLVIIDLTGGYETQCVKAFYQAGFTIHRAEGRKVKAFMRACGQLAKTDSIDARALADYGKRLQDKLTLFQPVDNEIKPYIMRLNELKQLLQMEKNRLQSPQTDNKIYEQVSRHIAFLKTEINFLAKELQQIIEKTPQLHQKQKVLTSQIGIGETTANLLLALLPELGYLPRRKIAALAGLAPYAKDSGTLNAARHVYGGRKEVKRALFICALTAIKRDKEMKRFYEKLLKNGKKKMVALIAVMRKMIIILNAKCKKLN

SEQ ID NO: 307652 - protein, 336 aa, unidentified
MRHYVGIDLHRRRSVIFTMDCVGTRLGCKRIVNEPQALLEAVLEHSPDPEVVIEATYGWYWAVDLLQEQGLSVHLAHPAGNDWGKRRVKNDERDARDLADLLRLGRLDEAWIAPKETRELRELVRYRHKLVELRTGLKAQIHAVMAKEGELPSRGWMFGPGGNAQLDAMEHVGDGYGIRMASLRELIDHYDAEVAKVEREIHHRLKGDPAYEAVQTIPGVGRTLAAIFVAEIGDVSRFKSPEALSSWAGLAPRHHESDTKVIRGQITKMGSKLMRWAAIEAVSGRRGGTKLREDFHQIAERRGKYKARAAVARKLLTLVYYGLRDHEIRALATEAS

SEQ ID NO: 307653 - protein, 337 aa, unidentified
MKRITVFVGLDYHQHSVQVCILNREGVVLGNRRCENDRLIIATYVEQFGTDIRAAIESCVGASDFAEELVQQHGWSVDLAHPGYVHRMKQSPDKSDYTDAHMLADLIRVGYLPKVWLAPSSIRELRRLIRHRQQIAQSIRNTKLRMGALLREHRSGTSSFGRWTLGWIDWAITHPCLREQSRWIMERLLSQLRFHEEERRVVEQQLQSVTGDDAVVQQLMSFAGIGPVTAWTLRAEIGRFDRFRSGKQLSRFCGLSPRNASSGNRQADAGLIRACNRELRTVLIEAAHRLARLDTRWSVFAQKKRGEGKPGSVVAAAVANRWVRWLYHQMVPVLQAA

SEQ ID NO: 307654 - protein, 324 aa, unidentified
MHLGIDISKRYFDATLRTDTDETKHCQFENNATGIQSLLAWLRQHGVTQLHVCMEATNTYWEAVAEALHGAGYTVSVVNPARIKGFAMSQMRRNKNDKLDSDVIATFCAKMTPAPWTPPSASERKLRSLVRHRDGLQKTLTQQKNRLANAHDQEVTASLQKVIETLQAEIAQLEKRIDHLISADAQQQKAVTLICSINGVGRRTARQVLAEMPDLAHYPSATAAAADVGLTPAHHDSGETVHRRPHLSKQGKTGMRRILYWPAIVAIKHNPIVAALAHRLKQRHKPKKVIIVAAMRKLMHLIYGVLKNQTPFDPYYHSRSRPVT

SEQ ID NO: 307655 - protein, 400 aa, unidentified
MAQPVWAGVDAGKADHYCVVIDTNGKAVLSRRVANDEAALLELIDMVTALADGGETTWAIDLNAGGAALLITLLIAAEQRLLYIPGRSVHHASGGYRGDGKTDAKDAAVIADQARMRRDLQPLRPGDDIAVELRILTSRRTDLVADRTRAINRLRAQLLEYFPALERAFDYSKTKAALILLTGYQTPAGLRRAGAARIAAFLRKRKARNADAIATAAIEAANAQRTIVPGQQLAAGVVARLAEEVMTLDTEIGDTDAMIEDRFRRHRHAEIILSMPGFGVTLGAEFLAATGGDMSAFASVDRLAGVSGLAPVPRDSGRISGNLKRPRRYNRRLLRACYLSALVSIRTDPASRTYYDRKRTEGKRHTQAVLALARRRLNVLWAMLRDHTTYQPTTPNAAAA

SEQ ID NO: 307656 - protein, 351 aa, unidentified
MKSKNTALPKLFIGIDIHKANWNIRLATDLFQGKRFTTPSDPLLLRHFVNKHYPDHQVYCAYEAGCCGYSAHRAFQSFGWNSLVFNPSDISRTGKTQFQKTDQMDADLICRELKDNRLHGITVPDMERDHLRCLFRRRNDLVKDLRQIKSKIKAQLLYLGIKLPPEFDNANWTKAFRRWIDELAFENETVKTAMNSRKAQFEFLESNLRGVSNELRKCCRKHYKKDYMLLRSIPGIGGIVACAILSELGDLRRFGNFRQLAAYVGLMPSIYQSGDTLRSQGLSPRGNGIIRSYFVEASWQALRFDPVMQTYYRTHAGKNSKAILVKIARKLLSRTLAVIKTETPYQIGVVS

SEQ ID NO: 307657 - protein, 431 aa, unidentified
MKLPKHLEHINRYAAGIDIGSKSHFVAVPEGVDETPVREFSTFTADLERLAEWLKTCGIQTVAMESTGVYWIPVFEILEERGFEIKLVNARHVKNVPGRKSDVLDCQWLQQLHTYGLLQGAFRPADEVLTLRGYVRQRSMLVHSAASYIQRMQKALTQMNLQLHNVVTDITGTTGMRIIKAILSGEKNPETLAGMRDPRCKNSAAIIALSLKGNYRPEHIFSLRQALELYEFYQTKIAEADQQILDQLKHFDDANTTPPVDITDALIRMSGVDLTHIDGISTTTALKILSEIGTDMSRFKSSKHFASWLGLSPASKISGGKILSSATKPSANKAAAALRMAAFTLIHSKSALGAYLRRQKARLGTPKAITATAHKMARLIYTMLKKGTAYVDLGQDYYETRYRSRVLQNLKRKAQEMGFELVAINSEKAFV

SEQ ID NO: 307658 - protein, 359 aa, unidentified
MLTQSNKIDFNGQHFYVGLDVHLKSWKVSIMTEKLTLKTFSQDPKPELLHHYLVKNFPNGIYHSAYEAGFCGYWIHNKLTALGIDSIVVNPADIPTTDKEKVNKTDKRDSKKIARSLRNGDLKGIHVSSLKTLEDRCLVRMRRTLAKDLSRNKNRIKSFLYFHGIEMPEAFNKSATHWSKRFMNWLRSIEFTESSAKKSLSLLINESQHLRLTMLDAIRGIRELAQSEEYCNLVKLLRTIPGIGTLTAMIILTEIETISRFSGFDQLCSFIGLIPSTNSSGEKEITGEITHRGNNFLMSIIIESAWIASRWDLALNKSFHDYCKRMEPNKAIVRIARKLLNRIRFVLKNNQPYVCSVIK

SEQ ID NO: 307659 - protein, 484 aa, unidentified
MAKRKMSTFERLQGGKWNRAQRKELQLRLNAADPGLEVVHPDAAGIDVGNESHFVAVPAGRDPHPVQEFGSWTADLHRMAQWLKSCDIRTVAMQSTGVYWIALQEVLEEHEIEVYLVNARGTKNLPGRKSDVQECQWLMKLHTYGLLRNSFRPPEEIRAVRTIWRLRDRLVQDAGRAIQQIQKALTTMNIRLANAITDVSGVTGMAIIRAILRGERDPRVLAKLRDARVKASEEEVARCLEGHWRDEGVFELEQVVECYDFYQCRIAACDQQLKRYMAALPDREVASEPVVASSPERPQGRKKAKKRRAKNSKNQPTSFDIEAELRRSFGVDLTRIDGIKAMTAQVILSELGPDLSAFRSEGNFASWLELTPRRDITGGKVIKQKARKSNNRVANALRMAAESLSDSDSYLGARYRRLRGRMEGEKAIKAMAHYLARLVYRLVTKGEEYVDRGAAYYERKRADRDLTYLKRKAAELGLKLVSAA

SEQ ID NO: 307660 - protein, 346 aa, unidentified
MDNIGIDLHKRSSQICTLTAGGELFERRIETTRERFAVALGDRPRARILIEASTESEWAARCLEHLGHEVIVADPNYAPMYGQRSRKVKTDRRDARALAEACRLGAFRPAHRTSDAQRHVRTQVVVREALVQTRSRYISLVGALLRREGIHLGSGGAAAFPARVARLPLPEALQQEIAPLQVMLKILNTRIQCADAQLENLVASDPRAQRLCTVPGVGPVTAATFVATVDRVERFAGAHQLEAYLGLVPRERSSGEKQCRGRITKAGNGRARWLLVEAAWSILRYKKSETLALRQWADRIAVRRGKFRAAVALARRLAGILYAMLRDSTVYQPERLSSGAERKPAA

SEQ ID NO: 307661 - protein, 318 aa, unidentified
MDEAEKPVLRRQLRRGEVAKFFKKLAPTRVALEACGAAHHWARVLRGLGHEVVLIPPQYVKPYVSRGKNDAIDAAAICEAMSRPKTRYVPIKSTEQQAALMLLKVRDLLVKQRTMLINAIRGHAAEFGVTAAKGPERVAALLECVAAAEAGVPALAREMLNLLADQLAVLEAKLKAVERRLMAWHRQDQASQCLATIPGVGPISGVSFTLKVPDPKAFRSGRHFAAWIGITPRENSTGGRARPGKISRQGDETLRRLLVLGATAVIQQARPGRASPWLLELLARKPKKLAAVALANKMARIIWAVMVSGEVYRQPQEA

SEQ ID NO: 307662 - protein, 418 aa, unidentified
MTKLTFAPVPAAAAVDYDSTVVVVVEISERSWVVGAQIPGVDRSRKPKRTIAPSAAVLFEVLDQYRRRAAEAGYQVTREIVAYEAGYSGFWLARALRERGAECYVIHPSSVPVSRPLRRAKTDPIDVDLLLRTLLAWLRGEPRACSMVPIPSLSDEDARQAVREREELVGRRTALTNQLKSLLATQGVTGYEPRKAGRRERLADLRCADGTPLPAHLEARLGRLLDQLDLVERQIGVLEAERDAVVRRVALARKAAATDAASKDAAEPDDTASRPAEPVAPASPEAMIADLVKVKGVGVQSATLLVREVFVRPVGSGRALGSYAGLTGTPYNSGGQEREQGISKAGNRRVRAAMVELAWLWPRFQPGSALARWYAERTRGAKGRMRKILIVALARKLLVALWRYATQGVVPAGAEVAA

SEQ ID NO: 307663 - protein, 336 aa, unidentified
MGEIIIIGLDLAKSVFQVHSVDEAGRVVLRRQIKRAQLLAFFADLSPCLVGMEACSGAHFWARELGKLGHDARLMPPSYVKPYVKRGKTDAADAEAICEAVARPNMRFVPVKTEEQQSVLMMHRARDFLVRQLTQVSNALRAHLGEFGFVVPKGVQNIERLLTLAGAGNLPANALNSIRLLAEQFRDTKVKIEDVTAEISSASDTDSTARRLKTIPGIGPITSSVLAATLPDASGFKTARDLAAWLGLTPKPHSSGGKERLGKISKMGNRYIRRLLYLGAMGVIAARRRRPAGDDWLWQLLERKPVKLVAIALASRNARTVWALLKSGESYQVARA

SEQ ID NO: 307664 - protein, 404 aa, unidentified
MIPPSEIRVSVDVGCQRHHVAIGLSDGELLDEFEIAHQRQGFDEFFARIEGHRRRYGGEVSVAMEGYNGYARPLDSLVLAQAYRLFNINNLKLARFKEIFPGAAKSDRLDARRGLELFQLRDHLPLAKEVLQEVAPTPKVNAVLKRLTRRRRALVDEKARVLSRLQSDLQAVCPELLAMTRDAENLWFLHFLTYADTLTKLPRLRQSTLLKIPAIGRKYATVIQRWQRKAHFSHEVEWVGPMILEDAKRVLELRGKVKTLEAECMKLLEASEIATQVDTIPGFGLICSGELAGEIGTIERFHSEPSLALYLGMANLENSSGKQKGSKAPKHVNTRAKAAMMTAVDKHRKCVPESQRYYEKKRHEGKTHNQAIRALGRHLCRILFKMLTHNRPYEIRSSQTHSAS

SEQ ID NO: 307665 - protein, 342 aa, unidentified
MKLSTVGIDLAKNVFAIHGLDEEERVVVKRTLRRSQVLAFFGKLERCVIGMEACASAHYWGRELMGLGHEVRLMPAAYVKAYVKRGKTDAADAEAICEAMTRPSMRFVPVKSEEQQSLLSLHRVRDLLVRQRTQALNVLRSLCAEFGIAAAKGKMGFADLAALMEDKSDLRLPDEARLALQPLADHLEQVSRKIAEFDRQIAGRTRHEDAGKRLQTIPGMGPITASAFIATLGDPKRFAKARHLAAWIGLTPKAHCSGGKQKLGAISKQGDSYLRRLLVQGASSVVRAARNPRSRASAWLKTILAKRPAKVAIVALANKMARIAWAILVKGGVYKPAQTGAA

SEQ ID NO: 307666 - protein, 408 aa, unidentified
MNPLFVGIDVSSKNNVAYLMKPDGSKHSSFSVQNNLGGAKLLSERIVSALGSMQLERVVIGLEATSIYGDSLVYALREDGRLGRFQRKIHVLNPKQVRKFKEAYSDLPKNDWVDAFVIADHLRFGRINREVYMDDYRYKALQTLTRARFDVIQNLTREKQRFANYLFLKCSGMAQDKDIQNTSATTIALMEHFETVDDLANADLEELTAFITETGRGKFADPDATAKAVRAAAKGSYRLPKTVNDNVNQAMAVSIASMRALKGQVKVLDKAIEQQFEIIPNTLTSIPGIGKVYSAGIIAEIGDIHRFDSQASVAKYAGLVWNRSQSGDFEAEHSRMIKSGNRYLRYYLLEAANSVRRCDSEFRRYYDLKFKEVNKYQHKRALALTARKLVRLVFRLLKDNRLYIPPEG

SEQ ID NO: 307667 - protein, 399 aa, unidentified
MFCGIDVGKTSNHIVALDRHGDKPLINRKVPQEEAEIRAALEEAGDFGLALVIVDQFGAFGRLVVGVVKSMDIPVAHMSPRRFRQVAETYGEDKFDEKDAYILADASRTTPRNIEFVGNRAESMAEIKVLSSRRDDIVEERTRCYNRLHDFIHQVSPPLEELFSKRKLHNDLEIRLIARYGGPIGFRQAGRARASTWAAELKYHCVDGPKKVEQVFDVLDRQTVMLPGAAVIEEQIRSIASRIIELLAEEKRLNLMIEQRAKMIPEVDLLQSIPGVGPVYAALIAVEIGDIGRFRDSNHLASYAGVAPRKEESGTSVHKRRKRKGGNRRLKNALMQSSQRSVQCDPLARAYYERKRAEGKKHLQALRALARHRVTVIFAMLNEGTFYEPPVEVDENGRG

SEQ ID NO: 307668 - protein, 342 aa, unidentified
MTITIGIDPHKGSHTAVAIDSNEHVLDEIRVRSCSTQTARLRDWADRFEGRTWAVESAHGLGYLLAQQLVAAGEDVVDVPPVRASRVRVLGSGKSQKNDPNDARSIAIAALRADDLTAVCADDHARVLKLLSKRHRDLGRLKNKASCRLHALLLEMVPGGAGFRITTVTRINTVIDSFEPADAMGRQRQDIARDLAGDIDRYNDLLDTSKQRIQTAVAASGTSLTTILGVGPITAAMIIGQAGNIDRFNSKHHFASYNATAPVEASSGSKVRHRLNQRGNRQLNWALHVIAISQLRHDTAGRQYFDRKVAEGKTTKEAIRSLKRRLSDVVYRHLVADASQQR

SEQ ID NO: 307669 - protein, 402 aa, unidentified
MNAVGIDVSKGKSTVAVLRPFGEVVASPFDVAHTGSDLTALADFLKKLRGETKVVMEATGNYFEPIARYLHEQKIFVSVVNPVLISDFGGNTLRKPKTDKKDSLKIASYALSYWVDLKEYVPQKDLRKSLKLLNRQYQHASKLKTMMNNNLISLLDLTYPGINKLFTSPPRDSDGHEKWVDFVLSFPHCDMFSKLTIKAFSRKYKMWCNNNSYHFTETACKKIYDFSKDCISGVPSEESTVFAVIQAATMLNSATEYCHAIQLEMNRAAAQLPEYDTVMSMYGVGKAVGPQLIAEIGDPRRFHSRKAITAYFGYDSEDDDSGQKISKTNPMTKKGSGALRRTIFIIMQVLLQTKPVDNPVYDFLIKKQSEGKHYYSYMNAAANKFLRIYYARVKEVLIAAEP

SEQ ID NO: 307670 - protein, 344 aa, unidentified
MHIASIGIDLGKTTFHLVALGERNKILLRRKFSRSQLLAYTANLPASLIGLEACTGSHFMGTALREQGHQVRLIPAQFVKPYRKSNKNDFIDAEAIAEAVTKQNMRFVQIKTQEQLDWQAMHRVRDRLVQRRTALINEIRGFLLERGITFPAQPIHLRKNLPTVVEDAEQNLSPRLRWLLARLWQEWKQTESEIKAITDELERISKEDARCQRLLQIPGFGPLVSTATVAAIGNGAAFRRGRDFAAWVGVVPRQYSTGGKQKLFGISKRGNIYLRRMLIHGARAVLFRIKYDSGGFGQWVHRLAQRAPRNKVVVAIANKLARMAWSVLSSGKQYRHQPLQPAAA

SEQ ID NO: 307671 - protein, 343 aa, unidentified
MQTVTTVGFDIAKSVFQVHGVDVAGRVVIRRQLKRRQVIAFFQKLPSCLVGIEACASSHYWSRELQALGHNVRLMPPAYVRPYVKRQKNDMADAEAICEAVTRANMRFVPIKTAEQQSGLMLHRTRHLYMRQQTSVINAIRAHLAEFGIVAPVGRRGVEELLRVVADPRDKRLPEVVRTCLAALGSQLLSLKKQILDFDRMIMAWHRSNQTSKRLNCIPGVGPLLSTALVASVADPKTFRSGRNFSAWIGLVPKQNSSGGRDKLGSISKQGDRYLRGLFVAGAFAVIRYAKIHGTKHRPWLTALLARRHTKVAAIALANKLARMAWAMMATGERYNYPASLKV

SEQ ID NO: 307672 - protein, 438 aa, unidentified
MSNKVIFNLDELFISVGIDVGADFSWMSIALPNQQFVGKPYKILHNSIDSLTTAVSKIKEAEELYSLESRIFLESTGIYHYPLFCYLRDKGFNCSVINPIITKNSTNINIRKVHNDRFDSKKAALVGLKPDLKVSLMPSDLALNCRNLCREYYDLMDNRSAYVNKLQGELRMAFPQYLGIFSKVTINTSLTLLETYTSPSAFLKADKQEIIDIIKSTARFGLTYAQNKYNAIIQAATDANQFGYIIDSNIKRIRLYISFIRKYDEEINDILESLHKLVDSNEDTKFVKQVHLIETFKGAGFLSAATIMGEIGDFSAFSKPKQLFAYFGLDPAVKQSGKFEGTKVQMSKRGSSIARRVIHTLALQSISISRNGKAKNPVLREYYLQKCDSKPKLVAMGAVSHKVCNMIFAILRDNKPFEIITPQEHIKQYNAAKCDIAA

SEQ ID NO: 307673 - protein, 465 aa, unidentified
MTTAKLWRNRKERKDWARRLRSEDPGLEVVHPHAAGIDVGNSAHYVAVRPDRDPEPVRRFECFTADLYRLAEWLESCGVKTVAMQSTGVYWIPLYEILEDRGFEVYLVNARHTKNLPGRKSDVQESQWLLKLHTYGLLNNSFQPPAEIRVLRTYWRQRAEHVSGAATCIQRMQKALTQMNLQLANVISDLSGVTGQAIVRAIVAGERNPQKLAELSDPRIEASREEVAKSLEGNWRPELVFVLRQEVEMYDAYQRRIAECDQQLQKHLASFADTELPQSPKAESKEKRAKSTKNAPRFDLSSELKRITGVDLTRIDGIDVMVAQTLLSEVGMDMSRWNTEAHFSSWLGLCPDNRISGDKLLGKGTRHVVNRAATALRLAARNLIRSRSYLGAQYRRLRTKLGAPKAITAMAHRLARLVYRMLKYGQQYVDKGTEYYENRYRQPQIHLLQKNAAKLGLQITVAAQS

SEQ ID NO: 307674 - protein, 346 aa, unidentified
MLIIGCDFHPGVQQISFVDRETGEYGQMRLDHKKGEAERYYRSLAGRSVRVGVEATGRMRWFERLLEELGFELWVADPRKVRAAAAHQAKTDKKDAELLLRLLLEDRFPRLWIPSAEQREARQLVLHRHRLVQTRTRAKNQLQALASNEGLRRRVWSQAGQAELKKLALSPWGQVRRQDWLELLAELNQRIDPLDEALVKQAQQRPEIQLLMTHRGVGPVVATAFVVTLGDPRRFASSKQVAAYLGLVPQENSSGQGRQRLGHITKQGNNLLRGLLVEAAHVAVRWEPEWSRKYARLAIKKNRSIAAVAMARCLAVRLWWMWKLGLSYEQMKAQKQESHSHAELLG

SEQ ID NO: 307675 - protein, 331 aa, unidentified
MGNVTTVGIDLAKNVFSLHGVDADGAVVLRKTVSRARLMEVVVQQPACLIGLEACSGAHEWARRFQELGHTVKLMAPRFVAPYRKNGKNDGNDAEAICEAVSRPSMRFVPIKTLEQQAVLCLHRVRQGFVEERTATINRLRGLLAEFGFVLPQKAGEVRRRATEWLEQMPPRAAGAIRDLREHLRVLDERVKEYERSIEAHARDHEQAKLVQQRLGIGPMSASAIVASVGDMREFKNGRQFSAWLGLVPRQHSTGGKQRLGHITGRGDPYLRTLLVMGARSVLQRASSQSDPLSRWALAVRERRGYHRACIAVAAKNARVIWAMLNQHAAA

SEQ ID NO: 307676 - protein, 370 aa, unidentified
MNRLFVGMDVHKEKIVVVGLPEEGNHPLMCEEFGGHTLSRVVKRLQRLAKTYRIAACYEAGPCGYGLARALLQAGMECRVAAPSLIPRRPGDRIKTDGRDARELALALRANTLSFVRIPTTEEEQVRGLIRCREDIAKEVRRIKQVIAHWLLLHGHRVPPGIKSWTPAHRRWMRELELSSLDRTVLDHYLDVAHLLGERLQLIEDQVVALADTEGFRNRVARLQAFKGFSKLSAMRVIAEVMEFARFPKATSFMKFTGLVPSEHSSSNRIRRGRITKAGNSHLRHVLVEAVQRAKSAARPGRSLSQRLAAVCGPSRQVALSALTRLHHTFWRLTRRGVSAGKVKVALARELAGFVWAMMTLPETPDAAAA

SEQ ID NO: 307677 - protein, 457 aa, unidentified
MGVEKQGARLSLECIEPNAAGIDVGARSIYVAVGAEREAEPVRCFATFTEDLRAMAAWLKQCGITTIAMESTGVYWIPVYEVLEDAGFKVCLVNSHHVKHVPGRKSDVSDCQWLQYLHSVGLLGASFRPEREICALRALSRHRAGLVEVAAIHVQHMQKALTQMNLQIHHVLSDITGMSGLAVVDAILAGQRDPQQLAGLVQSRVHADRETVSKSLVGNYRAEHLFTLGQSLEAYRQYQKMLVDCDREMEQYMRQLPGKGTDQGPGASSSSPHGGRGKRRKNQFHFDMGKELYRVLGTDLTLVPGLSALTVHTLVAEAGPDLSRFANAAAFTSWLALCPGSKKSGGKVLSSKTRKSNSRLSLALRLAAQTLHRSQSYLGAFYRRLRSRLGAPQAITATAHKLARIIYHLVTTRTAYDESVFRNEEQKQALRSQHRLQKQAKSLGFQLVPISHQEVVH

SEQ ID NO: 307678 - protein, 318 aa, unidentified
MGSVGIFVGIDVAKAQLDVAIRPSGEYFTAPHDDPGVSGVVQRLCALQPTLVVLEATGGFELDVASALGAAGVPTAVVNPRQVRDFARSTGLLAKTDRLDAQVLAHFGEALRPAARSLPDAQAQELSAVLLRRRQLLEMLVAEKNRLPTATRRIRPQLQHHIEWLQQQVADLDRDLGALIRSSPLWRAKDDLLRSVPGVGPVLATTLLASLPELGTLNRQQIAALVGVAPLNRDSGTWRGRRTVWGGRAHVRAVLYMSTLVAVRHNPRLRSFYARLRAAGKVPKVALTACMRKLLTILNAILKHQTPWALPSDFGHPS

SEQ ID NO: 307679 - protein, 359 aa, unidentified
MTEDARDRRVTIGVDTHLDVHVAVALDERGVRLREIHVPTTLAGYRQLQRWAVGLGSVEAFGIEGTGSYGAGLARFLRELGQRVVEVNRPDRATRHRLGKSDPIDAEMAARAILSGVATGTPKAGDGSVEMIRMLKIARDSAVKARTQSLNQIRALLVTAPAGLRECLTGLTVGQLLDRCTAFRPGPLSSPTAVARYSLRLLARRNRRLRTEARQLAAEIRRQVASTAPDLLEAFGVGPDGAATFLLTAGDNPGRLRSEAAFAALCGASPIPASSGKTTRHRLNRGGDRQANAALHRVVVVRLRWHAPTQAYLARRLGDGKTKPEIMRCLKRYVAREIHGLLRPPGSAVGVLDHGVRAA

SEQ ID NO: 307680 - protein, 340 aa, unidentified
METRGKKHVWVGVDVSKETFFAAVDVLDEDGSKKPVNSLSAKEFELTGIGSGSFLKWLSESFAEYDFSIVMESTGCYSKKLKAFLHEKQNDLPISILNGRQSSNFVKSLETLHKTDKSDAQALARFGTERSPKSALPEDPVRESLKELSRERSALLKAKAALENRSDSLFDAFTRDINDRAIAALNLQVSAIEKELERCIKANAEMRHEAELMKTVPGVASTSAYGFLAELGSLKQYSSRKLSLMSGLLPRVFISGTSVNKTCLSKRGSARVRQLLYLDCMTAVNKIPELNSQYQNLVSRGKTKMTARCACMRKLLLIIRAVVVEDRPYEKNPKKITKTA

SEQ ID NO: 307681 - protein, 357 aa, unidentified
MTSMTSTLAVVTVGVDTHRDTHHAAVIDEVGRKIADASFVTTSSGYQALVEWARSHGQVQKVGVEGTGAYGAGLARHLHAAGLTVLEVDRPDRPDRRTRRHQGKNDPVDAYAAAAAVLAGTASGTPKTRDGRVEAIRTLRLARRSAVKGRTQAINQLRAAVLTGPVDLRETLRGLRRSELLDACRRLRPTSTPLAELDDPVLTVLSATKSTLRRLARRITALQEEINDIDADLAPLVAVTAPRLLEVYGVGTEVAAQLLTSAGDNPERLHSEAAFASLCGVAPLPASSGRTVRHRLNRGGDRHANYALHVIALVRLSWHEPTRAYARRRTAEGLSKAEIIRCLKRYIAREIHHALTT

SEQ ID NO: 307682 - protein, 339 aa, unidentified
MLIQSKTIVPELKSLFAGIDVGAEELILIIRKNGIPYKAQKFTNTPADRTRLVKKLANLPGIVVCLEATGVYHFDLSIALHDAGVALMVVNPKSSHNFAKVLMKNSKTDAVDAETLAQYAERMDFVAWTRPSDEKIALRSFARRIDALTRQKAAAKNNCHALTASQETPQAVLRDVKLAISQLEKRIARLGKEALDLIGKHADLERVFQLLTSVKGIAQTSAIALMGELLLLPPGLSHREWVKFAGLDPRAFDSGKSVHKQARLSKAGNRHIRSALYMPALSAKQHDPYVKAYFQHLVDNGKKPLQALCAVMRKLLHAIHGMLKYDTPFDNTRFYAIPA

SEQ ID NO: 307683 - protein, 387 aa, unidentified
MPQPNDLSRSLVALDQNSTIVAVIEMSQSSWLVAGMLPGIERQPRKKLEPSPERLLGLLHRWQDEAVRAGRTITRIALAFEAGRDGFWLARWLAARGIEAHVIHASSVAVSREHRRAKTDRLDTELLKRGFLGWLRGERGHCTMARVPTIAEEDAKRPNRERDCLVGERTRIVNRIKSTLARLGIRNFKPTLRKAAERLASVHTPEGMPLPPNTLAELQRDMARLSFVVSQIRQIEEARQKRLEQQPETGPHAMVRLLARIVGVGVETADMLVHEVLSRPMRDRRAVARYAGLTGSPDESGAQRREQGLARAGNARVRRGMIQLAWRFLLFQKESALALWYRARTADSRIGTRKTMIVALARKLIIALWRFVTTGETLEGVVLRPAS

SEQ ID NO: 307684 - protein, 338 aa, unidentified
MNTCYLGIDVALDHLDVATATTPALRKFIGRYANHLAGWQALAAAVEALVRQQPSEQAIQLIVEPTGGYEEGLVAFAYRQGWLVTLVSPLQVRRWAEGQGQRAKTDRQDALLLAWYGASMQPSPQDELDESAAQLDDLLRRRHDVEQLRQAEHNRLAQVQRKPHPHPAVQASLERTLRTLDDELQQLEAAIQQLLKTQADLQAQRKLLRSSPAIGEKLSLEMLVVCHRFYAYTRGLGTVKQFAAFLGLDPQPHESGKAKGHTFISHQGNARLRALLYCGALGGVRGHNPLRTFYQRLVADGKAKKLALVACARKVATWVWALFTSNTAFEASRFPMPS

SEQ ID NO: 307685 - protein, 347 aa, unidentified
MSFTNTFDYIKTFIGIDVSKQWLDCIIRPSGDWTRCENQPNGFDQLDRWLRERDVDPQTSVICMENTGVYDDRVLQALTEKGWICCLEKTTILEKVTPDHHRKDDRFDAAGLAEYAERYLDKLNVWEPVDEEIELLRQLFSERRRLVTQRAAVKSKCTQSLHHTQTSSVVAQSWQQQLTFYTEHIDQIESRIRTIIKGHQGMTTYDDLIKSIPGIGEVTSWLWLILFYGQTDLDYKKIASRFGYAPHSKRSGTSVKGKTRSSGHGASEVRQCLCMAVRSASTHCEKFKKYKQKKLDEDKIWPIVRNNLANKLIKTICAIWNSEQPYDPNHTSRFDRQKKAAQYLKKS

SEQ ID NO: 307686 - protein, 343 aa, unidentified
MKITIKWCFIVGIDISKLVLDICLFNRQSGRGIRYQVPNTMEGFRLLEQWLIDQKASKSKTLLISEHTGRYGELLLRWTTEAGWQHSVVKTTALQKVSWEHHRKTDELDADHLAEYGDRFSDRLQPAVAPKPAVGQIKRLQAERRKMVSQRAALKNKYTEADTHDADMSQLTSMWRQQIDLLSQHIDLLEQTMDQLISQDADLSQRYKSMRTAPGIGPIVGRFWLSLFAGEDQLDARKVSSRFGFAPHGRSSGSSVKSPARSTGYGNSEMRRLMHLAARSVANHKDHYHDYYEQKIAEGKHELVAINNIINKLIRLYCAMWNNRVKYDPDHILKTEHQWKKSA

SEQ ID NO: 307687 - protein, 343 aa, unidentified
MQYFAGIDVSLEKSSVCVVDGAGKIVREAKVASEPEALVGFFRGLETGVTRIGLEAGPLSQWLYAGLVAAGFEVVLLETRHVKAALSAMVIKTDRKDARGIAQLLRMGWFRPVHAKSPAAQEVRALLVARKLLQTKLLDVEFSIRGILRGFGLKMGEVSKGRFATRVRELAAGHAMLERITEPMLRAREALRTEYAKLHGEMLAIVKPDPVCRRLMTVPGVGALVAITFKSAVDNPGRFARSRVLGAHFGLTPRKYQSGETDVTGAISRVGDAMVRMALYEAAHIMLSRVTRFSSLKRWALNVARRRGLKRAKVALARKLATVLHRMWVDGTSFRWGKQAASV

SEQ ID NO: 307688 - protein, 315 aa, unidentified
MALQVAPVILGIDVSQDWLDICQHGSDQVERIENNPRAIRALLKRYGSAAMAVEATNIYHETLVALAHGQGFDVYLISGYQLKRYGESLGQRMRTDTVDAKLLARMLDREIDRLRPYVPRSPRQIQLRRLLKRRALLVRQCQQISQSLPGLGLDASLKSLQRRYREVIALIDKRLSHLANELGWRTELARLRSIPGVGPLTALALLEAWHAGSFTHRDPYIAFLGLDVKAKDSGKHTGKRKLTKQGNPETRRLLFNAAMAATREGRHFAPTYQALQSRGFTKIQALVIICRKLARLAFALLKNQSSFDPKACPAT

SEQ ID NO: 307689 - protein, 343 aa, unidentified
MQAVTTIGFDIAKSVFQVHGVDSVGQVIIRRQLKRRQVIAFFRKLPACLVGIEACASSHHWSRELQALGHNVRLMPPAYVRPYVKRQKNDMADAEAICEAVTRANMRFVPTKTAEQQSGLMLHRTRHLFMRQQTSVINAIRAHLAEFGIVAPVGRRGVEELLRVVADPRDKRLPEVVRACLAALGSQLLSLKKQILDFDRMIMAWHRSNQTSKRLNCIPGVGPLLSTALVASVPDPKTFRSGRNFSAWIGLVPKQNSSGGRDKLGSISKQGDRYLRGLFVAGAFAVIRYAKIHGTKHRPWLTALLARRHTKVAAIALANKLARMAWAMMATGERYNYPASLKV

SEQ ID NO: 307690 - protein, 461 aa, unidentified
MLVVAMPTSPSYWVEEERENAMAKVIIGVDPHKLSATIEVVDRRERLLGSGRFSTDQAGYTAMRTFAKAWPERVWAVEGSNGAGRPLAQRLLEAGEHVVDVPAKLAARVRLFDTGHNRKTDARDAHSIAVVAVRTRTLRVLAADGELEGLRMLCDRREELTRLRVQTVNRLQRLLAELIPGQGQKDLTALQAKAILATVRPRDIAGKTRRRIAVEELADLVAVEAKMKKATAELKTIVLARGSRLMDIHGVGPVVAARILADVGDITRFADRNRFASWTGTAPLDASSGEQNRHRLSRAGNRRMNHMLHIAAVTQIRLDTEGRAYYSRKRAAGKKPLEAMRCLKRRLSDVVYRQLVADAERAAMTASSGAAGTGPGGHCGATQESSAVDLPPHIDTSDQPLPGPAHPTLPATKPHANPCAASAPRRSRRRAGAVKVERPTGRTTLTAPSAGAHSAAPKPTS

SEQ ID NO: 307691 - protein, 359 aa, unidentified
MASKVKEKKINFKGKMVNIGVDMHKLSWRITALVEGEIVLAVNLAKPKYDSFKQLISRFEGNYVRVVYEAGPGGFDLYDKLTDDGIDCIVTPPSLIPTESGNKVKTDKKDSHKLARLLESNMLKKVWVLSPEERAHRQLVRTRRQIVNHRSDVMRQIKSLLLFHGIEVPFSSRQQWTGPFIKWLHEIDLGDEYLNASLKALVHLFDYLSVEKKRLTREVIELAKKDKYVSRVKLLKGIPGIGALSAMEILVEIQDMSRFETADELAAFLGLTPSQYSSGEHIRMGHITHMGNDRIRTTLIESSWILINKNPLMRKKYENIKYRRGGKRAIVAVARSLSACIRRMLLDQVPYEIDFRKAA

SEQ ID NO: 307692 - protein, 310 aa, unidentified
MTIASTTLGIDISQGALDVYVHPQGRYRRFANKEKGIAEIVELALELGSFVVLEATSPMDRALLKALGEAGVVHHRSNPRMAREFARSLGLLAKTDKVDARMLALYGASVELRPTLPVSEQRLYLQDLVARRDQLVEMRKQEKTRLKALPSPRLIQSLEAMIACLSAQIQAIEAEISAAVAQDRELARQAELLRSAPGIGAVTAGVLLANLPELGQVHRRAIASLVGLAPIACDSGKLRGRRRIWGGRKRVRDALYMAALTASRSALYRGGYQAMRAAGKPAKLALIAVARKLLVALNATMRDQVRFKSA

SEQ ID NO: 307693 - protein, 464 aa, unidentified
MTAGKILWRNRKERKEWARRLQSEDPGLEVVHPHAAGIDIGNASHYVAVRPDRDPEPVRRFECFTADLHRLADWLKSCGVKTVAMQSTGVYWIPLYEILEERGFQVYLVNARHTKNLPGRKSDVQESQWLLKLHTYGLLSNSFHPPAETRVLRTYWRQRGEHVAGGATCILRMQKALTQMNVQLANVISDISGLTGQTIIRTIVAGERDPLTLAALSDPRVHASQEEIAKSLEGNWRPELLFVLQQELDMYDIYQKRITECDQRLQEHLASLTHSLPVQPPAQKAKTKKPAAKNAPRFDLSSELQRVTGVDLTRIDGIDVMIAQTLLSEVGLDMSRWKTESHFVSWLGLCPDNRISGDKVLGRGTRRVVNRAATALRQAANTLIRSRSYLGAQYRRLRTKLGAPKAITAMAHRLARLVYRMLKYGQAYVDKGTEYYEERFRQQQIHLLPKKAAKLGLQVAEIQA

SEQ ID NO: 307694 - protein, 410 aa, unidentified
MEVFLERCAGLDVHQASVVCCVLIGTPGRKAQKLLRSFGTTTRDLEALRAWLAEHDVTHVGMESTGVYWKPVYAVLEGHVDLIVGNAHHIKNVPGRKTDVKDAEWIAQLVRHGLVASSFVPPPAIRDLRELVRHRRTLIETRTAIHNRVLKLLEGANIKLSGVASDVFGVSGMAMLEALAAGTNNASEMAGLARGRMRRKHAALEAALEGRMREPQCFLLAMQLRTLGTIDQDLDALDARIEAQLEPYQAQHRLLTQIPGVDWVTAASIIAEIGTDMDVFASARRLAAWAGVAPGNYESAGKPKGAGTRRGNVFLKSALFAAASAAVRTKGSYYRDKYNRLRARRGPVRAIMAIAHKLLIAAFHMLSTGEAFRDLGESYLDQVARKRSTTKLVQRLSNMGYDVMLVPKAA

SEQ ID NO: 307695 - protein, 359 aa, unidentified
MAIRIKRNQNNFKGKIVCIGIDMHKLSWRITALVEGEIVLAVTLAKPSYDSFKSHLTQFKGNCVRIVYEAGPGGFDLYDRLTADGIECMVTPPSLIPTESGSKVKTDKKDSLKLAKLLESNMLKRVWVLSPEERAHRQLVRTRRQIVNHRSDVMRQIKSLLLFHSVAVPFPSNQQWTGPFVRWLHELDLGNEYLDKSLQALVVLFDFLSAEKKRLTREVLALSRKAGYALRVRLLKTIPGIGALSAMEILVELDDIRRFQTADELAAYLGLTPSQYSSGEHIRMGHITHAGNQWVRTTLVESSWILIGKDPSMRRKYEEIKHRRGGKRAIVAIARILSGRIRRMLLDHVPYQIDFQKAA

SEQ ID NO: 307696 - protein, 396 aa, unidentified
MSKPQVIDDQEHERVFERVAAVDVAKKDGMACTRTPHPSRPGSRRSTVWTVPATVPAVRQLAGQLKADRIQEVTLESTSDYWRIWFYVLEAAGLDVQLVSARQARQLSGRPKTDRLDAMWLARLTEMGLLRPSFVPPAQIRALRQYTRARTHLTGDRTRCFQRLEKLLEDALIKVSPVVSTLATASAQDMIAAMIAGERDPQALAALARGRMKARHDALVAALDGMFDDHHGQIARLLLDQIAFCDARIARLTMLISEQLAVISDGWGVDADGTTGPVAGTSDDATVLSAVARLDEIPGISAELAAAIIAETGLDMTRFPAPGHLVSWAGLCPRTIQSGRAPGTARTRATPTCAAASARPPTAPPAPRPSSASATSASPAAAARPGPRSRSPVPSW

SEQ ID NO: 307697 - protein, 347 aa, unidentified
MNFYTQQHKHYCGIDLHARAMYVCILDQHGTKLVHKNLPTTPEAFLRIIAPYREDVVVGVECIFTWYWLADLCSKEGIAFVLGHALYMKAIHGGKAKNDKIDAHKIAVLLRGGMLPQAYVYPAEMRATRDLLRRRCHLVHKRAELLAHIHNTNSQYNLPEIGKKLAYKANREGVEEHFPDPSVRKTIEVDISLIDHYDKLLGEVELYITRSAKAHDVQTFARLQSVPGIGQILALVILYEIQAIARFPRVQDFVSYCRLVKCAKESGGKRLGTSGKKIGNVHLRWAFAEAAVLFLRHNQPGKEYFAKLEHKHGKAKALTVLAHKLGRAVYYMLTREHAFDLQRFVTA

SEQ ID NO: 307698 - protein, 423 aa, unidentified
MGGVSEVRDEVLYLRAAGVDVGKRFVVACVRVPNPARPGRWVVESERFETVPGAMRALAGWLRERAVEVVALEATGDYWRAVYYPLQDAGLNLVLVNPAHLKGVKGRKSDPSDAAFLARAAGSGMVMASFVPGRAVRELRDLTRRRTELTVERGREVQRLEKELEDSGLKLTSVLTDVVGVSARRILGALIAGERDPRVLAGLVHERSRGKIPLLAEALDGSFSEHHAYMCRHFLAQIDHLAAVIGELDERVAALVEGGGRGGDLERLETIPGIGRRAAEIIIAETGGDMSVFATPGHLASWIGVCPGRNESAGVERSSRTRHGNANLKRLLGTAAMAAVKAKDSYYGAYHKRIAARRGYRRALVAVMHKLVIAIWHILSARITHHDLGADYLARRDPQRAIRRIVKQANALGLTVRFDPIAA

SEQ ID NO: 307699 - protein, 299 aa, unidentified
MLAEVVDAVVGGDTHRDTHALELTAPSGATIATLMIGNDERGFAEAIAWVAEHAPGPRVVVGLEGTRSYGIGLARVLQAAGLTVVEIERPRRGERRRGKSDPIDAHLAALHALRLDADRLPTPRADGDREALRILLGARRELTTAKTRTINRLRALLLTGSDADRALSRGALSSDRLAAITRRRGGQHETREYAVRRAEARRIALAISGIDRELADNKWHLADLVTHLAPQLLAKRGVGPVSAAQAIVSWSHPGRCRNDAAYAALAGASPIPASSGRIVRHRLNRGGDRHLNRTLHDIL

SEQ ID NO: 307700 - protein, 385 aa, unidentified
MSSKAFIPRDYEVFAGLDVDKKSISVTFTNHQGFIRSLRVPYSAEHLVNHVRKHFPDQKVAFAYEAGPTGYGLYDGIVAQDYPCLIASPSMIPKAPGQRVKTNRLDSRGISENLRGGQLKSIHVPSVLYRELRHLTQLRDTFVSELVAMKQRIKSLLLMEGLEFPPAPAGSQWSFMVKAKLRKLPCSSTVRFKLDELLDGLEFNEKRVVKTTQQIRRFCQNDPELSQCIEYMMSVSGIGWIVASQLLARIGDWRELGNVRQLGAFLGLVPTEHSTGERTDRGSITHSGEPRLRSKLIQAAWSAIRKDGELREFFRSVCQSHARPLASRVAIVAVARKLTVLISVVLMEQRPYVVRKKVHSAPLTQEETVPQGTTRRLAVPGETNS

SEQ ID NO: 307701 - protein, 318 aa, unidentified
MMSKAGAERFIGIDVSKDVLEVGVRPEGEHWSVPNDEQEMPSLVRRLADLEPSLVVVEATGGLQTMLVAELAAAALPVTVVNPRQVRDFAKATGQLAKTDAIDALVLAHFGEALRPEVRMLKDEQTQELTALMTRRRQVVGMITAEKNRLATAPKGIRKEIRKHIEWLQGRLNAMNGQLDKAIKQSPVWREKDAIVRSSPGVGPILSISLLAGLPELGTLNRKKVAALVGVAPLNRDSGGYRGARSVWGGRGQVRAVLYMATVTAARTNPVIREFYERLIGSGKKPKVALTACMRKLLTILNAMMRDGTRWGERKVTA

SEQ ID NO: 307702 - protein, 372 aa, unidentified
MDERIKFFVGLDAHKDSTSMAACDTGREPARFVGTIGPDVRVLLKLLAKAGDPTQVSVVYEAGPTGYGLYRELCRRGYRCEIVAPSLIPRRPGERVKNDRRDCARLAELSRAGELKPIWVPDEAHEAMRNLWRAREDAVSMRLKARQQLKAFLLRQARRYPGKTSWTKTHERWIASQRFDHDGDRVALAEYLLAVQSAEQRVQRLTTALTEAVQGWRFEPVVAALRALRGIDTVSAIGLVAEIGDIGRFSTARQLMGYLGLVPSEHSSGNSIHRGSITKTGNAHARRLLTEAAWSYRFPARLSRQLRERSAALPDAVRSHAWKAQQRLCSRFARLSSRGVQVNKVCVAVARELAGFVWAIAHQALPAAEALH

SEQ ID NO: 307703 - protein, 520 aa, unidentified
MVTARTTRRPRRRPPTATTGKLRGVLHPRVQQVGPEHFGIVCFDCAKARSKFLLADFYGRILIPPTTVAHNRPDLDAAVAQIRQAFTISQLRDGLIAIERTGRYHRLVQRTFAAAGFETRILHPFVTKQYRQPVDPGNKTDDTDLAAIHRATVTGCALLEATRDEAWTTLQLLIRHRRDLVEKGAALNCQIRDHLEAALPGYAACFDKLWDSPIPWHLLRHFPTAAQLRAAGVTTLCHSLRQAGIRFQQRTVQTVLDWADQAAPGDVAASQHHRIALTLFDDRHRKTLEIQALERDIASRLVQTPYVLLLSFPGINVVSAADFAGEMGPIEHYANPRSITGRAGLRPARYQSDQVDRANGPLVRNCNRALRAAILRIADNLILCNHHFNVLATQWAAQGKDPRDRHVRVGLRFCRIAFQMVAGRQVFRHPCIQGRHYILDKLSAFHTAHDTGVAELMRDLQAAVDQIPAREHAPEAGPLAEELRRIQDGHRRGPQLLGDILPIVLARLGVGVVQSTESGE

SEQ ID NO: 307704 - protein, 460 aa, unidentified
MRLTLGIDIACRAAHRASLADARGEFLWVAKAFRTSVADLEALWAAMPDEAEVTVIMEPTRNAWVPLAAWFRRRGARVVLVPPERSADLRAYYAKHTKSDQLDSRLLARLPLLHPEGLHPEHGLGPGEPLRRATKLHSTLVHRRSQALARLDALLEIMGPGWHAALGGDLAAMTVLRFLAAGYADPDVVRRLGRARLTRFLYRHSRGMWGEARAGDLLAVAAETAALWDDGLDHPALAEDIALEARMALTLSAEIKELDERIIVLVDEADPSGIVRSAPGVGPITGAAILGRLGDPARFSSLAGVRAFSGLVPRLDASGLSGQHGGPTKRGDAVLREALYMAADHARRIDPTLAARYHRLMTESGKHHVSALCHIAPTLLTRIVACWRQGERYVLRDVDGRIVDVAEARTIIAARYTVPATVRARGRTVGGNRTGRRSEGSRSAPSPSPSLAHASTVVMA

SEQ ID NO: 307705 - protein, 341 aa, unidentified
MAKNVYFVGLDIAADDFVASIYQSPKQSVITKEGIKNTFDGFNVFIPWLKEHGLSKTNCIICMEATGVYNEAIAHYLVSRGFRVSVEPPLKVKRAFDPVGHKTDPVDSKQIAEYAYRYSDELRFWQPKDEIIEKIKHLLTAREQFTKQSTAIKNAMKSYEKHIVQVPLIVKAHRQTLREIKKHITEIDKELDRIIRQNPSISNMNNQLKSIPGFGLLLSASLITLTGAFSDISHYKTLAAFLGICPYQHQSGKSIYRQPHMRSFGPAYPRKLLTLAARSVATHNDVFKKYYARKLAEGKAKQLVLNNISNKLIKLACALIKNNSRYTVTYRSINPMFLNIS

SEQ ID NO: 307706 - protein, 345 aa, unidentified
MTTFKINKNDHESKLSLQAGIDVGSEELILVVRKNSKPFDPQKFTNTPADRAQLVKKLTKLPGIIVCMEATGIYHFDLAIALHDAGVLLMVVNPKASHNFAKVLMKNSKTDAVDANTLAEYAERMDFVAWTRPSDEKIALRCFSRRINSLTGQKAAAKNHLHALTATQETPKAVLRDAKLAITQLQKRIDRLTAEALVLIAKYPELTRILQLLIGIKGIAETSAIALMGELLLLPPDLSHREWVKFAGLDPKAFDSGKSIHKKTRVSKAGNRYIRAALYMPALSAHQHDPHVRAYFQHLVVTNGKEKMQALCAVMRKLLHAIHGMLKYDKPFDNTRFYAIPASAG

SEQ ID NO: 307707 - protein, 389 aa, unidentified
MIYVGIDVAKDKHDCFITNSDGEVLVNHLTFPNTLKGFNTFVTTVTSFSDGSEIIKVGLEATGHYSNNILDFLYSHGFTVYVLNPLSTNLFRKGQSLRKTKTDKSDAKMIASMLLTQNLKPYSPLSYHTSELKSLSRHRFRLVHERSKFKQSFSRMIQLVFPELPSIVWSISQNSMLYLLLELPGANAIATCHLTKLTSLLQKHSRGKYTKQKAMEIRTMARDSIGSESPAKAFELQQVIRTLLFLQEEVKQLDKQLKKMVVVLQSPILSIPGISYITAAMILSEIGAISNFDSPAKLLAFAGLEPSTYQSGNFTATHATMVKRGSKYLRWAILTSTRLVCMRDETFNEYKDKKLAEGKHYFVALSHTSKKLVRVIFHLLKTNQSYCPQ

SEQ ID NO: 307708 - protein, 341 aa, unidentified
MTIKRIGLDLAKQLFQLHGVDQQDQVVLRKQLRRNQMLAYFSNLPPCLIGIEACSSAHYWARELQKLGHTVKLMAPQFVKPYVKSNKNDAKDAEAICEAVSRPTMRFVAIKTIEQQDIQALHRIRTELVHQRTAKVNQIRGFLAEYGMVVERSVEKLRKALPMLLEDGENGLSFYFRALLQGLQQDLITLNDRVSDLDKKIKLLASSNTSANRLQQIPGIGPVTATALVSAVGDGKQFKRGRDLSAWLGLTPRQHSSGGKECLLGISKRGDSYLRTLLIHGARAVLKVAGHKDDPRSRWLQNLCTRRNKNIAAVALANKNARIVWALLTQETDFIPEGKPA

SEQ ID NO: 307709 - protein, 352 aa, unidentified
MRKYYVGLDVHKVSIAVAVLDAHGKLVTRTVIETSSEAVRDFFRNLRGEVHLTFEEGNHAAWLYDIVEPLVKRVVACNPKHNRIEGSRSDRVDALKLAELLRLGALKPVYHGEHGTRTLKHLMRSYECLVKDITRVKNRLKAVYNSQAIKQRGRELYHASKRESWLQKLPNPGQRTRAELFFQQLDELKVIKRAAQKAMVAESKRHPAYEVLSTVAELGPVRIAQIIPTVETPWRFRSKRPFWNYSGLAVVTRSTADHEFEDGRVRKRKQQIIQTRGLNPDYNRRLKSIFKGAAMHASHCGAYREYYEGLLKTGMRAEMARLAVARKLSATVLAVWKSGESFDARRILKKAV

SEQ ID NO: 307710 - protein, 353 aa, unidentified
MKCDKYMGMDVHQAMTVVVVLDADGKVILETMVPTEAAAIIRLVQGLGRPLRLTFEETTQAAWLYEVIRAYVTEVIVCDPRRNKLLEDGSKADKVDARKLAELLRAGLLRSVYHGHEATRNLKELVRAYETFSIDTQRTMARIKAIYRARGIRTPGRGVYQPKQRERWLELLTDAGIRQRAAWLYEQLEQLQPLRREAKQAMLAESRRHRAVSLLRTIPQMGPIRCAFIVATVDTPHRFRTKRQFWSYVGLAVVTHMSSEYEMTAGRVVRRRKPVATRGLNHNCNRRLKEVFISAATGGSLHEPYKPFLERLKQNGMRAEMARLTLARKIAAVALIVWKKGVAFDPKKLNCTT

SEQ ID NO: 307711 - protein, 410 aa, unidentified
MEVLHPRCCGLDVHKQTVVACVRLVIDGKTVKEVRTFSTTTASLIALSEWLTETKCTHVAMEATGVYWKPVWHILSDGGFELVLANAAHIKNVPGRKSDVKDADWITDLLAHGLIRPSFVPDPPTQEMRTFLRTRKQFVHEKSSHVLRIQKTLEDANIKLDSAITDIIGLSGRKMIEALIAGETDPAKLAQLADRRVKASQETLRQALRGRVTKSHRFLLRLHLGHIDALDAAIAELDREVEASIAPFRTAVEQVTTTPGVKSLAARTILAEIGTDMSRFPTSGHLISWACICPRSDESAGKRRSTRIRKGSPWLKSTLVQCAWAATRKKDSYLQAQYYRIRARRGPKKAILAVAASILTSIYHMLKDGTMYQDLGPNHFDAHAKERQKNRLIKRLADLGYAVELAPLTH

SEQ ID NO: 307712 - protein, 343 aa, unidentified
MGEVSTIGLDIAKSVFQIHGVDAAGAVVIRKRITRAKLLEFFAALPPCLVGIEACPTAHYWSRRLQELGHTVRLLPPSYVKAYLKRSKNDANDAAAICEAVTRPSMRFVATKSEQQQSDLMLHRSRQLLVCQRTMLSNAIRGHLAELGIISAKGRNGTAELLEIIADEQDDRIPAAARFSLDVLARQYAVVRAEIVAIEKRIHAWHRSSEQSRRLEEIPGVGPIVATALLAEVGDWKTFASGRNLAAWIGLVPRQHSTGGKERLGRISKQGNRHLCWLLVAGAMAVIRYARQHGTKRLWLARLMDRRPIKVAAVALANKIARMAWAMMVRGERFKEPKLLPAA

SEQ ID NO: 307713 - protein, 415 aa, unidentified
MEIKRYANAKGGKKKGGEIKMALVSQELTTLSSPREKGAAGIDPARYSIQIALLSPFQEHYNITFPVCANTVEELENIVPKDIHVVAEGFGTTSRIFFLDLSQKGYTLWELNPALGKHLRILEKEAHTDSLDPRSIARAGLYFPDRLSPICLKEEREALTSLLRMRKEIVKELTADWNRLHALLSESYGYWYDKLKKKVHTKKGRAFFKKYPSINAFCQDKEKEESFSPSLTQEEKEGLLSQKPWASKIYLESLEWQIRFLLEKIELLEGKKRELGKKIEQYLKEDAEAQLLQSIPGVGPVSAATLLSEIKEIERFPNEGKLAAYCGLVPCLRESGKMKARGAKRKYYNRKLKGTFFNIAFTAIRVNPIARSYYEKKRREGKTHRKALLCLARQYVKIVYAVLRKKQKFNQGVLT

SEQ ID NO: 307714 - protein, 376 aa, unidentified
MKIVGCDLHTRYQQIALLDQETGELIERRLEHESGEARSFYAGLCGPVRVGIGATGHTRWFERLLGELGHELWIGDAAEIRATVVRKQKTDARDAAHLLDLLLTDRFPRIWRPTLEERDLRQLVWHRQKLVWMRNAVGNQLHALAMGEGLCRKQRLFSKKGRAELESLALGPWASYRRQELLRMLDELDRSLQRLDGAVQQQADQNPQAVRLMTHPGVGPVTSLAFVLTIGPVARFQRSKQVASYLGLNPREHSSGGRQRLGSISKQGNPMMRSLLVEAGHTAARLDAELRQDYQRLKLRRGSGVAKVAIARKLAVRMYWMLRSPASYAQPGSHARQPEGHPGGPVRHRWPDWAPCLPETVGEFEERIMVGSKVIG

SEQ ID NO: 307715 - protein, 343 aa, unidentified
MQTITTIGLDIAKSVFQVHGIDGDGNVVVRRQLKRRYVLTFFRKLPPCLIGIEACASSHYWSRELQALGHTVRLMPPAYVKPYVKRHKNDAADAEAICEAVTRRNMRFVPTKTPEQQSCLTLHRTRHLFIRQQTAIINSIRAHLAEFGIVAPVGRRGVEQLLKVVADANDTRLPEIARACVAALGTQLLALKAQILAFDRRIMAWHRSNETSKRLDAIPGVGPALATALVASVGDPKAFRSGRDFSAWIGLVPKQNSSGGKDKLGSISKQGDRYLRSLFTAGALAVIRYAKLHGTKHRPWLAALLARRPTKVAAIALANKIARMAWAMMTRGERYKEPVALAA

SEQ ID NO: 307716 - protein, 393 aa, unidentified
MSLDHHFDEPTAIRTNLDAIFVSLELSRSTWLITLVSPGGGEKMSKHGVSAGNVAALLTRLSELKQKAFARTGKSFHVVAIQEAGLDGFWIHRVLQSEGVESHVVDPASIATSRRRRRAKTDKIDGEALVRALLAYKRGEPRVCAMVRAPTPEEEDRRRLCRERKTLTNERVQHVNRIKGLLFAQGISDYQPLRRNRHQRLDELKTGDARPLPPHVKAQISRELDRLELLLEQIKAVEIERDALISAMKPGGMNADAVRSPPAMLTKLNGIGPEFAAVLWSEGLYRSFANRRQVAAYAGLAPTPWQSGSVRHEQGVSKAGNSRLRTTMLQLAWLWLRHQPQSALTLWFHERVRRNGARLRKTTIVALARKLLVALWKYVNAGVVIDGAVTRAV

SEQ ID NO: 307717 - protein, 359 aa, unidentified
MQQGIMVGCDLHDGTMVLRVLGAGKKVLGGVYVTGPNGRQQMFEALKKESRKAGGVPIYLVYEASGLGFTLHDEAVKAGIQCFVLAPSKIEKSVKQRKNKTDAKDAEALLELVKCHVLAGKEMPVIWIPGMELRDDRERVRERLELGAEAARVKARIRSLLKRYELKVPEEAGKGWTKKAKAFLGKESQESTILGPGARAVLESLLRQMEVLEKEAEELEKGFEDLAQKPQYQKPAEKLMELKGVGLLTALVFLTEMGELSRFKNRRQVGSYVGLAPSVDESGESGDRKGHITRHGSARLRKVLCQAVWSSIRHRGKERDFYEKLVEKNPRKKKIAVVAAMRRLAVKMWHVGVEAKRAA

SEQ ID NO: 307718 - protein, 374 aa, unidentified
MLADELDYVVGVDTHRDQHALAIVDAHSGAVIAQTTTAANARGYIDAVRFADRHALGDRLWAVEGSGHYGAGLVRHLQRQGEQVHEVDRSSRGERRLRGKDDQLDAVRAARSPLAHEHRARPRAGEHQEALRLLLLARRTAVDTRRVALVQLRSVIVTAPEGLRDELRRLPLGELLNRCSRFRRSSSRTPAQLATILVLRTLARRIQTATDEAETLEREMLSHVRALVPELLDEPGIGPIVAAQLIVTWSHHDRIDSEACFARLAGVAPLPASSGQTTRHRLSRGGDRQLNRALHTIVLHRRQHDPATKDYIARRISEGKTSRDAVRLHKTLPRPTPLSRHAELDPTDLLTVIGASFLRRRGCSVPVKDAPTGA

SEQ ID NO: 307719 - protein, 413 aa, unidentified
MVLGIDVGSETHYARAFDYRGIEYSKKPFKFSNTEVGFATFKEWILDLKERHEKDKVVPGMEPTGHYWFNLGKFLQDNEMKPMLVNPHHVKKSKELDDNNPTKNDRKDPKVIAGLVREGRYMIPYLPDGVYADLRTASNIRFQLQAELTRIQNRISRWFNIYFPEYKTVYGKPDAKSGMLILKAAPLPEDILTLGIDGVNQIWRDAKLRAVGKARAKTLIEAAEHSIGSKEGTMSARMEIRMLLEDYESKNMRLQEVMVLIEELVKEIPMAEKLLEIKGVGIRTVSGFLAEVGDISRFNNPKELQKLAGLAVVENSSGKHKGKTTISRRGRKRLRYLLFEVAMSLVAKNPEFRELHNYYTTRRLNPLKKMQSLMAIAAKLIRVFYAMLTKGVDYDPKKMISDIKRPTVYLQAA

SEQ ID NO: 307720 - protein, 331 aa, unidentified
MNTATHPLTWVGVDVAKKKFDIFFERADGRVRHKVFANDRRGFAELLSWVQAHGLDLSQAGFCLEATGPYGLPLARALHEAGVVVALENPARIQAFARTLGVRAKTDKADAQLIARYAQQHTPRPWTPPSPEEERLRALVSRLDDLLAMRTMELARLEQLHDAAQPSIKNVLKALNDEIERLRAAIAQHIDNDPKRRRDAELLKSIPGIADETVSRVLAYLSEPLRRCEDVRQVVAHAGLDPKVRQSGQWTGSSPISKRGSPALRRALYMPALVAKRHNPILRAFAERLAAQGKRPKQIVVALMRKLVHLMWGILKSGRPFDPAMGLPGGG

SEQ ID NO: 307721 - protein, 402 aa, unidentified
MTITPAAEMDAVFGGVDSHADTIHVAVITDRGGHVADAEFPTTAAGYAAAIAFLNAHGTVTAVGVEGTSSYGLGFTRAARHAGLTVIEVNRPDKAERRRIGKSDPIDAYAAARAALSGRATVIPKDDTVSGIRALHNAARSAVKARTATLNQIAHILITAPDDIRVKYTALRGKTQVDAISRLRPTGDGPRVALLTALKTLARRVQALTAEHDTLTAALDTAATEHNPGLRAAFGVGPDTAAQLLVTAGGNPHRLRTEASFAALCGVAPVPASSGRTNRHRLSRGGDRGANSALYRIALVRMSSDARTREYVARQTAAGRTKKEIIRLLKRAIAREIFRYLTTPVSVPDVSDLRPARQAKNITLTTVAEHFGVWPAVISCIERGTRRDDDLAGAYRDWLTAA

SEQ ID NO: 307722 - protein, 375 aa, unidentified
MKKLTRFVGMDVHAETIAVAVAEGRGEVRSLGIIPNRPEAVRRLLKKLGGSQPLKVCYEAGPTGYALYWQLAALGVHCDVIAPTLVPTKAGDRIKTDRRDAEKLARSYRNGDLTPIWVPDARHEAIRDLVRAREAAKEDQLRAKHRLGKYLLRYGQRAPDGCRSWTAVWWQWVRGLQLPQVEQNTTLVELMLEVDHQAQRIDRFDAAIDRAVTEAPAQLRALVDALQALRGVAKVTAVTLATEFGTFSRFERAAQVMSYTGMVPSEHSSGSKTKRGAITKTGNSHLRRVLVEAAWHYRHRPRLCQRQKELQGSLAPKVATMAWTAQERLHRRFQALSFKSKPSAKIVTALARELAGFVWAIGVEVERNLATARAA

SEQ ID NO: 307723 - protein, 426 aa, unidentified
MAVVMIGVDPHKASHTAVAVNAAEQSLGQLRVRASAVQAERLLAWAHAWPERTWAVEGAGGLGHLLAQQLLSAGERVLDVPPELAARVRLLATGNINKNDPNDARSVAVAALRSADVRQARRDDHAAVLKVWSKRYRDLGRMRTQVACRLHQVLCELVPGGVPGEISAGQAVRLLASVTPAGAVEAARWELAAELTEDLRGLDARIRQTRTKAAAAVRAAGTCLTGLFGVGPIIAAAVIGDVRHVSRFGNRDRFAAYNGTAPIEVSSGGRKVYRLSRRGNRRLNHAIHMAAVTQIRYRHTKGRAYYDKKLAEGKTPKEALRALKRQISDAIFACLQQDARRAAAAAKSPGGQPGNHSATRAAGSHPEHRLFGQATPGPATHPTTPAAPVPAQLPSRASERLSPGPGAARPRSGARRASSTRPRASR

SEQ ID NO: 307724 - protein, 343 aa, unidentified
MEYYAGIDVSLESSSLCVVDATGRIVREAKVASEPETLTAWFNSLGFALSRIGLEAGPMSQWLYAAMKQAGLTVELLETRHVRNAFKIMPVKTDRKDARGIAQLMRLGWFRPVHCKSLPAQEIRSLLGARKLLQGKLHDIELSLRGTLRGFGLKIGKTTPKTFAGRVRSLVTNHPTLTLIAEALLRARAVLLGEFLNLDQKVHTLARHDPRARLLTTAPGVGSMVALTYAAAIDDPARFKSSKTVGALFGLTPKRYQSGETDVTGRISKIGDAAVRTALYEAANIILERPVKGGWLKAWALGVAKRAGMRKAKVALARKLAVVLHRMLVDGTPFRMDRVATTA

SEQ ID NO: 307725 - protein, 353 aa, unidentified
MTHATTTSFPRTIGMDLGTRRSSYCVVDPGGDRIREGSLKTERREVREFLESEPRSRLVIEASGPSHWIAELAESLGHEVIVSNPRDFRLIAESHRKTDRNDARILASFGQFRPELLRPIQLRGVKCQVARSTLAARSHLVAQRTELVNFVRAQVRNLGDRLPTCAAYAFHRRAADLIPAPLQDLIAPLLGLLERLHDAIKSYDKQIEHLCEHSFPETAALRQVSGVGPNTSLSFVATIEDPKRFPRSRDVGAYVGLVSKSRSSGQREPDLRISKRGDASLRRLLVNSAAYIVGPRGGDCDLRRFGERLQGRGGQAARGKARIAVARKLAVLLHRLWITSEVYDPHRHSACAA

SEQ ID NO: 307726 - protein, 596 aa, unidentified
MLPQPAPAPQPPRRVGVGIDTSRYGHYAAFLRDDLQPAAPELQFAESAAGYALLRQRLECIAQRHPPAHFVVRLDAAGQYAENLLHFLHRLATPPADPLAPAARLALTISCGDPQRNKNYRAAVFGPQKSDPVAARAAARFALTERPGRDRPLSLPLRTLRQVAGRLQAVVRQRTRLINQFHHLLALTFPELALQTRDLAAGWVLELVHRYPTAVCLAGASLADLLDVPYLPDAQAGPLLEHARASVASLGGAATEELVRDHVRQLRDAGARQKRLEKLLVSAYQTLPRDNHLATIPGIGDVTAAVLTAFVLDIDRFATPGQLVAYFGVLPIEASSGVDREGQARGPRRYVMSRRGNDLVRRYLWMAALSAVRYNPAVRALYARVVAKHPGRKAIAIGHAMRKLLHLAFAIWKSGRPFDPGHYPWQAPGHVETRGQDKGTEGEAGGKGPAEGDQAAGHRPDTQPARQVVTAACADSVAGAVPFGEATAIDFAHLQRQLPIARALDQLGLSDRLRGRGPQRRCACPLHRGDARGRSFRVNLEENVFQCFDRQCGRKGDVIDLWAAAHGYALREAALDLVRTFGLEPTPRSGTEKRNG

SEQ ID NO: 307727 - protein, 417 aa, unidentified
MNYTQNEKIEQVTDSTMVVGVDIGSQIHYARAFDNRGRELTKRIFSFHNDLEGFNSFNLWAETLKTENKKTAVLIGCEPTGHYWFAFAKYVNDHQKRLVMVNPFSVKKIKELDDNSPKKTDSKDPKIIAKLVVDGRYSIPYMPEGIYAEIRDLVYSRDRIMKQHNISANRIQRWLAIYFPEYLGLYTRFDAISGLAVLEKAPLPKDVIALGVNGIRKIWHDKKMRGRGVTEDRAKTLVEAAHNSVGLDGGIGTKSELYMLLEEHRLWTSQLEAVNKVLEEMILKVPHVEKLLAIKGVGSITIAGFIAEVGDIRRFDSPKQIQKYAGLELVENSSGKHKGRTRISKRGRRKLRKILYQVMVPLLARNKEFRGIYDYYVTRVKNPLKRRQAMVAVSCKLIRVFYAVLTKGVEYDRFKMM

SEQ ID NO: 307728 - protein, 369 aa, unidentified
MFFVGIDIAKRSHEAAVINQDGTFKVKPFKFQNSTDGFNKLMEVVLGVSQTLSDFEFGMEATGHYWLNLYCKLVDRGANVHVVNPVQSDALRGLYIRKSKTDSKDSLLIADLIRIGRYSETTLSDPDIISLRELTRQRFYLVDCVSDAKRKVITLIDKVFPEYEQLFSDMFGATSLALLEQFPTPDLLCEISTAKLTNFLKSVSRGRHGRNKAEEIKSLASNTFGSAVFAAGSAFALKQFIEQIELLERQISDIEDYIAELLPKFNSTLTSIKGVGSTLAAIIVAEIGDVARFDSPEKLAAFAGVDPSVNQSVEFVGTKAKMSKRGSPYLRRAFFLAAVAGTMHNPALKALYLRTALFWTANCSSGLEH

SEQ ID NO: 307729 - protein, 360 aa, unidentified
MFTERTSVGLDVHARSVVAAAIDGVTGELIQSRLTPSHEHIRSWLQGLPGPVAVAYEAGPTGFGLSRALAAAQIRCVVVAPSKLQRPSGDRVKTDAKDAVHLARLLRLDEFTAVSVPSVDQENARDLVRAREDCRGDLMRARHRLSKLLLRQGIVYSGGQAWTGAHDAWLRRQRFDSPALQLAFESDYDAVLTVKARRDRLDQAIAAMAADSEFTAMVQRLGCLRGVSTLTGFALAVEIGDWHRFTGNTIGSFVGLVPSEYSSGQSRVQGSITKTGNTHARRLLVEAAWHHRARYVVGKTMRDRWDLASPAARARGDAGNRRLHQRWVRFGERRKRHVVANVAIARELAGWCWSLAVLEE

SEQ ID NO: 307730 - protein, 420 aa, unidentified
MIAAVIERCAGIDVGRKFIDVCVMVGEAQAEPTQQTRRFSTLNEDLERMHQWLRENHCTHAVMESTGSYWRPIHNILDDGQMEILLANSQHVKNLRGHKTDRNDARWLAHLLRHGMIRPSFIPDRETRELRDLTRRRKQLVGCAADERNRVQRVLQEVNVQLGTVLSDVFGESGLNMLDALMYPDATPAEIADLAVRQARKKIPLLKKALQGHRMTDHHRRLIRHSMEHLAFLEEEITELDREISEHVKTHTALRVASQLAQSVTGIKQIAAAAVIAETGPDMTQFSNGGKLAAWIGTCPGNNISGGKRKGGQTRKGNPWARRILVECAWSATRKKDSEAQRYYERLKPRLKHKPALIATAHLLTLQLYQALATGNPYSENAQTELTATQAQRLVRHHSRRLKKLGCWLSAHRQRCAPTT

SEQ ID NO: 307731 - protein, 450 aa, unidentified
MMKTEKQIRDLQLAIIQPHTAAIDIGSMLMMVAYSDSQGNQCLLETDGFTQSLESLAETLKSEGVKEVAMEATGVYWMSLYEVLEQKGLHVTLINPRHFKNADAQKTDVKDCQWIQQLHAHGLLRASHIAPELFRELKGYLHERNVLRNQKSDTLNRIHRILTLMNIKVQHLISDMEGVTGMKLLRAIASGKEEPEELLSLINTDRLKAGKEELLKSLKGIYKQQQVIILKHSLEAYDFFLKQMKQYEQLIEEVLTKMLPIDETGNKPKIAKKKSHVRKNQYGINLKSYLEKITGTDITQVDGMDEISILEIISVTGVDMSKWRTAEHFTSWLNLCPRLKVSGGKTLGHQKRLTNNKATQAFRIAAQTMWKHKGALGNLYRRLAAQKGSKKAVKAIARKLAVIFYNMIKHKIPYDKSRLEQNAEKRKARRIIYLEKEAKKYGYIMQNIVA

SEQ ID NO: 307732 - protein, 314 aa, unidentified
MNHRESFVGIDVSKTRLDVCIVPCGTSRQVAYDETGVEQLVRHLQDLRPTLIVLEATGGMETFIATSLASRGLAVAVVNPRQVRDFAKASGRLAKTDRVDAAVLATFAQAIRPPTRPLKDEDSRALEELLKRRRQLIEMRVQERQRLDTAVSKAMKQSLMDHIQWLDKQIDDVDRDLKRRLRQSPVWRAKDDLLKTIPGVGPVTTLTMLAKCPELGTLNRRQIASLVGVAPLANDSGQRRGKRFIWGGRAEVRAVLYMATLSAMRCNAVIQAFAARLRQAGKPPKVVIVACMRKLLTIMNAMIKNNTPWTPKVA

SEQ ID NO: 307733 - protein, 461 aa, unidentified
MAKKAKKVKSAKGAELRIVNPDAAGIDIADGIMQVCIPADRSKDNNRAFGAYTSDLHAISAWLRECGIKTVAMESTGVYWIPLFCRLQEDGLDVVLTNARDVKNITERKTDESDAEWLMLLHQYGLLKASFQPHNDAKRMRTLTRHRDTLSREASSMVLRMQKAMQQMNIKLTLVLSDITGKSGIRIIEAILAGERDPKKLAELADIQRKTPKEEIAKALEGNWEEDLMFVLRQNYDTFKHYCTQLGECDAELEKLMENYRAEVAKVEDTSYSPAKKRRDYKKTRHTVSFDVERKAYEMWGVNVFEIPGISHLTALELMSELGHDFTRKFPSSKQFCCWCNISPNTKISGGKRISSHVPHRRNNVGLIFRSIASSLANAKNQLGNFYRRIRSRAGGKAAVIATAHKVAEIFFAMVANQTTYNPERVGIDEKVLLEKRITRYKRELERITGTHIEIGNACVP

SEQ ID NO: 307734 - protein, 358 aa, unidentified
MNNVSQQQEKIYFGLDISQKTIEIFVLKGEKGVSFGKISNTQKSLNEFFDKVPVPSESIVVILETGTHSAWISRLLEARGYDVIVAHARDLAFIYKGDKKSDRIDAEKLARMARADKKLLHPVKLMDKKRQEDLIAIKARDLLVRQRTNIINSIRGFVRSLGIEDVEYSHETINQMYDTLPSEIQQNLSGLFETLTAINSSIKNYDKRIEKLAKDYSETKTLQQIKGVGPLIALSFALIIGDPQRFSSRECAAYIGLIPKRDQSGEVDKQLGITKCGNKMLRRLLVQGAQYIMGAFGEDCDLRDFGNRIAIRGGSIARKKAKVAVARKLAITMLALWRNPDVKYDPHFKAANKQNRCA

SEQ ID NO: 307735 - protein, 349 aa, unidentified
MTEQRRSYAGECVYVGVDVHKETYTVTCVCHKQIVKPATVQAEPGSLAVSLPRGFPGATLYSVYEAGFSAFVLHRVLTKAGITTMIVNPASIAVAANDKVKTDRRDSKKLAIDLADGRLRGIYVPTEAAELARLLPRTRAQIVEHRATIARQINAKLHQFGLIAPSSRRMISNRYLREMATWTLPPELSVSLTLLAEQWRFATRQLIEMRRLLRDQAKAQEEIEKVYRSVPGIGEVVARTFATELGDMTRFANERALFSYTGLTPSEHSSGTAVRRGSISRQGSSRVRHLLVETAWRAIPRDKALKEIFDRIAATRGKKRAIVAIARRLTGRIRACFRQGTTYAVGTAA

SEQ ID NO: 307736 - protein, 412 aa, unidentified
MAVVMNQDSGFDIWCGLDVGKTGHHACALDAAGRKVFDKPLPQDQKRLEELFDKLQTHGRVLVIVDQPNTIGALPIAVARSMGIQVAYLPGLAMRRAADLYPGNAKTDARDAFVIADTARTMPHTLRRVDAGEETLAELKVLVGFDEDLAAEATRLSNRIRGLLTQIHPALERVVGPRLTTKQGLAVIEQLGGPQAMAAASKSKLLRVISKAYPRGTQEFADAITTALAEQTVIVAGTAAAEQVLPQLAASLRQTLDQRHALAAQIEQVVDAHPLAEVLTSMPGVGVRTAARILLDVGDASQFPTAGHLAAYAGLAPVTRRSGTSIRGEFPARSGNKHLKRALFLSAFAALRSDPTSKAYYDRKRAQGKKHNPALICLSRRRCDVLFAMLKNREPYRAPTPTREPSPLPLAA

SEQ ID NO: 307737 - protein, 411 aa, unidentified
MENILACCAGLDVHKESVEACVRRIEPSGRVHQETRHWGTMTRDLQAMADWLAAEGVTNVAMESTGVFWKPIFNILESRFTVLLANARHLKQVPGRKSDVRDCQWIAQLLQCGLLKGSFIPPRAQRELRDLTRHRTQLVEEKTRTINRIQKVLEDANIKLASVASDVMGVSGRAMIQQVIEGETDPHKLADLAQRQLRGKIPELEKALEGKLTDHHRFLLKMLWKELDQQEELIAELDSKIKEQTRPFAAEIERLDAIPGVDNRVAEVLLAEVGADMKPFPNDQHLSSWAGMCPGNEESAGKRTRKRITPGNRWLKQTLAQAAWAASHTKKTYLASQYRRVAGHRGRKRALITVGHSMLVIFYHMIRSGANYAELGGDFFDRLEPERLTRYYVKHLERLGHKVTLETSVAA

SEQ ID NO: 307738 - protein, 370 aa, unidentified
MRFYNQPHRFYAGVDLHARSMYTHILDNGGKTVFERDLPAAPEAFLDAVAPYRNGLVVGCECMFAWYWLADLCEDESIPFVLGHALYMKAIHGGKAKNDKIDAGKIARLLRGGTFPLAYVYPKGMRETRDLLRRRTYLVRKRAELMTHLQILNGQYNLAPFPKKLSFAANRAEMDIARRFSDPSVQKNAAADLALIDALDVQIAELELYLTRTAKVDDVQTFYRLRSIPGVGKVLGLILLYETHDVQRFQGVGQFLSYARLVRCAHESAGKRVGSGGKKIGNAHLRWAFGEAACLFLRSSERAKKWKQKQQAQRGEAKALAILAARLARAVYHLLRQREAFDEDRFWQGGGHSSTGSSSLSRPEAAHAGD

SEQ ID NO: 307739 - protein, 351 aa, unidentified
MPKRTSAAAISTIGIDTGKNTLHMIGLDEKGAIVLREKISRHRIAARLVNVPPCLVGIEAGMATHYIARELVTLGHEVKQVPPAFAKPFRQGHKNDFRDAHAIAEAVQRPSTRCVPIKTDDQLDLQALHRVRSRLIGDRTAVINQLRGFLLEHGITVRQGHRFLRQQLPQILATRSDVLSPRMIRIIGDLVEDWARLDERIETVTDEIEGLARADVSCGRLMTVPGIGPIIASAMVAAIGDGTAFAKGRDFAAWLGLVPRQMSTGDRTILGRITKRGNRYLRMLFIQGARAIQLHPASWAKHSFGPWLTAVARRLHCNVLTVALANKLARISLTVLVQGREYETRIETVAA

SEQ ID NO: 307740 - protein, 350 aa, unidentified
MLIIGCDYHPAFQQIAFVDTETGELQERRLQHREEAEKFYRDLAAQGMKVRVGMEASGHARWFERLLAELQIELWIGDAAEIRTKRVRKQKTDRQDAQLILKLMLKDDFPQIWVASWKNRDLRQLLWHRHRMVQARTRIMNQLQAVALNEGLRCKKRLWREAGREQLEAFQLAPWASQRRRDLLELLDRLDPTIAKLTQAIEQEVEKCPEAQRLRTHPGVGPLTALAFVLIIGRADRFQCGKQIASYLGLVPLEESSGNRRRLGHITKQGNSLLRFLLVEAAQVTVRSIPEWRSKYFHLAMRRGRKIAKVAMARRLAVQMFWMMRKGWDYEQVKKFGSHAGQPEHRDGVQ

SEQ ID NO: 307741 - protein, 322 aa, unidentified
MAKHTTICAGIDIGKRKLDVAIEGCREQLQVENTPEGHKVLLAWLRQRRVKRVGLEASGGYEQPVVAELRRKRFVVVVFQPAQVRAYAKFHLQRAKNDKIDAALIADCTAAVRNIHAAPDPRLLPFAAQLTMIDQIGEDVARLKNRIESCRDARINKLWQEDIARLEMRAKAELKTLVASIRKHPDLAKRLALINSVDGIGLPTAVAILVRLPEIGRITREQAVALAGLAPYDDDSGEQVGARHIEGGRKRLRRALYTASLAASFRWNRQLIQLYQRLTAAGKEHKRALVACARKMLIFANTVVARGTPWCDQPPERTLSVS

SEQ ID NO: 307742 - protein, 430 aa, unidentified
MNSNTQNKKIEAITEKTLVVGIDVGSETHYARAFDHRGIEYSKKPFKFSNDEAGFASFKAWILEHKKAHDKDKVVPGMEPTGHYWFNLGKFLQDNDMKPVLVNPHHVKKSKELDDNSQTKNDRKDPKVIAGLVREGRYMIPYLPDGVYADLRTASNMRFQIQSELTRILNRISRWFNIYFPEYKTVYGNLDAVSGMLVLKTAPLPEDILTLGVDGIDKIWRDAKLRAVGKKRAQTLVNAAEHSVGSKEGAIAARVEIRMLIEDYESRNARLQEVMALIEELVKKIPMTEKLLAIKGVGIKTVSGFLAEVGDISRFKSPKELQKLAGLALVENSSGKHKGETTISRRGRKRLRYLLFEVAMSLVSKNREFAEVHNYYTTRKQNPLKKMQSLMVVAAKLIRVFYAMLTKGVDYDPKKMLEDIRRPLISLKAA

SEQ ID NO: 307743 - protein, 479 aa, unidentified
MHLVMTNSQKSSISDSTIRLSQDQVCPLSGDDSMLDTIRAVQQEPEWAAFAAIDWADQQHTWTLVPAGSSLPQRGKVENTPEALHLWATALSVQFGGRPIAVCLEQCRGLLIYALSKYAHLVLFPVHPTTAARYRQTFSPSGAKDDPRDADSLLDLLLHHRDHFPRWQPDTVTNRHLQRLVEQRRLMVHEKTRQSNRLTACLKTFFPQILQWFDDITAPVVADLLKRWPTLEQLQHSHPGTLKKFFLQHNSRSEKRIQARLNAIYQAVSSTHDEAVLESESIAALGFLRLLKTLGENIEILDHRIQQLVATHPDAPIFASLPGAGPATIPRLIVAFGSRRERWTSAYEMQCYSGIAPVKEASGRHEWIHFRRSCPKFLRQTFHEYAFLSTNKSPWAQAYYRHQREKGIAHPAAVRSLAYKWIRIIFRCWKDSQPYDEARYAAAQQKRNSPLAALGIDTKEVAGFQKPALKKSCSKRLTE

SEQ ID NO: 307744 - protein, 313 aa, unidentified
MSQNNANILYVGLDVAKLSLQLHLAGRFHLLANDAKGHAKLLKHLRGHTTAHVVCEATGGYEQTVVRALQSAGVPVSIVEAGRVRYFARAQGQRAKTDPIDAAVLSAYGTTFKPAATAPASPQQQQLAQLAQRRRQLIQLLVSERNHAEHYTDSFRVRQSRQLAKALEKQITQCDEAITTLIAQDTELARKADRLKAIPGVGPVVAATMLAEMPELGKLTTQTAAALAGVAPYNRDSGSQTRVRHTNGGRVAVRCALYMATLSAVRHDRILKEFYLRLRAAGKKPLVALTACMRKLVILMNRLLKNYDFQLAS

SEQ ID NO: 307745 - protein, 497 aa, unidentified
MPSTNVAAEVTIVGAMKRKSIFKNNSQNIDAAFIEAGLPEKVLLVPLDFAKSTHYACFCDGLGRYLRQAFTVKNNKEGLDYLVERIEATRKSRAIRDKRHVIVGGEDSASYTRNFMQRLGELGYLAVRLSSCEVHRQAESVDSSTDRTALRAIAKTMLNRDARPIDGHDVYNELRALTRQRRRIVHLNTAVKNRIHTHADRLFPGFLAKDSALAPFSRASLELMSKPSFGAVSISRKNEKTLGQLLKRHGTPRSVEVASALKQQARDSIPADKDSARLSAYILAGELELFRALESNLQTLDKECARLLARTPEAFVTSIKGIGITLTSSVCAESGSLAQVTRADSLNAYAGIVPKVKQTGGPESEAKIRGRRRSFNRVLKDYTMQAGNHLYLHGPEELMQDAVRRKLVGKAVDTAMARRFLRIARALCKNHFIYLPTHLRGQNASSQERVQYILDTWPALLVKWKRLGLHEEAFASENPLGQWRLIMQEIHDIDLPL

SEQ ID NO: 307746 - protein, 463 aa, unidentified
MAKKNTASRKSKSKARKNVLERINPNAAGIDVGANFHLVAIPEDRAEENIKKFGPFTSDLHRLADWLSEHRIGTVVMESTGVYWIPVFQILEQRGFEVKLVNAAHVKNLPGRKSDVSDCQWLQQLHTFGLLNGSFRPKDQVCILRTFLRLRDILVKDCSSHILRMQKALTEMNVQIHRVLSDITGYSGMAIIRAILAGERDGLKLAQMKHPLVKASTEQIVKALEGDYRPEHLFALQTAIELYDAYQLKITECENKIEQQLKQFDTKLDLRQVLEQSGALKARSAKVRQELQRQAYLASVCGVDLTRLPGLSTLAVEVIISETGLDMNCWKSEKHFCSWLKVCPDNRISGGKVLSSRPRKTKNRAAGMFRLAAQGAMQSKTAVGAFIRRLRARLGAPTAINAGANKLARLFYRMLKFGAAYVEQGQTYYEQRYKERVLHNLSKRAKELGFQLTPFQPVTVSVS

SEQ ID NO: 307747 - protein, 408 aa, unidentified
MQLFVGVDWAEDHHDVCVIDVSGSVRAKGRVTNDLAGVAKLHDLVGRAVPAELDEDPEVIVGIETDRGLLVRALVAVGYRVLAVNPLGVDRYRDRVRVSGAKSDPGDARVLADMVRTDGHQHRPVAADSDLAEAIKLVARSHQSAIWSRRRLANQVRSALREFYLAALDAFDELTHPDAVSVLAIAPTPELGKALSRSKIASALRRGGRKINVDKRAAAIQAALRTDHLTQPPLVADAYGNIVASLVKVIAAHNTQIAELEEVLEAHFGQHPDAEILRSQPGLGVVTGARVLGEFGDDPDRYATAKARRNYAGTSPLTIASGTRRVVRARHIRNRRLADALHWWAFNAINQSPGARALYDHRRAAGDTHSGALRVVANRLVAIAHGCLKNRTLYDETTAWAHRNDLAA

SEQ ID NO: 307748 - protein, 413 aa, unidentified
MDVLHPRCCGLDVHKSSISACILLREAGRVQKHQHRFGAMTQGLHELAEWLRQFDVTQVAMESSGVYWKPVWNILERQFTVVLANAQHIKNVPGRKTDQKDAEWIAQLLQHGLLRPSYVPCEIIRDLRDLTRMRASLSQEASRISSRIQKVLEDANVKLASVATNALGKSGRAMLEDIIAGEDDPEHLAALALGHLRVKIPQLRLALEGKIRSHHRFLLRRLLDQMQFVEHEIALLDERLEDIGRQRPELSQAVARWDTIPGVDRVAAWTLLAEVGDNMAQFPTAEQLASWAALCPGNHESAGKRLRGSTRQGSPWLRRMACQCAWAAARTKNTYLSSQFRRLAARRGKKRAIIAVAPTLILIGYHLQKKQSNYDELGGNYFDRLHSDGLKRYLVRRLQQLGHKVTLEPMEAT

SEQ ID NO: 307749 - protein, 345 aa, unidentified
MKIVGCDLHTRYQQIAMLDQETGELIEGRLEHESGEARAFYAALSGRVRVGIEATGHTRWFERMLGELGHELWIGDAAEIRATVVRKQKTDARDAAHLLDLLLTNRFPRIWRPSLEERDLRQLVWHRQKLVWMRNAVGNQLHSLAMGEGLCRKQKLFTKKGRTELESLALGRWASYRRQELLRMLDELDRSLQRLDDAVEQQAEQNAEAVRLMTHPGVGPVTSLAFVLTLGPVGRFQRSKQVASYLGLNPREHSSGGRQRLGSISKQGNPMMRSLLVEAGHTAARLDAELRQDYQRIKMRRGSGVAKVAIARKLAVRMYWMLRSPANYAQLVRMQGSPRGTLVGQ

SEQ ID NO: 307750 - protein, 461 aa, unidentified
MSKRKKPKKQDLDMNLLSQINPNAAGIDIGADKHWVSVPVGRDEENIRSFSCFTPDLYAMADWLKQCDIETVAMESTGVYWIPVFQVLESRGFEVKLVNAHYVKTVPGRKTDVLDCQWLQQLHTYGLLSGSFRPEDQICKLRSYIRQRDNLIKSACVHIQRMQKALTQMNIQLHRVISDITGTTGLNIIRAIVSGERNPIKLAALKDGRIKASVEQIAASLTGDYRPELVFILEQELQLYEFYQAQIQKCDIQIEQCLTSFTDKVDVEKKPLSKPKRRGKKQPGNAPQFDLRTHLYRISGVDFTAIDGLGSLSVLVLLSEVGLDPTRFPTVKHFTSWLGLCPGSRITGGKVKSSKTRPVANRAATAFRMAAQTLCRSNSALGGYYRRMQSRMGAPKAITATAHKLARIFYRLWISGDAYNDPGIDAYEQKYRERILKNLKKKANTFGFELTAISNQTECVS

SEQ ID NO: 307751 - protein, 431 aa, unidentified
MKNRTNQRLEEITANTLIVGVDVAKSLQWARFVDYRGVEIGKALSFQNDRKGFESIVTRIREHCNSKILCYPIETAIIGMEPTGHYWKPLANYLMKAGYRVVGVNPYHTKKSKELDDNSQTKSDKKDALTIARLVKDGRFFDPYLPEGEFGELRGLSNARVGLMKRANAIKNTITAILDEYFPEIKTVFKNPLKGKAARQILKSCPFPSFILAMSEDEILVEIRKSVKKTVGMKKVRELITAAKDSIGVDYGLEAAKMRMGWLLDELELLEKQLHEAEQAMDETLQKTGYAAQILGIKGIGVVTAVSFLGEVGDPLRFQSARQIARYAGYNLVEDSSGKSKSGTVISKRGRKQLRSVLYQMAFTMVGQNAEMKTLYQYLTTRKVNPLKKKQALVVVSKKIITVIYSLLKKQEAYQPELVLGAVRREMLKAA

SEQ ID NO: 307752 - protein, 466 aa, unidentified
MTPRRTKTFRMPPQPAEPLPVQHPRAAGIDGHAAQHWVAVPPEAAPPPPADHPPNLPSHVRRFGAGTADLEALADRLTARGVTTVAMESTGVSWIPLFALLERRGFQVFLVDPRQTRQVSGRPKTDVLDCQWIQRLHSYGLLAASFRPEDQVVVLRGYLRQRHMLLRHAGQHVQHLQKALEQMNVKLAEVVSDVTGVTGLAIIRAILRGERDPLELAELRHDKCHHTESEIARALYGNGRDEHLFALRQALELYETYQAKLRDCDDCIERHLRTFADRSGGRKLDQKARRRRRPRHEPAFDVRAALFRFRGVDLTVIEGVDRTTALTILGDIGCDMSQRPTVKHFVSWLGLCPQHQGSAGQIKSRHTRRGANPAARALRLAAQGCHHAKNALGAFYRRIQARCGGPKAVVATARKIAERVYRLLKYGEAYVRQEMAAAEEAYRARVLKGLARKATGLGYPLVPATP

SEQ ID NO: 307753 - protein, 324 aa, unidentified
MSSHGIVGIDVAARKLVMIGERVALAEYENTAAGRSKLAKALSRSPRPVRVVLEATGIYFLDLACELAAAGIAVMVVNPKATHHFAEAILQRRKNDPVDAAMLREFGRRMDFVPWQPPRHELFAFRALTREAQALSKAVAAAKNRLHAITATQLAPDTLIRALERQIAQNQALVDELVAAALAETKTNRELARLVARTDSAPGFAAKAAVLVVGELAVLPPMTARQWVAQAGLDVREECSGTSLARRPRLSKRGNKRLREALFYPALTAARCCPLAGAFVERLVAAGKTRLQAIVALMRKLLHGLHAMWRNDEDFDAEKLFAPA

SEQ ID NO: 307754 - protein, 391 aa, unidentified
MSMYFVGIDISKYKHDCCIISAADQQIVSKFTVKNDKDGFEHLLTTLNSLSNPEDIKIGFESTAHYALNLELFLENAHHSFMEVNPVLIKEYKKSTTLRRTKTDSVDCESIARWLMTVEYKPHSKGFYHSYSLKSLTRLQDRLIRQRSFYLVKITNVLDHTFPEFKPFFNERLSKTAIYLLENYGSAEKMAHMNSASYDKLRCASRGKFSIQQFLRLKELAANTVGVNNSIFDIELNSLLTLYNSLCKEIKTLEAEITKLIEEVHPHYMSIPGIGPISAAVIYAEYGDISNFSNPGQMLAFAGIEPGINDSGTESHGGRMVKHGSSQLRYVLLNACLPLIRLDITFATYYAKKRAEGKKHRVAITHVAKKLIRVIYALERQDVDFNVQKLR

SEQ ID NO: 307755 - protein, 343 aa, unidentified
MERELYIGVDVSKRWLDLAYYDGVTVDWKQGHIRVDNKESGFLQIGRWLKKIVSEKENVLFCMEYTGLYCQDLRLWLEKEGFVYGMVNPRKMHRFEPDLGENERALDRIKTDEMDSFRIAMYCEKHCRKIRSLPSRLPAPAYFKLKRLIAERRQYVVQSVLYKQQLHDVCDYDTDSSVIRKQKELKSLMAHIRQTDAEILSVMEEDAAIKRNYDLLRSVTGIGIVVATETIILTENFTAITNPRRYACYIGIAPAKKESGVSVRGGEHVSRKGFTQAKADLSMACLKAIQSDANIKSYWQRRKAEGKKGGVLLNAIKFKLLLRMFAVIKRQKPYVELEGYRKN

SEQ ID NO: 307756 - protein, 453 aa, unidentified
MKEQDQISMDIVNPKAAGIDIGSRSHFVAIGQKEEHVREFGVYNEDLKAISNWLKENGIQSVAMESTGTYWQALYAVLLDDGFQMILCNGKFTKNIKGRKTDVQDCQWIQKLHSIGLLSGSFLPDLQTEQLRTYCRHRASLIDVVADTSKKMQKYLRLLNLRLDVIVKDICGLTGLKIIDAICNGETNPQKLAELRNGNCKKSEQEMAKALETNGRKDYLFGLKQEYKMYKNLQIQIKECDLEIEKILEEQIDNDHNKKQHYTDPKIHKRINKNTPKNIDLNLMGYQYFEGVDLLKIEGFSHQTLLTLMSEVGLDGIKKFSTAKQFASWLRLTPNNKISGGKVLSSRIPKGSNRLKIALRNAANAIGNLKESTPLRDFFHRINFRKGRVSAISATARKLGVIIWNMVVKNIPYHNPKEYLYLDEKRKLAVQKRLQKQVENYQFSADDFNFSTT

SEQ ID NO: 307757 - protein, 353 aa, unidentified
MKVRIRGIDLAKNVFQLHGLDRKGGAVMLRRVRREQLLKVIGELDPCLIGIEASTGAFYWQRQFEKLGHTVRIMAPQCVKPLVRRQKNDSNDAEAICTAVQQRNMRFVPKKTLEQQDIQALHRARQRLVNHRTALISQMRGLLLDRGIAIAVSATRARQLIPKILAATSDELTVLVREIVSSLYAFMLQIDERIRVFDRKIDAIFKASEVWQRIAKTRGIGPKTATAMVAAIGDGSNFKNGRHLAAWLGLVPRQHSSGDRRVMMGISKRGSQHLRTLLVPGARAVVRTAVRKTASRPTTCRGECERMSHLGAPSSVDASLYLLRRICPSPSRDGLYFISRGFSGACQPHTEKY

SEQ ID NO: 307758 - protein, 339 aa, unidentified
MKLYSGIDLHSSNSYLAIIDESGKRISKEKLPNEIAMITERLSLYSGTLEGVVVESTYNWYWLVDGLMAEGYDVHLANPSAIQKYSGLKHADDKHDAFWLAEMLRLNILPTGYIYPKDERPIRDLLRKRSHLVSLRSSLLISLQNIISRNCGMKIKTNDIKRLRENHVHPLLANNEDLALAGQVSKDSIDFLTRQIRAIETFIEKKLELTDAYKNLVTIPGIGKILGLTIMLETGPVTRFEKVGNYASYCRAVSSQWTSNGKPKGKGNKKNGNKYLSWAFSEAAEFARRFDDQARSYYNRKLRKTNFMVAHSALAHKLARAAYYIMKDQVAFMPEKTFT

SEQ ID NO: 307759 - protein, 340 aa, unidentified
MEKSEEIQRRDWILGIDVSKESIDACLVRSSDGQIFESKFHNNLSGFRHLKRWCKETGCECDDGTLCCMEHTGLYTRLLVHYLVSRGVGVWLESSLQIKRSMGLLRGKSDKIDAQRIARYAHLHKNNAAVIEIGVLTLEKLKDLQANRRRLMKSLQGLRTSAEELSQFDPSTGKEIQLINREAVRGLEKSLDKVDEQILFIISQDQELKQKYDLMLSVKGVGKVLAAMLLVYTHGFNRLNDSRKLACYSGVAPFVYESGTSIRGKTGVSKFANNELKKVLHMAAISSVQHNPDLKEYFQRKVQEGKNKMSVINAVRNKLLHRVVAVVNRGTPYQVHPKNI

SEQ ID NO: 307760 - protein, 345 aa, unidentified
MKITTIGIDLAKSVFQVHGVDARGKAVLRKQLKRKEMRPFFAQLPPCLVGMEACGSAHYWARELQQFGHDVRLIAPQFVKPYVRSNKNDAADAAAIAEAVSRPEMRFVPIKTAPAQALLAVHRARQGFIKQRTAQANQIRGLLAEFGIVIPTGLHRLFAQLPEILEDGENGLPGLMRQTVARLRDHLRRLDQEVVALDCEIERWHRADPTSQRLAAVPGIGPITATALVATFGHAETFHRARQFAAALGVVPRQHSTGGKPTLLGISKRGDVYVRTLLIHGARAVIANLGRTSHPDPWLQRLCTRRNANVAAVGLANKNARIVWALLTRGETYQPGHRVRQPRAA

SEQ ID NO: 307761 - protein, 456 aa, unidentified
MSHCTANKKAASAFVRRNSIPTTGAVAKALFNSAIGIDVHHDILVCAYQYCNRESDEITTEVCSFGTTASELAKFTDWCRNRHPEQILMESTGVLWFSPYEALESVGFTNRQLSLINARDFKAIVGRKSDKQDAERLALYARIGNVRSSFVPAKCFREMRTVSRLLSKTTDEQSRARSRYLKTLNFIGCRASSVFSDVRGKAATAILEVLAEGTREQLIDAIKIHGRRLRKSAAEILDALDFAVSPAMAMQLRIQKQHMEALSQTCEELYALLKVMQANYQPWINRLMTVPGIKERAARVIFAEVTNDLSSFPDAAHLASWVGVCPGTMESAGKRYSGRAAKGNRYLRRILVECSQAIGLMRKGALYSLFQAFKERKGTRRAVVAMAHHLVKIIYCLFTKGGNFEAQSTDALTKVRKQKYLSAVANIKKQNFEILTSGSLVDKATGAITAVDPLTV

SEQ ID NO: 307762 - protein, 359 aa, unidentified
MNAQVKKIDFKNQNIYVGFDAHSKDWKVTIMAENMVFKTFTQPPKPEILFNYLKNNFPGCNYHTAYEAGFCGYWIHHKLESFGINSIVVNPADIPTTNKEHVQKEDKRDSRKIARSLSSGTLVPIYIPTLQAQRDRSLTRTRSMLVKDLTRYKNRIKGFLYFYGISINESFSNPQSHWSNRFMSWLESLEIDRASGKEALNVLILECKNLRASILKVTKQIRSLSNTEKYKQNVALLKSVPGVGSTTAMTFLTELESVNRFNNVDKLCGYIGLIPSTKSSGEKEKTGEITPRGHSVLRSAIIESSWVAIRNDPVLIKAYLSYTKRMKSNRAIIKIAKKLLSRIRYVLLTQKPYVCLIEK

SEQ ID NO: 307763 - protein, 270 aa, unidentified
MMIIGCDLHTRYQQIAMLDTETGELVERRLEHEHGEARTFYAALRGRVRVGIEATGHTHWFEALLAELGHELWMGDAARIRAAVVRKQKTDARDAAHLLEMLCTNRFPKIWRPSPTERDLRQLVWHRQKLVWMRGAVKNQLHALAMGEGVCRKQKLFTAKGRKELEGLALGPWASYRRQELLRMFDELAAAVAQLDQAVEQAAKNQPLAVQLMTHPGVGPVTSLAFVLILGPVERFERSKQVVSYLGLNPQEHSRAESSGWDRSASKATR

SEQ ID NO: 307764 - protein, 344 aa, unidentified
MTVDYYVGIDVSLEASSICVVDGAGKVIKEAKLSSEPEAFIAWFKALPFSLARIGLEAGPLSQWLYAALKEAGFAVELLETRHVRDAFKAMPVKTDRNDARGIAQLMRLGWFRPVHCKSAPAQETRALLTARKLVQGKLYDIEMSLRGILRGFGLKVGRTKKAGFASRIMELTEHHPALKAIAKALLTVHEVLLKELNRFENQVRKLARGDARARLLMTTPGVGPIVGLTYVAAIDDPARFSSSKMVGAHFGMTPKKYQSGEIDVTGRISKMGDKGVRAALYEAAHVILTTPVKGGALKSWAAKLARRAGMRKAKVALARKLAVILHRMLADGSVFDVTKAAAA

SEQ ID NO: 307765 - protein, 359 aa, unidentified
MVPIGVDVHKRRCKVVELSDCKVKVRRPIENTREDWLELLGELPPDAEIALEVSTAGYFAMSVLEEAGWGERAHWVHTAGIDSPRKQKYDRWDAERLARKLAVHHLDPLPEAWFPPSEIRELRLRARQRCWLARLRTQAKNRLQSLLEMHGWQPPGTDPFGRRGRDWLDQQKLSAALSESVPQMLRLVEVLGMELETSEGYLEGVESQFPELSLLRTIPGIGPLLAPVIWSEIGCLQRFTSASALVNHSGLVPSLYESAEVSVQRHITRQGPRWLRWALITAANVAIQHRNPLARRYYRLRRNKKKPNVAKTAIACSLARCIYGVLKHRSPFREERWGRKVGALEQEAWGSAGSTKTVL

SEQ ID NO: 307766 - protein, 421 aa, unidentified
MPNIEIGVDSMVKENFIYVGIDLHKETHTAVMIDCYNQKLGEITFPNRPADFPKLVTKVKKCNTDAKEVVYGLENAYGYGRPLAVWLIDKGYFVKDVNTAISHRQAKHRGAMYRKSDSDDAEAIALATLNMLDKLPDACPNDAYWSLGQLVHRRDNIMKQRTRLVNQLHEQLCIAYPSYKSFFNDISRPTALYFWEHYPSRKYLRGKSVEDLRKELVPVSHNRCSTKNCEKILDAVASDKVKNNAYQDARDMVTLSIVSDLQHYDSQLAEVDKMLEQMYKMLGCTLTTIPDVNVITAVKILAEIGDIKRFSNANKLAQFAGIAPLHLSSSGKGKDVATKQGNRRLQATIYFLAIQMVQVSSKGTPRNSVVRAYYEKRKAEGKTSQQALICISRRLISVIYGMLKNGTEYRMPVVENAGENR

SEQ ID NO: 307767 - protein, 343 aa, unidentified
MQAATTIGLDIAKSIFQVHGVDGEGNVVVRRKLKRRYIVAFFQKLPRCLVGIEACASSHHWARELQALGHTVRLMPPAYVKPYVKRHKNDAADAEAICEAVTRANMRFVATKTPEQQSCLMLHRTRHLFIRQQTAVINAIRAHLAEFGIVAPVGRNGVEALLNVVADTSDNRIPEIARACLVALGAQLRALKAQILEFDRRIMAWHRSNEASKRLDEIPGVGPALATALVASVGDPRAFRSGRDFSAWIGLVPKQSSSGGKEKLGNISKRGDRYLRSLFTTGALAVIRYAKLHGTKHRPWLTALLARRPTKVAAIALANKLARMAWAMMAKGERYKEPIALAA

SEQ ID NO: 307768 - protein, 354 aa, unidentified
MIIIGADYHPAFQQIAFVDTETGEVQERRLEHAEVAEKFYRELAAQGKKVRVGMEASGHARWFERLLAELNFELWIGDAAEIRRKRERKQKTDRLDAQHILRLLLKDDFPRIWVPSWENRDLRQLLWHRHRMVQARTRIMNQLQAVALNEGLRSKKRLWREQGREQLEAFRLAPWASRRRRDLLELLDRLNPTIAELSQAIEQEVEKCPEAQRLMTHPGVGPLTALAFVLIIGGADRFQCGKQIASYLGLVPLEDSSGNRRRLGHITKQGNSLLRFLLVEAAQVTVRSLPEWRSKYVHLTMRRGRKIAKVAMARKLAVRLYWMMRKGWDYEQVKKFGSHAGQPGHRHGVKSNIE

SEQ ID NO: 307769 - protein, 395 aa, unidentified
MDSLESTRLEQFRQFQKEIRGSEQYLIVGLDIAKDQHHAFFGTATGQTLWKRWLFDNSQEGFQKLLLQTEALQVRHGLPQVVFGLEPTANYHKPLGEYLIRGAHQVVFVSGVAVKRNRELLDGRWDKHDTKDAANVADLISQGKCLYYEHPEQRIRDLRLLLSLKKRLKRQEQGIRVRIRNGLVAQYCPELDPSLSRLIAPGKESDLLSTMQQPSSIGCAAHPEVAFVAKVMGEELQQTRKVLKAVQERIQKLCSQFAEYAYLLSIPGFGPEISSQVLGAIGDPFRFQNGKQILKMAGLDLSADRSGKTSERARPVISKKGKADLRYALYQAAFIASTRNAAFTAYYTLRLKARRQEPGIQAKRRVKLAAKLLIIAWTLMKRKEAFDPERLIIHR

SEQ ID NO: 307770 - protein, 344 aa, unidentified
MTYCAGLDVSLRSTHICVIDDDGELLAEGKTDSEVADIIAFFDELEVEITEVGLEAGTLTQYLTYGLQFAGYEVVCMEARQVKAALSAMRNKTDKNDARGIAQLLRSGWYSRVHVKSIESHQVRALLSCRKAVLAKCIDLEQEIRGLFKVFGIKLPPKLGHGSFDPKVRPLIEADEVLSQSLLPVLDARLVLYRTFLTLENRVRNLAKNDAVCQLFMTAPGVGPITALTYKSGVDDPTRFRRSRTVAAHFGLTPRRFQSGEFDFEGHISKAGDSIVRSTLYVAANSMLTRSSKWSPLKAWGMKLAKSRGHKKAVIAVARKLAVILHRMWIDDTQLRWSTEAARS

SEQ ID NO: 307771 - protein, 317 aa, unidentified
MEVSLIFVGIDVSKAQLDVAIRPSGEEESFANDKVGIKALVKRLAKIEPTLIVLEATGGYERQVTRALVSADLPVVVVNPRQVRDFAKATGQLAKTDSIDAAVLAHFAEVIRPELRPLPDVVTLELRALTARRRQILEMIAAENNRLAMTSKAVRKHIDAHVHWLEQGLERVEKDLDRSIKQSPIWKENDELLRSAKGIGPVTSHTLLAELPELGTLNRKQISALVGVAPFNRDSGSLKGRRSIWGGRAPVRCALYMATLVATRRNPVIRDFYKRLKAKGKPFKVALVACMRRLLTILNSMIKHKTYWSETFSLQTT

SEQ ID NO: 307772 - protein, 354 aa, unidentified
MIVLGADTHKRSHTIAAVSATSGELLGEQTVLSGAKGAAGLLGWARGLGEDRVWAIEDCRHVSASLERFLIERGERVLRVHSTLTAGSRRQARGRGKSDSIDALAVARAALREGLDTLPAAHLDGPELDLRLLVDHRERLVRARVAVNNTLRWHLHDLWPDLEIPGSSLFYGKWGPRIARRLARAEQTTRVRIARDELRRLRELTQSIKQLEAEIADLVAQIAPHLLAEPGFGPLTAAKLVGEIAGAQRFTSDAKLARAAGIAPIPVSSGNSRRHRLDRGGNRQLNATIHRIAVTRLRCHPETKDYIARKRAEGKSTKDAIRCLKRHLTRRIWHLLQTPAPIPDQTITPTTSLT

SEQ ID NO: 307773 - protein, 415 aa, unidentified
MTEQRWYAGVDWASESHHVFLMDGAGCKIGEKIFKHSGEGLAEMAAWLLTASGAASSSQIYVAIEVPHGPVVETLIERGFTIHAINPKQMDRFRDRFTLAGAKDDSRDAEVMASALRTDPHCFRLLAALDPTVIELREWSRIASDLGTERNRLTNRLREQLWRYFPAMLELESDLGAPWLLDLWELAPTPGKAARIREGTLAKLLKRHRIRRFDAAHVLDVLRQPAVQVAGGTVEAASAHIKMLIARIRLVSGQVKEAHRRLDALPARLIPAEEAQAGQQKQHDVEILASLPGVGRIVLATLLAEAWDGLQRRDYAALRSLTGVAPVTKKSGKSCIVIRRQACSNRLANVMYHWARVAIQLDTASKAKYAMLRGRGHSHGRALRSVADRLLSVACAMLKNGALFNPSFNAQNTPC

SEQ ID NO: 307774 - protein, 371 aa, unidentified
MNSIVYVGMDVHKESYTLCCYCYDTDKVEYKQTIPSDYKLILKYMETMRKVYGEDATFVCGYEAGCLGYSLYHQLRDHAVDCKILAPTTMAVTNNSRVKTDKRDAANIARCLAFHTYSEVYVPDDEDNSVKEYIRMRDDQKLMLKKIKQQILAFVLRQGKKFEGGKTYWTIAHVKWLKALELPELAKETLQEYLVTYEYLMDKIERLDNRIEELASGEKYNETVKNMTCFLGVKTHTALSMVVEIGDFKRFEKAPKFAGFLGLVPSEDSSGDKVNRFGITKAGNSHLRRLLVEAAQSYTRGNVGHKSIALKQRQQGCTAEVIAYADKANERLRRRFYKMTLNKGVNRNVATTAIARELACFMWGMATGNIS

SEQ ID NO: 307775 - protein, 404 aa, unidentified
MERAEMDYDVYVGVDVGKTKHYAVALDGATGKRLFSRPFGQDEASIRELLEDASGYGKALVTVDQFGNIGRLVVAVGKDMGLDVAHITPKDFKDISTTYKEGKSDAKDAFIIADVSLSTPRLIRTVGTRDDAVAEIKVLNSRRVDIVKERTRYYNRLHDLLLQASPPLEQLFEGDSLHSDLAIKIFERYGGPRGLKRAGKARVSKWAGSLKYQKTRGPKKVEEVFEALGTMTVELPATEVIEIQIKKLAKRILELDQEESELDAAIEERADAVPETAILKSVPGIGRVYGATIAAEIGDINRFPDANHLASYGGIAPVKEESGTSVKKNKKRKNGNRKLKNAFIESAQKAKRYDPRCKAYYDRKRAEGLQHKQALRALARRRVDLIYALLANGTFYEPSHRAAA

SEQ ID NO: 307776 - protein, 389 aa, unidentified
MPTIADRHDAPTAIQTNLAAIFISLELSRSIWLITSLSPGSAQKMSKHSVRAGDVAALLARVSELKRKASERTGKSFPIVVIQEAGLDGFWLHRVLQSEGIESHVVDPASIATARRRRRAKTDRIDGEALLRALLAFKRGEPRVCAMVKAPTPEEEDRRRLSRERKVLVADRVKHVNRVKGLLFSQGVSGYEPLRRDRRQRLDNLTTGDGRSLPMHLKNQISRELDRLELLLDQIKRAEAERDALLAAQQAAAPAPTGRMLLEFRGIGAEFAASLWLEALFRHFDNRRQLASYAGLAPTPWQSGSVDREQGVSKAGNPRLRTTLIQLAWLWLRHQRQSALALWFKERVNRNGGRLKKTTIVALARKLLVALWKYVTAGVVIEGAVMKDA

SEQ ID NO: 307777 - protein, 386 aa, unidentified
MQKSSTHKKNENIDLFVGLDVHKETIDIAVAADGRTAEVRHYGKIGGDLAALDKVLRKLQADGRTLHVVYEAGPCGYAIYRHLTARQIACAVIAPSLTPKKSGDRVKTDRRDALSLARLHRAGELTTVYVPREDDEAMRDLSRAREDAKRAETRARQQLQALLLRHDLRYTGRTPWSAPHLRWLAQLKLPHPAQQITFQEYVTAIDEAAQRVARLTTQIEELLPSWRMAPIVEALQAMRGVALITAVCMVAEVGDLTRFDNPRQLMAYLGLVPSEHSSGGRRHLGAITKAGNSHVRRMLIESAWAYRLPARVTPIIQKRQEKLSKPVREIAWKAQLRLCARYRRLSGKGKTKQLIVTAIARELAAFMWAIAGEVTPAAGGAVASQR

SEQ ID NO: 307778 - protein, 338 aa, unidentified
MRIVCGLDVHKDSVFVCILSENGEKFEAKYGVLTPELEELHRLLVNHGVKEVTMESTSIYWHPIWRILEDIEDLKLVNPYFIKQLPGRKSDVRDAAWIAECTMKDLIRGSFVPAPLVQRMRQYNRRIFDLNKEKVCKLTKLDTVLQRCNLRISNYVSSTDSKSYKKVVRLLSEGVTDATSLAKSIHGRTVNRVGKDIIIASLTGIISEADIDMIRQYREEIEMIDLHIVECQEKLTAICREEFPKEFENLQTIPGVKERSATSILSEIGADMKMFITASALVSWCGLKPRNEESAGKIKSRRMTHGNKYIRKTMIECAWGQAEHKTAFTRNSATRKLS

SEQ ID NO: 307779 - protein, 359 aa, unidentified
MDAQEGAVRHIVGGVDTHKDLHVAAVVDEQDRVLGTRSFASTRQGYRQMLAWMRCFGQIQRVGVESTGSYGAGLLRFLQQAGIAVLEVTTPDRQDRRRRGKNDDFDAQNAAHAAFAGIRTVTPKSRDGMIEALRVLSACRKTAVAARRIALQMIQNTIVCAPESLREGLRRMTRMQLVRTLAAWRPDLTADRDVEVAYRISLKSLARRYLELHDEIADLDAMIAAIVNELAPNLVARNSIGHVGAAQLLLTAGDNPERLRSEAGFAALCGVSPVPASSGKTARHRLNRGGDRAANSALHIIAIGRLRTDARTQAYVAKRIGEGHSKMEAIRCLKRYIAREVFILIKQRQREINQTRIAA

SEQ ID NO: 307780 - protein, 353 aa, unidentified
MVMLGIDVDKDTHTTVAVDDVGRQLGQRMVRATDAGHRQLVRWARTRWPGEPDQRIWAVEDCRHVSGRLERALLAAGERVVRVPPKLMARARDSARTRGKSDPIDALAIARAALREPDLPVAEHDEVSRELKLLVDHREDLVGERTRMQNRLRWHLHELDPELDVPARGLDRLTVLDWLTGWLAEQPVTVVVRLATELLGDIHASTLRINALEREIAERVAQLASALLALPGCGALTAAKIVAETANVFRFRSEACFAMHAGVAPIPASSGRTQRYRLARGGNRQLNVALHRIAVTQIRLPDSLGQVYYQRRRATGDTAMEALRVLKRRLARVVFNLLQPTTTTATGHLPAAA

SEQ ID NO: 307781 - protein, 410 aa, unidentified
MEILHPCCCGLDVHKETVVACVRLVTDGKLVKEVRTFSTTTASLIELSEWLTETKCTHVAMEATGVYWKPVWHILADGGFELVLANAAHIKNVPGRKSDVKDGDWISDLLAHGLIRASFVPDGPTQQMRTFLRTRKQFVHEKGSHILRIQKTLEDANIKLDSVITDIIGVSGRKMIEALIDGEKDPAKLADLADRRLKASQQTLRQALRGRVTPQHRFLLRLHLDQIDALDAAIGRIDREVEASIAPFRTAVEQVMTAPGVKSLAARTIVSEIGIDMSRFPSSGHLISWACICPRSDESAGKRRSTRIRKGSPWLKTTLVQCAWAATRKKGSYLQAQYYRIRARRGPKKAIVAVAASILTAIYHMLKDGTMYQDLGPNHFDARAKERQKNRLIKRLADLGYVVELAPQAS

SEQ ID NO: 307782 - protein, 399 aa, unidentified
MIENYGAVDVFVGVDVGKSAHHAVALNRAGETVFDKTLPNDEARLREILTELKHAGRVLLVVDQPATIGALPIAVAQAEGVLVGYLPGLSMRRIADLHAGEAKTDARDAAIIAQAARTLPHALRSIQAETVNVAELSMLCGFDEDIVKQINATANRLRGLLTQIHPALERVVGPHLDHPAVLELLQYYGSPEALRAAGQTRIATRLSKRAPKIGPRIAAEITASLKAQTVVVAGTSAAGMVVPRLAEQLATLRRQRAEIAAEVEKLVEAHPLYPVLTSMPGVGVGTCARLLTEVSGRHFDTAGHLAAYAGLAPVTRRSGTSIRGEHTSRRGNKILKRALFLSAFAALRDPVSRTYYDRKIAQGKRHNQALIALARRRCDVLYAMLRDGSLYQADHHLAA

SEQ ID NO: 307783 - protein, 354 aa, unidentified
MKCMTKYVAFDVHQATTVASVRGESGRVLARTVLPTEEPAIVEFFRGMRGAVHVAFEIGTQSQWLHELVAPLVDRVVVCDPRQVIRQGNKGDRVDADRLSELLRLGGLRAVYAQSAHRADLKELTRTYRTLVEDGTRVMLRIKALFRARGITTPGSAVYHPVKRAHWLAQLTDRGVQFRAEALYAELDVLRELRPKAKAMMVAEARRDPAWPVLQAIPFYGPVRVALLLATMQTPWRFRTKRNLWAYSGLAVQTSSSADHRFIAGQVVRRRRAPLTRGLNRNHNRVLKDVFKGAATAAASQPGPLQEFYAAMVARGMREEMARLTLTRKLAAITLRLWKRREQYDPAKLTTQAS

SEQ ID NO: 307784 - protein, 315 aa, unidentified
MSDVPCFIGIAVAKAQLDSALRPSGERWAGPNDASGVATLVEQVQALHPTLIVLEATGGLERAVTSALATAGLPVVVVNPRQVRDFARATGQLATTDALDARARAHCADVIRPTPRPLPDAQTQELRALLGRRQQLIVMRTAEQHRLAGTSERLTQAIAAHMTWLNTGIATLDDASETMLRASPRWREHDDLLQRAPGIGPVCARTVVLELPELGTLTRQQIAALVGVAPLNGDSGPMRGRRTMWGGRAHVRTVFYMGTLVATRDNPRIKAFSQRLLAAGKVKKVALTACIHKFLTILNAMLKHRTPWQAQEVQS

SEQ ID NO: 307785 - protein, 347 aa, unidentified
MKPATHILGIDISKDKFDVHLRTLLCSELHLAACFPNNPKGFQALQRWLTQKAACANDQLHACMESTSTYGDALAEFLYGQSYLVSMVNPRRTRHYADSQLTRTVNDQIDAGVIADFCASQRDKLLLWEPLSSQHRQLRDLTRARQALVDERDRFGNMLETAIGLVRKTFLRQVRQLDRQIQQLEKAIKQFVTLFPELHQQIALADSVPGVGFITAATVVAELPPIDKIAQARQAVALFGLDPINKTSGTSVKTPARMSRMGSRRGRKALYMPALTALRYNPLIGALGQRLQAKGHTGKYVVVAAMRKLLRLIFGVIKQGQSFDPQWLASRQKVPSTTQNPTDVASI

SEQ ID NO: 307786 - protein, 447 aa, unidentified
MADRGMAARGMFIVKEETAVIEEQEAGEVWWTAGADCGEERHRLVVVDEHGGRRQSMWIKNRIDEIEKGLVEVIMALPDGARLRVISEGVRSLGSVLSVVAMRLGIEQWEVNPKALSRYREVEGQPRKDDDTDGWLLARMCVVGVSGCHRIVDPRPEERRLARLSRLHGQLKSKRTTAQSQLRSRLVELAPEVLSKEWQGPAANGKGMLAVLQRWPAFIGLESAHVATIERLVRSSTRYGERCTAMAHALKAMARRVRMAAEEREVVRLEMRLLVDELSALEASCAEVEREIKTAVLQHPIACKLLAMPGVGHLTAAADVGEILPLARNVSEGKAATYTGLTPLSRSSGKSEGRSRLARGVNKHALDANYLSALAALTCSALDAAYYRKQRELHQGHPKAHVAALLSLARQRFKVKYKLMTTDAVYDKEVLIASHLHRLEQARQRAA

SEQ ID NO: 307787 - protein, 400 aa, unidentified
MTTVRAGVIAGVDTHADTHHAALISDTGQHLADRSFPATPAGYQALAVFITSHGPLVRVGVEGTSSYGAGLTRVLLATDMPVVEVIRPARTNRRRGKSDPIDAYAAAAAALANDKLPTPKTSADQVDAIRAVLTVRRSAVKAATATMNQIHNLLITAPNQLREQYRTLSGAKLIAALAAQTADDHHHIRTALQRLAHRHQHLTAEVTAADTDLDHLTALANPALRSGYGIGPISAAQLLVTAGDNPDRITTDAKLAALCGISPIPASSGKTNRHRLNRGGDRQANSAFHRIALIRLQHDPRTKAWAEPRQTPHNSNNKHILRCLKRALCREIHHYLLNPHDIPDITDLRPLRHTLGLTLAHAAQQLNTTTATISRLERGQHRNDHLATTYRTWLHTHPTP

SEQ ID NO: 307788 - protein, 337 aa, unidentified
MTDRNLIAIDLAKSVFQVCVFSSAGKVVTNRRHRRAELKTFMAQQRPSLVVMEACYSSHYWGRLLNGYGHEVRLIPAQHVKAFVRGNKNDANDAIAIGEASKRPNLRAVPVKTIEQQDLQAVHRIRARLMKNRIALSNQVRGLLSEYGIVFARGHKALVESLRSLIEEPREDLSVRMQNELVELLAEYEQLCTRLRRIDRQIDQHAHGNALCVRLMTIPGIGVLVASALVAAIGNAAQFSSPRELAVWLGLTPRQYASGDRNHMGAITKRGDRYLRRLLIHGARAALHRRRHDDRLSRWAKAVAERRGNAKATVALAHKIARLAWVLLQREQSYRSL

SEQ ID NO: 307789 - protein, 482 aa, unidentified
MKKTNIYQNQSQELLHLFEEARSGEKVMCVPMDYAKKDHLVMFCNGHGDILRKPFSVKNTPEGLAYIEDQVTRSCTKRGIKKEHVFFGGEDANSFAKNFVSTLRSKGFLVANVNAHDAKKQRESVQASTDRIDLMGIAAMLLNCRGNCCPAQSGIYRNLRLLVRHRRKLVQMLTEVKNRVHGIVDELFPGFLKEQNTGIVAFTESSLYLMEDRFSPKQICRRKRKKLTEILKRFGTSKAEETASKLQQYAAKVLHAPVEYVDTMQLSLSQHVKHIRCLKESIAQMEKEIALNLAQTQGAFLTSVRGIGLVLAAGVTAEIGDPNDQRPLNNLSSYAGIVPRVKQTGGIEGKTYTGPVARRCNRILKDYVVQSAHHLGWHGPPDLMNDYKRRDASGQHANFGMGRRYLRMAMCLMRTSQVYLPSDLRKGDYTPEEKASYYLMNWPYLRGKWKKVGALEKAFALNRPLGLWRQIVQELYDIKLKL

SEQ ID NO: 307790 - protein, 375 aa, unidentified
MKRNKHYVGLDVHARTISVAVADEAGVRSLGKIPHDVTSLRKLLGKLGSKRSIKVVYEAGPTGYGLCRALRSDGYRCDVIAPSLIPSKPGDRVKTDRRDAENLAQLARGEMLTAVRVPERQQEALRDLVRAREAAKSWAKKASQQLGKFLLRHDRRPPQKMTNWTLKHLDWVRSQTFDEPAQNLAFEEYLAEYEHQHERVKRIDGHLEEVYTQLPQEYQTVIRSLAALKGVRFLTAITIVSEIGDMMRFSHPTQLMAYAGVVPREHSSGDRVRKGAISKTGNTHLRRIVGESAWAYARGRSTPSRVITRRRDDLSAAVVNIAERADKRLHRRYRMLTAKGKHRNKVITAIARELLGFIWAIAVEAQMAAGKKAVA

SEQ ID NO: 307791 - protein, 320 aa, unidentified
MTYIGIDVSKDSFVAACPTKSGYTTKSFPNTTSGVRKFISSLPKESHCVMEATGNYSMLLLYLLQQANITVSMENPQKIKHFARAMLSTTKTDEIDAKLIALYGEKMNPAPYKIPSESIILLKQKRTVLRQLKKQLTATLNLQHALSALPKQDPTSKVTVEKTISFLRKQISKMEEEITNLSNKEFNRQMTLLTSIKGISNTIASALITATGGFTYFSSAKQISRFLGLCPTYQQSGTSINVKGHINRNGDTYLRSQLYIAACASLRCNTACRETYERLRAKGKSGKGAIIAIANKLIRQAFAVVTNNRPYIDGYVSTFA

SEQ ID NO: 307792 - protein, 337 aa, unidentified
MKYSGIDLHSNNSVVSVIDETDRVVAEKRMPNDLPKILAFLSPWRAELAGVVVESTFNWYWLVDGLQEAGFKVHLANTTAIKKYDGLKHSGDETDARYLAHLLRLGILPTGTILPPQQRAVRDLARKRMQLVRSRTSHILAVENITARQFGRRITSNQVKRLDEESINQMHLPNDIALAVRANVAVITTLCAQIDLLEKCLHEKVAPDPDHRLLMTAPGIGQTLATVILLEVGTIERFASAGTFASYARCVDSQHMSNGKKKGEGNTKNGNPYLSWAFIEAANFALRYCAEAKRFYERKKVKTNTILARKALAHKLARACFHMLKEHKPFDMTRCFA

SEQ ID NO: 307793 - protein, 426 aa, unidentified
MYRIAGIDVHKRMLAVVVSDVEVAGDYEFESRRWGTTPAQLQALAAWLVEQHVQEVVMESTAQYWRPVWELLEHYWKPICKKQEGARPRSGRLHLAQAQSNRGPRGRKNDFADAERLVKRLVAGELILSLVPDAEQRLWRTVTRAKVQLSRNRVQLQNRLEALLEQAHLKLSSVVSDLLGVSARRMLGAIADGESNPAALADLADPSLRATREELCDALSACQELHPTYRELVKMALEELQLLERQMEKLDQKMATLLSPYQDQVERLAEVPGLGVDSAQQILAEVGASAATFPSAGSLSSWVGACPGQEETAGVNRNHRSPKGNRQMRRLLNLAAHASIKHPGTIFAILYRRYVTRLGPIQTIAVLAHRLCRLIWRILHQGVRYQERGPAVNEKTRRRRTARMIRELRRLGYRIEPTNSQLPVPA

SEQ ID NO: 307794 - protein, 382 aa, unidentified
MAGIVGLHALIGQFADPDDPAGSGQVLVGIETDRGPWVTALVAAGYRVFAINPMQVARYRERHTTSGAKSDAGDAHTLADMVRTDAHQLREVAGDSALAEGIKVVARTHQTMIWDRQRQVLRLRSMLREYFPAALGAFEGVLGDLAAADVLALLERAPDPDTAARLSRAQIAAALKRARRRDIDTKTATIQSVLRAEALRQPAVLAAAYAAGVRSLVAVIGVLNTQIAVLQGQVEAHFGQHPAAEIYRSQPGLGDILGARVLGEFGDDPRRYPDARARKNYAGTSPITRASGRKKVVLARYARNDRLAAALHQQAFCALNSSPGARAYYDTLRARGTGHHAALRQLGNRLVGILHGCLKTGRPYDEGTAWAHHTEQHQQDAA

SEQ ID NO: 307795 - protein, 420 aa, unidentified
MEVAQDDQEIIARVAALDVGKAEVVCCVRVPGVGPRARRMQEVRTFTTMTRSLLAMADWLTGLGVTRVVMEATGDYWRPPFYLLENSFEAWLVNAKDVRHLPGRPKTDRLDAVWLCKVAERQMLRPSFVPPPAFRELRDLTRYRVDLIEARTAEKQRVEKLLEDALIMMSVVASDIFGVSGRDMMAALVAGERDPKVLAQMARGRMRAKTGRLEEAFTGRFTDHHAFLLRTMLARIDGITADIDVVQTRIDQQIAPFAKAVTRLDEIPGVGVTAAQAIIAEIGLDMTRFPTPSHLASWARFAPGVSESAGRKKGNSGTGKGNRYLARALGEAAVGVRRTDTFLGERYRRLAHRRGKKKAIVAVGRSILVIIWHLLADPQSRYQDLGAHHYDQHVNTLTKKRNHIRQLEALGYRVTLEPAA

SEQ ID NO: 307796 - protein, 428 aa, unidentified
MDGVDTTRLESFRQLRKEIRGSNEHLIVGIDVAKDNHHAFFGTARGKTLLKRLVFNNDFQGYEKLFTYVEATKVKNNLNKVVFGLEPTANYHKPLGEHLIKCGFDVVLVAGTAVKKNRELLDGRWDKHDTKDAANVADLVSQGKCLFYEYPIMPLRELRNLLSFKRRLKKQEHGTRVRIRNHLLAQYFPELDPYFSRMSGCSLSVVKWCLEPSLIAGLEYEEFLRLVAPGKRTIKQLEHVKLIWEKAFESIGCNAGETVQFEAKMMVEALQHVRESILEVEEKIEEICLDFPEYRCLLTIPGFGKDISSKVLGAIGNPFRFDNAKQVIKLSGWDLNANRSGKSSGYATAVISKKGKADLRYALYQAALVASSRNQHFVAYFTEKLRQRSREKGIKTKMRVKLAAKLLVIAWTLMKKQEPFDLEYLKVT

SEQ ID NO: 307797 - protein, 352 aa, unidentified
MNQEKYIGMDVHDATISAAVKNAQGKLLMECVLETKAATILEFIQGTLALTFEEGILAAWLHDLLKPHVSRLVVCDPRKNALMRDGNQNDRADARNLAELLRTNQVKAVYHGKHGTRALKELGRSYLTLTKDSTRVMNRIKSVYRSWAIPCGGTSVYSRRHRAEWLAKLVEPAVRIRAEHLYQQLDSLEPVRQAARGELLRESRKHAAVNLLRQIPSIGPIRSALLVAILQTPHRFRTKRQLWAYGGFAVQTYDSGEYRMVRGKLQRNRERITVRGLNRNHNHDLKNLLKGAAISAIERPGPLQDFYAALVEKGMRTSMARLTLARKIAAITLTMWKKGVSFDPKQLQRQAA

SEQ ID NO: 307798 - protein, 391 aa, unidentified
MVYVGIDVAKDKHDCFITNSDGEVLFNVFTIANNLEGFTELYQKIVSVESNPDNVKVGLEATGHYNYNLLGFLIDKGLPTFVINPLHTNLFRKSLSLRLTKTDKVDARTIALMMMSGVNLQSYSDKSYHNEELKSLTRYRFDKVQERAKLKTSVSRLMVILFPELEKLVPTLHMASVYALMTEFPSANAIAEAHLTRLSNLLQQSSRGRYGKNDAIRFRDAARSSIGSSMSAKSLELKHTIKLIQELSSEIDEIEEQIKLIMNELNSPITTIPGINLRMGAMILAEIGDFSRFDSPDKILAYAGLSPTTYQSGQLDSSYSHMEKRGSRYLRYALFNAAKYVCIWDPTFSAYLTKKRTEGKHYNVAVSHAAKKLVRVIYQLEKTRQPYVKVS

SEQ ID NO: 307799 - protein, 369 aa, unidentified
MADRITYVGLDVHKESIVVAVASGGLRGEVREYGRIANTAAALDRLMRKLGADGMALRFCYEAGPCGYGIQRRLSARGQECVVVAPSLIPKRAGDRVKTDRRDAASLAKLHRAGELTAVWVPDARHEAMRDLVRARLDAVHSLRRARQQLSGFLLRQGCHYGRPAWTKLHRRWLAGLKFDQAVHHIVLEDYIAAAEAAAARRDRLTAQIEAMLPDWALAPVVAALQTMRGMALVNAASLIAELGDLSRFTNPRQLMAYLGLVPSEHSSGASVKRGGITKAGNGAARRLLIEAAWSYRFPARLSRELLLRQENQPRPIRDIAWKGQVRLCARYRRLTRAAKPANVVTTAIARELSGFVWAIARHVTIPAG

SEQ ID NO: 307800 - protein, 343 aa, unidentified
MLAITTIGLDIAKSVFQVHGVDARGSVVVRRQLKRRYVLAYFKKLPPCLVGIEACATSHHWSRELQALGHTVRLIPPAYVKPYVKRQKNDAADAEAICEAVQRPSMRFVPTKTSDQQSCLMLHRTRHLFIRQQTAVINTIRAHLAEFGIVAPVGRNGVEDLLYAVADQRDERIPEVARACLEALGALLGKLKAQILEFDRQINAWHRSNETCRRLDELPGVGPALATALVASVADPKAFRSGRDFSAWIGLVPKQNSSGGREKLGSITKQGDRYLRSLFCAGALAVIRYAKIHGTKHRPWLAKLLERRPTKVAAIALANKIARMAWAMMAKGECYREPIALAR

SEQ ID NO: 307801 - protein, 465 aa, unidentified
MALTLGIDVAVRAEHQATLARDGATVWRGRKFWTRPADLERLWADLDLPDPAELTVVVEPTRNAWIVLAEWFRRHGARVVMVPTTQSADLRKYYSKHTKNDRIDSDLLAGCPCCTPKACGSTPGRGPAHSLRRLVKQRSTMVKRRVAVYARLDALVELLGPAWYAVLGSNYGAAALEFLSRYADPHAVIRLGRARLTRFLIARSRGAWRDDHAAGLITAARETLALWGTSDGSDGMDFAELAEDIAHEAEQALFLTRQIKQIDERVANLYADADPAGIVASAPGVGAVISAVIAGRIGDPHRFTSLAAIRAYTGLVPNVSQSGVSKVESSITKAGDPLLREMLCTAADQARRVDPQFAAKYQRLMVGDRHHESAICHLATHLVTRIAACMRAGQPYALRDVDGTPITEAEGRAIVTARYKIDPRRRDNVRYQRMRERRKQAAGQESRCAPTAQPAKTKPTSRHVA

SEQ ID NO: 307802 - protein, 394 aa, unidentified
MRYWAGFDVGKAFHWLCVLDDEGGVLLSRRVEATEEDIEAACSQIRALGSSQERTVAVDMMGGPATLLEAILLGRGERVFYLPGMSVNRAREGYQGEQKSDRGDARVIADQLRMRWRSLREVLPRDDEAVEMRLLVSYRRDLVVDQARCITRLRALLNEVFPALDALLNFQKDRAFVLLSKVATPKAARRLAISRLARWLRTQGIRRSDELAGKVVEAAKAQSCDLPASATRGALVCEMAAEVLRIRERVAEIEDRLEELLSARPEAEVVRSLPGMGVVFTASFLAEVDDPGRFNSADTLAAAAGLVPATRQSGGTSFQTRARRGNRTLKNLFYRSAFSCTAHHAPSKAFYDRKRAEGKTHHQAVIALARRRVNVLWAMLRDGQLYEDRTPAAA

SEQ ID NO: 307803 - protein, 369 aa, unidentified
MELYVGLDVHSKQSVFVIEDADGNVVARGEVPTSREGMERLRNEHALPAGTAVALETGTTSFFVARELSRVELRPVVVDAHEVRLKAHRPTQKSDRRDARELCEGIRRGIYRTIVHVPPLEVSRLRETLSRRRHFVRLQTAEVNAAKRLLRSAGLGQLARSLGTEAGWAKLESSLKEKDEVLAMYVGQHRAMWRSAREQVKALDRVLEVQGAAFAEPLGRLQTVPGVGPIVAATAVAVFSDIHRFPTAKHAASYAGLIPCTHQSGDRNAQGRITKRGSGELRTMLCEAAHHAARANHPLNPYFRKLCAKRGYKMAVIAVAHRLCRILYSMLKNRTNFDIGKLGVERGPFRRTAQHLYRLKVVPIATTNA

SEQ ID NO: 307804 - protein, 315 aa, unidentified
MSQELFVGIDVSKAELEVATHDQDETRSFPNDRRGIAKLIAALEATPPTLIVFEPTGGYELALAIALVAADLPGVMVNAKRLRDFAKAIGRLAKTDKLDAQDIAHYAQAIRPQLRRVPDDQERALRDRVTRRRQLLEMVNMERNRLELASAARRKELNRHLAWLAKEVQRMDDEIERMLRENPVWHEDEQLLRSVPGIGPVSCSALLSELPELGTLSHKQIAALVGVAPYNHDSGKLRGHRCISGGRASVRSALYMSVLTATVHNPPIREFYQRLTQAGKPAKVAFTACMRKLLTMLNAMLRDRTPWQANAIQTA

SEQ ID NO: 307805 - protein, 426 aa, unidentified
MNYNNHRKLGFVYVGIDCHKATHTACVISPFNEKLETLTFKNCKEDFNKLLEMVNKYTSEEVKAIYGLEDTKHLGHTLCSYLLSKGQTVKHINSNFTYNERKKYPIIDKTDELDAQCIAKVTLDELDNLPNAKDDEIYWSLKQLVQMKRYVSHNNTKLKNKLHAQLLHHYPNYKEFFCKIDNVAALDFWETYPSPNMIKDMTPEEIKAGLDTKGKFPLTKASTISLLIKDYDYKDTNYQDSRNILIVTIVKNIKATNEQLKELENQIIALYNKLGVKLHTFIGLTEISSAEIMAEIGNIDRFSSSSKLAKYCGVAPVNFSSGNHDKTVRNEYGNRRLNGSIYYLACRSICTGRATTNPHNPVFLDYYYKKIKDGKTKRQALTCVMRRIINIIFNILKNDVPYEHPTILNEQCLQNIEEMNKEMDEM

SEQ ID NO: 307806 - protein, 391 aa, unidentified
MSMYFVGIDISKYKHDCCILSAANQKVVTKFVILNNKDGFNKLLAALQSLSNQEDIRIGFEATSHYALNLELFLEKAHHSFMEVNPVLISKHKMSTSLRRTKTDTVDCEHIARWLMTVEYKPHPKGFYHAYSLKSLTRLRDRLIRQRSFYLVKITNVLDHTFPEFKPFFKDHFSKTSIYLLENYGSAEKMARMNSASYGKLRSLSHGKFTPQHFLALKSLASNTVGVGNDIFDAELKCLLTLHKSIAEQISMLESQITELIMEIRPRCMTIPRIGPISAAAIYAEYGDVSNFSSPAQMLAYAGLEPGVSESGTESHRGRMVKRGSSHLRYVLLNCVLPLIRYDMTFATYYEKKRSEGKSHLVSTSHVAKKFIRIIYALERQNTDFNVQALR

SEQ ID NO: 307807 - protein, 370 aa, unidentified
MSVRRILAKTIDTDLEYEAIGIDLAKNCVSAALLTTDGEVVCIDRLDYSELEKSAQALSPTTFAMEPCTEMNYLVQKLEAWGHRCLVIGGKNVQNYVENHYSGQKTDLNDAQALAFLAQDKQLRTIKAKDIEQQKYASLTTLREQYIKQYRQTIVSLKGICQAWGLNISKGISGKAQLKDLIENHAAFPEELRESLVDMVTHAQTTQKVLNKITKTLEVLAKNDKVCQLIQTIPGLGTICSCRLRATIGDIKRFKNPKDFPAYYGLVPRSIATGHNEKKGKITHRGDRTMRSLMVQAAGSLVNMATKGKLKSKQLTKWILKKQKEKMPWGKLVCAVAAKLLRIVRAILISSKPYNPKIAGVAKCSLSKGS

SEQ ID NO: 307808 - protein, 372 aa, unidentified
MDKREHGRLWRGSPADQEVGISMRYVGIDIGSDSHVVAAVTADGTVAFKPTGITEDAAGYAKLFALLGQAPVALVTMEATGHYWRNLFAALAAHGYAVALLNPLRTRRFAGEDLARTKTDSIDALGIARFGAQKCPAVTRLPDAATDALRELVRHRDRLVADFGNRVRQLHRLVDLGFPEFRRHVKSLDSMLACTLLAEYPNAQAFAGGTPRRLAKLVYDGVHKVGPELAAALIAAAKVSVGHHHGPAYRIQVRHTCQDLDLLRRRIRELDGDITRQLDDYEVGSLLTSIEGIGTNTAARLIAELGDLSHFRNAAALAAYIGVVPGLKQSGKRRGQRPASVRSATPACAPPCGCRCSRLYVAILGSRPSTIA

SEQ ID NO: 307809 - protein, 410 aa, unidentified
MKVLHRRCAGLDVHKAEVVACARVFAGRKVVHEVRRFGTTTRELMALAAWLESLEVTHVAMEATGVYWKPVWHILEADLTLILANAQHVRNVPGRKSDVNDATWIADLLAHGLIASSFVPPQPIRELRDLTRTRRQAVGEAVRHQHRIEKILQDANIKLSSVLSDPMGVSGRRMLAAMAAGETDAGKIAELGSPRLECGRGALIEALSGRVSEHHRYLIGWHLRLLDEIEAKIAELDQRIEAQIAPFRAAIERLTGIPGIKQVAASAIIAEIGADMSIFPTAGHLLSWARIVPRLDESAGKKRSRRVKKGGAWLKPVLVQCARAAARKRGSYYGAQYRRLKARIGDQKAIIAVAASILTAIYHMLRDGTEHADLGAAYLSRREGDSKAIAHQLARRIRALGYQVDLREAA

SEQ ID NO: 307810 - protein, 377 aa, unidentified
MDKDGRFVGLDVHAETIAVAVAEPQGEVRAVGTIPNTPEAVRRLVKKLGPPETLRVCYEAGPTGYVLYRQLRDLGVPCAVIAPTLVPVKAGDRVKTDRRDAEKLARSYRSGDLTPVWVPDVTQEALRDLVRAREAAKKDQLRARHRLGKFLLRHGRRPPAGIHAWGTKHRAWLRAVCFAHPAQEATLLDYVTEVDHASDRIVRLERTIAAAVETAPAPVRAVIAALQALRGIAQLSAVTIVTEVGALSRFARPRQLMGYSGAVAREHSSGPRTQRGGITKTGNAHLRRVAIEAGWAYRHRPAIGRTLRTRQRGLSEEVKAVAWKAQHRLHTRYRRLLAKGKPPPQIVTAVGRELLGFIWAIGVHVERQTPGDARTPV

SEQ ID NO: 307811 - protein, 334 aa, unidentified
MNNVSLIGIDLGKNSFHVHCQDATGKALSRKKFTRAKLFEFLANCPSATVVMEACAGAHYIARKISDMGHKPKLISPQFVRPFVKSNKNDFVDAEAICEAASRPSMRFVAPRTESQQEILALHRVRESLVRDKVKTTNQMHAFLLEFGISMPKGLAVIRRLSVVLTENELPPYLAKLLVKLQSHYLYLVEQIRDIENELKLAVNHDDTTQRLMSIPSVGPITASVLMANLGNGQQYKQSRDFAAATGLVPRQYSTGGRPTLLGISKRGNKNLRRLLVQCARVYILHLEHQSGYLAEWVRHQLSKKHSCVVACALANKLARIAWAITTKQSVYMA

SEQ ID NO: 307812 - protein, 341 aa, unidentified
MNVKTIGIDLAKNVFQIHGVDEHGKRLFNKQLRRAQMASFFANIPPCLIGMEACASAHFWANKLISMGHNVKLMAPQFVKPYVKTNKHDAADAEAICEAVTRPNMRFVPVKTAEQQAVLALHRSRQSFIKQRTAQANQIRGLLAEFGIVVPRGIQQLQRRLPELVEDADNPLPVLFRTQLSLLQHHLAYLFDVIATLDKQIEQCYRQNALCQRIGKIPGIGPVTASALIATIGKANNFEKGRQLAAWLGLVPRQHSSGGKQVLLGISKRGDTYLRTLLIHGARAVLQSAKHKQDAVSSWANQLMARRNNNIASVALANKNARTVWALLAKEREYCAPIISA

SEQ ID NO: 307813 - protein, 392 aa, unidentified
MIAQALGWDNHRKFSRVSLMEQTPDGQIRAVERARLEHDDKDAMRGWLSRLDPEIPVALEATFGWPWVADLLEELGHPVHLGHPPIIRALAKHEAKTDRCDSDRLGKFQLRGILPESYLAPPEVRQRRERIRYRMALSTLRTSVKNRSQAILHRHGILHDFSDLFGKAGRRFLDSLELPDGSRQALNGCLELLDRLTLLIGEVEQWMTDNLEEDETVRLLMTIPGVGLILAHVIYAEIGEIERFPTARHMASYAGLAPMSNDTAGREGPRHCSMACNHVLRWAFVEAVHGVQRTKGSHGQRLRQLYMRLCSHSKRRGCKSSAKVAVAHELSKLVHVVWSKRMAYSDSPPPRPGSRDDQRQPKETSTMKTTLRSDQPRPPMVRRRATVGQTRL

SEQ ID NO: 307814 - protein, 341 aa, unidentified
MQELYYVGLDVHKKMIAYCVKRADGHIVDEGKVRATRSALTSWGSGRRGRWIVGLEATMFTGWIYDFLKPHTADIRVGHPYMIKAIVAGKKKSDRLDARTLADLLRCDLFPTCYMAPEKTRELRRVLRHRNLLVTEATRLKNKTASLLMEVGAEYSKGRLHSRRYFNELVGNLKEVPSSLLELLHLNRESMEIFERNQRRLVDELVCHPELRTRVERLMSIAGVGEVTALTWALEIGDPHRFRSVKKAVSYCGLCSGQKESAGVSKRSPLSKQRNKHLQRILVEAAKLAPRWNPQLAAVYERERERGTNYNCATLAVARKLVAYLLCVDKTKKAFEPREVA

SEQ ID NO: 307815 - protein, 368 aa, unidentified
MRFVGLDVHAETIAVAVAEATGEVRSLGTIPNREDSVKRLAKKLNADGSWEACYEAGPTGYALYWQLTKLGIVCTVVAPTLVPMKAGDRVKTDRRDAERLARSFRAGDLTAVWVPDPAHEALRDLVRAREAAKRDQLRARNRLSKFLLRYGRRPPEKMTAWTQAYITWIKSGVTFIEQAKQWVLEDYLNEVEHCSLRIKRLEGLIDEAVKTAPETMREVIAALQSLRGIAAMSAVTIVAEVGELSRFATARQLMGYSGAVASEHSSGQRTQRGHITKTGNAHLRRIVVEAAWSQRFKPIVSRARKLRQEGLDPGVIEISTKAMHRLHQRYAQLLGKGKTKQQVITAVAREMLGFIWAIGVAVETKNAA

SEQ ID NO: 307816 - protein, 408 aa, unidentified
MSTPDEVEIWIGLDVGKEDHFADVLDDDGESLFARSVANNEADLVAVIERASKHGTPGLVIDQPGSIAQLAIAVANQHEVPVAYVPGLVMRRAADLYPGESKTDRRDAFVIADTGRTRRRSIHWLDAGNDELLEQLRVLNGFDIDLAADLTRLTNRLRDSLVSVSPALERAVGSRLHQAGVRDLLAKFPTPAALRAAGRARINTAVKKRSPRVAAKVVDAVTAALDAQSVTMPAEQAVGRVIAELAVELDRIHARRDALAAEIEEVFLAHPFGQVLVTLPGIGPRTGARILAEIGDGTRFANGSKLASYAGLAPVTRQSGTSIRGESQSRRGNHRLKNAMFLAAFASLRSTESKAFYDRKRAEGKKHNAAVICLARRRCNVILAMLRNLEPYRAPDATATEEDTPIAA

SEQ ID NO: 307817 - protein, 412 aa, unidentified
MDKTAEAHEVTRFVGMDIHRSYATVAAVDGNQQVVLTARRIDYEHFDEWIRKNLRPTDAVTLESTGNAWYFHDLLAPLVASVTVANPIQVALIAKARVKTDPRDALTLARLLAARMLPSVWVPPTEVRELRALVAHRQRLVKQRTQVRNRLRAVLIRHNLVAPPTDVFGSGQRAWWDGLDLPASEKLRVRHDFAILDSLEPLVKQVEVELARQSNIAPWEDQAAFLLQLPGIGVPSAMQLLGAIGDISRFPTPHQLVGYAGLGAGVHSSGQEHYGGGITKQGRRDLRKTMVDVAWVAVANHFYWKAVFERLADRTGRNKAIVAIARKLLVVVWHVLAKQVADRQAVPERVAGKFLEWSWKVGRVNRRGLTTVEFIRRQLCRVQVGQGLTTVSRGKKTLRLPPALQPAVTGVG

SEQ ID NO: 307818 - protein, 345 aa, unidentified
MKSNTQNAKIEAITEKTLVLGIDVGSETHYARAFDYRGIEYSKKPFKFSNTEAGFATFKEWILDLKERHEKDKVVPGMEPTGHYWFNLGKFLQDNEMKPVLVNPHHVKKTKELDDNNPTKNDRKDPKVIAGLVREGRYMIPYLPDGVYADLRTASNIRFQLQAELTRIQNRISRWFNIYFPEYKTVYGKPDAKSGILILKAAPLPEDILTLGIDGVNQIWRDAKLRAVGKARAKTLIEAAEHSVGSKEGAVAARMEIRMLLEDYESRNIRLQEVMTLIEGLVKQIPMAEKLLEIKGVGIRTVSGFLAEVGDISRFNNPKELQKLAGLALVENSSGKHKGETTISR

SEQ ID NO: 307819 - protein, 342 aa, unidentified
MDEYVGFDVSKEETSFCVMDEAGKILAQGKAFSDPQSLFEALREHTLCPKRIVLETGTLSNWLARGLHEYGLPVDVIDARQAHAVMKLQHNKTDANDAVLLAEIARTGFCRPVSVNSEDAHKQRILVKARRLLVCQRRDIQNAIRGFLCALGIRFPKGSGKLANRVQTALVERPDLTAMIEPLLASSEALETQIKHLDEEVIKQAKASKASQLLMTIPGVGPITALAFAATIDDATRFEKSRTVGAYLGLTSRRHQSGEMDYSGRISKFGDGLLRSLLYEAANSLLTIVRKSHPLKDWARRIRKRSSHKKACVALARKLAVVMHRMLTTGEAFSWPTQEATA

SEQ ID NO: 307820 - protein, 322 aa, unidentified
MPQGEVMVGVDVSMARLDVALWPGGESYSVSNDPPGVEQLLERMLELRPQAVVIEASGGPEDLLVSELCVAGVAVAVVNPRQVREFARSLGQLAKTDRLDALVLAQFGHSAQNHGRLTLTQLPSVAEAELKALVRRRRQLIGMLVAETNRRQRASKVVKRSIVATIRALKRSLAELEQQVRETIKNSPAHQQKIAMLQQVPGIGPQLARTLIAEVPELGQIGRRQIASLIGVAPHAHESGKFKGRRMIWGGRAGVRSTLYMAMLSATRCNPLVAPFYRRLLERGKSKKLAYIACARKLLVILNAMFRDRTTWCPSLDFQHSR

SEQ ID NO: 307821 - protein, 327 aa, unidentified
MNTQTIPKRYIGLDVHKHYLIAIGVDADLNQILGPKRVELCHLDQWMEKTLNQEDAVVLEMTTNTWQLYDELSPHVKSVLVVHPPHVALITRSQVMNDKIVASILARLLAKGLLVGIWVPPVEVRELRALIAQRSKMTRLATHAKNRLHSILHSHHIAAPEGDPFTSDKRSWWLALPISDLEKVNLQSDLNTLIFAQKKVEEMGSALKSLAFKDDRLTRLVHLPGISIITALTILAAIGDIRRFEDAKHLVGYAGMGASIHDSGVSTRTGRITKAGRKDLRSVMMEAAQVASNSHPFWKEELKRMEPRLGRNKTIPQVVGHSLVCIS

SEQ ID NO: 307822 - protein, 364 aa, unidentified
MYDSTTTVTVGLDVHARSVRLAAVRADELLEERTLPYDEDAVERVLRRWPGVRCCYEAGPTGFGLYRHLIGRGIDCSVVAPGLVPQRPGDRIKTDPRDARKLAGLLAGGLLEPIHVPSRELEAARDLVRAREDARLDRMRDRHRLSKFCLRHGRVLPTSSWTVMRRKWLGEQRFEFAAQQITFDSYVHTVDLVDARIEQLERAIRETAEQEPWCGLVARLRCLRGIETLTALALVTEIGDFDRFKTAEEFMAFVGLVPSEHSSGEKRRQGSITKVGNSHVRRLLVESAWHARRRPKVGYELARRQRGQDAVVVERAWRCQQRLYTRWQRMAGRGKPQQKIVVACARELAGFVWAIATEQPLRDT

SEQ ID NO: 307823 - protein, 346 aa, unidentified
MLYAGLDLSRKRLDFHLLDAAGATVEVGAAPPDADGLHRLTQRLARHEAPVRAAIESMNGARFVHDQLELAGWQVEIADAQKVKGLAPLACKTDRIDAWVLAELSRRDLVPAIWLPGPLVRAERERARWRLHLVRHRSSLKQRVHAVLLTHGKPCPVSDLFGVRGRQLLARLGLPEPWQGTIEASLRLIDQLEREISDCERELRRLGADHRYVPLLCTVPGISWVLAYTIAAEIGDVSRFASPRKLAGYSGLCPRVYQSGERDLRGPLSKQGPRYLRWALVEAATHACTAAVYRDRYQQTKARIGKQRGAKVAQIDLARRLSEAIWHMLSRGEPFAPKGATDPLAA

SEQ ID NO: 307824 - protein, 345 aa, unidentified
MKYKSYLGLDAHSKNCYFVVRDRKGQIVRRAMVKTTEVDLLGFVRSIEGNKGLILEESSISQWIFILLHEEVDEIAIINPASRGKAQGPKNDFLDAAELAEAMRKGNLKTVYHSADERMELRTLVSGYDDLVQEISRTKNRLKALFRRTAIPTSRDAEYKQKALLERLPSENERFVGGPLFEQIELLEKQKQLYHERFEANMKNFKEMKLLKSIPGFDRVRVNQVVGIVVTPHRFPSRGDFLAYSMLVKHKKLSDGKLYGQRQPRGKLQLKMIFKMAAKNVVRGENSYRRKYDQVLKDKGDERAAMNAVARKLAFTFLAVWKSGKKYNDHYLEEKVRKGKQSKKA

SEQ ID NO: 307825 - protein, 415 aa, unidentified
MPCVRLPPDGLPNNEELITMKANHTSPPAPVGRVIGLDLHPEVFSAAALAGRDAATAQVEQSWDRRPTAELEKWARTLQAGDVVVVEASGNTFAGVERLRAAGVPAVVLESQRAGQIRKTYCANDRLDAVKLARIYLSGLAHVVWQPDARTRERREVLHGYRKAVTTATRARNRLKSFLSDHHVRLNKGVALTRRSGPDTVRAATPWTALQQLLLEEMLAELQAAHERRRRLSAAMAQEVATDPALLGLMRLLGVRHIIAFAIAAVVGDITRFANPKKLVAYLGLAPSVEDSGETIRGRGELVSFGRADLRALLVQSAQNALQQKNSPLHTWGWKLCLRKASKNIAVAAVARKLTVSIWYLMRGLFAPLQQIDSSLQVKLDKLATAIGVKTLRHLGYESKAIFIKEKSGCLLNPT

SEQ ID NO: 307826 - protein, 344 aa, unidentified
MVYIGCDQHKQFCQLAVLNESGTLIEEKKFYHSDPHALREYFASLPANSQMAIEASGFESWLADFAQSLGIQVTLSHPLKTRAIAEAKIKTDKVDARTLAKLLQTDFLPQAYLATPEIRRRRYFLRFRLCLNRYRSSLKNRVHSLLHHLGIQSPMVTDLFGVRGRQFLDSLELEEGYREALHGYLALLDMTEARVNCLKKRLAAYVKESPEAQLLQTIPGIGVLLAQVILAEIGDLSRFSSSGKLSSYAGLVPSIHQSGQVLYHGSCPQQGNKFLRWAMVEAAQTAVRKDPLLKAFYDRIKRKKGSQKAVVAAARKMLVIVFHMLEKKESFRYNAFPREARQSA

SEQ ID NO: 307827 - protein, 356 aa, unidentified
MFYVGLDIHTKRIAFCVLSDQGQLVQRGQVRGLDEVLRILKGLPDRFEVCYEASCGYGHYHDLLQPLAARVLVAHPGQLRLIFRAKNKNDRNDAERLAKLLYLGETPTVHVPSLQVRTWRELINCRSQVIAKRTRAKNTVRALLRGAGIAPPKQPGLWTKKGLAWLRRLELPTLSQQLRRDLLLEEIETLLRQVRRIEQQLNHQAQHTPAVAQLRSIPGVGIRTAEAVAAFVDDPERFGNAKAVGRYFGLVPCQDQSGDKNRLGHITREGAPVVRQLVAEAAWQAQRRSPTVRAYFERVRRDDPQRKKIALVATAHYLVRVMWALLKRGTVWEESRALAPEPRAVFPGVGITETQQ

SEQ ID NO: 307828 - protein, 343 aa, unidentified
MQVVTTIGLDIAKSVFQVHGVDGNGKVVVRRQLKRRYVLPFFKKISPCLVGIEACATSHHWSRELQALGHTVRLMPPAYVKAYLKRQKNDAADAEAICEAVVRPNMRFVETKTAEQQSCLMLHRTRHLFVRQQNAVINSMRAHLAELGIVAPVGRNGVEELLDVVADPDDDRVPEVARDCVAALGAQLRMLKAQILEFDRRIMAWHRSNETSKRLDEIPGVGPALATALVASVTDPKAFRSGRDFSAWVGLVPKQNSSGGKERLGSITKRGDRYLRSLFTAGALAVIRYAKIHGAKHRPWLTALLARRPTKVAAVALANKIARMAWAMMSKGERYREPAALAR

SEQ ID NO: 307829 - protein, 344 aa, unidentified
MTLEACIIGIDLGKNWFHVVGIDAQGKALLRKKLNRSQLAEFAVTAPRAIVAMESCPGSQHWGRRFSEHGHEVRLIPAQFVKPYLKSNKNDFNDAAAIAEAASRATMRFVPLKSAEQVEMQATHRVRERFVSERTGVVNQMRALLLEHGITVAVGRERFARRMPDILEDAENGLTIGMKSLLHRLRARWLALDIEINEVTALLRDAAGRSELCQRALSVPGIGPIVSTAVVAAVGNARMFRRGRDMAAWLGLVPRQYSTGGKSKLGPISKRGDAYLRKLFIQGAQVLLINMKRDRSRLGEWLQNIEARSHRNIAVVALANKLVRICWKILASGEDYRAYPARTA

SEQ ID NO: 307830 - protein, 353 aa, unidentified
MSKILAIDLGKNNSAVCIFDRGSLKCKYKTLRTRKQVMHDLFVEFADQIEIVLFETGSQMGWVADILWALDIPFKVANTNHAAWKWKNNPNKSDRKDAQRLAMMYHTGFFPTVHVPGRAVRQKRSLINYRDDVVKRITKIKNSIRAILCREDIHLPSSKKGWTIKALSSIRAMAMPFADIEENEDLWKGHLHSEFALLDYTIEELKAIESKLNTLGEADEKIKLLRTVPGVGPRLSEAVVAIIDDPNRFKNGRHVSSYLGMVPRRWQSGQVDITGRISKCGNKLLRTLLVEVSWLCLREPWMRDIFNKVKHGDKKRAKVAIVALARKLLVICWAMLKNGTAFDADYAKRFVKC

SEQ ID NO: 307831 - protein, 345 aa, unidentified
MEHIGIDVHKVESQICILTESGEIIERRIRTQRERFAAVFGVRARTRILIESSTESEWVARCLEELGHEVVVADPNFAAMYATRSRKVKTDRRDARTLAEACRLGAYRPAHRTSDRQRQVRAQLAVREALVRTRTKYISLVGALLRSEGYRIKSGNAECFGRRVEQLAIGGRLKSEVAPLLAVLLDVNKQVAWLDSRLEHLAKTDETVGRLCTAPSVGPVTAAAFASTIDEPERFRGAHQVEAYLGLIPSEMSSGEKQHKGRITKAGNGRLRYLLVQVALSILRLRSPRTEVLRDWAERIAARRGKMIAVVALARRMAGILYAMMRDAKSYEPARPRLAPQAAAA

SEQ ID NO: 307832 - protein, 346 aa, unidentified
MMLIGCDYHPSWQQISWVDTVTGETQEKKLEHASGEAERFYRQLPAPALIGMESTGNCQWFVELAATLGHDLWIGDAAKIRACEVRAQKHDRRDAALILKLLLEGRFPRIWTPSGEEKDLRQLLIHRYKLVRIRAQVKNELQHLAMNQGVTKKRKLWSKAGEKVLRELPLAPWAGRRREDLFKVREMLNGQIDLLDQAVVEAAEKNEKARLLMTQPGVGPITSLAFVLTMGDVSRFQRGKQVASYLGLIPREYSSGEHQRYGSISKQGNRFMRMLLVEAAQCAVRYDPQMRSEYLHRCHRKAKGVAKVAAARKLAIRLYWMLRTNTGYPEVVRVESSSRVPLVSAS

SEQ ID NO: 307833 - protein, 337 aa, unidentified
MSQIIRIGMDSSKSVFQLHGVDAAEQPALCKKLRRVDVERFFASLPPTVVGMEACGAAHHWARALRGLGHEARLLPAQYVKPYVKRGKNDAADAAAICEAMSRPSMRFVPVRTAANQADLMLHGARDLLIKQRTMLLNAVRAHAAEFGVVGARGPWRITELLERIAGNAAVPPLARELFAGLARQIEALNTQLTELDRQLRAWHRGNERSRRLASIPGIGPIGATALAMKVPDPSVFHSGRHFAAWLGLTPKDHSTAGRQRLGIITRAGDETLRRLLVSGAMALINGARPGRTSPWLLDLLARKPKKLAAVALANKMARIAWAILARDETYRRPAAA

SEQ ID NO: 307834 - protein, 350 aa, unidentified
MKICTIGIDLGKTVFHLIGLDEQGRVIAKKRCSRSQLLAHTANVPAALIGMEACGGSHHLGAALAAQGHQVRLIPPQFVKPFVKSNKNDYNDAEAIAEAVQRPRMRFVPIKTNDQLDLQALHRVRDRLVRRRTGIINQIRAFLLERGITFRPGRVYLRSHMAAILEDAELNLSPLMRGLLEQLWQEWKISESRIEEVTDQLGVLADQDTSCKRLQGVPGVGPLVSTALVAAIGNGSAFAKGREFSAWLGLVPRQVSTGGKPKLLGISKRGNSYLRRLFIHGARSILIRERKKYAFGDWMTQLESRAHANVVAVAVANKLARIAWAVLVKGENYRRIPTFSASNCEGNMAA

SEQ ID NO: 307835 - protein, 337 aa, unidentified
MDYFAGLDISMDETHVCVLDREGVVVRESKTESTAQAVANELAKAPSCRRIVFETGRMAPILFHGLSQLGFPVICVESRQAYQALKSLATHKTDRNDARGLAHLARTGFFKPVHVKSLPAHAVRSLISARKKLVGQRVTLENQIRGLAVVFGIRLPRALTAAFVNQALKASEGIAGLSAAMRGLIAARTAVMTAVAAIDVDMRRMTRASGACRRLMTIPGVGQLTALAFVAAIDDPSRIRRSREIGAYLGLVPRRYQSGEVDYVGGISKCGDRRVRTLLYEAANVMLTRYKGQLKLKDWAFAIAKRSTMRKARIALARRLAIIMHAMLRDGTEFAPA

SEQ ID NO: 307836 - protein, 341 aa, unidentified
MEKITTIGLDIAKHVFQVHGVNAVGAVVVRRKLRRDDVAGFFRTLPPCLIGIEACATGHHWARVLMALGHEVRLMPASYVKPYVKRQKNDATDAEAICEAVTRPTMRFVPVKSEEQQSVLMLHRVRELLIRQRTMLVNALRGHLAEFGIVTRQGIVGVGMLIALVDEDDHDLIPPLARSALLPLIGQLREVHEKVSEMDRQIHSWHRSNELSRRLETIPGIGPITASAIAATVTDASLFASGRQLAAWIGLVPRQNSSGGKDRLGRISKQGDPYLRRLLVVGAHAVLRFSGKAKVAPTRWAAELLVKKPYNVVAVALANKMARIVWALMTTGRRFEATGAL

SEQ ID NO: 307837 - protein, 390 aa, unidentified
MEARVANNLAPAAAHDGAVRCLLAIELSKKSWVAAVNTPLSDKISLHKLKPCDWKELLQLIERIRKRIAQELKKPVEVISCYEAGYDGFWLHRLLEAQGVRNHVIDPASLQVDRRARRAKTDGIDVGKLLRSLMAYLRGEPRVWSVVRVPTIIEEDDRRLHRERSRLINERIQHVNRIKGLLAIHGIYDYEPMHPERIQRLERLRTADRHSLPLRLKAEILRELQRLELVLGMIQTIETERDAIVSAKSKSQQTSAKKIKHLVKLKSIGPEFATVLVGEVFYRTFDNRKQVGSYVGLTPSPFQSGSTSRDQGISRAGNAKARTTMIELAWLWLRNQPDSPLSVWFRERVGNRKGRIKRIAIVAMARKLLIALWRYLETGVVPEGAVLKSK

SEQ ID NO: 307838 - protein, 401 aa, unidentified
MRDEYGVFLGLDVGKQGHHAAGLNRDGKRLHDAALPNTEAGLRKLFDKLGRHGRILVVVDQPASIGALPVAVARACGHQVAYLPGLVMRRLADLHPGTAKTDARDAYVIADAARTLPHTLRRVDTGDDTLAELEVLVGYDDDLAGEVTRISNRIRGLLTQIHPPLERVLGPKLQHPAVLQLLSQCGGPAGIRKAGPAKLAELVTKRAPRMGARLVEQIFTALDAQTVVVPGTTAAETVLPRLADGLSDLLRQRDQVAEQVERMLDAHPLSSVLTSMPGIGVRTAARILLEVGDGTSFPTAGHLAAYAGLAPVTRRSGTSIRGEHPPKSGNKQLKRAFFLSAFASLADPLSRAYYDRKRAEGKKHNAALICLARRRVDVLHAMLRAQTPYQPKTADEPRLAA

SEQ ID NO: 307839 - protein, 347 aa, unidentified
MRFFTDRHQCYCGIDLHARSMYLCIQNQEGQIVLHRNMQARPEPFLKAIEPFQEDIVVGVECIFTWYWLADLCAEHKIPFILGHALYMKAIHGGKAKNDRIDSRKIAALMGGGTFPLAYVYPAKMRATRDLLRRRNHLTRKRSELLSHIQNTNSQYNMEPFASNICYKQNRAGVLEQFVNPDVRMSMEADLQLIGELEKQRSKLELYITKNAKNHDPQALYRLRSIPGIGSVLSLVILYEIENIDRFPRVQDFASYARLVKCSRESAGKRNGTGGSKIGNAHLKWAFSEAAVMFLKGNPEGMKFKKRLVKKHGKGKALSILAHKLGRAVYYILKRDQAFDQEKFLKV

SEQ ID NO: 307840 - protein, 312 aa, unidentified
MAEHFFCGIDVAKDRLDVMMSPEGLCFSVRNDAPGWAELVVRLRPLKISAIGLEPSGGYERGVIRALLAAGLSVRRINPNKLRQFARARGVLAKNDRLDARLIAEFVAIMPTRVVRRDKAAERLAEIVTMRRQLCDEHVTVENQATHLEDAMLRRLSKRRLARLEADIHLLDKRLADMVAADTALAPRYQMLISMPGVGPVLAFTLIALLPELGQMSRKQIAALVGLAPYDFDSGKLKGHRSIYGGRMQVRNILYMAALSASRYNPALKAFHDRLTRGNKKPKVIIVAVMRKMITTLNAMLRDNAPWQPKSA

SEQ ID NO: 307841 - protein, 364 aa, unidentified
MSQSKWLVAALVPGVERHPLKKFDAQEEGLLKLLHRWRNEAGQAGREIKRIVVAYEAGRDGFWLARWLRARDVEAYVIHPTSIAVSREHRRAKTDRLDTELLMRAFLGWLRGEKRHCSMVAIPTIEEEDARRPNRERQNLVTEQTRIVNQMKAIFVRFGIRAFRSTLHKVEGKLKDLRTAEGSPLPENTRAELCRHLARLRVVRDQIRAVEQERLRKLAAAPAAEKGSHVMVRLIARVLGVGIETADMLVNEVLSRRWRDHKAIARYAGLTGSPDESGKRRRERGLARAGSARVRCGMIQFAWRFVRFQKGSALAQWFAARTADGRASTRKTMIVALARKLLIALWRLATRGEVPPGIILRPAS

SEQ ID NO: 307842 - protein, 354 aa, unidentified
MKRTTKYVAFDVHQATTVASVREESGRVIARSVLPTDGAALTEFVGGMRGAVHVTFEEGTQAQWLHDLLAPLVDRVIVCDRRGVPRQGNKGDHVDADQLAELLRRGGLRAVYHASAQRTTLKELTRTYRNLVEDSTRVMLRLKALFRARGIPAPGKRVYHPTARLQWLAQLEDPGARLRAETLYAELDLLRGLRPKAKAAMCAEARRDPAWPVLQTIPFLGPVRVALLLATMQTPWRFRTKRNLWAYAGLAVVTRSSADYTLVAGQPVRRRRPPLTRGLNRNHNRVLKDVFKGAATAATARPGPLQTFYHSVIARGTREELARLTLTRKLAALTLRLWKKGERYDPTKLTTPAR

SEQ ID NO: 307843 - protein, 393 aa, unidentified
MFYLGIDIGKNTHVASMLGSDGKAVFKAFSFTNTTDGGNSLLSLINKHISLSSEIEIGMEATGHYWLALYSFLIEKGFVIHVINAIQTDGWRKGVEIRKRKTDPIDSLLIADLIRYGSFVETSLANENIMSLKTLCRFRSYLVDSIADLKRKIICVLDQVFPEYQSVFSNIFGATSKEILSTYASPSEIESLSVDTLAELLASLSRKKIDYDKAEKLSKLATNSFGVTFCKDSFAFQLKMLIEQMRFIEQQVKDTEKQIKDLLAVINSPITTIPGIGPVLGAVILSEIGDIAKFSEPAKLVAYAGIDASVSQSGEYERSSNHMSKRGSPYLRRALFQASLVACNNDPILQAFYEKKRAEGKHHSTCIGAVSRKLCYIIFTILKENRPYEKRNP

SEQ ID NO: 307844 - protein, 368 aa, unidentified
MKQVTTYVGVDAHKKDLFIAMLIGNEPNPVTWQLANEPHAVRRLVRKVEREAPGPVRVFYEAGPCGYALQRQVTTSRVSCDVVAPALIPRKPGERVKTNRRDARKLAELGRAGLLTAVQPPTPEDEAVRDLARARDDAREDLQRCRHRLGKLLLRRGLHYSGRNWTRAHRQWIDSLTWPHAAERAVIDDYLLAIDHTEARLLELDARLAEIAGREPYREPVGWLRCFRGIDTLTAMLILAELHDFRRFASAPALMAYLGLVPGEDSSGEKHRRGRITRTGNALVRRLLVEVAWHYQHRPGIGVALARRRKRQPARVIAIADKAQQRLCRRFRKLASEHKPAPKIAVAIARELAGFLWAALQPVATPAR

SEQ ID NO: 307845 - protein, 401 aa, unidentified
MKTVLSVDVAKNKSMIMLMNSEGEIFIDTKEINHNLEDFEKVKEEIKEINPQNLTVFMESTGTYHLPVERYFKENGFNTLVINSLTTKNNYDTIRKTKTDKKDCYRLAKLFFVNEVEYHNLSKKDLYANLKAMTRQYFYLLQNNVSCKNRYKRLINICFPELEKIFKSTRIYDDTALNFIKEFPHAEIVKEKRIDALYNNLYKTNGRNLNFYKRLSETIKIASANSYPGVDKEHKDVKNLSDMAKIVQNNNNVINELRDKMIETAKKSPYYEIINSFYGIGEILTAEILGELGDITRFDSPKQLIAFCGLDPTIKQSGKSINVKGAISKRGNKYARYILFNCSQMVVKLGASNYPEHPVYIYYQNKKAEGKHYYESLTACSTKILRMLYSMCKNNKQFLEN

SEQ ID NO: 307846 - protein, 344 aa, unidentified
MPVYIGVDFHARKQTISYLTTEDGEIHQLELEHEKQNEIRAFYAQFSGRVVVGFESSGYAAWFEEMLEELGCEIWIGHAAEIRRFARRRQKNDRRDADLILDLMVRGDFPRIHRYSPESRQVLQQLRYRQRLVKMRTMVLNSLMFMASSRGVSLRSKLLTKRGQARLNQLALPPHLQQQREEMCQLLAELTSKIESVEDWLEPQAEQDPRVKRLRTHHGIGPLTGLCLAHTLECVERFANPRKVTGYVGFDPVEDSSGERQRIGAISKQGSRLLRFFLVEAGQVAVRRDEDLRRFYYRVQLRRGHATAKVAVGRRLLVRAFIMLRDEIDYEEFQRRGVAARSSR

SEQ ID NO: 307847 - protein, 317 aa, unidentified
MTMVIAGVDVSKAALDVHVDGVDRTFANDRTGFRALAKWLRQCAVARVVMEATGRMHRGVHRSLHDRGFAVFVINPRQSRDFAKALGELAKTDRVDARILAAYGRILSDAAAPTAPLSAFVDELSDLPVMREKLVDARTALNGTKREVACREAVAAGAGAVDAVTAAIVALEDRIQARIEDDPEPRRIFEILTSIPGLGTITAAAFMCWMPELGRLENRQAAALIGVAPYAKESGQSARSRHIRGGRRRPRDVLYMAALSATTCNPELKALYDRLKARGKHHKVALVAVMRKLVILANVLLRRDRTWTAEPTSAPTG

SEQ ID NO: 307848 - protein, 351 aa, unidentified
MNVTKYIGMDVHRAMTVSAVLSATGKVVAEAIIETKGSVILDFIQSQRGTLWVTFEEGTQAAWLYDLIQPHVAKVVVCDPRKISTQGNKADRPDAKRLAELLRTNALTAVYHGERSTRALKELARSYSAIVGDSTRIKNRLKAVFRARGIDNSGAGIYTTEERECWTSKLEAGAVRLRVQRLWRELDTLDVLRAEAEKDMVVEARKHLSTRILQTVPGIGPVRAALILAFALTPHRFRSKRQFWGYSGLAVVTRTTAEYELVKGRIRRTKKRPALRGLNPNCNRVLKDVFKGAAGTAANGPWRAYFESKVASGNKPELVLLTIARKIAAITLALWKKGERYDETKLTMHAV

SEQ ID NO: 307849 - protein, 408 aa, unidentified
MDLTPMHKRVIALDVHQAKITACAVVEHDDGRVEVTKRDFGAFKRDRRALAQWALEMAPEVVVMESTGVYWKSPFAALEAVGLIAWVVNARHVKAVPGRKTDMADAQWLATLARAGLLRASFIPPVQMRQLRLVARQRQKLVGMCSAEKNRLHKVLVDAGIRINVLVADIHGQSARAMVKALIAGQPMHEVLNHKGRLRASRQELCEALSTEQFSAVHRFVAQEIVQHIEQIEQRIARMDQYLLQGLQPWQPQLRLLQTLPGIDEQGAAMLLVEIGADMSVFGSAERLASWVGICPGNNESAGKRKTGRIRKGNAWVRRLLCEFAQAAARTRCALKAKFDALTIRKGHKKSVVALAHKMLRTIYAMLSNGSHYQDKEVDYEALNVQRNAPRWIKMLRKHGFIATPAAA

SEQ ID NO: 307850 - protein, 312 aa, unidentified
MNIRRVQHFVVDGKEIFVGLEDSKKTWKLAVRSEGMLIHQASMEAKYSVLIRYLRNNFPNCTIHLICEAGFKGFNLYDRLTDDGIDCVVIPPHVVTEPKVNRVKTDKRDARRLALILENHDFRDACHVPDRERREDRQISRTLIAMQKDVIRTRNRIRKLLDFHGIEASFPDRWGRDEFRALKKLSLPEPLKISLDALLTQLEELWNHQVTLRTALRKLCRKERYEKAYTIARSLPGIGWFTAIRLVIELGEDLSHFTSGKKIASFVGLTCSEYSSGQTEWKGHITGMGSRFIRATLIENSLSRSRKCRGVR

SEQ ID NO: 307851 - protein, 420 aa, unidentified
MQVLYERCAAVDVGKDVIAVAVRVPGGRGGRKTEKRACKTFHGVLREMARWLVPLGVTHVAMEATGSYSMPVYHALLEHGGFERVLVCNAGRVKNVPGRKTDLADAEWLAQLPECGLLAGSFVPPAEVRAVRDVARYRAKVAQQRVGEIARLGDVLQDAGIKLDSVASSIATKSGRRMIEALIDGERRGRVPADLALGRMRSKIPDLSMALEGRFGEHHALMCRLHLDHIDHLDTAIAALDTRVEAMMQPFRAARGLLITIPGIGALSAAAVISEIGTDVRRYFPTAGHLASWAGLCPGNHESAGKRSGGRRRHGNKYLQPVLVEIAWAAVRHEGYLRSLYRRHVLRNGGYRSQSARNKAIITVAHAILIIIWHVLVTGRGYEDLGADYFDRRTDPGRETARLIARLEALGKRVTLEDAA

SEQ ID NO: 307852 - protein, 348 aa, unidentified
MTKELFAGIDLHSNNLVIGIINQEGRRVQHRRLACDLKLAEEFLSPFKPQLKSIAVESTYNWYWLVDGLRARDYPVQLANPASMDQYSGIKHAEDTNDAYFLAELQRLNILPTGYIYDPAVRPVRDLLRRRLNLVRQRTALMLSFKSLYTRTTGQAMSLGRLKSLPVEEAQRLYEHPANNLIAQIQKQHIEHLTESIATIEKTVLQSARPLPCYDRLNTLPGIGRILSLTIAMEIGEVARFKRAGQFASYCRTVDAQRLSNGKKKGDNNQKCGNQYLAWAFVEAANFAKRYDEQCRRWFDRKAARTGNVVATKALACKLAKAAWHVIVRGADYDAGRMFPGAQPPPAQ

SEQ ID NO: 307853 - protein, 356 aa, unidentified
MQTQVTKKIDFTGQSLFIGLDVHKKSWSVTVVVDGIEHRTFTQPPDPKALNNYLQRMFPGGAYNSAYEAGFCGYGIHRELNSLGIKNIVINAADIPTSQKDKLQKRDPVDSRKIARELEKGSLRGIHIFDRDLEELRSLNRTRFYLMRDLRRSKNRIKSFLQYYGEPLPQEFDNNQWTLKFVSWLKQVQMKTPGGQDAFSYLIRSYEHQREQMVSLSRQVRVRIREYDNELYSLLKSISGIGPLTSSALMTEIGDINRFPHIDHLSSFVGFVPRMRESGETTHTGGITFRCNSFLRTLLIEASWQAIRQDPALMQYYHRHLVNNKGHKVIIKVARKLLNRIRYVMKNRKPYETRVA

SEQ ID NO: 307854 - protein, 351 aa, unidentified
MVVVGADVHKRSHTFVAVDEVGRKLGEKTVKATTEGHHEALMWARDQFGAELTWGIEDCRNMSALLERDLLGAGQAVVRVPTKLMAQTRKSGRTRGKSDPIDAESVARAVLREPDLPVASHDEISRECKLLTDRRDVLVGQRTSAINRLRWNVHELDPERGPAPRALKAAVHQQALLVWLDTMAGLVAELARAELADVIRLTSEINTLEQRLSERVREVAPALLDIPGCGDLTAAKLVGEAAGVARFKSEAAFSCHAGVAPIPVWSGNTAGQMRLSRSGNRQLNSAIHRIAVTQIRMPDTEGHAYYQRRTADGKTKAAARRCVKRGIARRVYRALLADHQTRNQAPQTAAA

SEQ ID NO: 307855 - protein, 451 aa, unidentified
MDPGFLEHLRLSPRAVIGPGARFLEFFFTGPHADDATQEEEMELLHRRCCGLDVHKETVVACLRLVSDGQVTTEVRTFQTTTADLLRLSEWLAANECTHVAMEATGVYWKPVWHILDDGEFELVLANAAHVKNVPGRKTDVNDAMWLAELLAHGLIRASFVPDTQTQEMRNLLRTRKQLVREQSSHVLRVQKTLEDANIKLDSVLTDLMGKSGRAMMEGLIAGETNPTKLASLADPRVKASHEEFREALRGRVTKHHRFLLRLHLNQIDALDAAMATLDAQVEANLGPFRTAVDLIMSIPGIKNLSAHVIISEIGIDMSRFPSDAHLISWAGICPGNDESAGKRRSNRLRKGAPWLKTTLVQCAWAAVKKKNSYLQAQFYRIKVRRGPKKAIMAVAASILTAIYHMLKDGTMYQDLGCNHFDRRSTDQQKKRLVKRLTDLGYAVEIKPLAA

SEQ ID NO: 307856 - protein, 381 aa, unidentified
MSTATTHHANGNTTEAILFVAFELSEKTWKLGCTTGHGQKPRERSMPARDHERVLDEIAQAKRRLGLPETAPVVSCYEAGREGFWLHRFLLAQGITNHVVDSSSIEVNRRRRRAKSDGLDVRKLLSMLMRYEQGERQVWQVVKVPSVEAEDQRHLHRDLETLKRERASTTTRIKGLLSTQGIQVTTLTKLPEQLEALRLWDGSPIPPGLRDRILRVYAHHTFLSQQIAEIEAERRAQLQTSSDASLDKIRQLMQLKGIGINGSWLLVMEFFGWRAFKNRREVGGLAGFTPTPYQSGESAREQGITKSGNRHVRWMITELAWSWLRFQPESALSVWFHERFGGGGKRLRRIGIVAVARKLLIALWRFLETGALPEGAVLKEG

SEQ ID NO: 307857 - protein, 328 aa, unidentified
MKLQHIIGADLSKESIDLFSHEFQAHLKIENSFKGFRQMLKWLRDQKISCSNVMIVMEHTGLYSYHMEAFLHKHQISFTKVSALAIKRSLGLVRGKNDKIDARRIARYGFEKKDVLVVTSKPDKAIERLRMLHSTRNRLVRHRASLICAIKEYKNILKQSDLIIKSQLSLVKSFTGQIKKIEAEISQLITKEQLVNQNFQLLKTIKGVGKVVATAAIIKTRNFTQFSNARKFACYCGTAPFEHSSGKTIRRKTRISHLADKEMKTLLDQSAKSAIQYDPELKDYYLRRTAIGKSKMSTINIVRNKILYRMFAVIKRRTPFVQNYLQTA

SEQ ID NO: 307858 - protein, 429 aa, unidentified
MQNESAPGARGPVFCGVDTHADSHWLCVLDWRGRKVLSRQFPADAAGYEALAGAIAAAGEPACVAMEGTSSYGAGLTRHLASLGMPVREALSPAGMQRRRPGQGKCDEADAERAARAAMSGSRLGTPKSQDGWVDGVRCMLAARSGAVKARTSAINTARSLLTTAPEGLRSRFRGMGGPRLMEELPSVRAEGALGAALGALADLWAAARDAALDMELAIEASLEENCPALLAMYGCGPVSAAKLAVAAGDNPGRLRSEASFAAICGACPIPASSGKTVRHRLNRGGDRQANSALHEIARQRVMRDPETAEYAERARGRGKSDREVMRCLKRYVAREAYRALMHPHEIRRPEDASGLVAARRAAKVSQVRAASILRTSEKYISMLERGQRELKPIRRAYEAWVEAGLPLDWDRQAFEAERKMDSKKHLAK

SEQ ID NO: 307859 - protein, 412 aa, unidentified
MDVIYERCAGIDISKADVKVCIRVPGRGRARHTETRTFSTMTNDLLAMRDRLIAEQVTVVGMEATGCYWKPVFYLLEEHMDTWLLNARHMRNVPGRKTDVQDAQWICKLVEHGLVRPSFVPPEPIRHLRDLTRYRTELVRERTREAQRLEKLLEDAGIKLSVVVTDILGGSGRDMLAALIEGERDPRVLADLAIGRMRSKTDELIEALTGRFTDHHAFITRRMLHRIDELNADIDAISARIDADLVPFRRQIELLTTIPGVDQRIAQVLIAEIGAAITRFPTAADLASWTALCPGNNESGGKRKSGRTRHGDPWLKGALGQGAIAASRTNNTYLAARYRRIAARRGKKRAIVALGHTILIAAWHMLTNDVPYHDLGGDYFLERTARTRQTRRLVSQLTQLGYQVILNPTHTA

SEQ ID NO: 307860 - protein, 309 aa, unidentified
MTAVGIDVGKAALDVAIDGVTGVARFANTAAGIRKLVRRLEVVADARIVVEATGGYEDALLEACCDAGLWVSRVNPRQARDFARATGELAKTDAIDARLLCLLARLFADRLRQYDAPVPWQRELRDWLRRRGQVVTTLQAQKQQTAMTSPAVRKLIVRTIAALKRELAAIDREMQALLKVHTTPALRSSKGMGPIFQATSLALLPELGTLTRQQIAKLVGVAPMNRDSGQMHGKRRIRGGRAPVRVALYMATLSAVRWDPTMRAHYQQLRARGKLGKVALVACMRKLLTIVNARRRDELRLEGGAAIVA

SEQ ID NO: 307861 - protein, 324 aa, unidentified
MRSIGLDVHKHFAEVAIVQPGQGIVSRQRLPVTPAHLRQFAAGLGPDDQVVLEASFNTWAVADLLREHAGRVIVSNPKKTRAIASAKVKTDQVDAGVLAHLLAADYIPAVWVPDDATRTLRRRVSEHRGLVVQRSQFRNRIHAILNRNLVECPYTDAFGRAGRQWLTALPLPGPERCEVNRLLRLMAALEREIAQLEMELAQARLQDAGLRHLITVPGIGLITALALLAVIGDVKRFARPNRLVGYLGLDPRVRQSGDRPAYTGHISRQGQAHARGLLLEAAHAAIRVPGPLHAFYERVRRASSPRWLGTCSPRTASTNGYGPA

SEQ ID NO: 307862 - protein, 355 aa, unidentified
MDNVKYIGMDVHKETISIAVLDSSGKLVMESVIETKGITIVQFIRGLRGELHVTLEEGTWAAWLYDLLRPYVHEVLVCDPRKNALLKAGNKSDQIDARKLAELLYLNRLTPVYHGEHGVRALKELSRSYVTISGDAARVMTRLKAVYRSWAIPYAGKQVYAPRYRAEWLGKIREAGVRRRAEFYYQQLDELRALRQQVRRELLAESAKHQASKLLCQIPSIGPIRAAQLIAILQTPNRFRSKRQLWAYGGLAIETHSSADHRYVDGQLRASKRPVSLRGLNRNHNHELKNIFKGAAIIAATKAGPFQEFYAALVAKGIRPEMARLTLARKIAAITLIVWKKGVSFDAQHLKPQTA

SEQ ID NO: 307863 - protein, 397 aa, unidentified
MIAVGIDISKAKSTVAVIDSDGTVLASPFTMAHTQPEMEAFVTYLKGLGEPTTILMEYTGHYHYPVLKKLQDEGFPVCIVNPYQMKKYGDVEIHKAKTDKKDALRIAAYALEKSYKLVPYSSMEQKYEDLKFLSRQYSQRITYVAKLKVRLIALLDQTMPGITRILPLNSRNPEKCALLLFIKRFKSFDEIQRIGKARFLASYDVLAKKASERSASSKGLSIYELAVDSITTRGEDPYIWLSQNQCVDLLSATQNAADEIISQMRNIAETIPEYKVLRAMHGVGDRLGPIILAEIGDVHRFHSGKALNSYAGNDAPPYQSGQFESRNRHISKRGSSALRKACYEVMQALKLIKPQDDPVYLFMLKKEQEGKPFNVAKMAGVNKFLRIYYARAMELYK

SEQ ID NO: 307864 - protein, 310 aa, unidentified
MDAMYVGIDVSKNRLDVAVRPSGESFVVSRTGGGIDELIERLKSLSIKLVAVEATGGFETIVAAAVAGAALPLAVVNPAQVRHFAQAVGKRAKTDPIDAGVIAHFAEAVRPVPRTLPDEAARLLAELVGRRRQIIDMIVAERQRENRATNVRVRKSLARHLAMLEKELGAIDQDINTLVRGSPVWRVKEDLLASVPGIGKTLARTLLAELPELGSLDRRHIASLAGLAPYTRQSGRWRGRSMIAGGRSAVRSASFMAALVASRHNPPLKDFYLRLICAGKPKMVALIAVARKLLTILNAILRDNQPWQSA

SEQ ID NO: 307865 - protein, 346 aa, unidentified
MQTPSAVLNIGADVAKDTIVVACSEGSFPARQIANQRTAVLAFLKGLPAGSRIGVESTGTHHELFADAAHQLGFLVFLLNPKDTHHYAKAVGLRGKTDRVDAEVIARMIAHEHTKLHAWIPPTPQQREIDRLIKRRATLISLREAVAMSLHELDGFAADLKALRTRFNQLIARIDLRVKVLVEASPERKQNFTRLCTITGVGPVVGAALVNTLERVPAKSADAFVAFTGLDPRPDDSGQHRGKRRLSKRGPAELRRLLYLAALSAVKTKPWRPLYEHYRAKGLSSTAGPRDPRSAHRSHRLVYLPLQNRIRSCASYESIDIDHRIFREIPASLPNVSCWPILLKNS

SEQ ID NO: 307866 - protein, 373 aa, unidentified
MSDHSEAYVAFDTSKLRNAVAIAAAGRVGEVRYFGEIENSAAATAKLVRKLSGKYARLTFCYEAGPTGYGLYRQIKSLGHDCLVVAPSLIPKKPGDRVKTNRRDALGLAKLLRAGELTAVWVPDARHEAMRDLTRARTTAVADLRAKRQQVAAFLLRQGLHFAGKKSWSKAYLGWLASVKLAAVEQRIVFEEMLLAVRQAQERIERLEQAIRAAVEDWSLCEVVTALMAMRGIDLVSASGFLAEIGDLSRFQTPRQLMAYLGLVPSEDSTGDTIKRGPITKAGNNHARRILVECAWSYQHPPRVGAAKQAKVAAAPPSVRAIAWKAQSRLCGRYRALTKKGKRKTVVITAVARELAGFIWAISREVTSATATA

SEQ ID NO: 307867 - protein, 361 aa, unidentified
MKEEKRRYVGIDLGKRTYQMAIVVKDGKVTMRNGRTTVEGRQKLYQKLKAGDTVAIEAGNLAFIMAKELEAAVGCKVKVLNSRHMALIYGTMKKTDKEDALKLAHILEDYREERLPVVPVPSDREMKRRKLLASYRREVRTRNQAINRLHALFLAQGITDVVKSELATREARAETVRALIELEREEAEHLLECLNLCEKRIEILEVQMEKESEGDEEIERLKTIPGVGPKVSFAFVAHVAPERFGNASQVSNYLGLVPRVYISGDTVRYGRITKRGNGYLRALLVQASWALVRSRAGGRLKERFMYMTIQKGISRKKTIVAIARRLSELLYTLMKNGTRYEVQKFRPEESIEQLAQLAISA

SEQ ID NO: 307868 - protein, 345 aa, unidentified
MKHYVGMDVSVKETSLCIVDEAGGICRELKVSSHPDDLIEVLNDPAWHLVRIGLEAGPLSQWLFEGLSNAGLPVVCIETRHTKAFLKATVNKTDRNDARGIAQMMRVNLFRPVHVKTISSQQRRALLTARKLILNKIRDIENDIRGLLRNFGLKVGLIGRIGFVARIRELLEGMVDLAEIIEPLLSARQQLRESFEVLHRKVLSIVRNDATCRRLMTIPGVGPVVALGFVSTIDIPGRFKNSKAVGPALGLTPVMNQSGESNRVGRISLCGDIMMRTLLYEAAQVMLTVVRKWSWLKAWAMNIAKRRGHQKAIVALARRLAVIMHRMWSDGTDFQWSKDSGPAKA

SEQ ID NO: 307869 - protein, 402 aa, unidentified
MNAVGIDVSKGKSMVAIMRPFGEIVSAPFEIKHTASDINSLVELINSVEGESRIVMEHTGRYYEALAHQLSEANLFVSAINPKLIKDFDNDSLRKVKSDKADAVKIARYALDKWQNLKQYNVMDELRNQLKTMNRQFGFYMKHKTAMKNNLIGILDQTYPGVNTYFDSPARSDGSQKWVDFASTYWHVDCVRKMSLNAFIVHYQNWCKRKKYNFSQSKAEEIYGKAKELVPVLPKDDITKLIIKQAVNQLNSASTTVESLRTLMNETASKLPEYPIVMAMKGVGASLGPQLMAEIGDVSRFTHKGAITAFAGVDPGVNESGSYEQKSVPTSKRGSSDLRKTLFQVMDVLIKTHPQDDPVYQFLDKKRAQGKPYYVYMTAGANKFLRIYYGRVKEYLSSLPES

SEQ ID NO: 307870 - protein, 424 aa, unidentified
MNLTQNDRLKQVTFDTLIVGVDVGSQTHFCRAFDWRGFELSRRVFKFSNTGMGFLTFLRWTEELMNKAEMKKVIVGCEPTGCYWLTFQKFLQDHDIQFVTVNPFTVNRSMELDDNSPEKSDLKDPKTIALLVKDGRFSTSYLPSGVYAEIREASVCRDQIMKQHVRLSNQIQGWLQKFFPEYFECYADWDSTSGLMLLKKAPLPQDILRIGAGGINQIWRDAKVRAAGIKRAQTLVEAAQNSVGLEAGEAARLEIWVLVNDYILKAEQLKRLDEYLEEKVKEVPNVEKLLAIKGVGMSTVIGFIAEVGDIGRFTDPKQIQKLAGLEIVKKSSGKKKGQPRISKRGRRKLRRTMYESAKALMLWNPAFQDVFLYYRNRTRNPLGGMQAKIAVACKAIRVFYVVLQTGCDFDEEKFRKDIIRPEAA

SEQ ID NO: 307871 - protein, 387 aa, unidentified
MSATASGVAQTAIDVTLAAIFVSLELSRDRWMITSLSPGKGEKMSKHSVDSCDVTGLLSHFKTLRAKAQARTGKSVPIVVIYEAGLDGFWIHRVLEREGIESHVVDAASVLTSRRRRRAKTDRIDGEALLRTLLAYKRGEPRVCAMVRPPSPEDEDRRRLCRERKTLVAERVAHVNRVKGLLFAQGISDYEPCRRDRRERLEQLATGDGRPLAAHLKAQLSRELDRLELTPQQLKAVEAERDALLAPKGEAAPAPVAALAGLRGIGPEFAAVLWLECFFRSFGNRRQVAAYAGLAPTPWQSGSVRHEQGVAQSGNPTLRSTMVQLAWLWLQHQPTSALSRWFRERMKQNSGRGKKATIVALARKLLVALWKFVSSGVVIEGAVMKAA

SEQ ID NO: 307872 - protein, 342 aa, unidentified
MQITTIGLDIAKNVFQVHGIDAAEKVVVRKQLRRGKVIAFFEALPPCLVGMEACASAHYWARELRKLGHEVRLMPAKDVKAYVKRNKNDAVDAEASCEAVRRPTMRFVGVKSAEQQGRLMQHRTRDLLLRQRTQVINALRAHLAELGIVAAQGREGLKELLAVIADEKDDRLPIDARASLMVLAAQLQALQTMIGSIEKRIIAQHRASEESKRVATIPGIGTLGASAITATVTDPSAFRSGRDFAAWIGLVPRQDSTGGKQKLGPISKQGDRYLRRILVVGAIAVLRYAKQNPEKYPWLTQLLARRPFKVVAVALANKMARMAWALLAKGGTYRAPALAAAA

SEQ ID NO: 307873 - protein, 337 aa, unidentified
MEYFAGLDVSMAETHVCVVTRNGAVVHQAKVPSTPADIAAELAQVPTCRRVLFETGRMAPMLYHGLSQLGLPVVCVESRQAYQALKSLATHKTDRNDARGLAHLARTGFFKPVHVKSLAAHAVRSLIIARKKLVGQRVTLENQIRGLAVVFGVRLPRALSSTFIRQALQASEGIPGLSAAMQGLVAARTAVLAAIVAIDGDIRRMVRASDACRRLMSIPGVGQLTALAFTAAVDDPGRFRRSRDIGAYLGLVPRRHQSGEIDYSGSISKCGDRRVRTLLYEAANVMLTRYKAPLKLKDWAFAIARRSTMRKARIALARRLAIIMHAMLRHGTEFKPV

SEQ ID NO: 307874 - protein, 428 aa, unidentified
MKYNTQNAKIESITEKTLIVGIDVGSETHYARAFDWRNYEYSKKPLEFSNNEAGFVTFKVWMEELAEKYGKDVVISGMEPTGHYWFNLGAYLQDNGMKPVHVNPHHVKKSKELDDNNPNKNDRKDPKTIAALVNEGRFSYPYIPTGVYAEIRSLSNLRLQAQEEITRIKNRIARWFSIYFPEIKDVYKNPGAVSGLMILKVAPLPKDIVKLGVDGVNQIWRDAKLRAAGLKRAKTLVTAAEHSIGSQEACDSARIELKILLNDYEIYHQREEELMELIEEKLSEVPYIDKLLEIKGIGMKTVSGFVAEVGDIKRFDNPKQLQKLAGYAIVECSSGKHKGESHISYRGRKRLRYVLYEAAISLIARNTEFKEIHRYYQTRGKNSLKKMQSVIAVACKALRIFYAILTKGVTYDGAKMLQDIKRPQLKVA

SEQ ID NO: 307875 - protein, 388 aa, unidentified
MIYVGIDIAKLNHFASAISSDGEILIEPFKFCNDSDGFHLLLSKLESFDKNSLIIGLESTAHYGDNLVRYLVAENYKVCVLNPIKTSVMRKNNVRKTKTDKVDTYIICKTLKMQDSLRFVSYYDLDLMDLKSLGRFRQKTIKQRSRLKIQLTAYVDEVFPELQYFFKSGLHQKSVYALLKEAPTPEAIASMHMTHLAHLLKVTSHGHFGKEKAQQLRVLAQKSVGASDSALSIQITHSIAQIELLNDQLDKVETEMTEIMKYNDSVIMTIPGIGYINGGMILGEIGDIHRFSSPNKLLAYAGLDPSVYQSGNFQAKKTRMSKRGSKVLRYALVNAAHNAVKNNATFKAYYDAKMAEGRTHYNALGHCAGKLVRVIWKMLTDDVEFNLD

SEQ ID NO: 307876 - protein, 426 aa, unidentified
MTNSLFIGVDVALKSNQFCVMNFDQHIFFNSKFSNTPDGSDQFLAKLKSIYEKFHFDKLVFCLESTNIFSFHIACFLSSNEFLNSFNSLVYQVNAKDIKNYKKSFTDLEKTDPTDAYVIADFARVGRCKNLHPFKGSQFIALQRLTRHRFHLVKNVVKEKLYVINNIYLSFSGLVIADKSDKPFCDMFGATSSALFEEFSSPEVIANTSLEDLLEFISLKGKNRTKNPSDKIVLLHKAVRSSYRLDECAYDPINIAISSSLNLIKVFEKQIKLIDKAILKTIIGLDSNAYNVLLSIPGIGRVCAAGILAEIGSINYFKHNSKLAKYIGLSWNRNQSGNFDGVERNLSSFANKYLRYYIVEATSSCIRHNFLFIKSFYDRKYLEVTKHQHKRALVLSARKFVRLIFGLLHKNQYYIPIVSDQISKIS

SEQ ID NO: 307877 - protein, 348 aa, unidentified
MLYVGLDLSRKRLDWLALGEEGQPAGIGAAPPDRAGLARLGRRLDDRPVLAVIESMSGARFVHDQLEQAGWDVRIADAAKARGLAPLACRSDRIDCWVLAELARRNLVPEIWLPDPAVRAERERARLRLHLVKHRRSLKNRVHAILFQHGLPNAYRDLFEAGGRCLLGRVELEEPWASTVRASLALVDRLDDQIGECERELRRLGAEHRYVPLLTTLPGIAWVLGYTIASEIGDIGRFPSPRKLVGYTGLTPRVEQSGERDRRGRLRKNGPNYLRWALIEAAHTAGRDPRFRPIVERMRERHGRKRGSKIAAIEIGRRLSEAIWHMLRKDEPFAPAGAPTPLAAGRPT

SEQ ID NO: 307878 - protein, 461 aa, unidentified
MTPPPPASPGLRTGNREMRRRAPVSDRPGASPGTAGSSLPQGGRLLPLSVPGAVFYTGIDWAAESHAVCVMDASGKVVARFAIAHSAEGLDKLVRKLAGHGDPADMPVAIERPSGRLVDVLLEAGHPVVPVSPNAIKTWRESEVLSGAKSDPGDAEVIAEYLRLRQHRLRVAAPYAEETRALRVLTRTRDDVVDMRVAAVNQLGAVLDAHWPGGKAIFADLESRIALEFLARYPTAASAADLDEAGIAAFCREMGYSGKRPAAVLLGRMRSAPPGTRGDALSTAVRDAVLALVAIVRALTGATRDLDKSVTARLGEHPDGEIFTSLPRSGRINAAQILAEWGDCRQAYDSPDSVAALAGVTPVTKESGKHRAVHFRWACNKRFREAITTFADNSRHASPWAAKIYSDARASGKDHPHAIRVLARAWIRVIWPCWINGVPYDPALHGAAAALARENPDQLAA

SEQ ID NO: 307879 - protein, 459 aa, unidentified
MSSTSTPSAHREPFAALRAGSFVLVNPNAAGLDIGSAEIWACVPADRAPQPVRKFGTFTPDLQALADWLQACDIETVAMESTGVYWIPVYELLEARGFQVYLVNARHIKNVPGRKTDEKDCQWIQRLHTYGLLSASFRPEAEMCALRAYLRHRANLVDYRAAHIQHMQKALQQMNIQLTQVLSDITGETGLAIIRAIVAGEHDPVKLARLRNPRCAHSQDEIAKALTGHYRPEHVFALKQALALYDFYTAQIQECDVEIERHYRVFKPVVDVEQNPLPPPRKKNTHSKNAPSFDVRTQLYRLTGVDLTAIEGLNEVTAQIIISEIGTDMSRWSTEKHFCSWLHLAPHNDITGGKVIRSRTLKGKNRAAQAFRLAAQAVGRTDTGLGALYRRKRAKFGPEAAIVATAHKLARITYHLLKYREPYQEMGREEYERQVLEREVAQLTRKAAKLGFTLTPQVA

SEQ ID NO: 307880 - protein, 315 aa, unidentified
MDQTASQGGFVGIDVGKADIDAAILPRGETLRVARNGAALERLAARLREIAPRLIVLEATGGFERVVLATLAGAGLPVVMVNPRQIRDFARATGRLAKTDRLDAQIIARFAEAVRPEVRPLPDQAAQDFAELAARRRQLVEMISAEGMRAHQAVHQKVRRQLNAHLLWLNHELSALDADLDEAVRGSPLWVERAALLTSVPCVGPTVARTLIADLPELGRLDRRQIAALAGVAPVAHDSGKHHGARHIRGGRTKLRAMLYMAAWVGLRCNPVIKAYYARLTSAGKPRKVALVACMHKLLTILNAMVRTNTAWKTA

SEQ ID NO: 307881 - protein, 419 aa, unidentified
MANLKPTEQNTVLVAIDISKHRHEVLIAIPGKKRNRRFTLTNSLEDFDRLIAFLKNLDASVRVGFEATGNYHRALVFALGKAGFELKLVSSVAMARTREALHNSWDKNDPKDAQVILHMLQIGVVQVFCDPLVSGNNDIQELSKTHDIVSRSKTELWHRILTHYLPLYFPEADRFHRSSRSDWFFAFLEMFPSPYLISTLPKSMFLEQAWDVVGRKVNKKALLSDIYETAVHSVGLPVEPDSEALGMFRLVLAQGRDLIRQRNLIEAHAIELLAHRSDYQLLTSIPGIGPINALTILAEAGNIQRFVHHRQFLKFCGMDLATIQSGTFKGQSKISKYGNARLRRTLWMAGQTAVLQRANSFRDKFERYISKDRHNPHLRRKAYTAVAAKMARTVHAVIHSGELYRPFYEGASPGGRTSL

SEQ ID NO: 307882 - protein, 352 aa, unidentified
MPTITTVGLDLAKKVFQVHGVDAEGKVVVARKLRRKEVLAFFAKLAPCLVGMEACGSAHYWAREIAKLGHSVKLMPPKYVKAYVKRGKTDAGDAAAICEAVTRPSMSFVPVKGVEQQGLSMLHSARSQLIGQRTQLINAVRAHLNELGIIAARGLLGLAELAAIVRDESDQRLSATARTALMVLVRQIEIVSTEIAALDTALRKENKASELGPRLETIPTIGPVIASALRARVTDPKLFDNGRHLSAWLGIVPENDSTGGKVKQKGLSKKGDRYLRSLLITGAMAVVRQAKIRPDKRPWVTKLLGRMSKKQAAVAIANKTARIAWAIMVHGGVYDAAHRAPQCRAEACAATK

SEQ ID NO: 307883 - protein, 412 aa, unidentified
MLFVGDDWAEDHHDVEIVDDQGRRLARKRLPEGLDGIIGLHALVGQFVPDEWAELGPGEAASRVKVGIETDRGQWVQALIAAGYEVFAINPMSVARYRERHSTSGAKSDAADAHVLAEIVRLDRAHHRPVAGDSELGEAIKLVARAHQSLVWDRTRQVLRLRGVLREFFPAALEAFADLDAADTLELLAVAPDPQRAARVSKSRIAAALRRANRRNVEEKADAIQSVLRAPALRQPAQIQAAFAAIVTSQVRLITVLNAEIVQLGEVVASYFGRHRDAEVYASQPGLGVILGARVLAEFGDDRTRFTDAKARKNYAGTSPITRASGRKKLVLARYARNTRLGDAVQQWAFGSLKGSPGARAYYDALRARNIGHQAALRQLANRLVGILHGCLKTGTVYDETTAWAHHLTRAA

SEQ ID NO: 307884 - protein, 346 aa, unidentified
MQHYAGIDVSVEASSVCVVDGSGKVVREAKVASEPETLIDWFTGLGVDLERIGLEAGPLSQWLYAALSGTGLKVELLETRHVRAAFKTMPVKTDRSDARGIAELMRVGWFRPVHCKSLSAQETRALLTARRLMIDKLHDVELSLRGLLRNFGLKVGKTTPKTYEARITLLTQGHPMLETIAAALLAARAELARQFASLDRQVRAQARRSEPVKLLMTTPGVGAIVALDYVCAIDDPARFRSSQRVGAYFGLTQRRYQSGETDIAGRISKLGDKQVRASLYEAANVILTRSARASGLKDWAQRLARRAGMRKAKVALARKLAVVMHRMLIDQTPFNPAIGLSPARAN

SEQ ID NO: 307885 - protein, 417 aa, unidentified
MSNQQRTNHSGTLQYFVGVDLGGEQHAISVINSEGRVVGKHMFPHSGPGLEELVAWLRQQTGDDSSVVAVAMENPRGALCEALLGRNYTVYAINPKQLDRFRDRFSVAGAKDDARDAFVLAQSLRTDRSCFRLLHVDHPKLLHLRELSHGWDRTGQELRRTANQLNDLMRRYFPSLLTLCPGSDEPWLWSLLALAPLPEDAARIKRSRLEAVLKKHRIRRFSASELREVLRIPPLPLAPGSARAIAEQVVLLLPRLVLLQQQTQQLDKRIEALLDELAGDESYNEHRDVTILRSIPGVGKGFTAAVLSEAARPLADRDYRAIRGLAGIAPVTKQSGKTRLISMRQACNRRLRLALHHASASHARNDARAQLHYEKLRQKGHTHGRALRGVADRLLALLIAMLKAQTSYNPELRTVPS

SEQ ID NO: 307886 - protein, 368 aa, unidentified
MSATRMPRGGVKWVGLDVAKEAIAVGVLDGSLETAPRVEKIAHDEVSIRRLVSRLGEPARLRACYEAGPTGYELYRLLMSMGVGCEVIAPSLVPVARGDKVKTDRRDARRLVRLYRAGELVTVRVPTRAEEGCRDLCRLRGAAMFDRRRARQRLGSFLLRRHLVYGDGTTWTLKHRRWLRSLAFDETGAQATFAHLLASVEERELRVVAIDADLAEFFERGLFVDEVARLGAYRGIAPLSALGLACEVCDWRRFPAPAKFMGFVGLVPSEYSTGASTSRYGITKSGNAHVRNVLVEAAWAYQYPARVSPELHRRHEGLPPEVVARAWAAQIRLCGRFRRLAARKERRTVVATAVARELAGFVWAEMTA

SEQ ID NO: 307887 - protein, 410 aa, unidentified
MAERFVGIDVALREHRIAVLDRDGEAVGPSFTIAASQDGVATLLRTLAARGATAAQTLIGLEASGHLWENLEAALVGAGYRVLVLNPLQTRRYRDVVRRKAKTDDIDAHVIAGLIRSGAAQASYVPDEQIQSLRELARLRARLLADRQDYLRQLIAQLDVVLPEHRTVLGDLLSARARGILAQFPTAPHLARANPRTIRRAAEDAGTRGFSLNDAIAVRDAARQSIYSGKAAAARAHVVRTLVSQLERLTSAMDEVDRAATTLLPPSEPGAGPSDAELLQTIPGIGPQTAATLIGELGALTRFTDARALVAYVGFYPVIHESGDRAVPPRLSPVGPRLARHSLYLAAVNAVRRSGEWRTIYLRKKAQGKTAKQALVVVAVKLLHAVYAMLKHRQPYNPSRLLVAPATSRT

SEQ ID NO: 307888 - protein, 338 aa, unidentified
MEQVTTIGLDLAKNVFQLHGVDAAGNVLLRKQLRRGEVLRFFSGLSPCLVGMEACATAHYWARELAKLGHTVRLMPPAYVKPYVKRGKTDAADAEAIAEAVTRPTMRFVAVKTAEQQAVLMLHKVRDLLVRQRTMLINALRGHLAEFGIIAARGPSGVTAAIVALHETQDSLPVLARVALHGLVDQLRIVRDEVVKVEKRIVAQHRADDASRRLATIPGIGPITASAIAAAVPDATLFKSGRQFAAWLGLTPRTHSSGGKERLVGITKQGDGYIRRLLVIGATAVIRLARQDNASKAWAAKLLKHKSARLVSVALANKTARIAWALLARNQSYVAPAM

SEQ ID NO: 307889 - protein, 427 aa, unidentified
MKKEDSRLEEFRQLRNEIRGSEKHLLVGIDIGKEKQNAFLGTATGKTLYKRLIFENNKEGFEKLLTHTEAAKVQNNLSQVVFGMEPTANYHKPLGEYLIIRGHEVVLVSGNAVAKNRQLLDGRWDKHDGKDAANVADLISQGKCQYYEYPCIEVRDLRGLLSLKRKLKKQAQGLWLRIRNNLVAQYFPEMDRYYGSCAQDNLEIVRNCLSPSVIAGMEYNEFFKTVVSRKKGLRQHKHLYKIWQLAGDSICCEAGDAAVCEAEVLVEQLKQTRKAIERVDKEILKLCCLFSEYEFLMSIPGFGPDISAKVLAYIGDPYRFERASQVVKMAGLDLSANRSGKTTDRVVPVISKKGKADLRYALYQAAMIASSRNQHFIKYFTEKIRGREMEKGIKTKMRVKLSAKLLIIAWTLMKNKEPFNPDYLTVV

SEQ ID NO: 307890 - protein, 340 aa, unidentified
MRVYTGLDLSRKRLDWHCCRVDGTPVDAGAVPPDLDGLARLVHRLGDGDVLAVVETMNGARFVHDQLELAGWDVRIADAQRARALAPLACKTDRIDAQVLAELARRDLVPEVWLPDPRVRGERERARFRLHLVKHRTMLKNRINQTLVAHGLGRPTRHLFGPKGRALLERLPLPEPWHGTLQASLVLIESLDEQIAAIDRELRALGADHPYVPLLMTAPGIAWILAYTIASEIGDIGRFPTARKLIGYTGLCPRVYQSGQTDRRGALAKNGPNYLRWALIEAAHTAGRTIYYRPISERMRDRHGRRRGSALAAVEIARRLTESIWWMLTRNQPFAPAGAL

SEQ ID NO: 307891 - protein, 429 aa, unidentified
MNSTQNKKIEQVKETTMIVGIDVGSEKHYFRAFNWRGIELTRKSVAFSNSMEGFNSFYNTIVELMQKSELEEALVGIEPTGHYWFDLGQFMGEKSIKFVMVNPHHVHKTKELDDNSPSKNDRKDPRVIAGLVRDGRYFYSYMPTGVYAELRNASNRRFVLVEEQTRAKNRLQKWIAVYFPEYKGIYTHIDAKGGLLVLKQAPTPEEIVKLGEEGIIKIWKDAKLRRNGNKKALKILNAAMRSIGLRTGLTEARMEIQDLIEDYELQTKRLERVNDLIKELCQQIRYADKLLEIKGIGITTVAGFIAEVGDITRFDSTKELQKLAGLELVADSSGKHNGKTKISKRGRKRLRYLLFEAAISVVGKNEEFKEIHRYYTTREKNPLKKMQSLIAVACKLIRVFHVILTKGVSYDASKMLEGIRHPGEQLKAA

SEQ ID NO: 307892 - protein, 342 aa, unidentified
MGTITTIGLDIAKSVFQVHGIDATGEVVVRRRLSRGRILAFFEKLPRCLVGMEACNTSHYWARELIALGHDVRLMPAQYVKPYVKRGKNDAADAEAICEAVARPTMRFVAVKTPEQQSTMMLHRVRLMLNRQRTQLSNAMRAHMSEFGVVGPVGRMGLERLMAVIADREDLRIPADARVCLEMLAAQLAVVKEQILENDRRIRASARETEVGRRLMEIPGVGPLLASAFVASIADPTVFKSGRDVAAWIGLVPKQNSSGGKERLGSISRAGNRYLRQMLVVGAMAVIRHAERHGTKRRWLIQLLARRAKKVAAVALANKTARTIWALMTNGERYREPTVALP

SEQ ID NO: 307893 - protein, 454 aa, unidentified
MMHGAHIGGQRAGAFLELVDGVDPRRVLLVGVDVAKATWFVVASNLVGEVVVDGVRLVADRAGLAVLERLIAATSGQLDAAVVVVGVEAAGHHHQTLVGHLGDREGLVVRLLNPAQVAAVRKQQGNRRRKTDWLDAAAICELLARGEGSPPHLDASPAATLRPLWSGRKDLVDARGRLRQQAGALVDCLWPGFSATDKHAGVAPVLSSPFDTKAGRVVVGLLAEGWTPAGIAAADPAELRQIFAARGCRLSGPLAGRLIARAASALAPHPAATAGKAATLAGLLGALAALDLQIAGLEAEMAPLLAATQGAKLTQIRGVATVAAAGFVAFVGHTGRWADWSKVWRAAGLDPARSQSGATDASYGISREGSAWGRRAILDLAAGVCRQPGRFNDSYQARLRHRKHPKVALAAVGNQVGRTCLALMDSGADYDPDHQTNYAERRTAKQPKAGGRAA

SEQ ID NO: 307894 - protein, 340 aa, unidentified
MTIVMGLDQHRAQITAEWIDTDTGEISRARVAPAHREAVRRFLGRFSGQQVEVALEATTGWRFVVEELRAVGAGAHLAEPAETSALRGNKKHAKSDRADAKHLRELLMTGRLPECWIAPDHILDLRAKVRLRHTLVDERGEWQQRIRAVLYHHGVPRRSDLDLLTAVGRDWLGQLPLPAAGREQVTIALEMIGALDTQIPAIDKQLRSFARRQPGCRALMGHYGIGELTSVAILAELGDCRRFSSSRYAVRYGGLDITVHASDRRRAPGHLSRQGPPVLRWALYEAAQAATRPSSPDHAYYRQAAQRLGHNRACLAIARNLLKRSYHTLKELGDQALAPA

SEQ ID NO: 307895 - protein, 441 aa, unidentified
MKNEPTQNNNSIPAADPIAAWVGLDWADKKHSLFVRPTDGAATTACELEHKPQALDQFFLQLHQKHPQGRIAVCLEQSRGPVLYALMKYDFVVIYPVNPRCLADFRRAFKVSGAKADPTDADLLSELGCKHHQRLRALVPEDLATRQLRFLVEARRDFVNKRTALANELTATLKSYYPLALEVVGENLEGPMGLEFLRRWPNLAKLQGAKPSVVRAFFYAHNSRSEEKIAARLEAINTAVPLTEDPAIVGSLQLQAAGLARQLAAVQKTVAEYDQQIRVVFEGHSEKWLFEKLPGAGPVLAPRVAAAFGTIRTNLGAALDLLCLSGVAPVKRQSGQQETVHFRFARPKFLHQSLVEFAKSSIGQCDWARLLYEKQITQGKSAYAAIRVVAFKWVRILWRCWKDGQAYDEVKYLRSLKKRGIKLYESLYNALPAETGPVNNS

SEQ ID NO: 307896 - protein, 342 aa, unidentified
MEHYAGIDVSLESSSVCVVDASGKIAREGKIASEPGALIAWFGSLGLELSRLGLEAGPQSQWLFAAMREAGLAVELLETRHVRDAFKAMPVKSDRNDARGIAQLMRLGWFRPVHCKSVPAQETRAMLTARKLVQSKLRDIESSLRGILRGFGLKAGRTTSTRFGGRIKELVAGNASLEVIAEALLAVHAVLLREFKSFEKRVRTMARSDARTRLLMTTSGVGAVVSLTYASAVDDPGRFKSSKKVGAHFGMTPKRYQSGETDVTGRISKIGDKSVRTALYEAAHIILTKPVKGSALKSWAMRLAKRAGMKKAKVALARKLAVIMHRMLVDGTPFNFAAAAAR

SEQ ID NO: 307897 - protein, 321 aa, unidentified
METWVGIDISKDTFDAAWIMDGKKNHLKLENSSNGFKRLLNEVPAESHFAMEATGEYHLNCARYLSSRGNPVAVLNPFAVKMHMQSDLRRCKNDRADAYSIAKFAAEKNTDCWTCPTDDEIRLKHLDAVIDNLQKQIRQSKNILHSLTQVNLRDDQAVSIIKKTISSLEALMEKARNRQLEMVETGKKEEIALACSIPGIGLETSLKFFTHVGNIERFGSSRSLISWIGLTPRNAQSGTSIHKNGSISRMGCTRLRGQFYMCAVVAIKYNPDCRSFYTRLKESGKPSKVALIAVANKLLRQLYAVLTKKEAYVPNFCTKAS

SEQ ID NO: 307898 - protein, 355 aa, unidentified
MESTKYVGLDVHQDAITIAVMNSAGKVIMESIIETKTNTILGFFQGLRGDVHVTFEEGTWAAWLYDLLKPHVTKVVACNPRKNALLKEGNKSDRIDAKKLAELLRIGALLGVYHGENGVRTLKELLRSYLTISKDLGRVMNRVKALYRSWAIPCAGTQVYAPRHRSEWLGKITEVGVRRRAEHYYQQLDALQALRREVRKDLLVESRKHNASQLLRQVPCIGPIRAAQLVALMQTPHRFRTKRQLWTYSGLGLETHDSAQYRYVEGQLQRSKKPQQLRGLNANHNHDLKNIFKSAATMASVSTGPFHHFYESLLTKGMQPTMARLTLARKIAAIILIVWKKGARFDPEHLKQQAA

SEQ ID NO: 307899 - protein, 343 aa, unidentified
MQAVTTIGLDIAKSVFQVHGVDAEGKVLIRRKLKRRYVLAFFQKLPPCLVGIEACATSHHWSRELKALGHTVRLMPPAYVKPYVKRQKNDAADAEAICEAVTRANMRFVETRTPEQQSCLMLHRTRHLFIRQQTSVINAIRAHMAEFGIVAPVGRQGVEALLEVAADGGDNRVPEVARSCLAALGAQLRALKAQILELDRRITAWHRSNETSRRLDAIPGVGPALATALVASVADPKAFRSGRNFSAWIGLVPKQHSSGGKDRLGSISKQGDRYLRSLFTAGALAVIRYAKIHGTKHRPWLTALLARRPTKVAAIALANKIARMAWAMMARGERYKEPVALAA

SEQ ID NO: 307900 - protein, 354 aa, unidentified
MKRTTKYVALDVHQATTVSSVREAGGRVIARTVLPTEATALVEYFSGMRGSKHVAFEEGTQAQWLHDLLEPVVDRVVVCDRRGEPRSGNKADRMDADRLSRLLLNGSLRPVYHGRTDRTTLRELTRAYRSVVEDATRVMQRLKSLFRSRAIRARGRRVYAPKHRAQWLEQLTDRGARFRAEALLTQLDVLRALRPKAKAAMIAEARRDPAWDVLRQVPFLGPVRVSLLLATLKTPWRFRTKRNLWGYGGLAVVTESSADHEFVGGRAVRRRRQPLTRGLNRNHNRIVKEVFKGAATAAIGRPGALRDFYQAMVVRGMRPEMARLTLARKFAALTLRLWKTGERYDPAKLTERST

SEQ ID NO: 307901 - protein, 351 aa, unidentified
MLIIGCDYHPSVQQIAWVDTETGETGERRLKHSDREAEGFYRELKEKGFSVRVGMEATGHARWFERLLGELGFELWVGDPGKIRAKQVKKQKNDRRDAEHLLKLLMKDDFPRLWVPTPENRDVRQLVLHRHRLVGMRTRVMNQLQAIAMNEGIRRKRGLWNKQGRALLESLSLPPWTSRRRQELLELLDHLDPSIEQLSQAIEQEAEKWPEVQRLLTHPGVGPITALAYVLVIGTPHRFRCGKQVASYLGLAPSEASSGDRQRLGHISKQGNAMLRHLLAQAAQSVAHCEDQWRGQYVHLALRRNHAIAKVAMARKLAVRLFWMWRKEWDYQQVKNFGSHVGQLVQSHGVE

SEQ ID NO: 307902 - protein, 378 aa, unidentified
MRESITWVGLDAHKKAINVAVLVGHESKPQEWVVENKPAAIRRLVKKLMRDADGREVRSCYEAGPCGYALQRQIEAEGPVICEVIAPALIPRKPGERIKTDRRDARKLAELLRAGLLTAVQAPTPEQEAVRDLCRAREDAKQDQMRCRHRLGKLLLRRGIVYAGGKKAWTQAHRKWLRTVKFEHASDQAVFDDYLLAIEQVEERIATLEQRMQTTAETEPFATPVGWLRCFRGIDTVTALSLVAELHGIERFASPRELMAYLGLVPSEHSSSERPRRGAITKAGNSHARRLLIEASWHYRHPPRLGAALKERRQGQPAAVIAIADKAQQRLYRRQRHLTGRGKRPAQAVVAAARELSGFIWAALLHQHQQPLASAAVQ

SEQ ID NO: 307903 - protein, 315 aa, unidentified
MNTLDQPNQPVHIGIDVAKATLQIDLLGKSRKLPNTAAGHEALLGLLPWNAFIIMESTGSYHLAPLACFQTAGIPVAIVNPVRVKQFGKARGTLAKTDPVDAALLTDFGRAFLPRPTPPRDPERVLLGELVNLRETLGAQITLWNNLIEHQQSAVARKLSEAQARAAAKAMADVEARIAKLIKDSKTLAPAADVLRESQGVGAVTAAVLLAEMPELGHLNRREAAALAGVAPCANDSGKHEGKRFIRGGRPRVKRALYLASLSAVRHHPTLSPAYKALRAAGKPAKVALIAIARKLVVILNAKLKEHYATLAQPA

SEQ ID NO: 307904 - protein, 350 aa, unidentified
MKSITTIGLDIAKNVFQLHGIDGSGHVILRKSLRRGQMLAFFSELPPCLIGMEACATSHHWARTLMALGHEVRLIPPAYVKPYLRRQKNDAADAAAICEAVTRPSMRFVPVKSEEQQATLMLHSARELLVSQRTALINALRGHFAEFGIVVAQGARNVRLLVAIIHDKSDADLPADARAALRPLASTLIDIEVQIARLSKEILVAHRSNDVSVRLATIPGIGPIVASSLTASIADASVFRSGREFAAYLGLVPRQHSTGGKPRLGRITKMGNRRLRKLLVIGAHAALYSIKSGKTNTPLADWARSLLANKPFKLVAVALANKMARIAWAVMTRNTIYQPAFGGAASQAAS

SEQ ID NO: 307905 - protein, 356 aa, unidentified
MSTMPEIAGEVILGVDTHEREHVAALINELGRLLATRSFPATVRGFRMLLAWAREHGPVCRAGVEGTGSFGAGLARFLADEGVQVVEVTRPNRRGRRHLGKSDTVDAEAAARMVLSGEATATPKRRDGIVESIRVLQIARRSAIKARTQAGQQIRSLVVTAPAELNGALAGLTVARQVDRCARLRPGGTEGAAASTRRALRSLARRWQQLDREVDELERELHALIKAAAPRLLAEPGIGPDTAGKLLVIASDNPDRLRSDAAFAALCGVSPIEASSGKTRRHRLNKGGDRQGNNALWTIANNRLIHHPETRAYAARRAAQGRSRKEILRCLKRHLARRVYRLILADLRAAATVDLT

SEQ ID NO: 307906 - protein, 423 aa, unidentified
MMKLKYSICCGLDVHKNVIVATIVITNKDGISEYMQKSFSTINSDIQRFHNWLIENNCYHVCMESTGKYWIPIFNYLENDIDVCLTHPKYVKAIKGKKTDKKDSKWIADLYKFDLVRCSFIPPKDFRQLRELARYRFKLVCMKSSEKNRIQNCMTVSNVGIASVLSDPFGKTATEIMSYLLEHTADSIDEKAVRKLIKKGAKAKSDEIIEAIRGYNIETDQAKKLELARGHLEYLDNMITQTEVELYVRIKPYYEFVEFVSTMPGMTELSSTIVLAETGVDMNIFDDAKHLCSWCGLSPANNESAGKKKSVRIAKAGDYLKPMMVQCALAAVQSKKQPYFAIKYGRIKKRRGHKKAIIAIARMMMVCIYHMVSEKKPFTPTDYEDLMAPQNHVERVVLNENNVFAYLESLGYDSSKLVKRNDN

SEQ ID NO: 307907 - protein, 473 aa, unidentified
MGKGNGMTRGDRRRNARREQLRGMLPRDGAVIGIDLADEKQALAVIDHDVRVMARKTVRVKAFRLGEALDWAVAQARAKGFTAVAVACEPTGPRWLQVQRLCTERGLRLVCVQPLVSHIARQQQDYTAHKTDEADCVMIARLAVELHCYIPEELDEVWAGLRHLGRRRAALITSETASVQRIRDFLSVAWPVVPEACAQPFESMTWLAALQAVTSRCGGQPGELAVIGLEAFTALVRDALPGWGGQRIHGPICKTVFAALTSTEGVVRGHRRGLLRRVAAELGDLQRARTQRQETEAAMTAALGDLGLARLGDIPGLTATGAAAILAETGDPKRYDTSSSVVKHAGLSPSDNASGAFDGEAHISRRGRPGLRLTVWRAVWAVLIHNPVMAAKYAAMTQAADQAAADARAGSSGHATSAAEAARRRRAKARVACAAALLRWIYSMVVHGTCWDPGVAAGRKDTLAAPSCQPEAA

SEQ ID NO: 307908 - protein, 337 aa, unidentified
METYVGLDVSQKSTAVCVIDGDGNPVWRGIVASDPQAIDSIIRQQAPEVRRVGMETGPLAVWFYHALRNRGVPVDCIHARHVHAALATQLNKTDSNDARGIAQLTRSGWYRAVEVKSIASHEVRLLLGARSQLVSMRTGLYNQIRGVLKTFGVVLPPGTRSAFEKLVEQHTPSTSLIRGVVDILLDSWRHIDRQVRETDKALERIARASDVCRRLMTVPGVGVKTAVAFAAAVDNPDRFRRVGDIGPYLGLTPRKYQSGDVDHNGGISKTGCRLTRHMLFEAASALLLRHKRDCAIRRWAQALIPRIGLRKALVATARKLSTLLLSMWRSGKEFIPG

SEQ ID NO: 307909 - protein, 424 aa, unidentified
MSIVGGLDIHRKQLTFDYVEVETGRLERGRIAPADREHLAGWLTRFDGRTPVAFALEAGTGWRYVVEEMRGAGVAPHLAEPAETSTLRGPKRRAKTDKADAKLLRELLAAGRVPECYIPPSQVLEWRALLELCHDLRVEHTGWAKRVHATCFHQGTTALGEAGVVRGSRQRLESIVAEQLSPVGRLQVNTALSMMDTLAEYLDPLRRRLVATARHVRGARVLIEAIYGVGPQTALALCSWLGGADRFSSFRKAVRLVGLDITVHSSDTKPSPAGSRGRARRCCGGCCSRRPRPRPAAALPVTATTPTSGTATTPTGPRYPKPGVSSARPSTCSPTWARMPSPSSRNRQHPPWSPADGTGGRGDRHAAVAMGFLPRPAPGSHLSDRVTAGRTGAADGPERLSGRASRAGGQPINHHVARHTNERV

SEQ ID NO: 307910 - protein, 322 aa, unidentified
MQGKVLPERSATQVYVGIDVCKARLDVYLHPLGAKFAVSNDAHGFRRLKRSLEGHEVALVVMEATGKLHRAAHRSLVAESFAVAVVNPLRSRLFAEAAGALAKTDGVDARRLAVRGESMKPSPTAPPGALRQTLRDVLRRRDAAVAARTALLNQLGEASVPVAIAEIKRQIRAVETSLANLEAEIERLIAADPSLARRLAVLTSIPGIGTTTAVALIVGLAEIGALSDKQAAMIAGLAPIACDRGEQAGARHIRGGRPQLRRALYMAALSATRCNPDLKAVYDRLRAAGQKPKVALVAVMRKLVILANALVTQNRLWEPNHA

SEQ ID NO: 307911 - protein, 391 aa, unidentified
MPVPNDPGRCSVVLKPESTLIAVIEMSQSSWLVAATVPGLERHPLKKLAVDEAGLLRLLERWREEAGKAGRRVTRMTVAFEAGRDGFWLARWLRAHGVEAHVIHPTSVAVSREHRRAKTDRLDTELLKRAFLGWLRGEPNHCSMAAIPSLHEEDARRPSREREALVAERTRVINRIRGCLARLGIRAFKPTLRRAPERLEGLRTPEGDALPPNTLSELRRDMARLRLIRNQINEVEAARSERLDAAPATGLNAMVRLLARVIGVGVETADMLVHEILSRGLRDRRAVARYAGLTGAPDESGDRRREKGLAKAGNARVRRGMIQLAWRFLVFQRQSALAQWYRARAADARPGTRKTLIVALARKLLLALWRFATTGQPPAGVALRPAQTAAG

SEQ ID NO: 307912 - protein, 379 aa, unidentified
MKRTQVTRQDNNTEQATLYIAFELADKEWKLGFSDGSRERLRKIDADEKEEIWEEIEKSIEHFGLGDDVRLVSCYEAGRDGFWLHRYLESLGVENFVVDPSSIEVNRRKRRAKTDRLDAKKLLRLLMRYCWGEKQAWRVVRVPGVEEEDERHLHRELESLKKERTTHRNRIRSFLKLHGIRIDNPGRTDFVRYLDSVRLWDGSELGCGLKARLGREYARMVFLQMQIKAIEKERKRLVRLQETDSMRRVGQMMALRGIGIESSWLLEKEFFGWRRFRNRKEVGALSGLSPTPYSSGKSEREQGISKDGNRRVRVMMIEIGWSWLRNQPESKLTKWFNERYAEGGKRMRRIGIVALARKLLIDIWRFVEHGVVPEGAIVV

SEQ ID NO: 307913 - protein, 450 aa, unidentified
MKKKKGEIYKPFRVLKPNAAGLDIGARSIYVAVPDDRSKESVRRFETFTEDLHKIAEWLKSCNIETVAMEATGVYWIPIFQILEAYGFEVFLVNARHIKNVPGRKTDVQDCQWIQHLHSVGFLNSSYRPPQNVCTIRTLLRHRENLIKASVVHVQHIQKALSQMNLQIHNVISDITGTTGLAILDSILAGERDPNKLAKHRDRRIKSDEATIAKSLVGDYLPEHIFTLKQSLDTYRYHKNLIYECDCEIEKYLNKFDSRIDPDKKPPSKSKGSRKTKQGNDPHFDLQKHMYRILGTDLTQVNGINSLTAHVFFTTVGPDLSKFPTADQFCSWLKLCPYNKITGDKLISSKTLKTKNRLAQALRLAAWALWNSKSYLGDYYRRMRGKHGAPKAITATAHKLARIIYHLVKNRVPFSETVFEEQEKRFKKQLENRIRKQAKTLGLKIVPILS

SEQ ID NO: 307914 - protein, 361 aa, unidentified
MDDGSKGTPRITVGVDLGDRYSYLCFLDTQSGEVIEEGRLRTTPEALRRRFCSEQWPLRIAIEAGTHSPWVSRVLEQECGHKVLVANPRKTRLIYSNKRKTDEIDAENLARLARLDPRLLYPLKHRGEHSQAHLAIIRSREALVGCRTQLVNHVRGAVKSFGGRLPKCPAVSFHNRAPEHIPEELWPALGPILETIGSLTERIREYDRQLEMVCQEHYPETDLLRQVEGVGVLTALTFVLTLEDPYRFAKSRTVGAYLGLVPASDQSGDRDPQRRISKEGDEMLRRLLVSSAHYILGPFGSDSDLRRHGEKIASRGAKNAKKRAVVAVARKLSVLLHRLWVTGEAYDPLYNTHRRRRELAA

SEQ ID NO: 307915 - protein, 316 aa, unidentified
MTQVYCGVDVSGAALDARIGPSGPELRVARTPEGVAELAAFCRAHGATLVVMEATGGYERAPYVQLWAHGVACALANANAVRQFARAMGFLEKTDRIDAGVIAGFAAARAIGPGPAPDEDQSRLRALVTRLRQLVELKVDQANQRRLVDQPAVLDGIDELTALVRRQIRALEADIAAALDADPLWRRLDHAFRSIKGVAGRTVARLLAELPEIGALGGKAVAKLAGLAPLADDSGRRGGRRHIRGGRGHVRSILFVVAEIVRRHDPDFAAFHRKLKDAGKRPKVVRVALARKLLVRLNAKARDVRAEFAAHTLLAA

SEQ ID NO: 307916 - protein, 408 aa, unidentified
MKSLYRRVAGIDVHRMKQVVTILIEREDGGTDVQAREFGGYKRDLRALVQWLGEHQVELVVMESTGIYWKSVYAHLERAQIETWVVNAHHIKHVPGRKTDMGDSQWLAELGRFGLVRGSFIPPEDLRELRLISRYRKKLTGTLSGEKNRLHKLLDDAGVKLGAVVSDIHGVSAQAMLEGLIEGCHPEQLIALAKGRLKGKREELLLALDGELSARHRLVLANIHGHIQHLEAEIKRLDAYLIEAMAPYRWAWELLQTIPGIDAIAAAMILVEIGDDMSRFGSADRLASWAALCPGNNESAGKRKSGKTRKGNNLVRYLLCEAANAARRTKSIFASKYQSLVIRRGHKKAIVALAHKLIRTIYVLLTRREAYRDSGFDYEAASVAKNAPRWIRALKVFGYWPVATPNAA

SEQ ID NO: 307917 - protein, 364 aa, unidentified
MHYVNNTELSSHEETRSQFNGGRGAIKLGIDVHQDFYVVVEQVGGSNPKPPQRFAKEAFLHWAARLKQKSSAEVYAVYEACGFGFSLQRKLSALWINCYVVCPQKLDEQNRRVKTDGLDAKALCLKLDRFVQGNRDALAMVRVPTEEEEQLRAIHRQREQLVKARKQLEAQGRSLMVNHGVEPVQNWWKPRTFAALPAPQWMKELLANSQPILVALQQKIAALTLQPQSAAASNQPLGLGKMTSVILDREIGDWYRFNNRRQIASYTGLCPGEYSSGNTRLQSCVTKHGNPRLRAALVELAWRLVRFQPNYKPVVKWRQILAKGALATGAARKKAIVAVARQLAVDLWRIKTGRLRAEQLGLTI

SEQ ID NO: 307918 - protein, 454 aa, unidentified
MGQTTSKKGGRDQRLSAVNANAAGIDVGSQFHVVAVPGDRDEEAVRTFQSFTGDLHRLAEWLVACQISTVAMESTGVYWIPLYEVLAARGIAVVVANARDVKHVPGRKTDVNDAQWLQQLHAYGLLRGSFHPPADIATLRAYLRQRERLLDYAAAHIQHMQKALVQMNLQLHHVVADITGKTGMRIIRAILDGVRDPLTLASYRDARCKAAAETIAQALAGNYRPEHLFALRQAVALYDAYQHHVAECDQHLEAVLARLCAPEPPAHPLPAPRHTTRQPNAPSFDVRAALYAMLGVDLTQIHGIGPALALKLVSECGTDLSKWPTAKHFTSWLCLAPGSKISGGKVLSTRTRRSKNRTSALLRLAAVNVGKTDSALGAFYRRLAMRVGKAKAVTATARKLAILFYNTLRFGMDYSDPGASDYEARHRVRVLHNLSRRAKQLGYTLEPASVAGVS

SEQ ID NO: 307919 - protein, 365 aa, unidentified
MVDKEYYIGMDVHKEYVQMAVFTGNGEDPVYERRLTNDNELLTKEVLRFSREGKTIVAYEAGCCGYVIYRAMAKAGVSCHVLPANKVAKKRTDRIKTDKRDARLIGRELRSGSIRPISVPREDDEAARDLMRCREDINEDQRRMKQRLLKFLLRHGHTWTGKNNWTIKHWEWMDSLVFKQEYKKEVYEEYRSQIKSLQERQARVERQIISMAESSRYKDAVNRLRAFKGIDYIVAMSVICEIGDFRRFARAKSFMAYLGFVPSENSSGGKRRQGGITKAGNGHLRKLLIEGAWHYTVNTLAGKRLEQRRKDCPAWVIDIADLALRRLHKKYIRFVLKGKHKNVAVTAVARELAGFIWAVQTASAA

SEQ ID NO: 307920 - protein, 411 aa, unidentified
MDRIYDNCCGIDVHKKLIVACFRCGKKQDVREFGATTRELLSLADWLKEGGCEMVAMESTASYWKPLYNILESSGLNAMVVNARHMKAVPGRKTDVKDAEWIADLLQHGLLQPSYIPDKDQRELRELVRYRKSLVGERTRELNRLQKMLEGANIKLSGTVSDINGKSARSILEYLLTGEPIDEAKYDEMYNQKVIAHNLKATREQIIDDLNGVMSSLQRRMMKELLIHLDELNIHIRNLDDEIDNFMKPEEKQASQAIQDVTGIGNTSAQAIISVIGTDMERFPTDKHISSWAGLCPGDNESAKKRKSGKTRKGNSLLRTTLITCAHAAVKNKKSYFHAQFMRISAHRGTRRAYVAVAHSMLIAIYHILKDGVVFKDLGADYYNQFNKERKINAYLKKLKALGWEAPVVAA

SEQ ID NO: 307921 - protein, 376 aa, unidentified
MDHDSTLYVGLDVHKESITVAYALGEGEVELLGKIGTTKAEVERLCKRLQSKARRVRVVYEAGPCGYGLYRQLAGKGFDCMVCAPSLIPKKPGERVKTDRRDAVKLVRALRAGDLSRVYVPTVEDEAFRDLSRAWVSAKDDLKRARQRLKAFLLSHGVRYAGRADWGPAHRRWLSTYAFDSAWQQLAFEEHRRTIEDRLAQCARLEAALREAVVNWHFYPAVLGLQTMRGVQFTTAVGMLAELGDLSRFEHPRQLMAWLGVTPSEHSSGDRRRQGSITKTGNSYARKLLVEAAWSYRHPARVSPDIQRRHEGIPKAIIDRAWDAQVRLCRRYRKLAARGKNANIAVVATARELAGFIWDISQLSMSLAVSEEAPAV

SEQ ID NO: 307922 - protein, 325 aa, unidentified
MSLPILGIDIAKDTYQVTLLVEPQRHRHSFPNQPDHFAELTAWLQQQGVTQVQACMEATGRYGEALATYLYAQQHTVSVVNPARIKAYARSQLRRNKTDQLDADVIAEFARTQAPPAWRPTAPEIRELQELVHEYDSLQAARHQEQNRLKSGVQSDGVRNLLTQQVAFLDTQLATVLQLIEDLINHHPDLKQRQDLLTSIPGIATLTAAKLQAMELQRFDNARAATAFVGLNPMQRDSGSSVHGRPRLSKIGHADLRRALYMPAVVAKRFNPLVRAFCERLAAKGKPTPAIIGAAMHKLLCLAYGVLKSGKPFDPNYAQIQPVTP

SEQ ID NO: 307923 - protein, 367 aa, unidentified
MSDTIVPYQSFIGVDLHKNTVTLAAVRPDGSLIDRVKIPTKCRNRIEEWLLAQPRPSHLAVEAVGFVEWFIDDYRPCVDRIDIADATELANRRGKRRKNDPNDARDIAQRLARGECPLGYIADDELMQLRKLGRHWHQLSRLLTRTKHSMRSMLLAANIAGPKLDGPAAQKWLLAFGHLLKPVQRQAFSNFLDIVQLVERQRAQLHRQITFANRAERFRKTVELLKSVPGIDEIWACVIAAEIGPFDRFPNADALEFWAGLTSDLQESAGRTQSGKITKAGSRTLRWALCKAALTLCRSDKKPEAVRQRLIRRIGKPKANVAMGRRLLRILYAMIRDGKTYARGPATKHNLAANSARMARKKREETA

SEQ ID NO: 307924 - protein, 424 aa, unidentified
MNHTRMELTNQRIARITAEHAIVGIDIAKDMHVAQVVDFRGITLAQRALPFPNTQAGFQKLRDWIQAICAKHGKASYLVGMEPTGHYWFNLANMLVEQGVAVMLVNPMTTHRNKENRDNSPSKNDAKDALVIAESVSRGFYSEYEPLSPTYDRLKTLMSDREYWVNQQASLGNRIVRWIDLYFPEFRQVFKEWDGVRALATLRAFPLPQTLRKLTEDEVIKGWQEQGMKRAAGGSGKAKAVQLLQAAALSIGKRGTESEAQRDLKRLVSTYDTTTQVLQEMAEEVEVLLGELPLVGRIRSIQGLGSVAIASIFSYAGDLRHYAHGNQLLRRAGLNLAERTSGRHKGQIKLSKRGDSTLRKHLFLAVLSLVRQHPDFKRWHAHQVARGMTRMKSILKLVGKLCRILVGMVQRGEDYRSPGMAAAA

SEQ ID NO: 307925 - protein, 489 aa, unidentified
MSQGKRSVPRAASSKVKAEARPKAASCPGGAPAGALTVLNPNAAGIDVHSDMHMVCIPAERALLEGEGASGDLPANVRKFGANSCDLAAIAAWLAACGVTTVAMESTGVYWIPLFELLEARGFEVYLVEPGQLAHCGARPKTDVLDVQWIQRLHTYGLLRPSFRPANSIVALRGYHRQRQMQIRYAASHVQHMQKALEHMNVKLTEVLADITGLTGRRIIEAILAGERDPRKLAALRNVQCHNDAITIAKALEGTWRPEHLFALRQAYDLYRFHHQQIAECEQMIKTELAQLPNRAGNKPFSPKPRKGGRKQNDLTFEACGPLFKALGVDLTEIEGIDVRTALVILAELGVDVSRFPTEKHFASWLGVCPRQYESNHNKKKRGPRKGKNRIAIALRMAAQGLGKTKSPLAMYYRRIKSRIGGKGAITATAHKLACLVYRMLKYGKEYVTQSIEEYESRIKQQLERSLRRKAAALGYELVAKPAPEPAPA

SEQ ID NO: 307926 - protein, 385 aa, unidentified
MRGQTVLPRDDDVFAGLDVDKRTLAVTFLNHHGLLRSVRMPYSVDHLLNHVRKHFGDQKVAFAYEAGPTGYGLYDGLTAQAYPCVVAAPAMIPRAPGQRVKTNRLDSVSLAENLRGGQLRSIHVPAPLYRELRHLTQLRDTFVRQQAGMKLRVKSLLLFEGLPFPTAPPGSQWSARVLAELRTLPCTGAVRFKLDQLLDSIAFTSQQVHQTTRAIRRLCQTEVELARCIGYIRTVPGLGWSVASQLLARLGDWRHIHHGRQVAGFLGLVPTEHSTGETIARGGITRTGDGRLRSKLIQAAWVAVRQDGELRAFYHTVYRSHPPDRAARIAIVAVARKLGLRVAAVLKEQRPYVVRDDLRSAPGAQAETMPQGTPRRQAEPGAASS

SEQ ID NO: 307927 - protein, 334 aa, unidentified
MKSDAVYIGVDVSKAKLDVYIPPKKEGLRAEIKELENNPTGLRKLRSIARSVKGTICVEPTGGYELELIAFMHKFDVPVAYADALRVRQFAKAEGNLSKNDAIDAALISRFAAKVGARIIDKKDIDIVELKRKTKFRQALIESRTALISRLDTEFDDEIKEMIKAQIKHLNKLARKIENSCIEIINNNERIKELLPRFTMIGGVGDLTAVSILAQLPEIGRLDDAKLNRLVGISPEQRQSGTKEWQRRIGGGRKDVRNALYMAVTAGLMWNSILSDYYHKKRAEGHSHKWAMVPTMRKLLSLLNRIARDPNFIPLPEPESTKKNAGAGRKKKSA

SEQ ID NO: 307928 - protein, 445 aa, unidentified
MSELMPPAKSEPEWAAFAAIDWADQKHFWRLVPAGSRQQEQGEWENTPEAVEAWAAALQQRFGGRPIAVCLEQVRGALVYMLSKYAHLVLFPVHPTMAARYRETFCTSGAKDDPGDTASLLDLLMRHRERLRPLQPDTVETRLMQFLVEERRRTVNEKTRQSNRLTDCLKLYFPQVLRWFDGVDTALVGDLLERWPSLEELRRAHPGTLRKFFHEHNCRSEERNQERIDAIYQAVPASHDAAVLEAGALTARGLVALLRTLRDHIDKLDRRIAELVATHPEGALFASLPGAGSVLVPRLIVAFGTRRERYESAYEMQCYSGIAPVKEASGKTSWVHFRRACPKFLRQTFHEFALHSIGQSEWAKAYYQHLREDKNKSHQAAVRSLAYKWIRIIFRCWKDGKPYDEEVYLNSLRRRGSQLGAALAPATGLGWQTVAGFQKLSENKA

SEQ ID NO: 307929 - protein, 342 aa, unidentified
MVDAMIGVDLAKRVFQVHGSLTSGEVRFRKKLSREQFRAFMARQPACLVVFEACGSASYWAREMQALGHEVKLIAPQYVRPFVKRQKNDAADAEAIVIAARQPEMRFVAPKTADQQAKAVLFRCRERLVHQRTELVNALRATLYECGHVFPAGITHLKRMEALVEDSDCDLPALILAECQDLLAQIAEKSARIGAKSKKMKALAAETDTARRLRTMPGVGPLTALAVEAFAPDMAQFKCGRDFAAWLGLVPRQYSSGGKERLGRVSKAGQRDIRRLLIIGAMSRLNWLGRRTISEGSWLAKMLARKPRMLVAIALANKMARQLWAMLTKNEDYRDPALAAAA

SEQ ID NO: 307930 - protein, 339 aa, unidentified
MKLVATIGLDIAKQVFQVHGADKAGRAVLRRKLRRSEVARFFSELTPCLVGIEASGSAHHWARVLSGVGHTVRLMAPQFVKPYVKSQKNDANDAEAICEAVTRPNMRFVPQKSVEQQDLQCLHRVRSRLVANRTQLINQLRGLLAEYGIVLPQHPGQVRSGLPTVLEDADSQLTGFARELFHSLYEELTQLDEKIAHADHRIQIAFQNTPNCRRIAAVEGVGPLIATAIVAAISNGHAFENGRQFSAWLGLVPRQNSSGGKSRLLGISKRGDPYLRTLLIHGARSVVFRAKAKTDKRSLWIIDKQQRLGTTKACVAVANKNARIIWSLIAREQEYRRAA

SEQ ID NO: 307931 - protein, 337 aa, unidentified
MQKSYLGIDVSKLSFDISLIVFNKGRKEPIVTSKFNNDAPGFESFKVWLDEHQVTFDSNSLLVIENTGIYHRLLWNFCSTHLLPIYIGNAANLKWSFGIARGKNDKVDSMRLCEYAYKNYEDIKPTPILNKVLITLKDLLSNRSKLLKLKNAIKQTLNELKGSNDKATQSLMEKLNKAALEGLKQSIKQIDAELLKMVKQDKSIFANYKYILSVPGIGKITATFIICCTNNFAIKVTGKQLANYAGVVPFDNTSGTSVKGKSRVHFMANKELKSLLTMGALSAIQAYPEFKDYYERKTKEGKKHLQVLNAIKNKMLLRVASVINQQKDYVNNYKKAC

SEQ ID NO: 307932 - protein, 343 aa, unidentified
MKYFAGIDVSLNESSVCVVDESGAIIREGKVPSEIAPLVDWFDGIGVTCERIGLEAAPLSQHLHEGMAAAGLSPVCIETRHVKAVLSASINKTDRNDARGIAQMMRVGLYKPVHVKTQTSQEQRVLLTSRKFIVHKRQDVENEIRGALRNFGLKIGNAGRARFEVRVRELVQDNAFLRDVVGPLLEVRHCLREQEAALHKQVLRIAHRDPVCRRLMTAPGVGPIVALTFRATVDVPARFARSKSVGAHFGMTPKTYQSGTIDVTGRISKCGDGLVRVALFEAANTILTRIVKWFPLKAWAMNVAKRRGAARAKVALARRLSVILHRMWVDGADYNWGNEPCAA

SEQ ID NO: 307933 - protein, 353 aa, unidentified
MNNIKYVGMDVHKSITVIVVLNELGQFESRSQIKTKGENICDFFRGISGKVEVVFEEGTHSAWLYKLLKPLVASVTVCDPRHNKLIEDGNKSDDEDAETLAQLLRLGAVKAVYKGDDQQQQLKEICRAYDNLIEDSTRVRNRLKAIYRGRGISCSGHALYRADQRSDWLAKLGEDAARFRAESLLEQLESLSQLRKQSKQQLLAQARTHADYRILIKLPGFGPVRVAQLIAVVGTPHRFRTKRQFWPYCGYAVVTRSSADYQIVEGKIVKQRKKVSTRGLNRNHNPQLKQVFKGAALTALRHEAIKAYYQRLIDQGTRPELARVSVARKLASIALTIWQRREEFNVKKAFAQV

SEQ ID NO: 307934 - protein, 398 aa, unidentified
MDSLLVGIDVSKDLFSVMGIDFEGNESFSESYSMDSSGFEELMKAITSHCEDFSKVIVGMESTGCYHINLYSFLTSREIHTMVINPLLITNYAKLSLRKTKTDKKDAGTIAKFLLDHRQEISQLSVSQDLQDLRDLSRERESLCHLISAIKVEIKRVLRTTFPELESIGNLYTRSMVRFLQEYPSARLVRAAKLKAIAKALNQPSVGNKLTLTAEDIMKAAQRSVATVSPAKEIIIRGKIATLLHLQERLAEVTKLLIELCQRTKLEDLDILRSIRGVGPNTAAPFLAEMGEVKGYSSHKKIIAYAGIDPSVHQSGKWIGMSKLSKRGNRHLRRAIYLMTASVVSQNAFFKAYFLKRKREGLAPQKALFATAHKLIRVIFAMLSQRTHFKVKEANQNS

SEQ ID NO: 307935 - protein, 351 aa, unidentified
MNSMIIGGVDTHAATHCAAAIDTTGRLHGVAEFPATDAGYKRLVAWLRSHGELQAVGVEGTGAYGAGLARHLRVEHVTVIEAPRPDRRLRRNHGKSDSIDAEAAARAVLAGTATVIPKRADGPVEAIRALRVARLGAVKAKTAATNTLRGVLITAPEPLRAQLPSSGLPNKVIEACARLRPDTDHLADPTQATKAALRSIAQRARALREEIKILDAQIQALLAATAPATLEVFAIGPDTAAALLITVGDNPDRLRSERAFAHLCGVAPIPASSGKTNRHRLYRGGDRSANRALHIAVIVRMRYCPKTRAYVARRTTEGLSKPEIIRCLKRYLAREIYRALRADYTALTAVT

SEQ ID NO: 307936 - protein, 351 aa, unidentified
MAMLADLVELVIGVDTHKHTHTAAVVAATTGAVLAQATVAATPAGYRQLLALADQQPGQRVWAIEGTGGYGAGLTRFLHAHAEQVVELDRPKRATRRHGAKSDPLDATRAAREALGRDQLAQPRAAGHRAALQARLTTRRSAVQATTDAQRQLHALVVAAPDPLRGRLRDLTTHQLVTACGRLRQRAAWDAETAATAASLRALARRIQVLDAEIAEHTRAITTLVRAWRPELLTPCGVGPIVAAIVLCAWSHPGRCGSDAAFAMLGGAAPIPASSGQTVRVRLNRSGDRHLNQALHLIVLTRLRYDPATRAYAQRRRAEGKTNREIRRCLVRYVARQLYRLLEANPRFDPT

SEQ ID NO: 307937 - protein, 544 aa, unidentified
MMTRTVGQSFWSVPMSLRPTNRYEKAEARCGARTRACRVETLLDTLARFFKGVSCPHAGKKSDENGIRAEVAPEIVDGTGAGEAVRVFDRGPIRKNECGCLRSKPREQAERVKVTEIFGPALCCFGQERDNVESIATQSRVLAGIDVHKKMLAVVVRRDQNGETGYQQRAFGTTRIEIEHLAAWLQQNHVAEVVMESTAQYWRPVWYGMEVHFKLHLSHPLQTRAPRGRKRDFRDARRLVDRLNAGNLEESFIPGAEQRSWRWLARTRVDLQRKITRVRNQVEGVLEEGGSKLAAVVTDLFGVSGWSMLERMAAGETDTEALVELAQGKLLKKKSQLREALRGALPEHCRLLLRQQMEQVTLMRKQSLELSVALGRAMKEYAATLKRLCSMPGVDQCAAQALLAEIGPRAAAFATPEQLASWIGVCPGSQESAGVSYSTRSAKGNRHLRRILCQIAWAAVHSKGTFFHQLFGRLKPKIEAKGAVWAVAHRIAKVVWLILSREVEYVEKGPAPPNQRTLMRKLRRLAKDFALLGIDFNKALHASV

SEQ ID NO: 307938 - protein, 420 aa, unidentified
MSEMFDWYVGIDWASEVHQVCLADDRGVVRGERAVRHGGEELAALAAWLIATTGAAPERIAVGIELPHGPVVESLMERGFAVHALNPKQLDRFRDRFSVSGAKDDRRDARVLGDSLRTDTRCFRRLKRDEPRLIELRERLRMTEECKHERVRLTNRMREQLWRYYPQILELSDDLSAAWFLDLWALAPTPAKALRVRESTIAKLLRKHRVRRFDAAEVMRRLRRPALTVAPGTVEAASAHVGALRDRLRLVTRQITAAERRVDQILTELAASPEEPEAAPGQSPQQSDVTILRSLPGVGRIVCATLLVEAGGPLKAGDHQALRALAGVAPVTRRSGKSCVVLMRQACSQRLRDAVYHWSRVAVQCDATCKARYQALRQAGHSHGRALRTVGDRLLETACAMMRSRSLYDPQRTAREPQAA

SEQ ID NO: 307939 - protein, 343 aa, unidentified
MQTITTIGLDIAKSVFQVHGIDTDGNIVIRRQVKRRYVLAFFQKLPPCLVGIEACASSHHWSRELQALGHTVRLMPPAYVKPYVKRHKNDSTDAEAICEAVTRPNMRFVATKTPEQQSCLTLHRTRHLFIRQQTSVINAIRAHLAEFGIVAPVGRNGVEQLLGVVADSNDKRLPEVARACVVALGTQLQTLKAQILEFDRMIRAWHRSSEASRRLEDIPGVGPVLATALVASVADPRAFRSGRDFSAWIGLVPKQNSSGGKDRLGNISKRGDRYLRSLFTTGALAVVRYAKIHGTGHRPWLTELLTRRPTMVAAIALANKIARMAWAIMAKGERYKEPAALAA

SEQ ID NO: 307940 - protein, 385 aa, unidentified
MAPIRMPEAVIGLDVGKSSHWACVATRDGEVLLSAPVANREDDLDSLFGRFPDALVVVDQSRNIGALALARARAAGMSAAYLPGLAAHGAARLFAGDAKTDERDAMVIAKTALGIPDALLPVGDPGPTIAAARALVAQRNFLTCENTRNKNRLRSILLESCPAFEALVDLSDGPQLRLMASLGGAWSVADAGPRRAAALTRGAARGKIEALVRSTTSSTRPDASVVAAEDRAVKLLARRISENSAEIEAITAEISALLEGDDTYRCLLTVPGIGPKTASELAISIDIEDFPSHDRLASYCGLAPRNRQSGTSISSVTASRQGNKRLKNLLIFSCNCLTRTEGRWGDYYTRCRERGMSHGKALKALARKRLKVIYAVMRDRVPYAA

SEQ ID NO: 307941 - protein, 391 aa, unidentified
MIYVGIDVSKDKHDCYIVNSDGVVLADVFSVENNLDGFDLLLQRLKSVAPDLLNVKVGLEATGHYSYNILGFLLDKGLATFVLNPLHTNLFRKSTSLRRTKTDRVDARTIAAMMSSGIVLKSYTAISYHNEELKSLSRYRFDKVRQRAKLKQAVSRLVTILFPELEKLVPSLHIASVYALLAELPGAKQVASCQLTHLTNLLSAASKGHYDRSKAVELRNAARRSIGSTMPAKSLELQHTIRLIRELDAEISEIEAAIKQIMDQIASPILTIPGISYRMGAMILAEIGDFSRFDSPDKILAYAGLSPSTYQSGKLDNAYAHMEKRGSRYLRYALYNAAKYVCHWDASFCAYLAKKRAEGKHYNVALSHAAKKLVRLIFALQRSGQPYCPTA

SEQ ID NO: 307942 - protein, 321 aa, unidentified
MNKYKEIYGIDISKDVFDVYGSKSGHNQFKNEAKGFVSFMKHLPKDVLVVMEATGYYHYRLAQFLYKSGVSVSVVNPLSVKRFIQMKLAKVKTDKSDAKAISEYGEMNAVPLYTALTDVQSECLQLFRLLDSYIKHRTATKNKLKGEEVLGVPSKFVYRSLKRNLKHLNKEVESLELRLLDLIKQDQQHQLTLLKSIPGMGVKTALFLIVVTEGFEKFETASQLCSYVGITPTIRQSGSSVRGRSRISKVGNKKLRNLLFLCSFSACKYNKACREIYERLVAKGKSKKLALIAVANKLLKQAFAITKSGRPYDENFVSRLA

SEQ ID NO: 307943 - protein, 278 aa, unidentified
MEAAVVVGIDVSKRTLEVALSNGGGFSVANNEDGISELLARLQQSGAALVVLEASGGYESPAYLALWEAGVPTALINPRDAYHFAQANRQLAKTDQLDARGLCEFGLRMQPEPLPPPALADEELKALAVRRRQVIKMLAAERTRVQQAPRSVRPSIKRMVRALERELGAVDHQIEQRLRDNPRLALRCAQLEQVPGLGRVTCAILVSRLPELGRLGPKQVAALVGVAPYDHQSGEWRGRSSIFGGRAEVRSALYMATLSAIRCNPVLRSFYRPAALGR

SEQ ID NO: 307944 - protein, 401 aa, unidentified
MTATHNTNCTASSAPVLYLALDLGASSWKLAFSVGLGQKPRLKTINARSTLSLVLEIRAAKKRFGLPEDAPVVCCYEAGRDGFWLHRFLLDQGVQNQVVDSSSIEVNRRRRRAKSDSLDAVKLVEMLIRWHNGERKVWSTVHVPTVEQEDQRQLHREMLKLKAERTAQGNSIKGLLAGLGLCVIVDETLPTQLENLRQWDGAKLPPLLHQRLLREFQRWQLIDRQIHELEAERMAKIRDDRTPHVEKVRRLLNLKGIGDNGAWLLVYEFFAWRVIKNRRELASLAGLTPTPFASGESRREQGISKAGNRRVRFMITELAWGWLRYQPDSELSQWYMRRFGQGNKRLRKVGIMALARKLLIALWKYVEGGEVPAGAEELGWDNKPRFRAVKSRRKKEVLQTG

SEQ ID NO: 307945 - protein, 343 aa, unidentified
MKILKQSVGIDVSKSDFKVCLGKLDEQLSVAFSFQKAYDNNLKGVTVFLKEVSHLFTAEVTVQFILEASGVYHELLAHKIYQHGYEVSIILPSKSRAFFKSITQKVKTDKVDARLLSQLALERQLDNWVPADPIYAQMRSLTRERESLMKEKTVIINKIHAQQSAYQIAKSTLRRSKQRLKLLQKQIMSIDSELKTLVESSEMLCSKVNRITKVKGLSLLTVATVIAETNGFGIIRNRRQLVGYAGLDVIINQSGQKSSKGRLSKKGNPHIRKALFMPALSSSRSNELMKIIYQQLNQRQAAKKQGVMVVAKKLLLLIYALWKNSTEYDPQKNIESRLVLATV

SEQ ID NO: 307946 - protein, 392 aa, unidentified
MKTNAKKEGAVEGAVQGRKTHQLIKLGVDVHWHEYVVVRQIDGSSPQSAQRFTPEGFVAWAARQTQLAEQVWCCYEAGPFGFVLHKQLERLGVRNVVVRPRNWDEYGAKVKTDRRDALALCSSLDRYLAGNTQALAVVRVPTDEQEHSRSQTRQREQLVSERKRLGAQGLCAARYYGYDLPDQWWRPRRFAALQSQTPDFLLELLARWQRLLLAIDEELDSLGGLIESAQQQMLPTGLGALTAQILDREIGEWNRFKNRRQIASYTGLVPSEHSSGQTQVRGSITKHGNPRVRHILIEAGWRLRQFQPEYRAVKQRQAAFDSAKQKGNSPARKRLGVALSRQFIVDWWRIKTGRTTPAQLGLQMSWPTCPHLPSKPKPSSETSAQPNTQPID

SEQ ID NO: 307947 - protein, 363 aa, unidentified
MEETKRMYVGIDLGKFEYTIAIISKNGKVSIHKGKTSPKARVSLYRLLEKSDRIALEAGNLAFIMTREIQQQAGSEVLVLNSAKLPFIWDAPTKTDKEDAMKLARLVEERRDDQLPLVPLPSENEMARREVISNYSREMRGRTRTINMLHSLFVKQGITTVSRKNLATVEKARQAIGVLEGQLRDDAEYQLLHLELHEKRINELKIKINQEAKTDEDMKVLQSIAGVGPVVAYAYVAHIGDGSRFNKGAQVSNYLGFVPRLYYSGTIERHGHITKLGNGYLRGLLVQASWAMVRSQKGGSLKERYLYTTKFQGKSKKKTIVSISRRLAELMYTVLRNKIKYEERPWKVPQNKTMALAEQAISA

SEQ ID NO: 307948 - protein, 406 aa, unidentified
MNYLGIDVSESTSRCVTLDNDGEKLAKAFTLQNNNHDFNKLLTRLKELNLSPDSLLIGLEATGIWWENLYCLLSERKFKVVILNPHQTNKFREALRKKAKTDDIDAYVIAGLLRSNDYAASFVPEEDIQILREITKLRYRLIKDRKDYGRQISSLLGLIFPEYETTAIKNPFAISSIAILKSYPTAKHLSGTKPKHIEKIVRSIKGNNFNIKAIQHLIDTAKNSIYSGRAKDARGMNLNILIAQFQQLEKSIAELDQRMFDILSPSDSDDELSFPGANLLTIPGVGPKTVAAILSAVGSNGKSFASGKKIIGHLGFFPQIFESGESKKQNRISKTGPKYLRWALYVAAVACLKHNPQFKSLYDKKRSQGKTSKQALVYVAKKLAQLCLSMLKSGDVYRPERVFMPA

SEQ ID NO: 307949 - protein, 361 aa, unidentified
MDKYIGFDIDSNKTSVCIVQKNKADKYTTIGPEVGSMKKFLTNERKASFRVHLTFEISGQAGFLYDLLIGCVDSIKVANPDKMTWIYRTAKKNDRMDARKMAVLLSIGEIPAVHMPGKEVRQWRMIICHRRKLLAGAVTAKNRIRALFKSEGISKPGHKGKWWNVRNRSWMRLFCNESFDAENLWRIQLDNLLDELEMIEKQIASVTGYLDGYLDKQAGGKLLMSIPGVGPRTAEAVLAYTDDVERFEGGKEYCSYFGVTPKLDESGSSRRLGHINKKGPSVVRWVLVESSWKVIRYSPAFRAFYERVRAGQKGRKKIAIVAVARKLLSIMRAMQLTGEMFNEGLVSSSDYGKIEGLRRTA

SEQ ID NO: 307950 - protein, 309 aa, unidentified
MILRGCGIDVHKDVVVATVSGEGLKTETRSYKTFSSSLTELKEWLLSNGITHVAMESTGVYWKPVYRVLECPQMKVWIVNARHIKYVPGHKTDKKDSAWICKLLLAGLLKPSYIPEREQRELRDLTRYRNKLIQHVSSEKNRIVRILEDCNIKLSSVMSHLDGVVATKLIDILIEKGHVTMDDIACVYHKRLEASPELLYQACEGFIEPHHTYMLQTIRKDMEQTEAIIADLTSRIKDVLSPYENVMLLLRKIPGLSSKTVEDLIAEIGVDMEAFPTEKHLASWAGMCPGNNESAGKKKVVEPLMATNS

SEQ ID NO: 307951 - protein, 339 aa, unidentified
MKKITTIGLDIAKSVFHLYAVNDMGRYVKKKQLKRKQVLAYTAKLEPCLIAMEACGGANYWAREFIAQGHQIKLIAPQYVKPYVKGNKNDYNDAEAITEAVQRPTMRFVTLKSIEQQDIQNFHRQRERIKKERTALVNQVRGLLAEYGVVIPQGVKAVRKALPEILEDAENGLTALTRELFAELQEELRAIDQRFERCEKRIQSLNQAHEVCRRLDEVLGIGPITASATYAAAGDGKEFQNGRHFSAWMGLVPGQHSTGGKTVLLGISKRGNGYLRTLYIHGARAVLRHSAHKTDRFSRWAQALLERRGHNRACVAVANKMARIAWVILAKGESYRAAV

SEQ ID NO: 307952 - protein, 393 aa, unidentified
MICIGIDVAKDKHDCFILSSEGEVLSDVFTIQNNREGFESLLRRIQSCTQKSDKIVVGLEATGHYSYNILGFLLDHGLTTCVINPLHTNLYRKSLSLRKTKTDRIDAKTIAAMLLSDVDLKSYTDTAYHNEELKSLTRYRFNKVQERAKLKQSIARLVNILFPELETLVPTLHMASVYALLEEYPGALQIASAHLTHLKAILYEASNGRYNRDKSLIIRDAARCSIGSNMPAKSLELRHTIRLICELDKEIAEIESAIEGIMKTMQTPITTIPGIGFRMGAMILAEVGDFSHFDSPDKILAYAGLSPSTYESGKLSLTGTYSHMEKRGSRYLRYAIFNATRYVCLWDTTFAAYLAKKRAEGKHYNVALSHAAKKLVRVIYALQKTGKPYKALA

SEQ ID NO: 307953 - protein, 405 aa, unidentified
MDTLIIGIDIAKEVHWAVATVPDPRTGKARTVLSRKVDNTPDGIGALIEEITELQAVHGPAVAGIDILGGIARLLECLVQAAGVRLVHVPGLAVKVNRRATRGGEHKSDPRDARVIADLVRARDDLRVVTPVSDDDAELALLVGRRRELTEYQTTRIARLRDLLCSVHPELERVVTPRNKLDLALLARYVTPAEIRRAGHRRLSVYLAGTGRHNGRLVERLATRAVEAARRQQIAVPGQDVAAWLVKDLATELLGLRDKLATVDTQIADRLSRHPDAALIQSLPGMGVTLTSEFLAVAGDISRFATPDQLASAAGVAPVLQQSGKTRYLQRSTGGDRGLKRVFYQAAFCALKRDPTSKTYYDRKRREGKTHHQAVIALARRRVNVLHAILRNQEPYQARTPRATA

SEQ ID NO: 307954 - protein, 343 aa, unidentified
MTISILGIDIAKSTFQLHGADYSGRAVLKKRLPRHKLVAFVANLPPCIIVMESCGGANYWARVFQRSGHTVKLISPQFVKPFVKTNKNDANDAEAIVEAASRPSMNFVPIKQVEQQDIQSIHRIRTRIVKNRTALINEIRGLCLEYGVVLTPGAARVKSSLCAVIAVSDNELTPSSREFMRDLYDELVDVEGRLKRLDARIRQLCRQNERCRRILKVPGVGELTATAIVAAIPNPKEFRNGRHMSAWLGLVPRQSSSGDKRILLGISKRGDRYLRTLLIHGARAVLSHCKDADNDYSRWVTRKKATLSHNKAAVALANKNARIIWSMLNTGEEFNDGAQATAA

SEQ ID NO: 307955 - protein, 394 aa, unidentified
MRQQYKTEASMTKHNILFIGLDTHKTFTEVAYIEDQRGVKPVHLGKILSNKAAFKKLARQLQSQYPHATLHFVYEAGPCGYWIYRLLTSLNHCCYVIAPSLIPKKPGERIKTDKRDAMKLAKLLKSEDLTPIYVPEPEDEAVRDLSRARETSMADLKDAKYQRKALLLRNNINSKIKDNWSLQHLRWLAELVLPHPCQQIVLQEAVSTITERLKRLKRLDNELTHQVKNWRYYSVVKAVQAMRGVRLLEATGVIAELGDLTRFDHPRKLMSHLDLVPSEHSSGGKRHLGAITKCGNSRARRLLVEGAHSYKHNANISKEMQLRQEGLSKEVTDMAWQAQLRLCRRYKRLMHKGKHRNVVVTAIAREMIAYIWAISREIVLPVVDVKLRLARMPA

SEQ ID NO: 307956 - protein, 447 aa, unidentified
MSDLDKPNQESEFAAHIGIDWADRKHFWSMRTADGKLQRGELDNTPEAIQTWAAELAQRFGGRPIAVALEQSRGAVIAMLSKYAHLVLFPIHPNTVSNYRKALYPSGAKSDPRDSDLILDLLRAHPDKFRRLDPDTVETRKLQFLTEERRKLVNQHTSEVQRLLSWLKQIFPQIVRWFEDPSCAMVGALLLRWPTLQALQKASPKVLHKFFTQHNCRSEETIQERLQRIPLAVVATTDAALVESASMCIQNSVRLLEIMREGIAAFDRAILETYRNHPDRALMESFPGAGPALEPRLIAAVGSRRERFESATSMACFAGIAPVKEASGNSLWIHWRWACPKFIRQTFHEWAGCSIRTCDWARAFYDGKRAKGKGHHAAVRSLAFKWIRIFFRCWRDRVPYSEERYLQALQKNAPKPTPAAPKPTPAAAVEIGWKSCAGFSKLSLLSS

SEQ ID NO: 307957 - protein, 389 aa, unidentified
MIYVGIDVASNKHDCFLMNDLGEVYSSAFTISNDEEGYKKLHNAITSFVKQTNDSNVRIGLESTGHYSNNILLYFVKLNYKVMLINPLLTNMDRKATTVRKTKTDKVDARGICMFLDRNRNDFKSYTLISYHKNALKSLSRERFSIIKDYVKQKIKLQRLINIVFPEYLTFFSTLYTASSLNLLYDYPTPNLMKRAKESSISKHLHGRCNITAKEIQSKAASSIGQSSDYYAFEIKQLIDTLRFYEKQVNLYDDKIKKIMDEVGKDIMSIPGISYTTGAIIISEIGDINDFDSADKLLAYCGLDPSVYQSGKYDATQNTISKRGSKYLRYAIHNASNIIWQHDETFHQYYIKKQNEGKHHYVILGHIDKKLVRVIYTILKKGIHFTSQK

SEQ ID NO: 307958 - protein, 319 aa, unidentified
MAATAKDQKMFVGIDVSKDRLDVHIHPSAVAFAVDRDTDGLSQLVTRLKELDLAAIAIEATGGFESTPVAALAAASLPVVVVNPKQVHNYAKALGLNAKTDALDASVIARFAEATKPEIRPLPDDETLALAELLTRRRQIVQMITAEKNRALRMAANKLLQKSIGRIIDALERELARLDEGIDTTVKGSPLWREKENLLASVPGIGRVIARTLLAEMPELGTLDRREVAALAGLAPWTRQSGQWRGKSMIGGGRTVPRTVLFLGALSAARYNPDLKAFSLRLLNAGKSKKVVLIAVARKLLTILNAILRDKTPWSPKTV

SEQ ID NO: 307959 - protein, 387 aa, unidentified
MPQPNDLSRSLVALDQDSTIIAVVEMSQSSWLVGGVLPGIERQPRKKLEPNPERLLALLHRWRDESVRAGRTITRIAVAFEAGRDGFWLARWLEARGVEAHVIHPSSVAVSREHRRAKTDRLDTELLKRGFLGWLRGERGHCSMARVPTIAEEDAKRPNRERECLVKERTRLVNRMKGTLARLGIRNFRPTLRNAAEHLAALSTPEGSPLPPNVAAELERDIARLRLVIGQIKQIEEARRQRLEEQPERGPHAMVRLLARVVGIGIETADMLVNEVLSRPLRDRRAVARYAGLTGAPDESGAKRREQGLAKAGNARVRRGMIQLAWRFLRFQKNSALAQWYQARTADHRGATRKTMIVALARKLLIALWRFVTIGEPLDGVTLRPAS

SEQ ID NO: 307960 - protein, 429 aa, unidentified
MKIIYPRVCGIDVHKKFIVAVICISESVEPTYLKKRFSTFHNDLIHFRDWLIQNDCQNVCMESTGKYYIPVYNVLESHISNIVVANPKWVRAVKGEKDDDKDAKWIADLFKLGIVKSSFIPQKDFRILRELTRYKYKLVNMRSSEKNRYQNALTSGNCKLDMVFTDVFGKSASNIIDLILSDNPYTDEDILSKVHKNCKASPDMILNSINGTDLTSVQKSRIELVNDHIKQLSSNIQRLDKLIDLMIEPYEDYISFLCQIPGVSRNSAITILSEIGVDMNQFTSTRRLTSWAGLTPSSNQSAGKKKSVRISRAGVYLKPCLVEVAHAAVKDKNHPYYANKFNKISKRRGKKRAFIAIARKILVAAYHMLLTGEIWNPADLAEVETPVEQRIKYVKNNLKSDIKQLLDIGLTVEELTLMIQQNANIIATQ

SEQ ID NO: 307961 - protein, 339 aa, unidentified
MKYTPVGVDIAKHLIQVHFINEHSGEVVDKQLRSKDFLTFFSNREPCLIGMEACGGSQHWARELEKLGHKVRLMQGRFVKAFVMGNKNDVMDARAIWMAVQQPGKAIAVKTEEQQSVLVLHRSRSQLVKFRTAQINALHGTLLEFGETIHKGRAAMDRELPAALERLKTKLPPYLITVLEDQYHRLNELDTLIEGLEKQLNNVARQNETCKRLMEIPGVGPLIATAAVATMGEALAFKSGREFAAYVGLVPKQTGSGGKVRLLGISKRGDTYLRTLFIHGARAAALVAKEPGPWITELKKRRPTGVAIVAMANKLARTIWAIAAHDRKYDKNHISIRPY

SEQ ID NO: 307962 - protein, 363 aa, unidentified
MKNYIFVGCDSHEKTLVNKIAHNDGPLETKRFSARRAGRQKLIENLRESSRQAGGAQVVVAYEASSHGFILCDELRAAGFLCHVLAPTKIERSIKQKRNKNDDRDAERLLDIVRGHYLAATKMPAVWVADLQTRDDREPVRARQDLSEKQTTVKTQVQMLLKRQGIEKPEGVGTSWTKRYRLWLEALSGEGPAIQSGMRQTLKSLLRQLQFLEHEIEQMDQAMRELANTPRRKPIVDELMKEKGVGLATAMKYVTDIGDFKRFSRGRQIGAFFGLVPSTAESGENNDRKGHITREGSPSARKVLCQATWSRVQHDKQERDVYRRLVARNPKKKKIALVACMRRLAVRLWHIGFQAQLKMEAAG

SEQ ID NO: 307963 - protein, 347 aa, unidentified
MDQQCHYVGLDVSLETTSICVIDDAGAIIWRGKCSSDPDTITAIVRQHAPGAARVGLETGQLSNWLTLSLRRRGVPVVCMDARHAKAALSLQINKTDANDAFGLAQVVRTGWYREVAVKSMDAHTLRMLLVARSRLVSQRQATANTIRGLLKTFGLVVAKGSKGLFPVRVREQIVGNPALIAIIEPLLAVWYAIRDQVVMLDRQMLARARNDQVARRLMTIPGVGVVIALAYTAVIDDPARFRRSVSVGAYLGLTPRRYQSGEVDTTGHISKCGDSLLRGYLYEAAAVLLYRDGRASVLKSWGLGLAKRIGMRRAKVAVARKLAVIMHRIWSDRSEYRWTAIPPTAA

SEQ ID NO: 307964 - protein, 330 aa, unidentified
MQGRAKRRRKEIMDKEKVYVGIDIAKERIDVAVHSSEQRWSFSNDDVGITKAVSCISGVCPVLVVLEATENFQASLVAALVVAGITPAVVNPRQVRDFAKATGSLAKTDVIDAHVIVHFAAAIHPTPRSLPDTQAQELKDILARRRQVSEMLTAERNRFGSGHKTVRDRIQAHITWLQQELDEIDDTLRRVIRESPVWREKDDLLQSVPGVGPIVSATLLAQLPELGTLNRRQIAALVGVAPFNRDSCTLRGKRTIWGGRSRVRAALYMAVIVATRYNPIIRNFYERLCNASKAKKVALTACMRKLLTILNAMSKHRVPWNYKPPMAEVS

SEQ ID NO: 307965 - protein, 345 aa, unidentified
MYYIGLDIHKKTISYCIKDLSGKVFGEGEVAATRADVDRWMRDLPQPWTVAMEATLFTGWVYDQLRPQAAAAKVAHPLMLRAIAAAKKKNDRVDAAKIADCLRCDFLPECYMASSATRERRRTLRYRNLMVRQLTQLKNKMAGLLMEAGVSYNKAKLHQPGYFTELLATNQEIDKSLQPLLRLNREMLVRLEKTERGLLKALTRDGQLAERVKRLMSIPGIGPVTALTWVLEVGDVTRMTSVKDAISYCGLCGAERSSAGVAQRTPLSKQRNPHLQTVLVEAAKLAPRWNADLALVYEKEKQKGNHNRATLAVARKLVAYLLAVDRGQRNFVVKTEAAEKQQSAA

SEQ ID NO: 307966 - protein, 342 aa, unidentified
MQITTIGLDIAKNVFQVHGIDVAEKVVVRKQLRRGQVMKFFEALSPCLIGMEACATAHYWARELTKLGHEVRLMPAKDVKAYVKRNKNDAADAEAICEAVRRPTMRFVRIKSAEQQGQLMQHRTRDVLIRQRTQIINALRAHLAELGIVAAKGDNGVKELLSIVADEKDARLPIDARASVIVLAAQLQALQTLIGSIEKRIKTQHRSNEASQRVETIPGIGVLGASAITATVADPTIFRSGRDFAAWIGLVPRQDSTGGKQKLGPISKQGDRYLRRILIVGAISVLRRARENPGKYPWLTQLLARRPFKVVAVALANKMARMAWALLAHGGTYRAPVLAAAA

SEQ ID NO: 307967 - protein, 351 aa, unidentified
MEQHNTMTIGIDLGDRFSFLAVLNDAGEVVEEQRLVTHTDSFERTFAAIPAARIVIEASTHSRWVSALLAELGHEVLVANPRRLALIYGQDRKNDKRDAELLARVGRLDPELLCPVWHRSSQAHADLSLVRMRNHLVELRTKLISSVRGMVKSHGQRLPACSTETFHDKVAEHIPELLKAVAASALRTLAQLSEEVRALDRQIESLARTRYPETAALRQVAGVGPVTALTFVLTLERPERFRHSREVGAYLGLVPRQDQSGDTDKQLRITKAGNVYLRKLLVQCAHYILGAFGPDTDLRRWGLALAERGGRNAKKRAIVAVARRLAVLLHRLWRSGQVYVPLGYPSVARAA

SEQ ID NO: 307968 - protein, 350 aa, unidentified
MLIIGCDYHPAFQQIAFVDTATGECGERRLEHREEAEKFYRDLAAQGIKVRVGMEASGHARWFERLLSELQFELWIGDAAAISTKRVRKQKTDRQDAQLILRLMMEDRFPRIWVPSWENRDLRQLLWHRHRMVQARTRIMNQLQAVAINEGLRCKKRLWRESGREQLEAFRLAPWASRRREDLLKLLDGLNPTIAELTQAIEQEVEKCPAAQRLRTHPGVGPLTALAFVLIIGRADRFQCGKQIASYLGLVPLEDSSGNRRRLGHITKQGNALLRFLLVEAAQVTARSLPEWRSKYVHLTMRRGRKIAKVAMARKLAVRMYWMMRKEWDYGMLTKFGSHAGKPGTGDGVK

SEQ ID NO: 307969 - protein, 351 aa, unidentified
MKKVAYLAIDVHAGHCVLGHMDFDGTFIGNRRFPTSEQHIIEALKAVKAKEKYLALEESNLAYWAAQVARAYVTEVISSDPKENALIYRSPNKRDKVDTHKLCRLLRLGELKRVYHPENDERAIFKAAVQHYIDLRDQQVVLKNKIKAMYRHWGVIDVAGQAVYGIRTRDDYLKRVKHLHIGNQLHRLYCLMDETESMQKKALKAMKQLGRKYPEIKQFEKMPGIGEILSHTFDAFIQTPHRFADKRKLWRYCRLAITDRSSDGKPLGFKRLDKSGVSELKALSYRAWLCAMGSDNEVSRFYSRSLRRTHSHVHARLNTQRKILAVMYGMWKRGEAYRPQLFLDSPQMSVV

SEQ ID NO: 307970 - protein, 402 aa, unidentified
MRIIGMDLSRAFAELVAWEDGRLSKMGRVDMRREQLAAFAITLKPDDVIIIEATGNAAATYDVLAPHVAKVVVANPKQVRLIAHAKIKTDAIDAGVLAQLYASGFLPEVWMPDADTAALRRQVTRRSQIVRQRTRLKNMMQSILHAHLVPSCPHADIMGGKGRGWMAAQALPADERAALDRHIRECDRLAEDLRALDRELAVEALASPPVRRLITIPGVDTITAQAIVAAIGDPTRFADAEKLVSYFGLNPTVRQSGPGPAHHGRISKQGRGHARGLLVEAAWSASRTAGPLRAFFLRVSAKRGQHVAAVAVARKMVVIVWHLLTRQEDYAWGRPALHARKIRQAELKAGVPARRGQRGAAANYSVKAIRDEERRAAEGAERAYARLVTGWARQGTGTSVRS

SEQ ID NO: 307971 - protein, 462 aa, unidentified
MKHKAKSQAMHSGFAVVNPNAAAIDIGATMHVAAVGADRASDPVRSFGTFTADLHRLADWFAECGVKTVVMESTSVYWIPIFELLDERGFEVILVNARDAKHVPGRKTDVSDAQWLQRLHSYGLLRASFRPKGEIVELRAYLRQRERLLDTAASHIQHMQKAMTEMNLQLHHVVSDITGATGMRIIRAIIAGERDPAVLASMRDTRCHSSAEVIEKALTGHYRGEHLFVLEQALALYDVYQQKVAACDIRIESVLKELSSIRGRKEDARADGSGSPRRRSRQSNGPDFDVGKALHSLLGKDLTRIHGMGPYLALKLVSECGDDLSAWPSAKHFTSWLCLAPSNKISGGKVLSSRTRRSGSRAASLLRLAAVTIGRSDTALGAFYRRLSARAGKSKAVTATARKIATLFYNALRHGMDYIDPGASYYETRYRERVVKNLHRRAKAFGFILQAAEMPAAEQAVS

SEQ ID NO: 307972 - protein, 374 aa, unidentified
MADRGFQLRITAEHKPVSRAGELPQNRSQTSAFMSQNKSISIPQNQSPSLPAESSPVLGIDVSKLTLDTCLLQGGKVRHQRFANSQEGISTMLAMLQRDGASKALVAMEATGPYSLAAATACTAAGHPVAVINPRRVLDYAKACGRRNKTDRVDAALIARFASKEPLPLWRPLPAEQSMLRDLLRRQDDLQSQLHAEQRRLEMATSAGALKASLQRSITWLRAELGRLEKALGQHVKGHGSLLTDIDNLQTVPGFGEKSARLLAAEIPRHFANARAISAWLRVVPQQTDSGTSGHKPSRIGHDAPSLRSKLYFAALTAMRCSPRFQALAERLHAKGHCKMSIIMAVLHKLVRTAFAILQSGKPYDPNHVVTLAT

SEQ ID NO: 307973 - protein, 438 aa, unidentified
MKVMYERVAGIDVHKDMIKVAVRSPGDKPWTRKTEILTFRTFYGVLRAMARELRRRGVTHVVMEASGVYTEPVYYALCEEDFTEVAVVNPAHAKALKGHKTDARDCARLAELFECGLLQGSYIPPAGLKEMRDLSRYRMKTVQARTSEIQRLAKALESAGIKLGSVASEITGKGPVAMIEALISGERRGAVMADLARGRARTAGKLADLSMALEGRFTDHHALMCRLHLDRITALDAAVADLEARIAATAADWQREIGLLKTIPGFGDIVAWAWIAEIGPAPHQWFASHHKLASWVSLAPGNNVSAGKRKYGRTGDAGTYIKPMLIQAAWAATQVRGRLQARYNRLVRRLGGPKNPAAKKKAIVAIAHTLLKIAYTVLKTGTGYQEPGADFYTRRESPGHRQAWLERQIQKLHPGCTVTITISPSPDPAPEAALPPGA

SEQ ID NO: 307974 - protein, 391 aa, unidentified
MILVGVDVAKDKHDCYIMTSEGEVLFKSFTIANNMEGFNQLYEKILSVIDNFDNVKIGLEATGHYSYNILGYLLDKGLTPYVINPLHSNLYRKSLSLRKTKTDKVDSRIIASMLMSDVSLKPYSNTLYHNEELKSLTRYRFTKVQERAKLKISISRLVTILFPELEKLVPTLQMNSIYALLYEFPSAHAISKAHLTRLTNLLNTTSKGHYTKDKAVLIREAAKNSIGSNMPAKSLELKHTIKLIKELTSEINKIEEEIKIIMNKINSPILTIPGIGLSTGAQILAEIGDFKNFSSPDKLLAFAGLSPSTYQSGNMYSSNTKMEKRGSKYLRFALFNAAIYVSYWEPTFSQYLKKKRVEGKHYYVAISHVVKKLVRLIFHLEKTNERYSTVV

SEQ ID NO: 307975 - protein, 372 aa, unidentified
MDAPTRNGIECQSGSVCNHLNRKGASAMKITTVGIDLAKNLFQVHAVDERGRAVLRKQLRRDQMARFFANLPPCLIGMEACASAHYWARTLQKFGHTVRLMAPQFVKPYVKTNKNDVADAEAICEAVSRPNMRFVPIKSVEQQAVLSLHRVRQGFVRARTAQGNQIRGLLGEAGLIIPKGIVNVAKRVPALLEDAGDEVPASFRRLIQRLTEHLKELDRQVDELEAQIKAWHRGSELSCKLEKIPGIGPLGASALVASIADATSFDNGRQLSAWLGLVPRQDSSGGKPKLLGISKRGDVYLRTLLIHGARSAILAAQRKAVNTNVWLASLLNRRHPNIAAVALANKNARTVWALLAHGREFRTDYAPEVSAA

SEQ ID NO: 307976 - protein, 308 aa, unidentified
MSFFVGIDVAKATLAVALRPSGVCFEVSNTPAGHRKLIRRLKELDVERVLLEATGGYERPVVDALVDIWPVVRISPHRARAFALAMGRIAKTDPIDAAMLARLAQVIEGPLVRAVSPQQRELQGLVDRREQLVGARDDERRRQHQTACKAALASLKRQIKGLQLEIARLDRAIAEAVARAEQTIAAPLRSVSGIGPVTTATVLAFLPELGELSRRQIAALVGVAPYNVDSGQRQGKRRIRGGRAKLRRVLYMATWSAIRSQPDLNARYHHLRERGKCAKVALVACMRVLLIRLNAMLRDGTPWRPQTV

SEQ ID NO: 307977 - protein, 396 aa, unidentified
MRNDVTIYVGIDFSKEKFNACLLMDQGVMGESEFPNTKTGYLKLTKWVKNTSELGRSFDSSLVLFCGEHTGTCSIGLCEYLYAKGMKIWLESALKIKYGSGLKRIKDDKADAEMIAYYAKRFYEPGSCALFEPDSADLKTLRTLYQFRNRVVCDRVAIGNRISSGAFDCSTLVRNRMVKHHKEAQKDEKDIEKEMVKLMETSEELASNYQILISFKGIGPITAAALIIYTSNFKKFDNPRKFACYCGIAPFGKQSGTSINTKPHVSRFAHIGIKAAMVQACKSAMQHNAVIKAYAQRLYAKGKHEGIVMNNVKNKVMHIIFKMIQTQTLWEQEYQQKHTKECKPIPGKNGIGATEAAPIINATLKTSSSVVECTCLEKHSFQKNSKKTSSFSCVET

SEQ ID NO: 307978 - protein, 388 aa, unidentified
MPAAETPVAYLGIDVGKSSHSACALDAGGGVAFRAELANRPDDIDRLLERAGSGALVVVDQKRNIGALVLARAHAHGNPCAYLPGYAEKQTRGMFPGIAKTDAIDAEVIARTALGVPRALRPAPEEPEGTASLRILSSQREFASSARTRAKNRLRATLLEAAPALEGAVDPSSRWQVSMLAEFGGAAGCSAAGWRRFSNAARRAGAPAAGARRLWEALLASSRSGRRLPAGEDVAVRILAREIASLDADIEELDSLVADSLAGDEVYECLLTVPGIGPKTAAALVTSIDISAFRGHDELASYCGVAPSDRRSGSSIRSTSPQHGGNRRLKNLLIFSCNSLIGTDNRFGRYYGECRARGMRHSKALKAVARKRLKVIYAIMRDAVPYAA

SEQ ID NO: 307979 - protein, 343 aa, unidentified
MQAVTTIGLDIAKSVFQVHGVDAEGNVIIRRRLKRRYIVAFFQKLPPCLVGIEACASSHHWSRELHALGHTVRLMPPAYVKPYVKRHKNDAADAEAICEAVTRANMRFVETKTPEQQSCLMLHRTRHLFIRQQTAVINAIRAHLAEFGIVAPVGRNGVEALLDVVADTSDKRVPEIARACLVALGAHLRVLKTQILEFDRLIMAWHRSNETSKRLDEIPGVGPALATALVASVGDPRAFRSGRDFSAWIGLVPRQNSSGGKEKLGSISKRGDRYLRSLFTAGALAVIRYAKLHGTKHRPWLTALLARRPTKVAAIALANKIARMAWAMMARGERYKEPVALAR

SEQ ID NO: 307980 - protein, 421 aa, unidentified
MASKRKVTDLPPVAEATDAPTCSEAQIVGGAQGRSVMRSVGLDLGARHIAWCEVVDGAVVRRGSVRRLEELEPVLGAATAPARVAFEASREAWHVHDVMAGWKKEPVLLDTTRIRRIGVGQHGRKNDSIDAEAIAMAMDAGRVPVAHVLSPERRVLRAKLSVRSELVDMRARQVTVLRGLARAAGVLISSSSTDGFLQKLQQAPLGESTRALMAPLVATLTIAQEQLADVDAQIAQVAKAAPIIRLCATAPGVAVIVAATFVSVVDEAKRFRNAHAVSAYLGLVPGESTTGGKQRLGSITKHGNAHARAMLVQSAWLILRAKDSDDPLGRWATDLARTRGKKIAAVALARRLAGVLWAMWRDGTVYDRAFQARESAKGLHVAAQSGELRAQAMALVAKKIQRRERTPRRGSRAKTSRVAAM

SEQ ID NO: 307981 - protein, 388 aa, unidentified
MNITTDQLEAPTAIRTDLGAIFVSLELSRSSWLITSLSPGGGEKMSKHTVRGGDVSGLLQRFAQLREKARVRTGKVFPLIVIQEAGLDGFWIDRVLQNEGIESLVVDPASIATSRRRRRAKTDKIDGETLVRSLLAYKRGEPRVCSIVKAPTPEEEDQRRLCRERKVLTAERVLHVNRIKGLLFCQGICGYEPLRRDRRDRLEELQTGDGRPLPPHLKAQVERELDRLELLLKQIKTVEGERDALLAAAITSMPAPAAMLLDIKGIGPEFAAVLWSEGLSRHFDNRRQVAAYAGLAPTPWQSGAVDREQGVSKAGNPRLRTTLIQLAWLWLRNQPQSALTIWFHERVRRNGGRLRKTTIVALARKLLVALWKYVTTGVVIEGATMKAA

SEQ ID NO: 307982 - protein, 269 aa, unidentified
MEISTIGLDLAKSVFQVHAINDAGEVIVRKTLRRSQVLSFFAKLPPCLVGMEACGTSHHWAREILKLGHEVRLMPPAYVKPYVKRGKTDANDAEAICEAVTRPTMRFVPVKSPEQQAALALHRTRDLLVKQRTQLVNMIRGVLAEFGIEMARGLHHALALAKRLMDGDAAEVPTLAQRVVASLAHQIGAVQEQLASLEKELVAWHRSSDLSQRLATIPGVGVIAATALAASVSEPERFRSGRQFAASLGLTPLQQSSGGKEKMGRISKI

SEQ ID NO: 307983 - protein, 437 aa, unidentified
MADTEVTDQAAELVERVAAIDIAKASGMVCMRLPHPSREGRRTQEVWNVPASTIGILELGDRLVCQGVTRVVMEATGAYWKPFFFLLEARGLDCWLVNAREVKNVPGRPKTDKLDAVWLAKLTERGMLRPSFVPPKPVRQLRDLTRMRTVLIRERSRHKQRVEKILEDAQIKLSSVATDIFGVSGRSMIEALIAGKRDPRALAEMARGCMVVKKAALAEALTGQFEDHHAFLCRTLLDSIDFLSGQIDALTVRTTQAVEELPCPDPSGGSRPGAGADLVAKLVTIPGVGMRTAQILLAELGPDMTVFPTADHLVSWAKFAPRTVQSGGKNTSGPTGKGNPWIKGAIGEAALSASRSNTFLGARYKRIVKRRGRKRALVAVGHSLLVVVWHLLNEPETPYTDLGSDYHQHLVDPPRRTRDLVRQLKALGHDVTLTSAA

SEQ ID NO: 307984 - protein, 411 aa, unidentified
MEAAVITAVGIDVSKSKSTVAVRRPGGEIALRPFEVHHTNSDLKKLASTLKKLGGDIRIVMEHTSTYWRPIALTLKEAGFFVSIVNAMLIHDFSDNTIRKLKTDRADALKIANYALTFWDTLPPFNNEEETRLLLKMQSRANERITATATALRNGLIALADQTFPGVNIAFAPNTKNANGHEKWVDFFLRYRHKDCVCQYSMEAFTESYRGWCKRKNYKFRTDTAHKIYLLAQEGVATLPKCESTKMLITQACKSLNAVCEAKQSTQLEMQRLAAMLPEYEVVMQMEGAGPITGPALMAEIGDVRRFKNKKALVAFAGIDAPPFQSGTFESKSRHVSKRGSPHLRRTIFIVSNIILTRSNPENAVYCFMDKKRSEGKHYYVYTVAGSAKFLRVYYARVTEFLRSKPSPDAC

SEQ ID NO: 307985 - protein, 317 aa, unidentified
MNETTVERFVGIDVSKESLEVGVRPEGKHWSVANDEEEISSLVQRLGDLKPTLIVVEATGGFQAMVVARLAAAALPVTVVNPRQVRDFAKATGHLAKTDAIDALILAHFGEAVRPEVRVLKDEQTQKLTALMTRRRQIVDMITAEKNRLVTAPKGICKEIRKHIQWLQGRLNVMNGQIDEEIKKSPVWREKDAILRSSPGVGPVLSVSLLAGLPELGSLNRKKLAALVGVAPLNRDSGGYRGARSVWGGRGQIRSVLYMATVSAARANPVIREFYQRLIGSGKKPKVALTACMRKFLTILNAMMKNGTHWNERKVNV

SEQ ID NO: 307986 - protein, 449 aa, unidentified
MERYAGIDWATEKHGVLVQDAGGEEALAATFTHDERGLSALCSTLVRLGVVLVAIERPDGLLVERLLDAGLRVIAIHPNQVAAARPRFRASGGKSDGFDAFVLCELARTDHHRFRVLVADSDDTKALRALSRAREDLVQARVALANQLRTELERFWPAATMIFADVDSPIGLAFLARYPSPLDANGIGEKRLAAFLARHAYCGRKQPTQLLAQLRDAPHGRAGDAEIEARRAIVLALVAALKPIVAKIGELTREIAHRVRAHPDGHVFLSLFRDPRSVVCAAALLAEIGDCRARYRSAEALAADAGMSPVAVESGKRKVACFRRGCDHRLRAAISTLANATRHWHPWAADRYATARARGQDHQRAIRTLGRAWCRVLWRCWQDNVAYDPARHRGLQQHIAVTIPDGSRPRLDLTATQRMAGAAVTRRAARSAEREALDGKPTSATHAGG

SEQ ID NO: 307987 - protein, 316 aa, unidentified
MSIAAPIIIATSYAGLDVAKATLALHLAGRHHELPNTPTGHRRLVRLLQKHPAVQLVCEASGGYEQAPARALWAAGIPASLVEAGRVRHYARACGRHAKSDPIDAEVIAEFGAAVRPRPTPPPSPLADRLAALVQRRRQLQQTLVAETNRAAHYTDPLLRRQTAQLVRLLRAQVQTCATQTARLIAQDAELAAKVQRLSAVPGVGPVVAATLVAELPELGRLRDEAAAAMVGVAPYDRDSGLLQGSRRIAGGRRTVRCALFMATLSAVRHDRILKAHHQQLLARGKPPLVALTACLRKLLVLLNRLLKNPHFHLVA

SEQ ID NO: 307988 - protein, 317 aa, unidentified
MNTIGIDISKERFDCLCTQRQRNRRFTNNQSGWKAFKDWIIDEEVHVIMEASGPNYLGLASHLYEQRLTVSVVNPLVIRRYGQMKLARIKTDAKDAALIAQYGIDQQPELWCPPSEARRGLKKLMSMREGLVRQKAILTGQAEAFNQHKEIEHMVNELNGKMQKEIEKNITRIDRRMETLAEKHYEQVMEALLTIPGIGQTAIEFVTITDGFRRFDSARKLASYVGICPGIWESGSSVRGRGSISKLGCPQLRKLLYMCSWSAKRSNPACKKMYQRLKSRGKPEKVIKIAIAHNLLRQAFAVDKRCEAFNEKKSLAA

SEQ ID NO: 307989 - protein, 355 aa, unidentified
MEDTKYIGMDVHKDSISIAVLNSSGKLVMECIIETKAITILEFVHGLRGSLHLTFEEGTWAAWLYDLLKPHVAKLVVCDPRRNGYLKQGSKSDRNDARKLAELLHSNMLRPVYHGEHGVRSLKELARSYLTITKDQARVMTRVKAVYRSWAIPCVGKQVYGQRHRLEWLGKIEEPGVRRRAEFYYAELDALRSLRLVVLRELLLESKKHSVSTLLSQIPSIGPIRAALLIALLQTPDRFRTKRQLWAYSGLAIETHDSAENQYVNGQLQRSKKKQSIRGLNSNHNHDLKNIFKGASAVAAVKSGPFQRFYAAQISKGIRPEIARLSLARKIAAIILTVWKKGASFDASYLNPQTA

SEQ ID NO: 307990 - protein, 352 aa, unidentified
MEKNNKLDFGGQHIYVGMDVHKKSWSVSIHTEQFEHKTFTQPPEVEKLTYYLERTFPGATYHTVYEAGFSGFWLHDKLREKGIDCMVVNPADVPTKDKERAGKTDRVDCRKLARGLRNGEIKGIYVPPRVKVEDRTLVRTRQSMVRKQTRCKNQITSILFFYGIVIPEEGRWSRRFINWIESIRMERASGDFALKAHLEELKHLRQIIANLNKAILSLSRAEEYRADVLLLKSVPGISTLTAMILLTELADLSRFSSLDKLASYAGVVPDIRSSGETEYVAGITFRRNAALRALLIESSWIAVRKDPALIMVFNKLSVRMKKTKAIVHIARKLLNRIRFVLKNRQEYVPAVV

SEQ ID NO: 307991 - protein, 319 aa, unidentified
MTKQAIEFEQVIERGCGLDVHRDTVVATVMGKGIQTETRTFGTTTSSLKELGEWLESIQVTDGAMESTGIYWKPVLHVLREYPLNLLVVNARHIKNVPGRKTDKADSQWICKLLISGLLKGSFIPPENIQALRDLHRYKKKLVGTVASEKNRIIRVLEDANIKLSSVVSDTSGVTATYLINGLIEGRKDLEKLVSECYHKKLRSTPDQIVEAINGRLIPHLRFLLKSMQKHIQSVEEQIAEIDTEIETHIKYFEQEIELLQTIPGVGKEGAIGIVSEIGVDMDVFPSEHHLASHSGMCPGNNESAGKKKVQEHDKGTSI

SEQ ID NO: 307992 - protein, 331 aa, unidentified
MEIKETIGIDVGKLINEVRIHRNQKAKEFENTDKGISTMVQWVLRNTPFSKEEILFAFEHTGLYSEKLAIYLTEKEFHYIMLPGLEVKRSMGITRGKNDKIDAKKIALYAYRKREEITPSRLASKEIKEIRSLLSLREKLVKHRSGYKATLGEYKRCLKRKENPTLFSVHEKMIKELTRQIEKVEGDLDNIIKNDDYLKKLYELITSIKGVGPQTAMFMIAYTDGFTRFENWRKFASYCGTAPFPNSSGISIRGRTKVSNLANKKIKSLLDLCAKSAIQSNQEMKQYYQRRIDEGKSKMSTINIIRNKLLSRIFAVVKRETNYVNTLAYAA

SEQ ID NO: 307993 - protein, 421 aa, unidentified
MTPPNEVVWAGIDTHTDTHTIALLDERGRPLGAETFTADPDGYDRLIGMLPGPGRVAAVGVEGTNSFGAALARRLTAAGYEVREVLRPRRSVRRRDGKSDPLDAVAAARSVMAGDGTSLPKSSDGWVEALRHLNAQRSQLVSAMTAISNSTNGLLVTAPEPIRERYRGLRSETRMNRLAECRPAGGLVERSVLAALKSAAKAWKALKRQAGLLEERMRLILEEHARPLLDMYCAGAVIAATLAIVAGDNPERIRSEAAFAKLCGVCPIPASSGRTNRHRLNKGGNRQGNMALHRIAIVRLRYHKPTRDYMAKKTREGKGKLEIIRCVKRFIAREAYRALISIRNGEVGRGTPAERGAKLRELRVSRNITQQQIGEALCVPSSRISEIERGARDLPDLEQRAIQWIHSTTNPKQHTQTLDNV

SEQ ID NO: 307994 - protein, 318 aa, unidentified
MNTNTLQNINVGVDTGKANLDIYIRPVDIFFTVSNDDKGIKEAVKIIKKHQPERIVIEATGRLEMPFIIACSKANLPFVIANPIHIKRFAGAIGRRAKTDKLDAQLIAHYSEAIQPQLTQLKPEIMRLMSDLVARRHQILTMQTMEKNRLQQLPKTLHSTINPIITSFKNQIEKIETLIIALIEKTPSYQSKNIILQSVPGIGKVSAAAIISNVPELGYINNKQAASLIGVAPMNRESGRYKGKRIIQGGRAQVRTVLYMAMMSAMQSNPVFKTTYQRLLEAGKPKKVAIIACVRKMVVILNSMLRDGTMWNENMANN

SEQ ID NO: 307995 - protein, 408 aa, unidentified
MTVVGIDVSKGKSMVAAMKPGGELVAAPYEVRHSDIELSHLALDVLCMEPDTRVVMEATGRYHEPVAALLHSEGIFVSILNPLLIKQSGAGSLRKVKSAPKDTIKIAKYGLDNWSTLREYTPMEANRQQLKLCAHQCDLYNKSIIMLTNNLISLSDKTFPGVNELFSSPEKADGHLKWVDFYRTFWHCDCINRMSPDAFEERYKKWCKRKGYHFSTDAADALYAASCGSYTTLPRDNNAKLLVTVAADQLIALRENQSKLEAEMLNLCKQLPEYETVMAMYGVGKSTGPHLMAELGDVRRFPHRSSIVAFAGVDPGVVGSGKMQLSSVTTSKRGSPQLRKALFQVVSTYVKCKPENEAVYQFYAKKRDEGKPFFVCTTAAANKFLRIYYARVKECLSAAGSATQVEEG

SEQ ID NO: 307996 - protein, 334 aa, unidentified
MWHIGIDLHRRMLVMAAVKDDGEVVDPQRIDCQDTAAILKAVEDLQPFRAVIEATGTYRWLYDLLSPYGTVLLAHPLRLRAMIQRRAKTDKLDAQLLANLLRINQIPLAYVPPKNYQQLRDLTRCRARLARGGAKAKINLRALLARQNLTAPYKIPFGPRGLAWFGKQDFGPIENLVRDQLVEQLQHYAKHAAVLDRQIEQVGKDFPQIEALLDIYGMGVFSALVVIGELGEVERFRTAKQVGAYAGLTCRVHQSGSHCYHGSITHEGSAWLRWVLIQVAMHVVREDVALRNFYTRIRKRSSAKIARVATARKLAEICWKRLRRWHEQHGRKAA

SEQ ID NO: 307997 - protein, 503 aa, unidentified
MTTATAPGKPASSPPPNAPRMPAQAQRQAYHRRKARAKGQSEALRQEEAAHVEALPVQHPHAAGIDVGSRSHWVCVGFATEAPSCVIQEFPAHTDGLKAIAAFLREHQVKTIALESTGIYWIPLYELLQAEGFEVLLVDPSYSQQLRGRPKTDRRDCQWIYRLHSVGLLAAAFRPDEKTCQLRAYLRQRANLVRQASRHVQHMQKALEQMNLKLTEILSDITGVTGRSIIRAILRGTRAPEKLAKYRDKQCKASEAEIAQALTGSYREEHLFELKLAYEAWQFSLGQIEKVGGQIALQLGRMKCDRALPPLKPKARPKRRVNSPGFDVRTALYYVVGLDLTEIEGVSELTALTVVSEIGPGVSQFATVKKFCSWLGLCPNWQKSGGRVKSSRTRRGVNRAAQALRMAAQSLHHSQGALGGFLRRMRGRLGTQAALTATAHKLARIIYLALKHGMTYVRQSQEDYEAQMREKQIKALRRKARQLGLEIVEKPPGGVAESASVRG

SEQ ID NO: 307998 - protein, 416 aa, unidentified
MIDQKQWYAGVDWASDSHHVFLTDADGRTIAERAFKHGGEGLAEMAAWLMVMSGATEPSQIKIAIEVPHGPVVETLIERGFKVHAINPKQMDRFRDRFTLAGAKDDSRDAQVMASALRTDPHCLRLLAVADPVVIELREWSRIAEDLGAERNRLTNRMREQLWRYFPAMLELDNDLGAPWLLELWETVPKPDQVTRCRAATIAKILKRCRIRRFDAAHVLDVLRKPPLKVAAGTAEAASAHIATLVKRIRLVNRQIKDAEQRLDALTARLIPTEQAEPGQNKQRDVEILASLPGVGRIVLATLLAEAFDALQRRDYAALRSLTGVAPVTKRSGKSRIVLRRQACHDRLANAVYHWARVAVQRDPTSRAKYAALRSRGHSHGRALRSVADRLLNVACAMLKAGTTFNPSLAAQKTLC

SEQ ID NO: 307999 - protein, 318 aa, unidentified
MPESELTKVSVGIDVSKNTLDIAVHETGETWSSNNDSSGGAALATKLKQLKATSIVLEATGGFETLVTAILSAADLPVIVINPRQVRDFAKATGQLAKTDRIDARVLAHFAAAINPPLRPTKSAEAQHLEALLARRRQIVEMLVAEKNRLANNRDRAVVKDLKTHIAWLGRRLKSSDDELQRVLRASPVWRERDDLLRSTPGVGPVLSLTLLAQLPELGQLNRRQIAKLVGVAPFNWDSGKWRGSRHIWGGRAAVRSPLFMATLCAIRINPTIRFFYQRLIKAGKAPKVAITACMRKLLTILNLMIKTQTPWRTARSS

SEQ ID NO: 308000 - protein, 319 aa, unidentified
MTEHSTLTAGIDTGKDKLDVAVYGLIFCLTVKNDTKGWAEITAAFKKLGVSRVGIEATGGYERGVTRHLRAAGLTVIVHQPLQVKAFAKLHLRRAKNDTIDAALIAACTQLFEASKKIPPDPRLEDLAEQLTYVEQTKKDIKRLKNRLEHMENKRLRRVIEADIKRMEKRSNAELDRIEASLREHDDLATRLDLVLSVVGIGQPTAITLIVRMPELGHISREQAAALAGLAPFDQDSARHKGHRHIAGGRSQVRTALYAAAQAASQFWNPALKEFYQRLTKRGHCHQSALIACSRKLLIYANTVLERGKPWEKAVLATP

SEQ ID NO: 308001 - protein, 309 aa, unidentified
MKEELVYLGVDIAKSHLDAAIGAQKHRFCNDTVGHRQLVRWIQQTEAAVQVICESSGGYERRLVQALARARIKVSLVQANRVRQFARAAGILAKTDRIDAEVLCEFGKVMQPQTVTAATLEQEHLRELESQRRHLTHLLVMEQNRGARVSDASVVRLNRSLINQIKKQIEKLDLLIKEHIEQSPRLSAKAEKLTSIKGVGLRTAALLLAQMPELGQLNRREVAALVGVAPFNRDSGKMRGKRAIYGGRRFVRHGLYMAALVAARHNPILRNFYLRLRAAGKPAKLALTATMRKLLIVLNSALKRDLRYA

SEQ ID NO: 308002 - protein, 408 aa, unidentified
MSRLPSTIKESPPLVWFGELPVANYEQLGWRDASHICHPPMDRLLKTSPTHSISVNEESSGRVLDQSDRRFVRKVTQVGSTPATYTLPIGERVMQTPVDIGADISKDYVNVSCATHVFPNAKLLNRRAVLLAWLKRLPAGTRIGMEATATYHELLASLAHRLGLVVYVLNAKDVHHYAKATAQRAKTDRVDAALIARYVAKEHNQLHVWYPACPAQRQLQRLMRRRGKLTRTRASLRSSLQGVPSLRSDLRALLKHFDSLIAKLDTQARALVSRNVEREQAFGRLDDIPAVGNAVGIALLATLERWALPRANSFVAFLGLDPRADESGTRHGRRRLSKRGDPELRRLLYTAAMSASRTRVWAPLYQRAIARGLSRVQALVVLARHIARTAWSIYTHKTQFEPARVQNS

SEQ ID NO: 308003 - protein, 311 aa, unidentified
MDATVVVGIDVSKDRLDVHVLPSGENFAVARDEEGVSKLVARLAALGPYAIAMEATGGLESLVAASLNGANLPVIIVNPAQVRAYAQALGKRAKTDAIDAAVIARFVEATKPVIRALPDADTVLLAQLMTRRRQIVQMIVAERQRQTQLPTRHLRRSAARLIKALQRELDVLDRDIDSSVRGSPIWREKEALLRSVPGVGPIIARTLLAEMPELGTLTRREIASLAGLAPWTRQSGRWRGKSFTGGGRAPVRTALFMAALVGARFNPILKAFHQRLIAAGKPKMVALIALARKLLTILNAILRDNSPWQSA

SEQ ID NO: 308004 - protein, 314 aa, unidentified
MAQFITAAGIDVSKSWLDVALWPDDAAVLHIERSEAGCFDRLAAWLREQGVSRVGLEASGGYETEVMDALQARGFEVVRYNAYRIRMFAKANGRLAKNDRADAVVLAHAAAVLPVRHATARQAELDPLVELLNYRRRLHDWIGDCTNQLEHLRDKVLRRQTTARRARLHREVIAIDKKLAAALASSGASGELVQRLRNVPGVGPVLSAALVALLPELGTLSRRKVASLVGVAPFDNDSGNRRGERHIQGGRARLRRILYMATLSATRHNPVITAFAKRLAGKEPKVIITACMRKLLVILNAMVRDATDWSPKAA

SEQ ID NO: 308005 - protein, 411 aa, unidentified
MDVVHDRAVGIDISKRDAKVCVRVPGERPGTFTNDVTIWGATTNQILELRRFLETKNVTVVVMESTSDYWKPFYYLLEETLPVMLVNAKNARNIPGRKTDVSDAAWLAQLASHGLLRASLVPPEPIRELRDLTRARATAVHDRTREIHRLEKFLESSGIKLTSVASNLTGVSSRAMLDALLAGERDPRVLAELAHGRLRQKIPQLVEAMTGFFTPHHAFMVRSHLMQIDTLTARIDDFTVRIEEAMAPFRDARDALTTIPGVSVAIAEVIIAETGGNMSVFPTPGHLASWAGVCPGSNESAGRVKSAHILPGNKHLKAALGIAALTAVRSKTSYLSVKYRRIAAHRGQMKAVVALEHTILTAIWHMLTTGETYLDLGPNYYANLNPDRTKNKAVRQLEALGYEVTITHAAA

SEQ ID NO: 308006 - protein, 338 aa, unidentified
MDKITTVGLDLAKQVFHLVCCDERGKVVGKRMLRRAQVLGYFANLAPARVGMEACAGAHYWARELEQLGHAVKLLPPRFVKAFVRGNKNDFNDALAIAEAVVRPEVRGVAVKTVAQQDIQALHRLRSECADSRTALCNQLRGLLAEYGVVLPRGVSSLRRRLPALLEDGENGLSALFRRLLAQGYQRLCELDAHIAAYNAEVARHSRQDDACRRLQTIPAYGPVVASVFHSQVGDGRAYRRGRDVSAALGLVPRQHSSGGKTVLLGISKRGDCYLRSLLIHGARSVVRQAAHKDDRLSRWINRIKAQRGHNKAVVALANKLARIGWAVLRYQRDYQPA

SEQ ID NO: 308007 - protein, 349 aa, unidentified
MSPSGALNAADVELVIGIDVGKAEWVVAVWDSQQQCAQALVPLPNSDEGCQQLAQALAGHARQQGARAIHITVEPTGGYESTLVYFAHAQGWRVSVVNAVTVRDWAKGLGRRAKTDQLDALMLAQYTVERHPRLWQPPAAAMSELESLLARRRELRQMLQAEHNRQQQFAIHPQAAATVQHSIQTVVGSLQTALAEIEQALGDWREHNPSLDEQADRLDTLPGVGPKTVLPLLALLVRWDGLTAGQGADKALTAFVGLDPTVHTSGTSVRKRSLISRRGSPDLRTTLFMATLGALRGRNALHVFYDALVARGKPKMVALVACMRKLLIWAWHIYQTRLPYDPTKHLKPS

SEQ ID NO: 308008 - protein, 353 aa, unidentified
MEYYVGCDSHRRYSVFVVIDEKGRAAAPVRVEHDRSKLREFLQSLPPRSKVAIESSGGWYWLVDEIEAAGLTPQLAHAYDAKQRMASRNKTDKFDARGLALELLTGTLPAIWIPPADVRDLRGLIRTRLALRAQSTQVKNRVSAAINRYGLKEPNEDHDLFAHRCRSSLNRYIQSLPSATQQATKQELALLDEINNHVGDLEKQIDKQVGPLKEMRLLRTVPGIGRILGATILLEVGNVDRFPSAAHMASYAGLVPVVHSSGGKTWQGRVPKNANLFLKWAFVEAANCIVAQQRRLNGTHALVLYQRLKAAKGHGKAAVAVARHLAEASWWVLSKQQPYREPKQARISSSTHG

SEQ ID NO: 308009 - protein, 289 aa, unidentified
MDYFAGLDVSVKETSVCIVDDTGKMVREVKVASEPEALLAALKNPAYHFKRIGLEAGPLSQWLFSALAEAELPVICVETRHMQAVLKAQINKTDRNDARGIAQMMRVGLYRPVHVKTLRSQKLRMLLTHRKLLQSKAIAIENDLRGTLRNFGLKVGMVGKVKFEARIKKLVENLPDLAELVEPLLIVRRVLREQIVILHRRLLAIVRDDEVCRRLMTTPGVGPVVALTFRATVDVPARFRKSKAVGAVFGLTCSKYQSGEIDRSGRISRCGDEMMRVMLYEAAQSMLRS

SEQ ID NO: 308010 - protein, 355 aa, unidentified
MNDEKYIGLDVHQATIVVAVMDSTGKLVMESILETEAATILQFFAGLRGTLSVTFEEGTWSAWLYDLLNPHVDQLVVCNPRKNALLKDGNKSDRIDARKLAELLRGNQLKPVYHGETGVRMLRELSRSYLTIVKDLSRVMNRLKALYRSWAIPCAGRDVYYRRHRAQWLAKIREAGVRRRAERLYEQLDMLRHLRQQARRELLAESRKHPITAKIRQIPYLGPIRSALAVALIQTPHRFRTKRQLWAYSGLALETRISAEYRLVEGQVRRSKKLLSIRGLNKDHNHDLKGLFKGAATMASARPGPFQDFYQASLAKGIKPTMARLTLARKIAAITLTLWKKGENFDAEKLKSQAA

SEQ ID NO: 308011 - protein, 340 aa, unidentified
MHITRIGTDLAKNTFSICGVDVNDKIVLERTLKRKELLAFFAKTTTCVVAMEAGSGAHHWARELMKLGHDARILDPKFVVPYRTGNKQSKNDRNDARAICEAAGRPHMRFVPIKSDEQQATLIIHRRRRALVTEHTRTANQIRGFLAEFGVIAPKGVNSLKREWHRLRTDYALHVPAMAWEEIDPLYRHLLDVHQQILAYDRRINALNREDARAQRLLDINGVGPVTASAIVATVGDATLFKNGRQFAAWLGLTPREYSTGGKSRLGRITKRGDVYLRTLLVHGARSELRLTHKRTDNKSQWAEHLRESKSWNKTAVALANKHARVIWAILAKGETFKPV

SEQ ID NO: 308012 - protein, 393 aa, unidentified
MNKIVHYLGLDVHKETIAVAIAPQNTTEVRCYGIIGGAIEAVDKLVKKLSAENVELRFVYEAGPCGFVIHRYLKSKGIRCDVVSPSLIPKKASDRVKTDRRDAEQLARLYRAGELRAIHVPDQEDEAIRDLIRARTAAVCDQRQARNRLKGFLLRLGFRYSGKTSWNDAHKRYLSGLLMPQPAQQIVFQECIHAIDDATQRLERLTQAVEDALPGWKWEPVVRALMSLRGVQVLNGMTLVAEAGDMTRFTDPKELMSFFGLTSSEHSSGRKRRQGGITKCGNGHCRRVLTEAAWHYRLKPQVSEAMQKRQEKQSKAVRVIAWKAQQRLHKRFRSLSVRKKSVVVVTAIARELTGFVWAIARQVKVPEPSSAPEIIRTAHGRVYVLDPKKTYKK

SEQ ID NO: 308013 - protein, 312 aa, unidentified
MPCCVGIDGAKAPWDIALRPAGERWAVPNDAGGVVMRVERWQSLPPTLLVLAATGGLERAATAALATAALPGVVVHPRQARDCARATGQLAKTDAVEARALAHCAAVIRPTPRPLPDAQTQELRALLGRRQHLIGMRTAEQHRLAGTTARLTTDSAAHMTWRNAAIATLDGDLETLRRASPRWRDKDDLWQRATGIGPVWARTLRRALPALGTRTRQQIAAVVGVAPLHCDRGTLRGRRMIWGGRAPVRPVFYMGTLVATRFNPQSKVFAERRLAAGQVNKVALTACMQKLLPILNAMLKPRTPWQPQEVQS

SEQ ID NO: 308014 - protein, 367 aa, unidentified
MKKQTSATTETGIKGKTVIDFTGKIIYVGIDVHLKDYQAAKVYNGICLGNHRMQASSEALIKHLRTHYPGARFKCVYESCAWGFELQRKLTAAGMECIVVNAADVSTTDKERRRKTDKVDALKLARSYESGELEAIHVPDETLQKERNIVRYKRSLVEDITRSKNRLKSLLKYHGIDLPEQYAKNNWSANFMQWAAQQAAKDELLGDTLLLLLEQVKLLRQLLLKTEHKLRELSRGKYAPQASLAMSVPGIGQNTAMLFLLEAGDVRRFDNFDALNDYVGLCPDTDSSGETERDRGITTRGNKQLRSAMIEAAWLAIRKDPALLESYQLLTKRMKGTQAIVRIARKLLRRLRCVLISGIPYQKGIVG

SEQ ID NO: 308015 - protein, 387 aa, unidentified
MTVLTVNNLPAAAHGETVRCLFAIELSKMSWVVAFNTPLSEKISRRTLIGCKWRKLLELIEEVRARVSRETGRAVEVVSCYEAGYDGFWLHRQLSAHGIRNYVIDPASLQVDRRARRVKTDRIDTERLLRSLLAYLRGEPKVWSVVRVPSVAEEDARRLHRERDRLVSERVQHVNRIKGLCALQGIYHYNPLRPQAMARLEQLRTTQGGALPPRLKSEIKRELQRLKLVVEMIVTLEAERNAIVEDEASTHVNAKKIQTLHKLKAIGPEFATVLVGEIFHRDFNNRRQLASYVGFAPSPFQSGNVAHDQGISKAGNRKGRATGIELAWLWLRFQPDSDLSVWFRTRVGTTKGRIRRIAIVALARKLLVALWRYLETGVVPQGAVLKG

SEQ ID NO: 308016 - protein, 427 aa, unidentified
MYRMAGIDVHKKKLAVVVSDVEVHGEYQFERCWFGANPEQLRLLSPWLAEHQVEEVVMESTALYWQPVWGALERYWQPICQKREGAGATSGILHLAQAQSNRAPRGRTKDFRDAERLVKRLVADELKLSFVPDREQRLWRTLTRRRYQLTRARVQLQNQLEAMLEEAQLKLSSLVSDLLGVSARRMLQAIADGESNPEALAGLADRRLRATPAQLSDALGACTELHPVYRRLIKMMLGEWKVIEEHTAELNQELATLLRPHQDAVERLAEVPGLGVDSAQQILAEVGANAAVFASDKNLCSWVGICPGDQESAGESSSHRSPQGNRQMRRLLNQAANAAVKTKGSIFEIVYRRLVPRLGHNQTIGAVAHRLGRLIWLILRKGVPYEERGPAVSQRSKQNRTSKMIRELRTLGYRVEFLNPVPSNPMP

SEQ ID NO: 308017 - protein, 415 aa, unidentified
MYYVGIDIAKSFHVVSVIDDNETKVINKPFKINNDAKGFEKLLTIFDSITLNKSEFTIGLEATGIYGENLQEFLKSKGYSVKLLNPFQTTRYREQITLKKVKNDEIDSLVIALLLKSGKFSSGYITDDEYQSLRTLYRNRSTIQADMKDVKKRILTQITVTFPELEGFMKPFSVTGLVLLDKYPTAHHYKHSSVDRIMKLFRHIQGNNFTQSKALQLLELSRESIYSGKAKDARAIAIRSSIRLLQMYLSELDIIEAEILSLLQNSSVEVTVDEAGQEIERTDSLLANLKTIPGVAEKTIAALISECGDLTRFPTIPKFIGYLGLFPTENSSGNSKHIGHLSKRGSPLAKHALYMSAVSCLIHNTQLKQLYDTKRSQGKSKKEALIAVSRKIATIIYSIFKYNVPYNPNRVFAKS

SEQ ID NO: 308018 - protein, 350 aa, unidentified
MKIIGCDFHTRYQQIAMLDEATGELIERRLDHENGEAQAFYRDLQGPVRVGIEATGPIRWFERLLAELGHELWIGDSAKIRASEIRKQKTDERDALLILDLLLAKRFPKIWVPTPAERDLRQLLWHRHKLVCMRTMLGNQLHALALSEGLCRKKKLFTQKGRVELVHLGLGPWASRRREELLKLLDQLEPAIAELDRAVMEQAQRREDAVLLMTHPGIGPVTSLAFVLAIGPITRFARSKKIASYLGLNPSEQSSGGRRRLGAISKQGNTMVRWLLIEAVSAAVRKDPALRQDYQRLKFRRGHAVAKVAIARKLAVRMYWMLRSGAEYAQLVRRQGSPGATLMDASSSLG

SEQ ID NO: 308019 - protein, 408 aa, unidentified
MAGKVAGIDVHKKVLMVVVIDADTPAAKPERRRFTTMPSELCRLSTWLKEHGVEEAVMESTAQYWRPVWLELEPHIRLHLAQAFSNRAPRGRKHDFKDAERLVRRLIAQELILSFVPDGEQRIWRNLTRMKLQLVRDRVRLQSQIECLLEEMRIKLSVVVTDLLGLSGLRILHALANGETDAKNLALLGDHRLKCSEEQLIEALTGSSHPMHRQMLALQLERLRLIDEQIAKLNSLIAQAMNPHQDTVIRLAEVPGLGIDSAQQIIAEVGVTAGTFPSAAEFTSWVGTCPGKQESAEENSSSRSAKGNKYMRRVLNQAANAAARSKGTHFQAVFRRLLPRLGYQSAVWAIAHRLCRLVWKILHERIRYIEQGIESEPKLLIYRARSLAKQLRKFGYNVEITPANRAPA

SEQ ID NO: 308020 - protein, 336 aa, unidentified
MFQLGIDVSKKNLDLCLLREGVKGRVKTRKLKNGFNAANAVIGWLSKQHCEPADVHIIMEATGVYHESLAYGLYKAGARVSLANPHRSREFARGMDILTKNDHVDAFMLACYGALKEPEPWVPPPENVRHLSALLRRRDALVTDSTREKNRLEKCRATDIPLAVTESIENVLRNLSAELEHLDVQILTHLDQYPELKKDFDLLTSIKSVGYQLGLNMLVILRGHNFDTAEQVAAFLGVIPVEKYSGTSVRGKPKLSKIGPPEIRAKLYLASLCGLRFNPVMKAMYERLCQRGKAKMCAIGALMRKLVHWCYGVLKTQKPFDAEYLSSDARSACKAA

SEQ ID NO: 308021 - protein, 425 aa, unidentified
MKKNHQPKLDDQEVVYERCAGIDVHKKAITVCLRIGRKTQVREYGTITRELREMVAWLKENSCEMAAMESTGSYWKPLYNVLELEGIPAMVVNAGHMKSVPGRKTDVKDAEWIAKLLSQGLLKPSFIPDREQRELRELTRFRKSQIEERARNLNRLQKMLEGANIKLSSWLSDISGKSATELLELIIGKEDFTIEDVEQCRRTNMKATTEELFNSLEGIVTPIQRGLFKHVMKVIREQSAQIAETERLISSYMSEAYKAATEAIDAIPGIGCISAQQIIAEIGYDMERFPSAAHLCNWAGICPGNNESAGKRKSGKTNYANKTLKSTLTQCAQSVKKKKNSFFYAQYQRLVVRRGKNRATLAVAHSMLIAIYHVLKGAEFRDLGDDYYTRFNKEKKINSYVNQLKRLGVNVPDHVIRPAVMPEVA

SEQ ID NO: 308022 - protein, 348 aa, unidentified
MSQSNIHQYVGLDVSLKETSICVVDESGKVVWRGRTDSTPQAIAEAIKRHARHVVRIGLESGQLSTWLFHGLHERSLPVICIDARHAKAALSLKVNKTDANDALGLAQIMRVGWYREVTVKGLDSQAVRALLVARAQLVSQITTLKNCVRGILKTFGFVVRTGLRSQFPKHVREAIHANPALAAIVEPTLRVLEAARAQLLVYDRAVIQRARSDETARQLMSAPGIGAIVVLAYMTGVESPARFRRSSSVAAYFGMTPARYQSGEVDRAGRVSKCGDGMVRGLLFEAAKVLLSRSARPCALQSWGQALAKRIGTKKATMAVARKLAVILHRMWATGATFQWPTPAPAA

SEQ ID NO: 308023 - protein, 397 aa, unidentified
MWTLGIDIAKRKHVAALLDDTGQKVFKNFSFTNTMEGVNLLMTKVKQVGFSTENLLIGMEATGHYWMTLYHYLSNAGFQVRLINPLMTAARRNIGIRGTKTDSVDAELIANILREADPKFSAVPDDEVRQLRNLTRLRYECNQTFIAEKLRLVALLDLVFPEYAEHFSDIFGAASRELLAQYPTAEDIKKIDIRKLARILKEASKGHMGREKAQRLKDAAKNSFSLSGTNLSFALEIKFLVQRMNILLEQIEELEKQIKKYMKENQKLLQTIPGIGPVWAPTILAEVLPVFHPNEKNGARKFVAAAGLDVRLNDSGDSRGNGKMSKRGSRYLRTAAIQAAEVAALVAKDPMFRSVYEKQKAKGKKHLVAISHVANKLLHVVFSVLKNQKPYEVRLSH

SEQ ID NO: 308024 - protein, 417 aa, unidentified
MALKIVYPVCCGIDVHKSFVVACIAATDGKGVTTYKQRRFSTFTGDLRLLAQWLVDNQCRDVCMESTGKYWISVYNMLESTCKVVLAHPKYVKAIRGKKTDSRDAKSIADIFKHDLISGSFIPPFAIRQLRDLMRYRVKLTSFAVGEKNRAQNCLTVSNIKLDDVFTDVFGKSASAITDQILLHPDGNFDVMPFVDRRCKASTEKIQAAVDGLLCSEQAEKLKIIRSHMDSLELCRTNLESVILSLAEQFRLQMELVMTVPGVQLFSAISIIAEIGVDMSVFPTAKHLCSWAGLVPQNDESAGKKKSTRIARAGAYIKPLLVQCALTVCNSDKHPEIKNRYLALKKRRGHKKAIIAICRMLLTAVYAILKKSEAYNPDLYRKVVSLPANRAFTVEQAVAFVQRHGFIVVDSDGVIAS

SEQ ID NO: 308025 - protein, 345 aa, unidentified
MCNDTIIAVDVAKSIFEIAVSSEPGKVDERDRLSRQRFLDFFGNRPPATVLMEACSSAHYWARKIEGLGHRVMLLPPHQVRPYVLRNKTDRTDTKGMLEAYRNEDIRPVPIKTLEQQTVGSLHRLRSAWMDERTAKINTLRGLLRELGLVIPVGSQNVVPRAWSFIEDADSGIPDALRPLLAELGEEIRELDRRTKLVERQLEALANSLPAIERLRTIPGIGLLTATALFAFVGDPHRFPSGRHLASYLGLTPREYSSGSRRTLGRISKRGNAYLRTLLIHGARVILWHAKSMKQPDRLRVWAQRLEATAGHNKAAVALANKLARIAWVVWKNERTFESVVVPAA

SEQ ID NO: 308026 - protein, 382 aa, unidentified
MDLVSAELPARTLVVAIDPGKATNRVLLADGEQGLIGEPLSLSTQREGIERLCSLIEAAAAPETVIAIEATGSLHLPWVAELERRLPGSTRLFAPSETQAARVGLGSRRFKDDDRDCAALVSLARQGRGRPAQSGTLDALLDAVRHRRRLIAQRKVARQHLHHQLNALCPGLSAPAGHGKALGLETPTGQAVLACAVDFAGRAPARRSLIARAPGRLPRATVAFWAERWRGCLTPPPDALLRAERLGRDIKRWRALQGDIDAVEAQIAELLAQTPGEVLTTLPGVAKSRAAAFAAFALPIERFPNAERLYSFTGLAPARYESATIRKARGISRQAPGERRDALMSIAWGLSQHCEPFRERDRELRARGMRPIEARVALARHA

SEQ ID NO: 308027 - protein, 358 aa, unidentified
MDEYIGLDVSLEETAISIRRDGQRIWRGKCKSDPNVISALVRKRAPGAKRMVFETGPLSVWFYHALSAEGLPAICIDARHAKAVLNMAANKTDANDADGLAQLAEVGFYREVRVKGYDSMLTRTLVAARTKLVRICIELSNQIRGLMKTFGLVIPPGRGRTFEQNVRELLDGNDALSPIIMTLLEAWCGMRRQAAKLSRQLMATARQSAPCRLLMSIPGVGVVTATSFVTAIEDPGNFRKSRSVGAWLGLTTRRYQSGEVDYDGHISRRGDAHLRGLLYEAATVILTRAGADSSLRSWGLKLREKVGFKRAAVAVARKLSVIMHAMLKQESSLIVPQVWPPEPVEQGTIKEDLTSAPR

SEQ ID NO: 308028 - protein, 327 aa, unidentified
MTASVSFDNHIFIGIDVGGASFEAAWHRGGSTQHQNRPDAIAAFVARLCAEKQIIRIAVEPTGGYEKPLVKALRGAGLPVEMVHTSRFDAYRKLVGVKAKSDTSDARLLAAYAAAPAEVRGRKADHVEIPQDAVREHLAELAVRRDQLKRMIHAESCRLATVRSNDVREQIAAHLEALREAGRKLHVAMMQLVRERAELRNAKRLLRSIKSIGDKTALTSLALVPELGLISNKAAAALIGVAPFVRKSGTMNAPARIHGGRAAVRNAFYMAAVTASRHNPVLAPFYDRLIAAGKPPKVALVAVMRRLVVFANAVLRSGQPWKAAQTP

SEQ ID NO: 308029 - protein, 459 aa, unidentified
MQAVIGVVAHKNTHTLVAVNPLGRKLGEKTIATTSEAHEDGLRWVRAQFGTDVVWGVEDCRTLTARLERDLLAAGHKVVRVPPHLMSRSRASPRERGKSDPIDALAVARTVLREPELPVASHDPVSMELRLLVDRREDLVRQRAATINRLLGRVHQLDPVWAEPRSWDHKRPREQLGAWLTTQEGLLAELARDEFAEIVRLSEGAEALARRIGERVRAAAPALLTLHGCGELTAAKIVAEVAGIERFKNEAAFARHTGVAPIPHWSGQSNRPLRPIRHGNRQLNTAIHRIAMVQIVNDGPGNAYFQRRLEEGDSRQRALRSLKRRLARVVFNRLTADRQGRRRPAIPRVLMLPLANLDVGRERRASADGVVLARSRRPGRPKALDPYQAGLARKMHASGEKVAAIAAALRVSPSNHQAGTGRVLTLGFPALKSLVLLNSGTTNAEGTLMNHVVSGVRCG

SEQ ID NO: 308030 - protein, 314 aa, unidentified
MSAAIFVGMDISQACVDVAVHPGTAFQISHDERGIAEAVERLYAVQPTLIVLEATGGLEVPLAGALAAAALPVVVVNPRQVRDFARATGQLAKTDRLDAQILARFAEAIRPPVRPVPDEQTQALAALVARRRQLIEMLTAEKNRLRLAARPIQQRVQAHITWLEKELAATNTDLTATMCESPVWREKDEVLRSVPGVGPVLTTTLFANLPELSTLTRKEVAALAGVAPFPRDSGTLKGRHAIGGGRAHVRAALYMAALVATRRNPVIRTFYQRLCQAGKAKKLALTACMRKLLTILNAMIKNRTPWRESVSQPA

SEQ ID NO: 308031 - protein, 402 aa, unidentified
MQVDDIDVFIGIDVGKSEHWATALTTAGECLHDRPLPNDEARLREVYEHLGEHGRLLVVVDQPATIGALAVAVAQDMGITVGYLPGLSMRRIADLSPGSAKTDQRDAAVIASAARTMPHTLRSITSSDEDAAALSMLTGFDLDLARQVNQVSNRIRGLYTQIHPALEGVLGPWLEHDSVLEVIATWPTPAALRKAGRARINAKLKANGCRRHAAWAQAIVEALSKQTVTVAGTDAAGVVLPHLARQLIALHTQRADIAAQVEALVEAHPLYPVLTSMPGVGVRTAAVFLAGTLGKTFTTGAHLASYAGLAPVTRRSGSSIRGEHVSHGGNKRLKRAMFLSAFASLRTDPVSRTYYERKRAQGKRHNQAILALAHRRILTLHAMIRNGTLYNPQPAQPLTTTA

SEQ ID NO: 308032 - protein, 388 aa, unidentified
MIYVGIDIAKLNHFASAISSDGEELIKPFKFTNDNDGFQLLISKLDPLDKDSLIIGLESTAHYGDNLVRYLVAKNYKVCVLNPIKTSTMRKNNIRKTKTDKVDTYIICKTLMMQESLRFVTFYDLDLMDLKALGRFRQKTIKQRTRLKIQLTSYVDEIFPELQYFFKSGLHQKSVYALLKEAPTPEAVASMHMTHLAHLLKVNSHGHFNKEVAQQLRVLAQKSVGANDSAISIQITQTIQQIELLDSQLDKIEAEMTDIMKFNDSVIMTIPGIGYINGGMILGEIGDIHRFSSPNKLLAYAGLDPSVYQSGNFQAKKTRMSKRGSKVLRYALVNAAYNVVKNNATFKAYYQAKMAEGRTHYNALGHCAGKLVRIIWKMMTDNVEFNLD

SEQ ID NO: 308033 - protein, 348 aa, unidentified
MPQNPSSSMAVIGIDIGKNSFHIVGLDARGAIILRQKWSRGQVEARFANMPPCLIGMEACVGAHHLSRKLKAFGHDARLMPAKYVRPYSKGQKNDFRDAEAIAEAVQRPTMKFVATKTADQLDLQALHRVRERLVSQRTGIINQIRAFLLERGVAVRQGLRFLRAELPRLLATPLDVLSPRMVRVIEGLAEDWRRLDERVDHLSGEITALARQDVGCERLMSVPGIGPIISSAMVAAIGTGDAFSKGRDFAAWLGLVPKQISTGDRTILGKISKRGNRYLRVLFVQAAWVVLIKPKSWERHGLKSWIEAAKKRLHRNVLAIALANKLARIAWSVLANGRVFEARLQAA

SEQ ID NO: 308034 - protein, 340 aa, unidentified
MGKRFIGIDLHRNQFTCCVRLANERTYLSEWKLTDLAKFVKKLRPADEVAVEITGNTRLFYDAVAPAVARVVVVDTNQFRVISQSVKKTDPHDARLLSLYLSKDLLPEVRMKDKEHGQLASLTQTRDTLVKLRTALKNKVNNILSARGINLPKEALTAEKRLQEVVDLPFDEIVRIELRVIVDQIRSLNKSIAELEKTIADEGSKLEGHKSLTSIKGIGKVTSAILLSVIGDVNDFPDESRLASYFGIVPRVSNSNRTEHFGRIHKRGTKLGRTALVQSALIAANYSRYLKSFYERVKARRGAGKAIIALARKFLGIIYRTLKNKWVFQDFPNFVLAEAT

SEQ ID NO: 308035 - protein, 457 aa, unidentified
MARTGKGTKGIEKEQPFEGISRVNPNAAGMDIGSVEIVASVNGAENTQLVRAFGNYTADLENIGDWLSEHGVKRVAMESTGVYWIPIFETLENRGFECLLISSRSLRRVAGRKSDIADAQWIQTLHSYGLLENSFRPQADLIALRTILRHRGQLIEHRSPHIQHMQKALLQMNVQLSQAVSDITGVSGLRIITAILNGEREPAKLGALREPGCKKSAEEIGRALTGTWREDHLFVLKQSFEMFVYYSEQIVDCDEEVERTYAGLRVDNDPGDLPPMSRRKRGSHSKNKPKQAEEIRAHLKRISGVDLSLVDGFGVSLSQTVLSEVGTDMSKFPSEKHFCSWLGLAPKHAISGGKVLKNRTLKTKNRAGQAFRMAAQSVKRSETVFGVKYRRMRARLGPAQATVAVAHAIARVAYRMLKYKVEYETISVEEYEKKYKAQQLKYVKKKAAGLGFALVPA

SEQ ID NO: 308036 - protein, 463 aa, unidentified
MYRELEPLRQALSAELKADLPPAVPGIDTEHLLQTYLDRLTMYVGCDVADQTFALFSADAAGEKLGHRLNVLNNSSGFEQAWKWLEGLRGQHNLRIILLAMESSGIYYWGWWDFLAGRPNLARVLYNPRTTEHMTEVLSKRVRNELVDAYALSEQVRLGSTPEVVLTEDTDLLTARLCSRAARDLAQQINRKKNQLRSLIRAYNPAFTQVFPGAKFHHPAAYALLQRHVLPDEFTTAGTPAITAILQDHCRTIFGQDEAERLVTFCRQTLTSQTFTRQIGREALHQRVQQLTQDVLAAYKHQKRFLKTGYRLIEKRPQTTLLRTVKGAGISNTLALVSEVGDFERFPDGQHIASFLGLTTSKHISGTTLFRSKHITKQGSPNGRYAAVNIALHLSQRVPKYQQMYQRIKLRKPPRKGHFIALVAIARDFVTNVLYDMWRYQRPFFLEVEDYREYLRTHPRSDD

SEQ ID NO: 308037 - protein, 370 aa, unidentified
MSVYVGIDVHRKRSQVAVVTEDGKVQLNRNVVNGSEPVLKLIGDLPAGTPVAFEAAFGWGWLVELLEDYGFDPHLVHPLRCKAIASARLKNDKVDAAILAQLLRADLLPEAWIAPPQVRQLRALLRHRASLVRLGTGLRNRIHAVAADHGYDRRASYWTGPGRGWLAELDLPPASREVVTDCLAAIDHLAPVIERLDAGIHRHAKADPRVKVLTTLPGIGEFTALVMLAEIGDIARFPNARKLAAWAGLTPTVRGSDVKVRHGHISKQGSAWLRWVLNQAAQTAKRSPQFAATYAAIARRRGKKIATIAIARKLLTRAYHLLADGQAAGSAPAASACAMAAAAQTGRVTKPRARSPMRHEPAEGRARSFD

SEQ ID NO: 308038 - protein, 413 aa, unidentified
MSNENTCRNRCGIQNLKSFRMEVAMLFIGIDVAKDKHNCCVISSQGSVLSDGFEFLNSRDGFENFIKLVNSLRANGEEVHVGLESTGHYSANLLSFLKKQDFDVTEFNPLTVSRSRTAGSLRKTKTDKNDSRYLAQLLIAGDYKPYQEQARHISLLKSLSRARYRIVKESQPLKCRFKRLIHIVFPEITGFFDSLYSPSALNLFLLLPGAKDIAACNILALTKILSEGSRGRFKRDKADALKALAKNSIAEYNQGDALELQLIVQRIQFFQNQTNEIETQIHTLMKSIGSPITSIPGIGFVIGAALISEIGDIQRFSSPAKLLAFAGCEPSTYQSGNFTASKTPMVKRGSKYLRNALYQAVGKAFLKSPSFREYIKRKRQGKHHFVAMSHAMKKMTRVIFAVLTNNTPYTEPI

SEQ ID NO: 308039 - protein, 398 aa, unidentified
MLYVGIDVAKNKHDLAVIDTAGTIFIRHLQIKNNREGFTKLQMTLANLQETTGEEIQVALEDTGHYCFNLLHFLRTQGYPTFSYNPFLIKEFAKNQSLRKTKTDKKDAMTIARKLREDLDKQIFDTQSNMIELKYATRHVARIKDDCTRKKINYTRILDILFPELAVFLGASAAKHQVYVYELLREYPSTKKMGNAHLTKLTNLISKYSRGRLGKEQAVELRRLAQTSIGQESPALEFELIQTIEAIQYFTKMRSKAEEEVTRLMSEIDSPIITIPGIGTGLGSVILAEIRDIKNFRSPNQLLAYAGAEPSISTSGMNQLESGKMVKRGSSHLRWALYEGARLMSIWSPSMRVYFGKKLDEGKHYNVALSHVVRKLVRILFQLLRSNEDYDEQKMVVN

SEQ ID NO: 308040 - protein, 388 aa, unidentified
MNVGADKSEPLTAIHTDLGAIFVSLELSRSSWLITSLSPGGGEKMSKHSVRGGDFAGLMERFAQLQEKARLRTGQSFRIIVVQEAGLDGFWIHRALQNEGIESHVVDAASIATSRRRRRAKTDKIDGETLVRALLAYKRGEPRVCAMVKAPTPGEEDRRHLCRERKALTAERVRHVNRIKGFLFSQGVSGYQPLRRDRRQRLEELQTGDGRAFPPHLKALINRELDRLELLLKQIKTVEAARDALLAVEQTAKPGPAAMLLDIRGIGPEFAAILWSEGLFRHFENRRQIAAYAGLAPTPWQSGAVDREQGVSKAGNPRLRTTLIQLAWLWLRNQPRSALSVWFHERVSRNGGRLRKTTIVALARKLLVALWKYVTAGVVIEGVTMKVA

SEQ ID NO: 308041 - protein, 464 aa, unidentified
MRKPAEVAAKEFAARVSRELPTIRDRVAGIDLGSRQMYVCGPVEQDGKREVRSYDTTTEAIRACVQWLQQKQVESVAMESTGVYWIPVLEIMEADGLEVLLVDTRPLSRVPGHKTDVIDCEWIQTLHSHGLLQGCFRPGEAISMLRNLTRQKAVLVAEQADWVRRMHKCLDQMNVRVHHAVSDTQGTTGMAIIRAIVKGERDPRKLAALRDARCQKSEEQIAALLSGHWRGDHLFNLEQSLKIYDLLGERLAEYERQIQERMKRLTPPDNEDRKAPAVRNPAKAKAIKRRNQEEKRQRLYRLAGADLTVIDAINVETVEVLLSEYGPDLSKFESEKQFVAHLQLVPRKPVSGGKPLKKRARKTKSTRTGQALSMAAVTLSRSSSALGAYFRRISRTKDGSVAVFATARKLATLIYRMLRWGQQYVDIGQQAYEDLYQAARLRRLAATAAQFGYEITKKTEAANP

SEQ ID NO: 308042 - protein, 407 aa, unidentified
MLFVGDDWAEDHHDVEVQDEHGRAMRAARLPEGVDGMARFHDLIARFLPDRADPSQVLVCIEVDRGPWVRALIAAGYQVYGVNPKQSARHRELLSLSGAKSDKADAHTLADMVRTRRHQLRQVAADSDLGEAVKVVARAHQTLIWERTRHTLRLRSALRDYFPAALEAYKVLTLTGADALELLAKAPTPAAAARLTLTQISAALKKARRREIPAKAAAIQQVLRGEHLGQADVVATAYAATVRSAVAVLQVLNAEIKTLEGQVKAHFGQHPDAEVYLSQPGIGAVLGARVLAEFGDASGRYADAKSRKNYAGTAPITRQSGKTKTVHARFIHNDRLVDALHMQAGAAILHDPGVRAYYDELRGREIGHNAALRQVGNRLVGILHGCLKTTKHYNETIAWAHRTSAAA

SEQ ID NO: 308043 - protein, 431 aa, unidentified
MKNKTNQRIEEITPETLIVGIDIAKAVHWARFVDYRGIEIGKALSFQNDRQGFEKIVSRIREICNNKTQSVKKESVIIGMEPTGHYWKALANYSRKAGYRVVGVNPYHTKKSKELDDNSPTKNDKKDAITIARLIKDGRFFDPYLPEEEYGELRILGNARVSVMKRMNATKNAITAILDEYFPEIWTVFKKPLEGKACRQILRSCPFPAQILTKSEEEILGEVRKTVKKTVGLKKVRQLMVAAKDSIGVQNGVESVKKRLGWLLDELELAEKQQREVEQAMETALLGTGYAEQILSIKGIGIVTAASFLGEVGDPLRFQNARQIANYAGYNLIEDSSGQSKSGTRISKRGRKQLRSILYQMAFTMVGRNAEMKILYQYLTIRKTNPLKKKQALVVVSKKIITVIYSLLKKQETYDPALVLGIVRKEMMMAA

SEQ ID NO: 308044 - protein, 414 aa, unidentified
MLKIVYRVCCGMDVHKSFIVTCIASTSEQGVTTYKSKRFSTFTGDLRRCAAWLSENNCKDVCMESTGKYWIPIYNILERTCNIVLTHPKYVKAIRGKKTDKRDAKWIADIFKHDLVAGSFIPPADIRQLRDLVRYRWKLTNFTTGEKNRAQNCLTVSNFKLDDVFSDVFGKAASAITVRILENPTKKITDVSAFRTKGMKASNEQVLAAVDGEMCVEQAEKLRIIRSHMDSLELCKLNLESLILSTAEKYLPQLNLVMTVPGIQSFAAIGIISEIGVDMSVFPTSKHLCSWAGLTPQNNESAGKKKTTRIGRAGAYIKPLLVQCALNAIRAKQFPEVRNRYLALKKRRGHKKAIIAIARMLLTAIYNMLKKNEPYNSELYRKSDRPPVHREVSVEEAIFILQRQGYLVTAPSTS

SEQ ID NO: 308045 - protein, 445 aa, unidentified
MMPNIRKRYVGLDVHKDVVEYCILDRQGKKLDGGRFICEKSVLVNFAQKVLSSKDQIALEATTNTWAVVDILEPFVEKIAVGNSLKTKIIAEAKVKTDKVDAMILAQLLRCDFLPTVWIPDKQTRELRRISSFRKSLVQEATAAKNRIKGILNHLLIKHAVTWSVQGMEELKSLNLPSVERTIMDSEIAILEHLELQIKKIELEIQKLAYDEDNIRLLMTLPSIGYNTATALLAVLGDISRFKDTDHAASYVGLVPRVKQSAEACHYGPITKTGSALARAMLCEAAQTLFLNDGPLGVFARRIREKKGWNRAIVAGARKLVTIAYHMLKNKEPYRYAAVIRTQDKLRDLRNKAGGAKLPPPQYRYDDEVTRNRPVGDFKVRYVPPLADVYKNEGLPPALAFDELSSGEQRILKEMGVAEKVRAKEKIGMIVQSKKVTSPPKQSGK

SEQ ID NO: 308046 - protein, 341 aa, unidentified
MSESALIGIDLGKHTFHLHGQDKSGREVFRKKCSRAQMMQFFGNVPSCVVVMEACAGSHYVARQLAAMGHTAKLISPQFVKPFVKGNKNDFVDAEAICEAASRPSMRFVTPKTESQQTLSVLHRMRESWVHDRTKTANQMHGFLLEFGVSLPKGLAIMKRLASVWAEHELPVRLTVLLQRLHDHFVYLDEQIKALDKELAGQLADDDLGSRLLSMPCVGPITASLLAVEMGDGKQYRCSRDFAASVGLVPRQYSTGGKANLLGISKRGDKHLRQLLVQCSRVYMQRLDHQKGALAGWVKTLLSRRHSNVVACALANKLARIAWAIAARHTQYEAGPDALNA

SEQ ID NO: 308047 - protein, 359 aa, unidentified
MMSMNHDQSPCRVVIGVDTHKYVHVAVALDELGTVRGDTAVPADRSGYERLLAWASDMGKIAAFGIEGTGSYGAGLASLVRRRGHKVIEVARMDRRDRRLRGKNDLLDAHNAARVVLAGTATAIPKTADGVVEMLRQVKVAKDTAVKARTAAMITLRALIVNVAPELRESLQGLPKMALIERCAGLRPGQVDTPLAASKHALRSLARRWRELSAEVKEHEALLERLTREVAPQLVDAFGIGPDTAAEVLIVAGDNPQRIRSEAAWAKLCGVAPLPASSGTTTRHRLNRGGHRQANAALYRTVIVRMQHHEATLAYVARRTTEGRTKAEIIRCLKRFLAREIWALMRPLREGSTALSEAA

SEQ ID NO: 308048 - protein, 342 aa, unidentified
MEHFAGLDVSVKDTSVCIVDETGKIVREVKVASEPDALLAVLTNPAYHLKRIGLEAGPLSQWLYSALAEPGLPVICVETRHMQAVLKAQINKTDRNDARGIAQMMRAGLYRPVHVKTLRSQKLRMLLTHRKLLQSKAIAIENDLRATLRNFGLKVGMVGKVKFEARIKELVENVADLVVLVEPLLIVRRVLREQIVALHRRLLAIVRDDDVCRRLMTVPGVGPVVSLTYRATVDVPARFRKSKAVGAVFGLTCSKYQSGEVDRNGRISRCGDEMMRVMLYEAAQSMLRSKKWSWLKAWAMQIARRRGMKKAIVALARRLAVIMHRIWVDGTEFRWTRETAAA

SEQ ID NO: 308049 - protein, 333 aa, unidentified
MVEGTKGSHHKEGSTKMSNDSTVCAGIDTGKHKLDVAIDGSTERLQVDNSPQGHQALSAWLRQRGVERVGIEASGGYEQAVVSYLRADGFVIIVFQPIQVRAYAKFVLQHAKNDNIDAALVARCTAAATDIREPPDARLAPLAQHLTMIEQLTEDVAHLKTRHEACRDPRIRDFWKQEINRLKALLHGELKRLVAAIRQHRDLSNRLDLIASVDGVGLRTAVAILVRMPEIGRVTREQAAAIAGLAPYDDDSGLRRGSRHIKGGRQRLRQSLYAATLPAVFYWNAQLKTVYRRLIAAGKTHKLALVACARKLLIFVNTVVARGTPWTASPATT

SEQ ID NO: 308050 - protein, 331 aa, unidentified
MKKFSGIDLHSNNSVVVVSDEVDHIVYQRRLPNDALQIRAALAPHREELEGVVIEATYNWYWLVDALLADGYHVHLANPAAIRQYEGLKYSGDFTDAAHLAQLLRLGLLPEGYIYPADGRQVRDLARKRMQLVQCRTAQILAIGNLFARHTGSQMHGPQVKRLDGAQVSRFGFAPDVTLAIRANLAVLGALQQQIEIIEKRLMQQVKLNPDYALLNTVPGIGPVLATTIMLETGTISRFATVGHFSSYCRCVDSRRESNSRKKGEGNTKNGNRYLAWAFVEAANFAIRTCPQARRFYERKKRMRNGIVAIKATSAQAGSRLVSHASGAQTI

SEQ ID NO: 308051 - protein, 418 aa, unidentified
MDVVVERCAGLDVHRDEVVATVRVPGAGRRRWDQQTRTFRATLAGLSMLGDWLSGFGVTLVGMEATGVYWKTVFQALEERFECWLLNAHHLRNVPGRKTDVKDSEWICQPVQHGLVRPSFVPPVEIRRLRDLTRLRKAQINERARSIQRLEKVLQDVGIKLTSVASHTYSESARAMLDALLSGVTDPEQLAELAKSRMRSKIPQLREALASRFEIEHHGVMVAQLLAHIDTLDAAIRNLNERIDLALAPHQHVVELLCTIPGVQAHAAQVLIAECGLDMGRFPTVGHFASWAGACPGHHESAGRRRSGQTRPGPRWLTDALTECAKAAARTKGTYLAAHFAQLRGRRGEPKAIGATRHDILVAYYHIVRDQVPFRELGADWQRKRYSAEHRARRLQRQLEALGYKVTIEAAAEAQAAS

SEQ ID NO: 308052 - protein, 338 aa, unidentified
MTVVTVGIDLAKNVFAVHGVNAAGKAVLVKPLVRRAKLLELIATLPACLIGIEACTGAHYWAREFQKMGHTVRIMAPQLVSPYRMSGRHGKNDAADAAAICEAVARPNMRFVPIKSVEQQGQLFVHRAHQGYVSERTALINRIRGLLSELGIVLPQAFKAFLSGVAQVLEDLPGYCNQVIGDLLNELYHIEEKIKNSEKLIQQLARDNSAAQLLMQFRGIGPMTATAIVASIGNGHDFKNGRQFSAWLGLTPRQQSSGGKARLGRITKAGDSYLRTLLVLGARSVLLGAAKNDDPVSRWALQLKERRGYGRALVAIAAKNARMCWAMLHLRDEFRFPA

SEQ ID NO: 308053 - protein, 428 aa, unidentified
MSDDVMIAVDPHKASNTAAVLDPVTRTLIESARFANSTDGYEQLTGFARRWEQRRWAVEGCHGAGRSLAQRLVADGEMVLDVPAKLAARVRVFSQGHGRKTDKDDAVSIGLAALDGDGVAAAAADGATVSLRLLCDRREELGALRTQAVCRLHRLLTELTPGGMSRELSAGKAAAVLARIRPGDEVNRIRLQLAADHLADIRALDARMKTIGAQIADLVAASGTSLTTLYGIGPVIAGRILAETGDVRRFATKDKFATYNGTAPIDVSSGEQIRHRLSRAGNRRINHALHMMAVTQIRYPTTPGRQYYERKRLEGKTPKEALRCLKRRLSDLVYHQLVLDQQGTIDTCGSPTTGKRTPSTSSSPTTRSRPAGPASQLTRPTASRHSSSSTGKTTASSASKSSTPAPASTTTSSTKPNSSARRRSNGSA

SEQ ID NO: 308054 - protein, 347 aa, unidentified
MTIVEDARVITGGVDTHADMHVAAALDPIGGLLGVEEFPVTPVGYAHLLGWLGGFGTVGLVGIEGTGSYGAGLARHVAAAGIRVVEVDRSDRQDRRRQGKSDPLDAVSAARAAQSGRARGAPKGRDGAVEAIRALMVAKRSARSERTQTIGQARSLIVTGPDDLRARFAGHTVAALVSELAALRPRPGDAVGYATRIAVRELGRRAEFLDGQLARLDELIVPLVTGRAPGLLALHGVGPDTAALLLIAAGDHPGRLRSEAAWAHLCAVAPIPASSGKVTRRRLNPGGNREANHALWRIVITRMSSHAPTRAYVERRTAEGLSKKEIIRCLKRYVAREVYRHLRAADG

SEQ ID NO: 308055 - protein, 402 aa, unidentified
MNAVGIDVSKGKSMVAIMRPFGEIVSAPFEIKHTASDIHSLVELINSVEGESRIVMEHTGRYYEVLAHQLSEANLFVSAINPKLIKDFDNDSLRKVKSDKADAVKIARYALDKWQNLKQYNVMDELRNQLKTMNRQFGFYMKHKTAMKNNLIGILDQTYPGVNTYFDSPARSDGSQKWVDFASTYWHVDCVRKMSLNAFIDHYQNWCKRKKYNFSQSKAEEIYGKAKELVPVLPKDAITKLIIKQAVYQLNSASTTVESLRTLMNETASKLPEYPVVMAMKGVGTSLGPQLMAEIGDVSRFTHKSAITAFAGVDPGVNESGSYEQKSVPTSKRGSSDLRKTLFQVMDVLIKTHPQDDPVYQFLDKKRAQKKPYYVYMTAGANKFLRIYYGRVKEYLASLPES

SEQ ID NO: 308056 - protein, 345 aa, unidentified
MECYVGLDVSLKLTAICIVDRTGKIEREGTVPSDPEAIATFVKTHAPHVARVGLETGATATWLWTELNKLGLPVICIDARHAKAALKMQINKSDRNDAVGIARIMQCGWYKEVRVKDLNSHAVKALLVSRALLVKIKRDLENQIRGLLKNLGFVIGRAKMNVFAVRAAELTEHRPELAAAVAPLLNARAAIELQIADLDRKVMWLARNNAQARRFMTAPGVGPITALCFLATIDDPTRFKRSRSVGAYLGLTTRRYASGEIDWTGRISKCGDKMLRSYLYEAANVILTRVARWSALKAWGIRVAKRTGLRKAKVAVARKLAVVLHRMWIDGTEFRWSKEAANQPA

SEQ ID NO: 308057 - protein, 412 aa, unidentified
MLDSSEVASTTGEGVFIGLDWGNSQHQLCILDPAGRLIHQGRFAHDVAGLGDLDHLLHTHGRVAGIAIERAEGLLVERLQQQGHRLFCVSPKMSARARERYRLAPTKSDAFDAFVLADSLRHEHRHWRSLAVPSPLLAELRALTRDRERMICNQRDVENQLRAIVQVYHPAVLHLFSSLDRDISLAFLRDYPTPAQAGRVGTVRMAAFCGRHGYSGRTRPELLVERLRANLLTASEGTSRGKAFTALMFTEQLELLNTQIRAISKRIRELLLTHPDAAIFLSFPGMGQITAAIMLAEMGEDRHRFPTADVLLAETGTAPVTRSSGRSRTVRFRYAANKRMRHAIDWWAFVSVRENDWAHEAYEQARARGQLHNRALRGIGARWIRILWRCWTDNTTYDPARHLRNQPTPITA

SEQ ID NO: 308058 - protein, 368 aa, unidentified
MFEHTFIGLDVHAVNVVGHALNPATGEISGHTMASDPALVLEWVRRFEPPVKVVYESGPTGFVLARYLRAAGINCVVTASSKLLRAPGDRIKTDRRDARVLAEMLAVGSATEVRIPDPDEEALRDLSRLRSGTAKDLAHARQHVNAILLRHGIRYPKDSRWTKEHSLWLHRQRFDEPALQFTYEADVEQAELLAGHLKRVDKQIAATAAACRYGPVIDALMCLRGIQITTGFGLAVEIGDWTRFTGSSIGSYLGLVPSEESSGQSRHQGPITKAGNTYARKLLIEAAWQHRRPYARPGERLLRQLDLVAPATRIRALEGNHRLHHKWEHFDERRKMSVKANTAIARELAGWCWSLAAPLQQGERMTAA

SEQ ID NO: 308059 - protein, 407 aa, unidentified
MSYFVGLDWASQEHAVCVINERAQIVWHTTIPHTAVGLAELRTRLARLAPPATIPVAVERPSGLLIDSLVDGGFIVVPIHPNALKASRTRYAAAQGKSDAGDAFILADLLRTDGHRFRPLQPLSDETRALRALVRTRDDLVAQRVALANQLRALLESFWPGAAQIFADIDSPISLAFLHRYPTPHTAQRLGEQRLAAFLAQHHYCGRRPAPELLARLHQAPIAPCGEAESEAKGELVRALVAVLEPLVRQLHHLASAIEHAIAVHVDGPILMSFPRAGRINAAQLLAELGDERLRFASYEHLAAEAGVAPVTQASGKHRAVTFRWACNKRLRLALTTFADNSRHASAWAAQVYQQARGRGCDHPHATRILARAWLRVLWRCWQDHRPYDPAHHSSAQRIVHAAAATA

SEQ ID NO: 308060 - protein, 400 aa, unidentified
MYDIDDVGVFLGLDVGKSAHHGHGLTTAGKKVFDKQLPNSEPKLRAVFDKLAAKFGTVLVIVDQPASIGALPLTVARYAGCKVAYLPGLSMRRIADLYPGEAKTDAKDAAVIADAARTMPHTLRSLELTDEITAELTVLVGFDQDLAAEATRTSNRIRGLLTQFHPSLERVLGPRLDHQAVTWLLERHGSPAALRKAGRRRLVEVIRPKAPRMAARLIDEVFDALDEQTVVVPGTGTLDIVIPSLARSLAAVHEQRRALETQIGQLLEAHPLSPVLTSIPGVAVRTAATLLVTVGDGTSFPTAAHLASYAGLAPTTKSSGTSIHGEHAPRGGNRQLKRAMFLSAFAALHDPASRTYYDKCRARGKTHTQALLRLARQRINVLFAILRDGTFYEPRTPRLT

SEQ ID NO: 308061 - protein, 370 aa, unidentified
MEIIIYVGMDVHKDSYSLCCYDPRSDRYLYEHKMKSTTANVIKYLENVKKQLGDVMFVCGYEAGPTGFGLCRELLRKDISCVVMAPTSLKRNANYKVKNDKVDARLLAKDLFTHDYSPVHLSSPKEEAIKEFCRMRRSIMTELKTAKQVLLAFLLRQGKHFDGKSYWTGEHKRWLKEISFEQPYLQEAFDEYVISVNELEARLKRIENRLEEIAKDEEVEVKVKKLICFCGIDTLTAVSIVSEVGDFMRFARAWDFANFVGLSVGERSSGGKERHLGITKSGNCYLRRLFMESAKSIKKTNVKFKKSKRLLDRQKGNDPKIIAYADKCRYRLKHKMMNLENRGKAPNVASTAAARELACFVWGMMTDHIA

SEQ ID NO: 308062 - protein, 460 aa, unidentified
MTKKNTTSRKSKSKARKSVLERINPNAAGIDIGANSHFVAIPEDRAEENVRKFGPFTSDLHRLADWLTEHHIETVVMESTGVYWIPVFQILEQRGFEVKLVNAAHVKNLPGRKSDVSDCQWLQQLHTFGLLNGSFRPKDEVCVLRTFLRLRDTLIKDCSSHVLRMQKALTEMNVQIHRVLSDITGYTGMAIIRAILTGERNALTLAQMKHPQVKASTEQIVKALEGDYRPEHLFALQTAVELYDVNHLKITECENKIAQQLEQFETKLDFDQVLEQSGALKARSAKVRLELQRQAYLTSVCGVDLTRLPGLSTLAVEVIISETGLDMSCWKSEKHFCSWLKVCPDNRISGGKVLPSKSRKTKNRAAGMFRLAAQGAMQSKTAIGAFIRRIRTRLGAPTAINAGAHKLARLFYRMLKFGAAYVEQGQTYYEQRYKDRLLHNLSKRAKELGFQLTPCEPATV

SEQ ID NO: 308063 - protein, 477 aa, unidentified
MNDRRLVGIDLGIASAHAVRVLDGQGTTLAKRKALPTVESLTEIETAALAGTSCGTRLEVVMEPTGPAWLPIAVFFIGHGHLVYRVSSAESADLRRYLSKHAKTNGIDADTLARIPLFNPAGVQPLELPGGEAAALARRVRAADRLTRDIADRKTRIKALVRQLMPMSPLAGKITNADLTVLERWADPNRLVRLGAKRLAGVIAKASNGHSGIERAHEWIDAASAALELYAGHPAVAFTDLAAEVATEVRLLRAAQAELAIHASERETAYRWVDPGALARSLPGLADVGGPALAATMGDPSRFHSGKQFRSFTGLVPKASETGDTDRKGQAMSKAGSSLLRTTLVRAADTARKQDPQLARIYYVQMVERGKNHLGALCVVAANLAQRAWAVMNRGMPYVICDTDGTPVAAHEAAAIIAQRWTVPADVRGRRRNKKGKAPQAISTRRHQRGDLPRDASSTNDRDLVNTSTRRTRQRIA

SEQ ID NO: 308064 - protein, 410 aa, unidentified
METLVERCAGLDVHKNSVVVCLRLPGHKGERQVVHRRFGTTTPQLLALRDWLEAEQVTLVGIESTAEYWKPVFYLLEEAMECWLLNANHLKQVPGRKTDMNDAAWIAQLLEHGLLRPSFVPPKPIRELRNLTRYRRAQIEERTREVQRLDKVLQDAGIKLSSVASDILGVSGRSMLRAMVAGSRDPEVLAELAQGALRKKLPALREALTGRFGSHHGLLVGEILAKLDYLEEAIERLSAEVERLMAPFETQVELLDTIPGVNRRTAEGLIAEIGVDMSRFGSPGRLASWAGMCPGQHESAGKSRSGKTRKGSKWLSAHLREAAKAAAQSKDTYLSAQYKRLRGRRGGPKATVAVQHSILIAAYHMLERGVPYQDLGADWFVTRSPEQRARRLLHELRHLGYEVTIEREVA

SEQ ID NO: 308065 - protein, 370 aa, unidentified
MLDTTTFVGLDVHARSIKAVSLDVMTGEVRAATFGYDAGAVAEWVRSVDPRARCVYESGVTGFDLQKRLSGLGVDCVVGAVSKMIKPSADRRRKNDRNDAEFLARMLSVGNVVEVWVPDDECEAARDLTRALEDARDDLSRSKQRLSKFLLRHGLVFDERTPTGRRKGNWTRAHWSWIESIRFAERADEEVLAYYVDAVRRAAEEKARLERLVEGEARKPRWRRRVDSLRCLKGVDTATAADLVFEAGEFSRFGNARSFAAWVGLTPSEHSSGESDRRGAITKAGNKHLRKTLVEAAWHYLTCSGRPKDLAKDQAPDRVARRHAAKGVRRLVERREALLARGVHGNKANVATARELACWVWAVGLMAEEA

SEQ ID NO: 308066 - protein, 342 aa, unidentified
MKATTIGIDLAKHLFQLHGVDQHGKTVLKRQLKRDQMLSFFTNLPPSLIGMEACGSAHYWANKLQGMGHTVKLMAPQFVKPYVKTNKNDAADAEAICEAVTRPNMRFVPIKNGEQLAVLALHRARQGFVKARTAQANQIRGLLAEHGIIVPKGIAHISLRLPELLEDAENNLPGTFRQLIERLGEHLKELAKQVNELEEQIWCWHKKNSASQKLAKMPGIGPLTASALVASIGDAKQFENGRQLAAWLGLVPKQHSSGGKQTLLGISKRGDIYLRTLLIHGARSVLRVAERKTEYAGSWLAGVMERRNHNVTVVALANKNARIIWALLAHEREYDADHAVAA

SEQ ID NO: 308067 - protein, 341 aa, unidentified
MMKKLYIGMDLHSSNVYVGIVNQIGEKVTGHRLPCRLKDVLKYLAFYKNDIVTIAVESTFNWYWLVDGMMAAGYNVVLANPGAMKQYNGLKHTNDKTDAFFIAELLRLDILPKGHIYPVETRAVRDLLRRRQTFVHQRTTHLLSIKSAIMRHCALSIRRSDMQKLGSEDIDRIIPDNEMLNFTLKRSVEMSQFIKLQIKNIEDCLLDKISLNKEFIQLKTIAGIGKILGMTIMLETGNINRFAKVGNYTSYCRCTGSKCSSNGKVKGRNNAKNGNKYLSWALVEVATQAIMHYKEPNKFYQRKKAKRNSAVAIKAIAAKMSKVIYYMLKDDQPFDMKRVFP

SEQ ID NO: 308068 - protein, 415 aa, unidentified
MALKIVYKICCGIDVHKTFVVACIASTNDKGVTSYESHRFSTYTSGLKTLLQWLLDRNCKDVCMESTGKYWIPVYNILEKDCSIVLAHPKYVKAIRGKKTDKKDAKWIADLFKHDLVAGSFMPPADIRQLRDLMRYRFKLTCFKSSEKNRLQNCLTVSNIQLGNVVSDTFGKSAQAILDKLLENPADTSFDLEPLVYKSLKKKLPELRDAIDGYITPEQAGKLKVIKAHYENLESRKAELEELILALAAPYQQELTILQTAPGISSPFTAIGIISEIGTNMEAFPSAKHLCSWAGLTPTNNESAGKKKSVRVSKAGCYIKPLLVQCANAVVKSTKHPEMRNRYLRLKKRRGHKKAIIAIARMLLTALYHMLKNGENYNAELYQKSDLLPVDREITVEQALMIARNQGYKIKSATA

SEQ ID NO: 308069 - protein, 312 aa, unidentified
MADMVRLAGIDVSKQTLDVHVLPNGESRTVAYDAAGLVELCRWLVGVGVALVALEASGGYERQVSEVLEETGIVVRRLNPLRVRRFAELRGRLAKTDRLDARTIAEFARAYPEERQYPRDARRERLAEHLLVRRHAQETIVDCTNQLEHLRDAELRRLILSRQAALKRLCARLDKRLAELIAEHDDLVDLSCRLQSVPGVGPVLATTLIALLPELGSLTRRQVAALVGVAPFDRSSGRQSAPKAIHAGRATVRKALYMAAMVASRWNPAIAAFATRLASKPGKVRLVACMRKLIVSLNAMVRDGAQWQPRHT

SEQ ID NO: 308070 - protein, 345 aa, unidentified
MGPMYYIGLDVHKLKISYCVKDVMGKIHAEGWIPATRFDLDRWMKTLPQPWSAAMEATMFTGWIYDHLKPHAAMLKVAHPLMLRAIAAAKKKNDRIDASKICDCLRCDFLPESYMAPTAIRERRRTLRYRNLLVRQMGQMKNKVGMLLMEAGVSYNKQKLHKAGYFRELLASNPDINPGLRSLLCQCREMVVRLGKMETALVRSLQQDRLLAERVERLMSIPAVGPITALTWALEVGEVQRFSSIKKAISYCGLCGAEKSSGSTVQRTPLSKQRNKHLQTTLFEAANMAPRYSPTLALLYDREKQRGNANRATLTVAWKLVAYLLAVDHGQTHFLVLDRDSCTAA

SEQ ID NO: 308071 - protein, 344 aa, unidentified
MLYVGIDVGKERLEVATWVAGASRGRQLGSVANRQGGWRQLGKQLRRICKREKLAEVQLLLEPTGGYELGLVAYGHAQGWRVTVVNPSQVRNWARGIGNRVKTDREDALLLARYGAEQQPAPQQPVPAEVQALDSLLSRREDLKKLLRAERNRLDTLQQRPGVPAAVKTSVERTIAMLQQEAEAIEEAIQDHIDQDPDLQDKVRRLRSVPGIGPRNVLPLLLLFLRWELLTGGQGDAKGLTAYVGLDPQPYESGRSVLRRATISRMGNGMFRHQLFLAALGGVRGQNPLRAFYQRLVERGKVKKLALVAAARKVLVWGWTIFINNTQFDASLHQQEAPQAAITY

SEQ ID NO: 308072 - protein, 470 aa, unidentified
MKPYFLGGDASKGYCDFTLLDQKKNIVEENFQLDDCYEGHQSLCLFLEEFFSSHENDENVIIYAGFESTGGYENNWYQLIWKLQYSFNIQVARLNPFGVKYHKKASLERIDTDKISSRKIAEYLIAYPEKVEYSKEDYFAGLRRHWKFIRLLKNQKSQLQTNLKAQLYVAHPQLLPYCIDGISNWLLLLLQKYPTAARLANASIKTLSQIPYLPEARAKELVGDAKKSVASMQSPSMENIITSAVNQILYLQKEINQQVNLMISTYDFPEIEILSSFIGISQYSAFGLLLEIGAIERYALVKNLVSFFGIHPVYRESGDGSWGMHMSKKGRKEPRWILFNVAKSAIVHNEMIKQLYEGYQAKGKCKMAALGIIMHKILRIVYGMLKHKKKYDPTVDMTNRKKTARQKEPTKPKPEKSRRYQDYDRKAPISRRQTKKRNNKQKEKQKEVISIDREKEKGYGNQGNNPNPKE

SEQ ID NO: 308073 - protein, 347 aa, unidentified
MTLYIGVDFHPHQQTVSYCNNEEGEVHQTSLIHNVEQVRRFYRQLPKAVVGIEASCTAAWFEQMLFDLGHELRVGNPTAIRARARSRHKSDKRDADLILDLLLKDEFPTLWRRSVQGQSVLEQLRFRHQLVKHRTQICNRLQALAHAAGLPKKGIQTKRARVALMEARLSETQSFQRDQLFELLDDLTERIKHVEQWLEEKAAGDTKVQLLLTHKGIGLLSALATVHTLGDVSRFPSSKEAVAYTGLDPLEQSSAGKVRYGSISKAGSPVLRHLLGQAMHVASRYDGELRSFYKRLASRRSKSIAKVAATRKLLVRLFIMLRDGIDYAEFKRRGATVGMPVLSHGLQ

SEQ ID NO: 308074 - protein, 309 aa, unidentified
MNNVRFVGLDVHADTIAVAVAESQGEVRSIGTIPNRDEAVRQLIKKLGPVEQLRMCYEAGPTGYAVYRQLTALGVPCEVVAPTLVPVKAGDRVKTDRRDALKLARCYRAGELTAVWVPDGAHEAVRDLVRAREAAKRDQLRMRHRLGKFLLRHGYRAPAACGRAWSEAYWRWLETIRFSFPAQEVTRLDYLSEVEHAAGRVTRLERAIAEVVATLPAETRAVIAALQALRGIAHTTAVTIVIELGRLSRFTHPRQLMGYSGLVPSEVSTGARTQRGHITKTGNAWWLRPRGRIGISRGSARRCGNVKRH

SEQ ID NO: 308075 - protein, 356 aa, unidentified
MSVLAEIVDAVIGVDTHRDTLSAAAVTSIGAVLGETKVNADAAGYRELLDFGRTQVPGTRCWAIEGAGSYGAGLSAYLTEHGERVVEVARPKRPPRAGGRKSDSIDAVRAAREALSCEHLIDPRRRGQREALRVLVSTRASAVVARTRAINHLKALIVSAPESLRAELRGMTSDNQITYCAALRPRPTRDLEHRTTVRVMRSTALRILALRHEAIDLEAEIKPLVAVMQPQLLALPGVGPISAAQVLISWSHPGRFRSEAAFAAFAGASPIPASSGLTTRHRLNRSGDRQLNRALHTIVLTRARIDPETQAYIDRRTAEGKSTRDANRCLKRAVARQLYRLLQQAVKARESIKIAA

SEQ ID NO: 308076 - protein, 349 aa, unidentified
MSIIWIGCDFHPSFQCIAMVDTESGEYVERKLDHASGEARRFYEGLKGRRVVIGMEACGNSGWFERMVAELGHELWLGDAGTIRSLVVRKQKTDRRDAEHILSLLRQGRFPRIWVPSPRMRDSRQLLLHRHKLVQMRTRVKNELQHLALNQGVQQKRKLWTQAGRKQLESLPLTGWTGQRRDDLLQLLDDLESKIGKLDQAVKQEAAQYEDTALLQTQPGVGPITALAFVLTIGPVERFEKSRKLASYLGLIPAEDSSGGRQKLLGISKQGNAFLRTLLVEAGQSAARHDPELKRCYQRLAHRKHRALAKVMVARKLAVRLYWMLRTQKPYAPVRMQGSPSHPVVAGKD

SEQ ID NO: 308077 - protein, 326 aa, unidentified
MGRVMIGMDPHKRSATIEVIDEREQVLAQGRYGTDTGGYQAMLAAGRQFRDRVWAVEGCAGCGRHIAQRLVADGEPVLDVPAKLSARARVFDTGQGRKTDPVDAHSVAVAGLRTPGLRTVVADDATVALRLLVYRRDELGRTRTEVVSRLHHLLLELIPGGAKKFLMGQTRHQLARELIDELAVIDAKIRAADKQLRQLVKASGSSLTELNGIGPSGPARLIGDIADIGRFRTAAHYASWNGTAPIEASSGDQHRHRLSRLGNRRINRVLHIMAIVPLRHYTPGRAYWRCCTTAATTSCASPSTSAYRLRPTRPIMPSSALCGRVG

SEQ ID NO: 308078 - protein, 376 aa, unidentified
MNEKLRFLGLDVHAETIAVAVAEPNGEVRSLGMIANREDSIRKFIRKLGSPEHLRTCYEAGPTGFVLYWQLTQLGVKCDVVAPSLVPKKPGDRVKTDRRDALKLARSHRSDDLTAVWVPDEGSEALRDLVRAREAAKQDQLRAKHRLTKFLLRTGQRPPLGVKAWTEKYVEWVQQVRYTHPAQEATLLDCLNEVQHMEERVKRLEQSIVEVIQLAPAPMQEVVRGLQALRGIAHISAVTIAVELGNITSRFESARDLMGYSGAFPSEDSTGKRIRRGGITKSGNAHLRRIVVESAWSYRHRPAIGARLRRRQEGLPAEITEIAWKAQNRLHKRYMTLMARGKEQRKTMTAIARELLGFIWAIGIKAEAACKQQMAA

SEQ ID NO: 308079 - protein, 336 aa, unidentified
MKTGQPEPTYELFVGIDIAATTAAVSTQRPGAKASRSFTVDQTPESYSRLVNKLQAAGYVPSCILVVMEATGSYWMSLATRLVREGFRVSVINPAQAHHFAKALLKRAKTDAIAAQTLAQLAMVLQPEPWIPPPPIYYELQQRLAQRDDLLNLRQQVRNQLHALEQHPVVMTQVSTRRKDLLATLQSQIDEVEAEIAAALNQDSAWATAAERLQSIKGVGWVTAAWTLVTTLNFTTCDTVDSLTAYAGLVPMPRQSGSSIWHRPSIGHSGNGRLRTAFYMATLTAARFNPVIKRFYNRLREAGKPEKVARCAAARKLLHIAWAVVKKNQPFDPNYA

SEQ ID NO: 308080 - protein, 432 aa, unidentified
MKMYTVAGGVCQGRIRRVMRMQLGFKAGLGVTRRENCCHASQEVKHVEETCVRFHTPRTSCVECKEEVKGDTDMQVVHERCCGLDVHKKTVVACILVTSPQGVVQKQVRTFSTMTVDLLALADWLKSSEVTHVAIESTGVFWKPVFNLLEADFSVVLVNAQHIKAVPGRKTDVKDSEWIADLLRHGLLKASFIPPEPIRVLRELTRYRGSLIQERAQEVNRLQKTLEGANIKLAAVATDVLGKSGRDMIQALIDGETDAQALAELARGLLRKKLPQLQEALLGRVQPHHRTLLRHILAHIDFLESLLEQLMADIETQLSPYKEEQELLTSIPGISGTAAAIIIAEIGVDMEVFPSDKHLASWAGVAPGNRQSGGKRLSGAITGGNPYLRSVLTQVAWAVSHTKDNYLSAQYHRLARRLGRKKAIVALARSAF

SEQ ID NO: 308081 - protein, 336 aa, unidentified
MSKKVTLKQCLGIDVSMKKIDCCLSFYTEDLKIKVVATSGYENNPDGFVKLREWLNRKQDNSLALHVNMEATGTYHEEAAYFLAGVGYRLSVIQPTKGKQYAKSLDEKNKTDKIDAGMLARMGLERELMPWSRPNEQLRRLKRMSRERIGLIRDRNALTNQLHALNHSFDAFRDSVERLKERVALATKQLGEIELQMRERTDSDPELSKRTKHVITIPGVNFVTAITVIAETDGFANVGNRRQLVSYVGLDVVMKESGTLTWRPHISKRGNAYIRAGLYMAAVSSIIHNKTLKTYFNRLKDNGKPGKTGIVALERKLLVLIYTLYKNGQDYNPDHQ

SEQ ID NO: 308082 - protein, 330 aa, unidentified
MKKSNVVFGVDVSKLTLDICCIERNLHLKISNCSKGFTILKKWCKGNDISLNDVLMVMEFTGGYEYRFLQFCESLSIPYCRIPGLEIKRSLGMIRGKSDKIDAFRICQYGKEKIGRLQPDKPLDNNILALKQLLSFRKRLVREKAGLESTIKERKHMYPIKTTDLVTRIAEAKVKANEKYITQVENEIAILIKSNESLLLNYRIVTSIKGIGPVNAWMTIAYTENFTTFPDGRHYAVFVGVVPFEHTSGTSIKKRKRVSCLANKELKQELNQAAKSAIAYDPEIRAYAERKLKNKPYPLVLNNVKFKLILRMFSLVKRKVMYVDNYNAAA

SEQ ID NO: 308083 - protein, 410 aa, unidentified
MDAIVERVGGIDVGQATVVATALVGAAHERTRKETRTFSTVTRELLALRDWLLAKGVTHVAMEGTGIYWRPVYELLEDAFEMIVGNARHIKNVPGRKTDVKDSEWLADLARHGLIAKSFVPPKPLRRLRELLRYRRKLMESRTAERNRLLKLLETANIKLASVASSVFGVSGRLMLQALIDGVATPAAMAALARGRLRKKATALEQALEGRLDEHHRFLLQLQLRRLDAVDTDLLSLDARIDEALMPYRDQCEILEHIPGVSRVVAAVIVAELGTDMTVFHSARHAAAWAGVCPGNNESAGRRMRAGVRKGNVHLRTALIEAAVAASHTKGSYLRDKYYRLRARRGSKRAAMAIAHKILIAAFNMLATGSPYRDLGASYLGGLEKRHTTRNLVRRLERLGYEVTLGPKAA

SEQ ID NO: 308084 - protein, 438 aa, unidentified
MSNNVIFNFDELFISVGIDVGADFSWMSIVLPNQQFVGKPHKILHNSMDSLASAVSKIKEAEEMYSLESRIFLESTGIYHYPLFCYLRDKGFNCSVINPIITKNSTNINIRKVHNDRFDSKKAALVGLKPDLKVSLMPSDLALNCRNLCREYYDLMDSRNAYVNKLIDELRMVFPQYLGIFSKVTIDTSLILLETYTSPSAFINADKQEIIDLIRSTARFGLTYACNKYNAIIQAANDADEFGYILDSNIKRIRLYIGFICKYDEEINSILESMHELAAANEDTDFVKQIRLIETFKGAGFLSAMSLMGEIGDFSAFSKPKQLFAYFGLDPAVKQSGKFEGTKIQMSKRGSAIARRVIHTLTLQSISASRTGESKNPVLLDYYLKKCESKPKLVAMGAVSHKVCNMIFAILRDSKPFEIITPQEHIKKYNAAKCDVAA

SEQ ID NO: 308085 - protein, 344 aa, unidentified
MKKVLIGIDFSKEKFDVAIIVKSTSTQEHALFDNKVSGYRKMIKWVNSVVEDIPCSSWLFCGETTGGYSRMMSDWLYAQGYDVWIENALVIKRTFPLKRLKNDTVDAFMIAEYALRFEDRVQLYEPLSQALTELREIFLYRHHLVRHRCSFEVRRIEKRFTQQKSANKNVISQSARHIITEINKEIAKCDEKIKEYIESDDQLSSIFAIVTSMPGVGTINAVSLMVYTNNFTKFAYNPRKIACYYGIAPFGRDSGTSVHTDPRVGFIANKMLKSLLTQAALAAVRTCPQITKYYQRLIERGKKPMVALNNVKNKMIAIITAMVRTGCMYQPDNICLATQSVIVK

SEQ ID NO: 308086 - protein, 313 aa, unidentified
MNKIVCGVDVSKAKLDAWIEPGGAFAQFNSNAAGIARLAAFCREHKVELVVMEASGGYERRPFLELWQAGVPCALTNPYNVRLYAKAMGFLEKTDPIDARVIARFAVDKKLAPTPLPTRAQQRLKALVTRLRQVTDDLTVQKQRRSNLLDNPEVLASIDEVIVLLKRQSRKLEGEIASMIDDDPLWASLAESWRSVKGVAGRTVAKLHAELPEIGTYSNKSIAKLVGLAPLANDSGKRKGKRRVRGGRAGVRSILFLIARTVARYDKSLADFRDRLLAAGKEKMVVRIALARKLLVRLNAKARDARAAYALAT

SEQ ID NO: 308087 - protein, 343 aa, unidentified
MENFAGADLHKKVTQLGLLRKGKPPSQFRFSNDPHTVEKVLSRLPSGTKIAVEATGTWWWFVEKVRELGHEVFLSHPKQTKAIASARLKSDKVDALMLARLLKADLLPMVWIPGEKERYVRELLSHRGRLVRSRTAVINELHAVYAKRNVEVVGKAWLKAYPVPYRVKELSGYGPRIVKENVELLRFVNEQIDGLDKELRKLAKEDPQANRLMTLIGVGPATAVAVSCWVGDINRFANAKKLTSYFGIAPRVRQSADKERHGHISKEGSRMVRWLLIQAALSHTRVAKGPSRKHYLGVLNRQGKKIARVAAARKLLGVMYHIMKDEIDYEEFVRRGSSAQRAR

SEQ ID NO: 308088 - protein, 350 aa, unidentified
MHITTIGLDIAKNVFQVHGIDAAEKVVVRKQLRRSQVLAFFEALPPCLVGIEACATAHYWPRELTKLGHQVRLMPAKDVKAYVKRNKNDAADAEAICEAVRRPTMRFVQIKSAEQQGRLMLHRTRDLLMRQRTQLINALRAHMAELGIVSAQGREGIKELLKIIASEQDARLPVDAHTSLVVLAAGLQAVQTMIGSIEKRIMAQHRASEASQRLESIPGIGVIGATAIAATVPDPKIFRSGRDLAAWIGIVPRQDSTGGKHKLGPISKQGDRYLRRILVVGAHGIEAGAPAAGEVSSAHTASRPQTVQSGRSGACQQDGAYRLGVAGQGRHLSSACACGSGLIRGRAIGG

SEQ ID NO: 308089 - protein, 329 aa, unidentified
MSETSVLKKFSQHPSPEALYGFLTRSYPGAEYHSVYEAGFCGFWIHERLTALGIDNIVVNPADVPTKSSEKLRKTDTVDSGKLARSLRANELKGIYTPDSVSLEMRSLIRLKNSITKDTTRQKNRLKSQLRYLGIEIPQEFLTPFSNWSKRFFAWLKEIETLTPSGRQALDIHIRHLEELRRQKLEMTRALRTLAKTDRFREPLRLIMSVPGFGQATGMAFLSEICDITRFRNAEQLAAYIGMIPMCHSSGEKDGTGDITIRKHAVMRCNLIEAAWVAVRQDPAMNLFYTEQCKRMPKSKAIVKVARKLVNRLFFVLKHQTEYVNSIVS

SEQ ID NO: 308090 - protein, 413 aa, unidentified
MAVFCGIDWAEDHHDIALVDQDGALLAKRRIGDDAAGFAALLQLLAEAGDDPDAPIPVAIETSHGLLVAGLRATGRPVFPINPMSVSRYRDRHSVARRKSDAGDALVLANILRTDLAAHRPLPADSELAQAIAVLARAQQDAVWARTEAHNKLRSLLREFYPAVLAAFASKRGGLLRREARALLAAAPTPRTAARLTLSQLRTVLRRAGLQRGLDVEAERLQQVLRADYLHHPPLIEEAFGQQTLALLRQLDTACANAEQLAAATAQHFAQHPDATIITSMPGLAELTGARVLAEIGDDRNRFADARGLKAYAGSAPVTRASGKSTTVLHRRVKNQRLASVGYVWAFAALTASPGARAHYDRRKNAGDRHVSAQRNLFNRLLGCLHHCLHTHQTYDEATAFPATSSTPNARAA

SEQ ID NO: 308091 - protein, 391 aa, unidentified
MIYIGIDVAKDKHDCFITNSDSEVLFKAFTIFNNLDGFNDLYQKIESVMDDVTKVKVGLEATGHYSYNLLGYLIDKGLPTYVINPLHTNLYRKSLSLRQTKTDKVDARTIASMLMSDVNLKSYSDISYHNEELKSLTRYRFDKVKERAKLKSSVSRLVCILFPELEKLVPTLHMASVYSMLSEFPGAKHVASAHLTRLTNLLSEASKGRYSKDTAITFREAARASIGSNMPAKSLELKHTIKLIQELDSEIDEIENEIKVIMDEINSPILSIPGINYRMGAMIIAEIGDFSRFDSPDKILAYAGFSPSTYQSGQLDGAYAHMEKRGSRYLRYALYNAAKYVCHWDPTFAGYLAKKRAEGKHYNVAISHAVKKLVRVIYHLEKTKQQYIKVA

SEQ ID NO: 308092 - protein, 413 aa, unidentified
MPKVEEEYVLYFIGIDIAKRNHVVGIRQEDGQPCGNSFSFSNDEAGFKNLMERLAASSVDAQKCIVGMEATGHYWLALYSFLTDHGFDVAVINPIQTDAFRKTQSIRKTKTDAIDAFMIAEFTRFGGSGLCRVAPEDTEGLKYLTRYRMHLVSEVTSLKNRATAILDRIFPEYETLFSPLLSPSSMHLLETLPTPQDIAGADIRTVERLLREGSRGRFGRKKADELKALAKTTVGVSFAAQTLGFELAHIIKLIRHLEGEVGSLNDKIACLLEKTTGKWLTSIPGIGEVFASVITAEIGDANRFEAPNKLIAYAGIDSSKNQSGEFDGTKAHMSKRGSPYLRWALIQAADSVRKQEAYFGDYYDSMKARGKHHYVALSGVARKLAGLILALMKEERAYESRPAIQPKQASKST

SEQ ID NO: 308093 - protein, 343 aa, unidentified
MDQCIGLDVSLKDTAISIREDGKRIWRSKCPSDPSLLAQLIRKHAPHAKRVVFETGPLSTWFYHALTAEGVPAICIEARHAQKVLNETLNKTDANDADGLAQLAEAGFYKAVRVKAFDSMLTRTLVGARNQLLSVSTQLSNQIRGLMKTFGLIVPKGTGRMFDGNVRELLAGNGDLTTIILPLLEAWRDIRKRAADLDRQLLAAARESQATKLLMTIPGVGAVTAISYVAAIEDPDNFRTSRSVGAWLGLTTRRYQSGEVDYDGHISRRGDNHLRGLLYEAATVILTRIRARNESSLKSWGLKLRERLGFKRAAVAVARKLAVIMHSMLKTGEVFNALAGATA

SEQ ID NO: 308094 - protein, 428 aa, unidentified
MNCNTQNAKIASITEKTLIVGIDVGSGTHYARAFDWRNYEYTKKPLEFSNTEAGFQTLKAWMEELAEKHGKTAVVPGMEPTGHYWFALGKFLQDNGMKPVHVNPHHVKKSKELDDNNPNKNDRKDPKTIAALVNEGRFSYPYMPVGIYAEIRSLSNLRFQTQEELTRIKNRLSRWFSIYFPEYKDVYGDLKAVSGRMVLKAAPLPEDIMKLGAEGVNRIWRDAKLRGAGMKRAKTLVTAAEHSIGSKEAPEAARMELKNLLDDMDAYASRLEGLLRRIEEKLKGIPYIDNLLAIKGIGMATVSGFIAEVGDIGRFDSPKQLQKLAGYAIVANDSGKHNGESRISYRGRKRLRYVLYEAAISLVGKNAEFRQIYEHYRTRKENPLKKMQAVVAVACKVLRIFYAILTKGIQYDPDKLLGDIRRPQVQAA

SEQ ID NO: 308095 - protein, 338 aa, unidentified
MVPSLSFKLEQLNEALTSKHKKESTIMTREIRFVGIDVGKFEICAFDATERQHLTVANSAKGHKDLVLWLGNPANTIIALEPTGGYEWALWETLCASAFDARQVSAAHVHAFARATGALAKTDPIDACLIARFIAFRPNAGRKPPVEKLRKLRTLNTRRRQLVEMRKRLSCQIKQRHSTELVTMDSDLTSLITAQITELEIRIAKIISHCNKLAKRAAILRSIPGIGPVLTATFIGDLPELGQCSEKQIAALVGLAPMNNDSGKKAGRRSIRGGRYAIRSLLYQAALVASRHNPALKRFAMRLKEKGKPHKLVLVAVARKLLTIANVLVAKNELWTTV

SEQ ID NO: 308096 - protein, 357 aa, unidentified
MTKRSQDILRNEKVFVGLEDSKKTWQLCVRSGGVIVHETSMPAKLDVLSNYFNNKFPECQIQVIYEAGFKGFELHDELEAKGWDCIVTPPHTVTEEKCQRKKNDRTDCRRLAKNLENGDYHSCFVPDKELREDRQISRTYEQVQADIRRECNRIRRTLEFHGLDQGLSPGSWNRAMYTRVKSYLEDLEISASLRFSIKVMFNEIEQLRQLRKEILQQLRTLAKSDRYKESVELLQTTPGIGTFTAIRLLLEWGDVSRFKRKEEFASFLGLVPSDYSSGEKERQGHITKQGNSSVRSWLVECSWMAIKYDPVLLDKYRRVLKNCGSKKKAIVAVARKLAIRLRRILLDGEPYVIGVVE

SEQ ID NO: 308097 - protein, 367 aa, unidentified
MEKSSKVFVGMDVHKESIDVTLAEVGGEVRRLGAIGGDRGSLLKMVRKQQSKGGERVFVYEAGPCGFWIHRELAALGERCMVVSPALVPKRAGDHVKTDRRDSERLASLARAGELEPIHVPDIRDEAIRDLVRGRDDAVIAQRRVRQQLKALLLRNDIRYVGRTSWTGAHRRWLSELKLPEPAQRIVFEEYVDAIVVATARIERLTRAIESEVTTWRFAPVVAGLQAMRGIQFVHAVTVVAELGDLTRFPSARQLMGYLGLVPRESSSGEQRHQGSITKAGNSYARRALIEAAWAYRHPARVTRIIATRQTGLPKAACDIAWRAQLRLSAKYRRLNARHLNHNKIVVALARELSGFVWAIGQNVRPQ

SEQ ID NO: 308098 - protein, 350 aa, unidentified
MNLKRIGLDTSKAVFTLHGVGQDERAVLRRDMRRAEMEAFFAKLPPTLVALEACGGSHHWGRRLVAMGHTVQLIPPQYVKPFVRRGKNDRNDAEAISEAAARPDMPSVPVKSAGQQAEAIVLSARELLVRQRTQLVNAVRGHAAEFGIVAAKTISQLPGLLEAVAAAETVPATAKEMLAFLGAQVAQLDNQIAELERRMKQQHKANPVSQLLAEVPGIGPIGALSLALTIDPGRFQSGRHFAAWLGLVPKQHSTGGRQRLGGISRAGDERLRQLLVLVLGATAVIRFAKPGSKSASAWLLALLERKPRKVAAVALANKMARIVWAMMATGEAYRGSKKVATPAAGAAAAA

SEQ ID NO: 308099 - protein, 417 aa, unidentified
MSNQQRTNHSGTLQYFVGVDLGGEQHAISVINSEGRVVGKHMFPHSGPGLEELVAWLRQQTGDDSSVVAVAMENPRGALCEALLGRNYTVYAINPKQLDRFRDRFSVAGAKDDARDAFVLAQSLRTDRSCFRLLHVDHPKLLHLRELSHGWDRTGQELRRTANQLNDLMRRYFPSLLTLCPGSDEPWLWSLLALAPLPEDAARIKRSRLEAVLKKHRIRRFSASELREVLRIPPLPLAPGSARAIAEQVVLLLPRLVLLQQQTQQLDKRIEALLDELAGDESYNEHRDVTILRSIPGVGKGFTAAVLSEAAKPLADRDYRAIRGLAGIAPVTKQSGKTRLISMRQACNRRLRLALHHASASHARNDARAQLHYEKLRQKGHTHGRALRGVADRLLALLIAMLKAQTSYNPELRTVPS

SEQ ID NO: 308100 - protein, 393 aa, unidentified
MICVGIDVAKDKHDCFILSSEGEVLADVFTIQNNAEGFDMLLQTIRRCTRPEDKIKVGLEATGHYSYNILGFLLDKGLSTYVINPLHTNLYRKSLSLRKTKTDRVDARTIAAMLMSDVDLKSYTDTAYHNEELKSLTRYRFDKVRERAELKQSVSRLVTILFPELEKLVPTLHMESVYALLSEFPGAKQVAEAHLTHLKAVLYGASKGRYGRDMATTLRDAARCSVGSVMPAKSLELQHTIRLIRELDAEIEDIETAIQSMMDEIQSPITTIPGIGVRMGAMILAEIGDFSRFGSPDKILAYAGMSPSTYQSGQLSLSGAYSHMEKRGSRYLRYALYNATKYVCLWDPTFAAYLAKKRGEGKHYNVAISHAAKKLVRLIYAMEKSKQSYRNAA

SEQ ID NO: 308101 - protein, 326 aa, unidentified
MAIIGIDISKQKFDCLWLRDVCSLKVKTKVFANRPAGFAELIDWCCAQTGETPEQLQVFLEATGGYHEPLALYLHDRGVQVFVLNPARVREYARSLGVQGKTDKQESLILARYGATQPVRPWTPERREVRELKALIARHEALQEDLQRELNRREKAAVSGSLSVLASIDNLVKALQQEVARVRQDIDDHIDRHDDLKRDRALLQSIGGIGEVLSRHLLALLHSRNFSSARQCTAFVGLVPRPWQSGKSVQGRTVLSKAGSPRIRAKLYMGAIVAKGSNPDVKALYDRLLARGKPRMSALGAAMRKLLQIAYGVLKTQQPYQPRQAL

SEQ ID NO: 308102 - protein, 339 aa, unidentified
MTVKTVGLDLAKDVFQVHGISENGRIIFNKAIKRAKLLRFFETLPPCRVGMEACGSSHHWGRQLRKLGHDVKLMPAGYVKPYVKRGKNDAVDAEAICEAVRRPTMRFVEIKTEDQQAILSIHRTRDLAVRQRTQMANMIRSLLREFGHILPIGIEAVTAFAKRHLDGDHPDMPEIANGMLGIQCYQFIGLNTRIDGYSKMIEQHALLNADARRLMRMPGIGPITASAIVATIGDAHQFRTGRDLAAWLGLTPLNKSSGGKERLGKITKKGDRYIRKLLVVSMTSRAVMAKRSPEKVDLWTAKIIADKPFRLATTAMANKAARIIWAMLTKQQEYRQPAF

SEQ ID NO: 308103 - protein, 352 aa, unidentified
MRKITTIGLDLAKKVFHVHGVDAEGNVVVARRLRRKEVLAFFANLTPCLVGIEACGSAHYWAREIAKLGHTVKLMPPRYVKPYVKRGKTDPGDAAAICEAVTRPTMSFVPVKGLEQQGLSMLHSARSQLIGQRTQLINAVRGHLSELGIVAARGMLGFAELAAIVRDESDKRLPVTARAALMILVRQIETISTEIAALDSTLRKENNASELGPRLESIPSVGPVIASALRARVTDAALFENGRHLSAWIGIVPENDSTGGKIKQKGLSKKGDRYLRSLLVNGAMAVVRQAQKRPDKHPWVAKLLARMSAKQAAIAIANKTARIAWAIMVHGGVYEAGHRAPQYRAQACAAAG

SEQ ID NO: 308104 - protein, 341 aa, unidentified
MEHYAGIDVSLECSSVCVVDASGKIVREDKVASEPEALIAWFASLGFGVERVGLEAGPLSQWLFAAMRQAGLSVELLETRHVRKAFEAMPVKSDRNDARGIAQLMRLGWFRPVHCKSIGAQEVRAVLTARKLVQSKLRDVENSLRGILRGFGLKVGKTTELGFSGRIRELVAGHPHLEMIADALLAVHAVLRNEFKAFEKRVRKMARSDTRARLLMSTPAVGPIVSLTYSSAIDDPARFKSSKRVGAHFGLTPKRHQSGETDYTGRISKIGDRSVRTALYEAAHIMLTKPVKGCSALKSWAMRIARRAGMSKAKVALARKLAVIMHRILVDGKPFNAVAVA

SEQ ID NO: 308105 - protein, 330 aa, unidentified
MKNYADVIGIDISKLTIDAHLHKKGSHRLFSNTTKGFIKLLFWVKKEVGLSHVFYCFENTGNYSLKLAIFLANKSLEYVEENPLSIKRSSGIVRGKTDKLDAAMIARYAWLHREELVVSTVRDTELQELGRLLAFRDQLVRDRTGMINSFKELKSLLKSPSTDTCCKSIKRSTAYITKQILVLENRMKDLMKSEISLDKNFSLLNTIKGVGLVLGCQLLYHTSNFKRFENWRQFSSYCGTAPFEYSSGTSIKRRNRCHHIGDRKMKTLLTLASVSAIQCDSELKLYYKKKVAEGKPKMVALNNVRNKLLARVFAVIKRGTPYVELQQFAA

SEQ ID NO: 308106 - protein, 348 aa, unidentified
MSMLAELVDVVIGIDTHKHTHTAAVVNAATGAEVATVTVDTDPDGYAELVALADNHSGLRAWSIEGTGGYGAGLARFLAERDELVIELDRPNRPARRNGAKSDPLDAIRAAREALTREHLAQPRASGERAALSVRLAARRSAVDASTVAQRQLLSLITASPEAIRGRFRNLSTTVTIATAAKLRSSPTWDIETRTYAEVLRDLARRIQAMKTEAASHEKAILAVVRSWRPDLLDQPGVGPIVAATVLCAWSHPGRFRHDGAFANLAGVAPIPASSGVTVRYRLNRCGDRQLNRAIHVVVLSRLRYDPATRAYAERRRVDKTDREIKRCLKRYVARQLFRQLEAGPTTP

SEQ ID NO: 308107 - protein, 367 aa, unidentified
MIVNEVAKNVEKIISIDTAKNSFQVLVVNQKTGKKKNTKVQRSKFVEYILKQGPCLIFMESCSASQHWARLFESFGFTVKLIAAQHVKAFLRNRRVKNDERDAEAIYTCGIQPDTKFVRIKTVEEQTVALLHTLRKAAVSQRVELSNRIRGILAEFGIVVARGKGSFNSEIEAMFNECEKIHDVYLRAAISSLFEDYHRLEQREKELSEKIESLNKDNELVKIALTCPGVGPLTASAIVAEVGDASQFRNGREMAAWNGVVPSQHSTGGRSTLGGITKTGNRYLRTLLAQCACAVIQKASRHLEQGKDTHLDRFALRLKLNGKPAKKIMIAVANKIIRILWAMLTQRKTFKNKADETSDISAELQLA

SEQ ID NO: 308108 - protein, 428 aa, unidentified
MGAMSENEVLGQEPEFAALVGIDWADQKHAWCLQAAGTTQRESGEVEHTPEAVEAWVGQLCQRFGNRPIAVAVEQVKGALVFMLSKYEPLHLFPVPPAMSANLREALYPSGAKDDPRDADLLVDLLLQHRDKLRRLSPDSEATRRVQNLVEERRHLVEEKTAQSNRLTNHLKIYFPQMLEWFDRLDTELVCALLEQWPTLEELQKVPPARLRTFFRKQRCHYPELVERRLVGIRQAMPAIRDRAVIEAKSAVVKVSAQLIRSLIRGVADLDRKIEEAAATHPDFFIFESLPGAGAVLAPRLLAAFGSQRDRYANAEEVQSYSGIAPVTERSGKRKWVHFRWACPKFLRQSFHEWAGHSIAHSQWARSYYQQQRERGKAHHAAVRGLAFKWIRIVFRCWKDGVAYDESRYLAALAKRNSPLAAVAGTIL

SEQ ID NO: 308109 - protein, 348 aa, unidentified
MDTIGLDLHKRESQLCTLAEDGTVSERRIHTTRERLTAVLGARAPAKVLLEASTESEWVARHLEALGHEVVVADPNYAPLYATRSRRVKTDKRDARTLAEACRLGAYRPAHRLSDARRHVRAELAVRDALVRTRTRYIALAKALARRDGLRVPASESHLVAQRLTALPLSPTLEVELGPLLVLLEPLNAEIAAADRRIAALGRTDSVVGLLATAPAVGALTASAVVATVDDVTRFRSAHQLEAYLGLVPGERSSGEKRRIGRITKAGSSRVRWLLVEAAWRILRSKSPETAALRAWAMPIALRRGKRIAIVALARRLAGVLYAMWRDGVPYDASKVRAPRGPIAQRAG

SEQ ID NO: 308110 - protein, 340 aa, unidentified
MNITTIGIDLAKNVFQVHAVNERGHAVLNKQLKRSQVMAFFANLPPCLIGMEACGSAHHWARKLQGLGHTARLIATQFVKPYVKSNKNDAADAEAICEAVARPNMRFVPIKNVEQQAVLSLHRARHAFVKARTAQANQIRGLLAEFGLIIPKGIAHIRTRVPEFLEDASNELPGEFRSLIQRLTQHLRELDRQADELGAQIGIWHRNNELSRKLTAIPGVGPISASALVASVGDARNFSSGRQLAAWLGLVPRQSSSGGKNVLLGMSKRGDAYLRTLLIHGARAVISRARQNPDRNGWLLKLIERRNSNVAAVALANKNARIVWALLAHDRQFRADYATS

SEQ ID NO: 308111 - protein, 338 aa, unidentified
MATIRVFVGIDYHDQELQVCVLDESGRVLANCPCENSAAAVGAVVQRHGRMAYVAIEACCGAADLADVLVVGFGWSVDLAHPGYVRRMKQNPDKTDFSDARLLADLERVGYLPKVWQAPAAIRDLRELVRYRQTLADQRRSIKLRIRGLLRQHRQKPPEGVNPWTVAWLQWATKAAELSETSRWVLRAYFDELRALAVRIKAVELRLYQQTAGDGLVDHLASLKGFGRLTAIVLRAELGRFDRFRTGKQLARFCGVSPRNASSGQKQADAGLIRASNPQLRMVVIELAHRLARYQARWKKLKADLVARGKPGSLATAAVANRYLRWLYHQGKELALAA

SEQ ID NO: 308112 - protein, 389 aa, unidentified
MIYVGIDIAAAKHACCILSEEKKVIKQFTFANSASGYEKLRSALRSPAETKIGLESTGVYGNNLVEFLRRNGYTTHIFNPLLVKKSIQATTLRKTKTDKSDAKQIARYTMEHSQPDQLPSYHISELKSLSRGRFSLVRARSKAKTQAKTLLIQLFPEFSEAFSDMFGVTASAVLRSFPSARALSLCPANVLAEILSQTSRGRFGKAKAEYLIGLAKDSIGTQSIALELELQMLLQQIDLFTAQIAGYEAAIKSVMEEIDSPITTIPGIGYVLGAVILSEIGDISRFSTPAKLQAYAGVDPSISDSGSSVSAPGRMVKHGSRYLRWALCQAARCVSLYDPVFAAYMQSKRNEGKHYCVACSHVAKKLTRVIYSLLKNNSVYSPTYSLLSA

SEQ ID NO: 308113 - protein, 369 aa, unidentified
MGDRITYVGLDVHKDGIVVAVAEGGERGEVREYGRIANTPAALRRLACKLGQQGVELRFCYEAGPCGYGIQRQLSALGHECIVAAPSLIPKRPGDRVKTDRRDAASLAKLHRAGELTAVWVPDPGHEAMRDLVRARLDAVRALRRARQQLSGFLLRQGCHYGRPAWTKLYRRWLAGLKFEQAVHHIVLEDYIEAVEAAEARRDRLTAQIAAMLPDWTLAPVVAALQTMRGMALVNAATLVAELGDLSRFANPRQLMAYLGLVPSEHSSGASVKRGGLTKAGNSAARRLLIEAAWTYRLPARVSRELRLRQEEQPRPIREIAWKAQLRLCARYRKLARSGKPANVVTAAIARELAGFVWAIAQRVPPAVG

SEQ ID NO: 308114 - protein, 374 aa, unidentified
MKVYVGIDAHTTNYTMSTMLEGAQNAINTNTYTARVSNIVQYCNAIRKKLGEDTEIIIGYEAGTPGFSLRRKLEKEGLKCMVLAPTSLPSTGMNKKYRKKNDKRDARGIAEDLCHHKYSEVHMPDEEDEAVRDYIRMREDLKKQQKETKQQIGALCHRHGFHFEDGKYWTKKHRKWLRELPVEGYLKETLDGYLRTLDYCSDRIDEMDTKIETIAETDKYRESVHKLICFKGIKTLTALALIVEIGDFTRFLKAKNFAAFLGLVSGMDDSGDNYSSLGITKHGNRFLRKLLTEAAQCFSRSATKKSKELLRRQSGNTEETIAYADKANDRLRKRYYRLVLHNKKCVNKANTALARELACFVWGMMTGNTHTILA

SEQ ID NO: 308115 - protein, 339 aa, unidentified
MAIYYIGMDVHCKFTEMAVQRAGKIVQRFTVPTSVRSIREVLGTISGSKRVALEEGPMAGWLYRNLKDFVDGITVSDPRRNKLIASDGEKDDKIDAGKLAALLRGGYLRPVHHSQDELHVELKRWAGLYHDRVREATSCINKIRAQARMEGIRIPRKAILDPDHRGRWLERLGNKMLGERIELLCIGYDAVSQQAHLARNRFVRLSHRRSIVRQWSRLPGIGDIRAATLLAYLETPWRFSRKSQLWKYCGVGLVYNGSAGVGRLRVPWAVNKRLKNVVMGAALTAIRCKSNEYQSYYERMLKAGVLAGNARRSVARKLLTVMWGMWKQRSKNVLKRNDV

SEQ ID NO: 308116 - protein, 388 aa, unidentified
MRATDPRPEEQTAIHTNLGAIFVSLELSRSTWLITSLSPGGGETMSKYSVRGGDVTGLMERLSVLQDKAERRTGRRVPIVTIQEAGLDGFWIHRTLEGEGIESHVVDAASIATSRRCRRAKTDRIDGEALVRTLLAYKRGEPRVCAMVRVPTPEEEDRRRLSRERKTLTAERVAHVNRIKGLLFTHGVEYEPAHRNRRARLEELRTRDGGLLPTHLKRQISRELDRLELILDQIKALEVERNALRVPAEHEVPTPAKMLLDLKGIGAEFATVLWTEGLFRQFDNRRQVAAYAGLAPTPWQSGTIDREQGVGKSGNPRLRTTMLQLAWLWLRHQPDSALSRWFHGRVERNGGRFRKTMITALARKLLVALWKYATAGVVIEGATMRTAR

SEQ ID NO: 308117 - protein, 311 aa, unidentified
MTKSVVGVDVSKGKLDVAVSDEKRVRTWTNDASGCAELGEWVVEQGVSLVVVEASGGYEAGLVSELVSRGQAVAMVNPTRVRAFARAEGVLAKTDKIDAQVIARFGATMKPQVTARRDEAQVALTEQVTRRRQLILILTGEKNRLQTASPTIQAHIARHITWLQTEIETLEQQISQAIAAHPEWTETAQRVDSVPGIGFITAATLVADLPELGQLNRQKIAALVGVAPFNHDSGKQRGKRRIFGGRTSVRSVLYMATLSAIRFNPVIKAFYQRLVAKGKLKKVALTACMRKLLVILNTMVKTGQDWNPAIS

SEQ ID NO: 308118 - protein, 394 aa, unidentified
MRFAGIDIGAETHVVAVVDATGAGLSKPTPFTEDADGYARLRDRLGAATDLLVVMEATGHYWKNVFATLAAQGIAVALVNPLRTHRFAGEDLERTKTDAIDALGLARFGAQKRPPATRLPDAATEELRELVRLRDRLVQDFGDRVRQLHRLVDLGFPEFTRYVKGLDTELATAILQEYPTAQAFQGVSGKRLARLCYDGRHQVGPELAQALISAAGRSVGRHHAEAYRVQVRYACEDLAVLRRRLRSLEADIERTLNDHEVGRLLTSIEGIGPQTAARLVGELGDPAAFRSAAALAAFIGVVPALRQSGKRTATRAGLTPFGHAPLRAKLWMPTLTAVQRNPWLRSYYQRLRARGKLPKVALVAAMRKLLIAVYHVAKHRRPFIAVPVAAESRP

SEQ ID NO: 308119 - protein, 340 aa, unidentified
MKYIGMDAHSKNSYFVVLSRNGKVIRREKVTTQEDTILEFVGSVTGPKKLSYEEGVMSQWLYILLKDEVDELIVCQPPKSKGAKNDWLDAAEIADLLRVNRLKSVFHSDDVLINLRVLISGYDDLLQEIIRSKNRYKALYREAGIPTKGEDIYEDQEMLLQLSTEQRQLVGSSLYDQLQLLELHKQKYVKQLDQNVQSYKPVKLLRGIPGIGTIRANHVVAVMVTPYRFTRKGNLVAYSRLTKHGRMSDGKLYGRKRSLGQPILKDAFRGAALCSLSGKNAFRREYDVQRAKGKSDKEARNKIAKMVAATVLGVWKSGKPYDDNYWEVTRKSNQSCCRHM

SEQ ID NO: 308120 - protein, 416 aa, unidentified
MNAVGIDVSSRKSTVAVLRPLGEVVCLPFDVTHDIAGLASLVEKLKALDGETRVVMEHTGRYYEAVEKALHEAGLFVCAVNPLLIKEYGANSLRRVKTDKADAVKIARYALDNWADLRDFTPMDAIRYDFKTLNRQFQLASKQRTASANNLIALLEQSFPGIRKCFDSPVRSDGTQKWVDFAHSFWHVDCVRKQPFAAFCERYRKWCKRHAYFFKLSNAEEVYALAKRAVVLTPKSKVVKVLVQEAANQLSSISRSVEVYRAEMDRLAAMMPEYPVVMAMYGVGKSYGPQLMAEIGDVRRFERKQALVAFAGIDPMPNQSGDKNVRSNKSSKRGSPYLRKTLFNVIRTYLQCAPQDEPVFQFLNRKRAEGKPFYVYMLAAANKFLRRYYAKLRDYFASLDTLQPVAPIPTILKATL

SEQ ID NO: 308121 - protein, 407 aa, unidentified
MPKASVNSESAAAIQTNLAAIFVSLELSQKTWVVTSLSPGDGERMSKHSVPAGDVTALLTRFADLKGKAKARSGKAFPIVCIQEAGLDGFWLHRVLMGEGIESHVVDPASIAAPRRRRRAKTDRLDGEALLRALLAFKRGEPRVCAMAVPPSPEEEDDRRLGRERKALIVERVRHVNRIKGLLFSQGISDFEALNKNRRQRLEELQTGDGRPLPHRLKVAVGRELDRLELLLDQIKTVESERDEMLEVKKKKARKTDERKPEEQNSEEPADASPSACAKMLHNLKGIGPEFAFVIWHEGLYRDFDNRRQLASYAGLAPSPWQSGSIDREQGVSKAGNPRLRCTMIELAWLWVRHQPQSALSLWFKQRVEGGGRKKPNIVAMARKLLVALWKYIRFGAVIEGAVMKSA

SEQ ID NO: 308122 - protein, 313 aa, unidentified
MKKTICGVDVSKAKLDVCIEPGHRLASFDNDTGSIAELAAFCREHAVTLVVMEASGGYERRAFVELWEKGISCALTNPRSVRRYAEAMGILEKTDRIDASVIARFAHAKQLAPTPLPSQAQQRLKALVTRLRQVTDDLTVQKQRRAGLLDNAEMLASLDQVIALLKRQSRSLEGEIASMIDDDPLWARLAETWREMKGVAGRTVARLHAELPEIGTLSNKAIAKLAGLAPIANDSGKRKGKRPTRGGRAGVRSILFLVAATAARYDKSLADFRARLVAAGKEKMVIRIALARKLLVRLNAKARDARAAYANAT

SEQ ID NO: 308123 - protein, 479 aa, unidentified
MRLPSLTINPEAKMTQSRRTRSSSSRRRSLPPELQHVNLNAAGIDVGAEAHFVAVPAGRDPQGQNVRQFGAFTADLYALADWLAACGVETVAMESTGVYWIPLFEVLEERGFEVKLVNPRHVKNVPGRKTDVLDCQWLQQLHTYGLLQAAFRPEDQICVLRSYLRQREMLVRYASHHIQHMQKALEQMNLKLHHVISDLTGVTGMRILRAIFEGERDPHKLAGLRDHRCKNDEATIALALEGHWRPEHLFALRQAVELFDFYRQQITACDAQIEDCLHTFQDRSAGRPLDKPTRRRNRQKNQPAFDVRSHLFRITGVDLTAIEGIDAQTALKLIGEIGLDMSRWPTEKHFASWLALSPGSKISGGKTLSARTKPYPNRAAAAFRLAAHGLHNSHSALGAFLRRKKAHLGAPKAITATAHKLARLVYAMLKNGSQYVETGEAEYERRYRERVIHNLKRKARALGYDLFQRNVPVLPLAPP

SEQ ID NO: 308124 - protein, 250 aa, unidentified
MDEEGHILSRGKIDNDPQSLKTFLDGVDHATIAMEAGYCWQPLYDALTEAGHTVKLAHPQRVKAIAEAKVNTDKVDSETLAHLLRAGLLPESYVPPRDIRELRETVRRRAFLVRERAKLMNRIHAELAKRGIDLGIPIFTGKGRELLASLEIDAVNQLLPVMEALDSQIRLISGSLAKMSGEDEGARLLMTIPGVGYYVATLIVSEVGDVRRFGSSERLCSYAGLVPSVRRSGGSTVYGRITREGSRWMR

SEQ ID NO: 308125 - protein, 407 aa, unidentified
MGEVRTIGVDLAKNVFQVHGADASGAVLFRKKLRRHQVLTFFAGQKPCTVAMEACGSAHHWAREIGRLGHTIRLIRPAYVKPFVKRQKNDAADAEAICEAAQRPTMRFVVPKSEQTQAAALVFRARDLLVKQRTQIINALRGHLAEFGIVAARGPARAPQLMQAVEDPDEPIPKLARPILHMLVETLHRLDEQIALLDHEVAQRAKENETARRLMTIPGIGPVTAVALAALAPPAETFKRGRDFAAWIGLTPLQHSTGGKQKLGATSKMGERTLRRLLILGVALALNDPIKDVPVLVDGPPQPVLLAGNSDHDLVEVPNVAPARPLAFEAAGVVWPELQRPSPNGFIGDDHAALKQHLLNQPQAQWEPEIEPYCVGDDLGWKAVAFVADGLDHAAPSTRLAPILRLM

SEQ ID NO: 308126 - protein, 371 aa, unidentified
MGKASTFVGLDVHKASIAIALLRLGQREPLEWAIRNEPGAVHRLIRKLERELPDGLQCCYEAGPTGYVLKRQFDRAGIPCQVIAPSLIPVKPGSAIKTDRRDARKLAELLRAGMLTEVAPPTEDEEAVRDLTRSRDDAQRDLTRARNRLSKFLLRRGCVYAVDRKPTWSQKYRAWLRAQRFERVADQVIFEDYLLAVEQVEERLQALTDRIEHFAGQAPWRERVQALRCFHGINTVTALALVAEIHDPRRFPHPRQLMSYLGLVPREMSSGQRERRGGITGAGNRHVRRLLVEAAWHYRHKPVVGRALRLRRREKDPKAIALADRALRRLTLRQRRMLYQGKHANLVNIAIARELAGFVWNVLQPGTTSQS

SEQ ID NO: 308127 - protein, 355 aa, unidentified
MNSEKYIGLDVHQATISVAVLDSTGKLVMESILETKAATILEFFTGLRGTLSVTFEEGTWAAWLYDVLHPHVANLIVCNPRKNALVKDGSKSDRIDAHKLAELLYLNKLSSVYHGENGVRMLRELARSYLTMVKDLTRVMSRLKAVYRSWAIPCTGRDVYYTRHRAEWLGKIKEAGVRRRAERLYQQLDMLQHLRQQARRELLAESRKHPITARLRQVPSLGPIRSALAVALIQTPHRFRTKRQLWAYSGLALETRTSAEYRYVKGQLHRAKKQISIRGLNKDHNHDLKGLFKGAATRASVLPGPFQDFYQRSLAKGIKPTMARLTLARKIAAITLTLWKKGENFDAAKLKSQAA

SEQ ID NO: 308128 - protein, 351 aa, unidentified
MRIMALDLGGCQATVCEYDTNSGAQQFLKSRSTPQELHDLLAEHRPARLVFEIGPQAGWVHDLATELGIEVQVANPNHEGWRWRRVKRKTDRGDALKLAQLSAMNQLPLAYLPARPVRQWRSLIRHRHKLMNRRIAVKNLIRSILLREAVAWPEGKRGWTQESVAALKELARPIDTVEVDELWRAQLWLALEELAGVEQLISAADRRLDAIGNLDQRVKRLQTIPGVGPRLAEVVVAIIDKPERFRRANQVAAYAGLTPKQLESGTVQISGRITKQGDPLLRTLLVEVSWLGLLHNPWARNIYHRTRKGSVARNKLAIIAVARRLLIRCWAMLRDRSDWRSPEPVAVAVGS

SEQ ID NO: 308129 - protein, 387 aa, unidentified
MYYCGIDVAKHKHTSVIIDQDGQQQGKALNIQNERKGIEQLEQQLAGCCGAVEIGLEATGHYWLALYDQLTRRGYPVAVLNPLQVKAYRRIDLRKRKTDPVDAYWIADFVRFAHPSATPEQVPTLMQLKELSRFRFRLVEQIGDCKRKIITILDRVFPEYESLFSDVFLASSQRILQEAVTAEEFAEFDLSELAQILKQASRGRFGLSKAEEIQTAARQSIGISFLAHAVRLEMSCLLNQIRLLEEQVEAVEAKLEELMGQLPQFITTIPGIGLVTGAMLLAEIGDVQRFETLEDLVAYAGIDPAVYQSGKFKGDQMHMSKRGSPFLRNALWQAATAALLHNSELKAYYDKKRNEGKHHGVALGAVCRKLLARVYVVLKEQRPYVIR

SEQ ID NO: 308130 - protein, 343 aa, unidentified
MQITTIGLDLAKHWFQVHGVDAAGKVVVKRRLRRAEVVEFFKTLEPCLVGIEACATAHHWARELIALGHEVKLMPPAYVKAYVKRNKNDAADAEAICEAVTRPSMRFVPVKDADQQSVLMMHRARNLLVRQRTMLVNALRAHLAEFGVIAAQGLRHVEQLIAAIEAESTALPELACSILRLIVSQLNDTQAKIQQVEAKLAQWHRNSRLSKLLATIPGVGIMGASAIAATVCDPNLFRSGREFAAWLGMTPRQNSSGGKERLGRTSKRGDKYIRCLLVAGAVAILRHARTRATKDAEWVRGMLARKPAKVVAVALANRTARIVWAVMKRGDGYKAKEIVGQAA

SEQ ID NO: 308131 - protein, 416 aa, unidentified
MDVFCGIDWAEGHHDVALVDDTGKLLAKCRINDDLDGYRLLLDLLTEHGDTAETPIPVAIETSRGLLVATLRQGPRKIYAVNPMAASRYRDRHGVSRKKSDPGDALVLANIIRTDALVHCPLPADTDLAQAVSVLARAQQDAVWNRQQVANQLRSLLREYFPAMIEAFRDKPGTLTRPDARRILAVAPTPALAAKLQMWRLTAMLRRAGRRRGIETDAERIQQLFREEVPRQLPLVEDAMGKQALALLLQLDAACQAVDDLARATEEAFRSHPDATIMLSFPGIGPQVGARILGEIGDDRTRFATAGGLKAYAGSAPITRASGKRRYVGRRFVKNNRLNHVGHLWAFASLSGSTGADAHYRRRRAGGDWRMQALRHLFNRMLGQLHHCLQTRTPFDEAVAFPLGAVPLSTAAVSDI

SEQ ID NO: 308132 - protein, 343 aa, unidentified
MSVYVGMDVHRKRSQVAIVDEAGDQQRNRNVANDPAKLVPILGALPPGTPVAFEAAYGWGWLVELLEELGLEPHLVHPSRCKAIASARLKNDKVDAATLAQLLRADLLPEAWIAPQQVRDLRALLRHRAALVQLSTSLKNRVHAVLADRGIPEPSSLWTGPGRAWLAGLELPPIPRAIINDCCGLLDALATPITRLEGEIAALAKPDPRVQALMALPGVGKLTAMTVVAEIGDISRFPSARKLCAWAGLTPAVRNSDRKVRHGHITKQGSPWLRGILQEAAQTAKRHPMFVDTYSQLARRRGRNIATVAIARRLLARCFHILTELEAQKASEKATTGRARVCA

SEQ ID NO: 308133 - protein, 283 aa, unidentified
MNNNTKKGPVTVLGIDLAKQSFQLHGVDNAGQVVIKKKLNRTQLSAFVANLPVCLIGIESCGGAHHWTRLFTEMGHTVRMMAPQFVKPYVKSNKNDSADAEAICEAVQRPNMRFIPAKSIEQQDIQSLHRIRSQLVARRTAQANQIRGLLMEYGLVIPQGISYIRKSLPDILEDGENRLSVLFREQLSDLYEEMVHLDERIEALELSLKTISAQNEDCKRLLTIPGVGLMTATALIAAVGDVNVFKSGRELAAWLGLVPRQHSTGGKPTLLGISKRGDSYLRT

SEQ ID NO: 308134 - protein, 422 aa, unidentified
MSYCPVAGIDVSKQFSDMCILSPDNKIFAQEKIYHDETSINRANALLQKAERLFFSKPVIVMESTSHYHLILFQFFSEHGYDVIVVNPLQSNSMKDFSIRKRKTDRVDAFKLAMMYRTKTLRPSQIPQTATRALRQLCRHRAELLNDVSSYKNRLTALLDQTFPGYDKVFSDVGGVTSCAVLVRFPTPTILLVEEESELVEVIAAASKSGYSFAKKKAGLLISAAQKAQTLGIHSCADETLIVCTIQMLRTLSESVLQIETAIDNLLAQIKEMRNNVSLLQSIPGIGSHSAALLLGEIGDISLFKKPKQLAAYFGLDPTERQSGSFRGTKNKLSKRGSSYARAALHMGVVNSICKRGKDSAANPVLLSYYEKKCKNKPAKVAQAASMHKLVFIVFAVLRDQKPFELKTPEQHAVEQGFVKAA

SEQ ID NO: 308135 - protein, 343 aa, unidentified
MGDYIGLDVSMKETAISIRRAGERVWRGKCSSDPSRIAQIVRKHAPNVVRVVFETGPLSVWFYHALKEEGLPAICIDARHAKAALDMAANKTDANDADGLAQLAEVGFYREVRVKGFDSMLARSLVAARTKLVRITVELSNQLRGLMKTFGLIVPSGKGRNFEANVRRLLIDQIKLSNILLPMLDAWHDIRMRAADLTKLLLAAARKSHACRLLMTIPGVGAITATSFATAIEDPSNFKNSRAVGAWLGLTSRRYQSGEVDYSGRISRRGDRHLRGLLYEAALVILTRSSAESDLRNWGLKLRERLGFKRAAVAVARKLAVTMHAMLRTGTVFNRAIDAQITL

SEQ ID NO: 308136 - protein, 405 aa, unidentified
MVDIMVSDFRKGRYNLMKIYVGIDIAKLNHFAAAISSDGEIIIEPFKFTNDADGFQLLVSKLESFDKNSLIIGLESTAHYGDNLVRYLVTELYQVCVLNPIKTCQMRKNNVRKTKTDKVDTYVIAKTLMMQDNLRFVSFFDLDMMDLKALGRFRQKTIKQRTRLKIQLTTYVDQVFPEIQYFFKSGLHQHAVYALLKEAPSPKEIASMHMTHLANLLKVNSHGHFTKEQAKELRVLAQKSVGANDSAISIQITQTIQQIELLDSQLEKIEAEMTDIMKFNDSVIMTIPGIGYINGGMILGEIGDIHRFSNPNKLLAFAGLDPSVYQSGNFQAKTTRMSKRGSRVLRYALVNAAWNVVRNNATFKAYYDAKRAEGRSHYNALGHCSGKLVRVIWKMLTDNVEFNLK

SEQ ID NO: 308137 - protein, 405 aa, unidentified
MNAVGIDISKGKSMVAAMRPLGELVVKPYEVIHTADELEKLAYSLKKLDGETRVIMECTGRYHEAVAEALNEAGIFVSTVNPILIHGYGNNSVRRAKTDRKDALKIAKYGLDNWTELREYTPMDAVRQNLKTFSRQYNLYIKTKTALKNNLVALLDQSFPGANTFFDSPARADGHQKWVDFVMEFWHCECVAGLSEKAFAERYRKWCKKNGYNFSEGRAADVYAAAAGHFVTMPKNEHTKLLITGAATQLTAVSTTVEMFRAEMLRLAQSLPEFPVVMAMYGVGNTLGPQLMAEIGDVRRFERKQSLVAFAGVDPEPNQSGTHDPKSRPASKRGSTALRKSLFLVMSALLQKSPAGDPVYQFIDKKRAEGKPYYVYMTAGATKFLRVYYGRVKEYLNSLEDNCEG

SEQ ID NO: 308138 - protein, 355 aa, unidentified
MSQEKYIGMDVHQATICAAVVDAQGKVLMECVLETKASTIVEFVQGLQGTLSLTFEEGTWAAWLHDLLKPHVSRLVVCDPRKAALLKEGNKSDRIDARKLAEMLRTNQLRPVYHGEHGLRTLKELGRCYLTLSKDVTRTMNRIKSLYRSWAIPCQGSSVYAPRQRAEWLAKIVEPGVRMRAEYLYQQLDGLQPLRLQARRELLRESHKHAAVARLRQIPSIGPIRAALLVALLQTPHRFRSKRQLWAYSGFAVETHDSGEYRWVRGKLQRNRERITVRGLNDNHNRDLKNLFKGAAISASTRPGPLQDFYLARVAQGIRPTMARLTLARKIATITLTMWKKGASFDPEQLRRQAV

SEQ ID NO: 308139 - protein, 353 aa, unidentified
MNNDITIGFDLGNKKHKVVGLDVCGKIILKCELSNDKETLGAFFNAHAGATVAMETGTHCRWISSLAKRCGCDAMVGNARKLRAIWESSQKNDWKDAQMIANIARTSRELFHPVSLRDDEHHALVQLIELRDIVVAQRTQVVNAIRGMCKACGYMLPKCDAGCFHRHLDDIPPSEYWKFEPLVDRMESLAENISMYDWKIQDYADVHFKEDVALLRTVPGVGPVTSCAYAAFAPDPKKFGNPRDAGCYFGLTAGQDQSGDIDKPKTITKGGNEMMRKLLVTAANYILRESSKDSALKRYGERICARGGKIARRKAKVAVARKLAVIMMAMLQSRKPYQDNLAARTDAAGPAMA

SEQ ID NO: 308140 - protein, 495 aa, unidentified
MVARLPKKGRLDPVEENYKPIATGPDAAKIIEETETMNPKRSEKARGEQPEWSLNLDVVHPNAAGIDIGNESHYVAVPPNRDVEPVRQFACFTEDLRRMAAWLKSCGIDTVAMQSTGVYWLPVYEILTEERLQVFLVNARHTKNLPGRKTDVQECQWLLQLHTFGLLNNSFRPPEEICVLRAYWRQRAQHVASASACIQRTQKVLTEMNVQLANVISDISGVTGMAILHAILKGERNRYKLAALADSRIQATREEIARSLEGNWRKELLFILQQELNLYQMYQQQIAECDTALQGHLQTLQDKIEPDRPLPPAKTNKKAGSNAPSSFDLRKELYRISGADLTQIDGINVMCAHTIIAELGTDMTRFPSEAHFASFLGLCPDNQITGGKVLHRGTRHVVNRAATALRLAATSLWRSKTYLGAKFRRLRTRLGAPKAITAMAHMLARLVYRMLRYGEQYVDKGMKFYEEKYRQHQILSIQKKAKELGFAVTLAPVAA

SEQ ID NO: 308141 - protein, 539 aa, unidentified
MTCSRPEPMLITEAKQGYNKLLNTLRDLKRCYPNVVFQIRLDEAGQYAANLRMFLYTLPFEKTVSIGDCVRNNNYRAAHFPKRKADAVDSLSVARFAVLEQPGSAEEIPVQLGALRDVASRLEAQTREVTRHVNQLHNLLARVFPELDTIVRQLSAKNILELLRKYPTPTQIARARLTSLEAIPRLKTETACRLHEAAKTTIGSLTGPVAEVMVRTLVDQVRFSQKLKDQYEQLLIETYRSLPISNHLDTINGIGEVTAAVLTAKIVSIERFDRPEQVVGYFRIFPEEKSSGIGPDGSLRPGPKTRMSKKGNDLVRYYLYNASMSAVQCNPAVRALYRRLRARGTTGKAALGHAMRKLLHLVFAVWKSGKPFDPQHYPWDQTAEAKEATGHKQETNPDQQVVTGAPSQTLSRTKSDVNNSPSGVDFQAVRSQTSMQQVLELLRFEPVETRGDQVRGACPVHGSTSPHSRSFSASLAKNTYRCFQCQSQGNHLDLWAAVTSQSIDAAAILLCEKVQIELPRILFIQHGPPTREKVPVPRP

SEQ ID NO: 308142 - protein, 426 aa, unidentified
MHNSEKLEAITPNTLIIGVDIAKKLQWARFTDYRGSELSKALKFYNDKKGFDSILARIEALCKFKKLDKVIVGMEPTGHYWKPLANYLILNQITVVLVNPYHTKRAKELDDNSPTKSDRKDALTIAKLVSDGRYYEVYMPQDIYAELRVLSNSRISLMRRHNALKNTIMAVMDEYFPEIVSVFKNPLKGKASMQILKSCPFPALILGLGVDGVLVEIKKAVKRTVGIIKARQLVDTAKTSIGVNYGTTAAKLRLELLLEEFELLTRQLAQVEKGMEEALTETGLKEILLGIPGIGVVTAASFLGEIGDPLRFSHPRQISRMAGYNLVEDSSGKNISGTSISKRGRKNLRNVLYQMARTMVAVNTEMKELYRYLKTRSNNPLKKKQALVVISKKVVTIIHTLVKKRTTYKAELVFSEFRKNQMKQAA

SEQ ID NO: 308143 - protein, 409 aa, unidentified
MEVLYERCAGLDIHKQVVVACRITPDANGRPHKEVQSFPTTTADLLALGDWLAATACTHVAMEGTGGYWKPIYNLLEDQFTLVLANARHIKAVPGRKTDVKDCEWIADLLQHGLLRASFIPPRPQRELRELTRYRTTLIQEKADEANRLQKTLEGGNVKLGDIASNVLGVSGRRMLRALAQGETDTAALADLAVGRLRSKLAALQRALESRMQPHQRFLLGLQLDRIEELEAHVQTVSDEIALRLGDNEAIIARLDAIPGVGRKTAEIILAEVGATVDAFPTGAHLASWAGLCPGNHESAGKRLSGRTRKGNKALRTALVEAGQAASHTKDTYLRSLYDRIAARRGRKRAVVAVGHKIVLIMHALLRTGASYDESGYAALDVPDRERQAARLQRRLEKLGYHVALEPVA

SEQ ID NO: 308144 - protein, 316 aa, unidentified
MNEKSVESFVGIDVSKNTLDLRIEPAGEAMHVAYDDQGIAQVCRRLVEALPTLIVMEATGGLETRLAGELAAKGLPVAVINPRQARDFAKATGQLAKTDKVDAAMLCAFARAIRPAVRPLKSADARELDDLVNRRHQLVEIRVQETLRLATASSKALQKSLKTHIAWLDKRITKLDHDLKDRLQTSDAWKVKDDLLRGIPGVGDVTSMTMLAKCPELGQLNRREIAKLVGVAPLADDSGKHRGKRFIWGGRADVRAVLYMATVAAMRCNPAIKPFAQRLKMAGKPAKLVIAACMRKLLTIMNTMIKTNSPWTPPTP

SEQ ID NO: 308145 - protein, 341 aa, unidentified
MEQYVGLDVSMRETSVAVRQNGKRVWRGKCPSDPKALADVIRQRAPDAVRVVLETGPLSTWLYHALKAEALPVVCIDARHAKAALDMAPNKTDANDADGLAQIAEVGFYREVRVKGYAPMLARTLVGARGQLLRISIQLSNQIRGVMKTFGLIVPKGAGRVFETHARALLGTNEAVARVVLPLLEAWRAVRARAAELDRQLIAAARTSPACRRLMTIPGVGAVTAASFVAAVEAPENFGTSRAVGAWLGLTPRRHQSGEADYDGHISRRGDGHLRALLYEAAAAVLTRTRTDSALRSWGLELKGKVGFKRAAVAVARKLAVIMHAMLKTGAAFDPAPNTTA

SEQ ID NO: 308146 - protein, 360 aa, unidentified
MVRRLEELFPRRTVMRFYNGQHRYYCGVDLHTKRMYLCILDHEGNKLLHRNVRSKPRDFLSAIEGFRDDLIVGAECMFTWYWLADLCLDEKITFILGHALYMKAIHGGKKKDDKLDSEKIARLMRGGTFPLSYVYPREMRATRDLVRRRMFLVRRRSELLAHVQLVNQQYNHDPFEKTLKYAGNRDVLDRFEQRSVRLSVEADLATVGHYDQLLKQLEANLVRQATLHDPRACSLLRTIPGIGKILSLVLLYEIHTIDRFPSVGDFLSYARLVTPKQTSDGKVTGHSGAKIGNVHLKWAFSEAVLWMLRYSEDAKAFVKRKEKKYGKCRAMTMLARKIARAVYQMLKRKEPFDAVKFFAS

SEQ ID NO: 308147 - protein, 323 aa, unidentified
MNKDIKYFGIDISYLVFDVTDSDGNYYPFKNNETGFKKFIKLLNSYNHCVMEATGYYHYQLAYYLLESGVKVSVENPLAVKRFIQMKLSKIKTDKSDSRLICEYAKQVDMKLWQGNSKHQTECLQMTRLLSVYTKQSTMLKNKLHGEAVLGNPSKAVVSSLKRSLKQLQKEIKSLEDTLLILVKQTHQDLLTRLKSIPGIGPKTAIMLVVLTDGFERFTSGSELCSYAGLTPVIRKSGSSVNGRSRISKIGNQKLRNLLFMCSFNACKYNKACRDLYERIVAKGKSKKLALIAVCNKLLKQAFAIAKSGLIYDDTYRSTLVKN

SEQ ID NO: 308148 - protein, 411 aa, unidentified
MSKKLKELAFVGVDTHKDEHTACMTDCFGQPLEVFTVENRPDRIEELLEEIEETAEAHSLKPIFGLEDVMGLGQHLARSLLAGDYQLKEVNPIETERKRLRKAHPDKSDPLDALAISRVLISDFDKLPTIQRLDEVHLAIHQLSNRRDSLVKEQTRIKNKLHILLHREYPYYQTMFKKTFSKAALAFWERFPRASLLKGIGVKRLARYLRANSNNTVSTKKALSVLKLVDKSSLPSRINLVHSILIRNLVKHLRFLEEQISIVEKELKSLVDETGMKLCTLTGVDIVTAAKLIAEIGDISRFSSSDKLAKCAGIAPQQKSSGKKCRFKKSNRGRRQLNTAIYHIALSQISCDRSGRPRNSKAREYFLRKISEGKTKKEALTCLQRRLCDIIYAMMKNKTEYRFNKTVNPTV

SEQ ID NO: 308149 - protein, 387 aa, unidentified
MLSRADNTEAETSIRTDLRAIFVSLELSRTTWLVTSLSPGTREKMSKHSVPAGDIGGLLVRLRSLQERVRARRKQLPPLVVIQEAGLEGFWIHRVLTETGIESYVVDPASIATSRRRRRAKTDKLDGDTLVRTLLAYKRGEPRVCAMVRPPSPEEEDRRRLSRERRVLLKERVQHSNRIKGLLFGQGVTDYEPLGRDRRQRLVGLQTGDGRPLPPHLKAQIDRELDRLVMVIEQIKAIEDELRHAIVAADTVTPVPRMLIELKGIGNEFATVLWTECLYRRFDNRRQVAAYAGLAPTPWQSGSIDREQGVSKAGNPRLRSMLLQLAWLWLRHQPDSVLSQWFQDRVKANGGRLKKPTIVALARKLLVALWKYVTSGVVIEGAIVRAA

SEQ ID NO: 308150 - protein, 326 aa, unidentified
MNGSGQVISNERFLSTQEALDGFLDRFEDAEFVLESTGIWEFIYEGIEKRGFEVVLAHPLKVRAIAEAKVKTDKVDAEMLAHLLRADLIPRSHVPPRDIRNLRQLVRHRAYLVRQCTSIKNRIHAELLRRGIRRPDNLKKTFSHKHVEWMRSLGILTIDSSLNCLEGIQGQIKEVESFLLVEYNSRKDAQLIATIPGIGFYGALLILAEIDDIHRFSHPEKLCAYAGLVPTVHQSGSRGHNGSITKNGSPHLRWILIEAVHVHTNYCPESKLSKFHAKVAQRRGKQRATVATARKLLHTIYWMLLNKEKFHCQGFNLVEKAASMNA

SEQ ID NO: 308151 - protein, 350 aa, unidentified
MLIIGCDYHPGFQQIAYVDTETGEFQERRLQHPEEAEKFYRALWEQSVKVRVGMEASGHARWFERLLEELSFELWTGDAAKIRAKRVRKKKTDREDARHILELLVENRFPKIWVPTWQNRDLRQLLWHRHRMVQTRTRIMNQLQAVAINEGVRYKKRLWREAGRQQLESLSLAPWASRRREDLLEVLDRINPTIAELTQAIENEAEKCCEARRLMTHPGVGALTAVAFVLIIGEAHRFGCGKQIAAYLGLVPEEDSSGERRRLGHISKQGNSLLRFLLVEAAQATARCDQRWRNQFFHLAQRRGRKIAKVAMARRLAVRLYWMWRREWNYEQLQSFGSHVGQPGNPHGVQ

SEQ ID NO: 308152 - protein, 279 aa, unidentified
MRFYNQQHPFYCGVDLHAKTLHLCVLDQAGEIVRHRGIRARPEDFLRTIEPYQKEVVVGAECMFAWYWLSDLCLEREIPFVLGHALYMRAIHGSKTKNDKIDSEKIARLLRGGTFPMSYVYPRQMRSTRDLLRRRCFLVRRRGELLAHLNNTFSQYNVTPPPGKFSYAANRVDLTKCFDDASVRRMVQTDVALAADFDKELTSVELYLKRNAKVHDPDTFHRLKTVPGIGEILAMVLLYEIHDIRRFADVGDFVSYARLVRGSHESSKLRVSWQSGLTG

SEQ ID NO: 308153 - protein, 401 aa, unidentified
MTESSDYQSVQVFIGVDVGKDTHHAVAVNRSGKRLFDKALPNDENKLRSLISDLKQYGQILLVVDQPATIGALSVAVARSEGVLVGYLPGLAMRRIADLHAGEAKTDARDAAIIAEAARTLPHALRTLKLADEQVAELSMLCGFDDDLAAQTTQASNRIRGLLTQIHPALERVLGPRLDHPSVLDLLQRYPSPEKLALLSEKKLAAQLCKLAPRLGKRLAADITQALTEQAVVVPGTNAAIVVLPRLALQLITLRKQRDEVALEVKQRVLSHPLYPVLTSMPGVGVRTAARLLTEVACRAFASAAHLAAYAGLAPVTRRSGSSIRGEHPFRRGNKTLKRALFLSAFAALRDPISRAYYTRKMSQGKRHSQTLIALVRRRCDVLFAIIRDGTFYPPQASEYA

SEQ ID NO: 308154 - protein, 403 aa, unidentified
MNAVGIDVSKGKSMIAVMRPFGEVVASPFEISHTERELKGLTRFLKGLSGETKVTMEYTGKYYQPIARYLREAGIFVSVVNAILLHDYGGNSLRRVKTDRKDAIRIANYGIDRWVDLTEYTPEEDIRQLLKTLNRQYNQYVKVKVMMKNNLIALLDQAFPDVNRLFNSPARKDGHEKWVDFVAAFWHCKCVSDTSENAFKERYAKWCKKHRYNYNPAKAKEIYDKASNLVSTLPKNDTAKLLITQAIAQLNTIAETLAAIMTEMHRLTTLLPEYDIVMSMYGVGPTLGPQLMAEIGDVRRFYAKKALVAFAGLDSPPNQSGVYESKSRSMSKRGSASLRKTLFQVMSVILQNSPSDEPVFQFLDKKRAEGKHYGVYMMAAANKFLRIYYARTKEYLSSLEETA

SEQ ID NO: 308155 - protein, 321 aa, unidentified
MQKDLLYCAIDVSKDKLDVDGAALALPAQLGNDQAGFRQLIKAAKKYPGAVQFVFEATGPYHLGLALALWEAQIPLSVLNPARVRYYAKAQGKAKTDPLDTQVIGDFARSFRPPPTPAPDPVRRELTELLQRRDGLISSRAAEQNRLGQCRHKIIKGQIRRLMVQLAEQIDQIDGLMKKLVNSSQELKAKVKALCQVKGVGHLTAVTLLITLPELGTLGRNRMVRLVGLAPLNDDSGTQKNKRFIQGGRKRPRCALYMPALSASRHNPVLKDFYQRLLKAGKLKKVALTAVMRKLLICLNALLRKLVDPHASQEGLCLAKP

SEQ ID NO: 308156 - protein, 317 aa, unidentified
MSYNIAAIDIHKKVLIVVVAAVAEEVADATGAAVELEGRKFGSGARERNHLVSWLQQRRVHEVVLESTAPYWKPVWLDLEPHLEKLHWAQAQSNRAPKGRKNDFRDAQRWGRRWLAGELMLSFVPEPEQRTWRGRTRGRLPLVRERVRLPNQVEALLEEARIKLSSVISDLLGVSGRRILEALSQGETDAVKLAELGDDRLRCTQEQLADALRGSPEPSHRALLKLHRERLKLLDQQIDQLSQRSATALKQHQDAVVRLAEVPGFGIESAQQRIAEVGVDAEAFPSAGELASWCGACPGSAVSAEENYSSRCPKGNR

SEQ ID NO: 308157 - protein, 387 aa, unidentified
MTHGSPEEFAAFVGIDWADAKHDICLQAAGSEKRESGILEHTPETIDAWVSMLRARFTGRPIAICLELNKGPIVSALRKYDFLMLFPINPLTLARYREAFTPSRAKDDPTDAELQLELLLTHRNKLQQLKPQSPAMRALEQLVAHRRRVVGDKVRLTNRLTSTLKNYFPHVLQWFQEIDTLIFGDFLCRWPTLKAAQLARRSTLETFCRDHHGRSTDVINKRIHAIKAAMPLTTDEGGIAPHALLVQTLVSQLRVTLHAIENFDTALAQRAQSHPDFALFQALPGAGPVFASRLLVAFGEQRERYASAIELQQYAGIAPVAERSGKKSWVHWRLQCPTFLRQTFVEWAAESLRHSFWARVSYQQQRDKGKAHQAAVRALAFKWIRIL

SEQ ID NO: 308158 - protein, 393 aa, unidentified
MRKSKKQQKPLNDLSRSLRPFDPNHTLIIVVELSKKTWLVAGIIPGIERQPLKKLTADENELLKLLERWRAEAEKAGHKIHRVAVAFEAGRDGFWLARWLKAREIEAHVIHAASVPVSREHRRAKTDRLDTKALKRVFLGWLRGERDHCKMCAIPTFAEEDAKRPHRERETLVGEQTTIINRIKGTLARLGIRNFNPKLKKAPERLENLRTPEGEPIPPNTLAELHRDMERKRLVAEQIRQIEKARLEQLKQAPKTGPNLMVLLLARVIGIGIETADMLVKEILSRNMRDRRAVARYAGLTGSPDESGNKRREKGLARSGNARVRRGMIQLAWRFLEFQKESALAKWFEARTENARGSRKKMIVALARKLLIALWHFVRDGVVPQGIVLRPAH

SEQ ID NO: 308159 - protein, 347 aa, unidentified
MRFYTKQHQFYCGIDLHARTMYLCILNRDGEILVHRNMPASPKPFLKTIAPYREDVVVCVECLFTWYWLADLCAREGIAFVLGHALYMKAIHGGKAKNDKIDAQKIAVLLRGGMLPQAYIYPADMRSTRDLLRRRISLVRKRAELLTHVQQTTSQYNLPALSKNIAYKANREGVAERFPDPAVQKSIEVDLTLIEHYDRLLRDLELAIVQTAKQHDPQTLYRLQSVPGIGKILSLVLLYEMHTIDRFPRVQDFVSYCRLVKCAKESAGKRYGTSGTKMGNAYLKWAFSEAAVLFLRSNPEGQRYFARLEKKHGKGKALTVLAHKLARAVYYMLRRETVFDMRTFLHG

SEQ ID NO: 308160 - protein, 352 aa, unidentified
MISSQITATPKLFIGMDVHKKSWTCHFKTDLFDHKTVTMPADPNCLKDYVFKNFPQHEVKCCYEAGCCGYWIARKLQQLNWNVLVVNPADVPRTSKHNWQKTDKIDCRNLCDHLRNNDLHSIYIPQEEQEQLRSLFRRRNHLSRQLRTIKNHIKSQLLYYGIKLPPEFDNPNWSHNMKTWIRKIEWKYSPAALAMQSRLKQLDFIWYETLDISTALRAYCRKHHNKDYYLLKSIPGIGGITAAGILAELGDLRRFNRLDDLAAIVGLVPGIYESSDNKICLGLSKRSNHYIRSLLVEATWVAVKTDMALQTYYRKHSAREPNKAIIKVAHKLLSRIRAVILTGVPYQTGLIK

SEQ ID NO: 308161 - protein, 346 aa, unidentified
MCSLPVFVGLDYHDSSVRVCVLDTDGSELGNADRANDWQAIAHFAERFGRPVRAAIESCCGAADLAEELVSCAGWSVDLAHPGYVQRMKQNPDKTDCHDAQLVADLERVGYLPRVWLAPRFIRELRQVVRYRLQLTEQRRATKLRLRALLREQRCHAPEGVNAWTKAWEQWVRQATDLSEQGRWLAEQHLRELARLTTVIHEVEKRLEHLTANDVEVQRLQQQPGIGPVTAWTIRAEIGHFDRFRTGKQLARFCGLSPRNASSGQRQADAGLIRAANPALRTVLIEAAHRLVRYDPSWQKFAQRLRAGGKPGSVVAAAVANRWMRRLYHDMKTPSGELAVAVGPAR

SEQ ID NO: 308162 - protein, 388 aa, unidentified
MQDVADQSAASTTIGADLCAIFVSLELSRSTWLATSLSPGRGEKMSKHSVSAGDIAALLARFSELRRKACARTGKSFPIVVIQEAGLDGFWIHRVLLSEGIESHVVDAASIATSRRRRRAKTDRIDGETLLRALLAHKRGEPRVCSMVRAPTPEDEDRRRICRERKVLIMERVQHVNRIKGLLFSQGASGYEPLRRDRRARLDALQTGDGRGLPQHLKAQVCRELDRLELLLEQIKAVEAERDALLNAEQTKVSAPPPMLLGVHGVGPEFASVLWSEGLSRHFDNRRQVAAYAGLAPTPWQSGSVNREQGISQSGNARLRTTMIQLAWLWLRHQPGSALTLWFKDRMERNGGRRRKTTIVALARKLLVALWKYVSAGVVIEGAMIRPA

SEQ ID NO: 308163 - protein, 358 aa, unidentified
MDNRKYIGMDLHQASISVAVRDGGGKLVMECTIETKAATVLEFIQGLRGELWIAFEEGTSAAWLYDLLKPYVARVVVCDPRKNALLKVGNKSDRVDARKLSELLRAGLLTPVYHGESGVRTLRELARSYLTLTKDLTRVMNRLKALYRSWAIACAGQRVYSRRHRSSWLEQLSQAGVRRRAEQLYQQLDTLAQIRRQARRELMIESQKHPAHQLLQQIPRLGPIRIALLIALVQTPHRFRTKRQLWAYCGLALQTRSSGEYRFTEGQLQHSNRLPALRGLNHNHNHDLKNLFKGAATQTSHCSDALEDLYQDLLARGMRPAMARLTLARKIAAIALTIWKKGGRFDPGQLKRQASLRV

SEQ ID NO: 308164 - protein, 430 aa, unidentified
MEIIYQKACGVDVHKSFIVAVICDSTSIKPQYSRKRFSTFPNSLIDFRNWLLANDCQNVCMESTGKYYIPVYNALEGYISNVVVSNPKWVRCIKGEKDDNKDAKWIADLFKLGIVRHSFIPPKNIRVLRELTRYLYKLTNMRTSEKNRFTNALTVGNCKLDMVFSDIFGKSSSAIINTIISQNQYSDKDILKNVDKRCKASEEDILNSINGISWVDAQKERMLLIQNHIDYLNSTIKSLKEIIDIVVKPYEDYIKFLCTIPGVDRNSAISIISEIGTDMSQFSSHYRLVSWAGLAPGCNESAGKKKSVKISRAGVYLKPALVEVAHAAVTDKDCDYYAVKYKQISKRRGKKRAIIAIARKILVTIYHMLSTGEVFNPSDLSKVETSDKDRIKYTKNNFMQSAKQLLSLGLTSEEIILLVNSQNSNLTPIT

SEQ ID NO: 308165 - protein, 338 aa, unidentified
MRKSSPASSEVLWAGVDLAKLTFQVAIWGHLSFPEMQCRSFDRTRKAMKGFLAWLRDQTPAGAKLGLVMEATGTFAEEMASWLMDLDSTLWLAIVNPGQTSAFIKSLGFRNKTDDLDAKGLAKYGQERRPVPWERPSPELAALKDLVRIRMDLINARTAMHLRLTDHKRAAKRASDAMRKVILSLKTQIQQLDIAVKDQVAAFPELAHQMERYTSICGVAQVTATTVMVELGDLRRFQRSRQLTAFAGLSPKRHQSGTSVNGKTRLCKQGSARVRAALYMAASCAVRFNPDMKATYDRLLAQGKERRSALGAVMRKLLVLMRAVLIADRAWQPMKVAA

SEQ ID NO: 308166 - protein, 442 aa, unidentified
MARFVGGDLQARFMARVRDVDPRRCLVVPVDVGKWSAMALVADHFGEVVRAPSEFRLDEPGVRWLLSLIAGAANDVDAVVCRVGVESAGHYHRTLVARLRGDGVEVVELNPAAVKEARSQQLLRRLKSDERDLGAMAELMIRGSGRLPQIRDDAMAAQTAWVAHRRRKVAAHVALSNQVQGHLDLVFPGLGACFDGILQTKAGKVIVRDLADPDRMRRLGSEGLRRFVGRRGVILRRSKAEQLIDAAKVALRLPDAERAPIASLLAADVALLEVIGDEIRRAENELASVLDATPAGVLVSLPGVGVVRASAYGAAIGDPFRFPNAAAAYRASGLVPAEYSSAGRRRGGQHISREGSVELRSAIIELGRGLAGHDDDFAAYRRRLRSTGKRPAVAAVAVGHRAHRLAFAMLRSQEPYDSKRWASAVADGPVMAKTGGRPTRTT

SEQ ID NO: 308167 - protein, 423 aa, unidentified
MPVSTLYVGIDVSLKTNQVCPINFNQDVFFNEKFDNSPSGTEKMIIRILDVLSKNKDLNKVLFCMEATNVYHIHVSCLLASDPRLLAYGCKVYAENAKAIQKYKETFLDREKSDPEDAYLCADYVRIGKCKDSLSVIGYQKIALQRLTRQRKHIAEQLGKEKQYLSSNLFLKFSALKVNPEESPFSNIFGKTSSVMLTDFFSNEEIVKADLGDLVVKISEASKYHISDPEETAKLLQNLAKQSYRLDNIAGDSVTMAMASSFRLIQTFQNELNKLDKEILRLIEGYDNKYYQILTSIKGVGKVYAAGIIAEINDIHYFKSDDHLASYCGLRWKKNDSGNKHSDHTKQPNTCNTYLRYYIIEATQSILRFNEEYSSFYCRKKSEVKVNSYKRALVLTSRKFVRLVYGMLRDNKLFDDHYLAHKS

SEQ ID NO: 308168 - protein, 419 aa, unidentified
MSFKIFKFNCCGLDVHKTWIYACIGITDSNNRTEYKQARFSSFSKGLHQLCVWLAKYNCNDVCMESTGKYWIPVFNILEQHKIRVTLSHPKYTKPMKGNKTDRKDAKWICDLYMCGMVKPSFIPPADIRELRDLVRYRFKLTCMITGEKNRAQNCLTVSNLKLDDVFSDVFGKSSRSITEQILQHPGEKFDVSPFVDSRCKTPIEEIQAAVDGNISKEQDVKLRQCLDHIDELQKHISEVEQEILRLSDKYEAALNLIRTVPGFDKNPMTAIQVLSEIGGDMSVFLTAKHLVSWAGCCPRNDKSDRKIKSTRISCAGSYFKPVLVQIANALIKSKKHFEFTTRYKRIKTRRGHKKAIIARCRMILTAIWHILTDLKPYTSDGFLESRPVKKEKVLTTSQALNLLRQRGYLIKDEPSPVS

SEQ ID NO: 308169 - protein, 318 aa, unidentified
MSVTEKVHVGIDVCKARLDVALLPRGEALSLTNDEEGIEALTEKLVEASATLVVLEATGGYERPLVAALAASQIAVAVLNPRQARDFAKATGRLAKTDKIDALVLARFAEAIRPTPKAPPEAEALEFQAILARRRQIIGMMVAEKNRLGASTSKKVRSRLEAHIRWLEKELARIDRDLEEVINQSPTFKENEALLRSVPGVGPVLSRTLLAELPELGSLSPRELSALVGVAPLNRDSGIFRGRRSVWGGRAKGREALYMGALIASRHNPHIKTFYERLVASGKPKKVALVACMRKLLTILNAVMRDRTPWRSPHALNS

SEQ ID NO: 308170 - protein, 324 aa, unidentified
MKDITIGMDLGDKKHVVCIVDAEGTMIADTNVANDKESINGFFCKYKGATVAIEASTHSPWISRQLAMLGCNVLVGNPRKLRVIWDSNDKTDKRDAKMLAKIARFDPSLLYPVAHRGKQAQIDLEILQARDSLVKNRTSLINHIRGSVKALGERLSSCSTESFYKKTAESMPDSLKETLLPIVEIIGQLTAQIKEYDRRIEIISKEKYPETELLRAIKGVGPLTALAFVLILEDPERFAKSRQVGSFIGLTPRRDQSGEVDKQLRITKAGNPFLRRLLVGAAQYILGPFGEDCDLRRFGLRLSARGGKNAKRRSVVAVARKLAV

SEQ ID NO: 308171 - protein, 420 aa, unidentified
MRNAGIHANSLLEVRRMYNAVGIDVSKGKSTVAVLQPGGTVIRKPFDVSHTSQNLNELADYLSSLDGTTKIVMECTGRYHEPMVKALSEAGLFVSIVNPHLIKNFGNNSLRKVKSDPADARKIARYTLDNWTDLRQYSGMDNTRTQLKTLNSQFSFFMKQKVAAKANLIALLDNTYPGVNKLFDSPTREDGSEKWVDYAYSFWHADCVRKIGLKAFTERYMSFCKKHHYIFQQDKPEKLFNASKELVAVFPKEKTYKLLIQQSIQQLNLASEHVEQLRREMNELASTLPEYSTVMGIYGVGKTYGPQLIAEIGDVSRFTHREALTAFAGVDPGVDESGQHKSKSNRASKVGSARLRKTLFQIMTTLLQNAPEADPVYCFLNKKRSQGKPYYVYMTAGANKFLRIYYGKVKECLRNLEQTE

SEQ ID NO: 308172 - protein, 387 aa, unidentified
MLATLRQDFTSEEVILAVALELSSGSWKIALSDGRRAKPTIVTVAEEQAHARLMAAVKVIQEIQMKWSLSVETKVVVMYEAGQDGFWIYRALEAMGYSCMVIDSASVPVGRQTKRAKTDRLDAIMLVNCLRGWLRGEQDRLRVLHVPDESAEAERQLLRDRGVLQKEIGQHHDRIRKLLRTVGCWDEVSHDIARRLQAGEVRCYDGSALPAELTARLLRECERLALVEEQFKTLSKTQISQLSEAVQEKIAHLTKLKAIGEIGATRIATELFWRHFSNQKQVGSCVGLVPQPYDSGATRIDQGISKQGNRRVRSLLVEMAWLWLRYQPESKMAIWFAQKTHSQAPNKRSRRVAIVAVARKLAIALWRYLEYGVIPEGARFKEIKSHS

SEQ ID NO: 308173 - protein, 361 aa, unidentified
MKCVQRNKLDFSGQNIYVGIDVHLKSWSVAILSEHSVLKRFSQSPEPELLHKYLVSNYPGANYFSVYEAGFCGFWIHESLTDLGITNIVVNPADVPTMSKEKLRKTDAVDCNKLARELRSGSLEGIYVPGTATLELRSLIRMRTLIVKDSTRAKNRIKSLLHFHGVKIPEEFIRCSSHCWSKRFLRWLHSLELSTEYGKKILELHLEQFIRLRKMLLQETRAIREISRKAPFAKPIRLLSSVPGIGITTAATLMVEIDDIVRFNSAEHLASFIGLVPMCHSSGDNDSVSNMTIRRHFMLRWLLVESAWTAIRIDPAMTMAYTEYRKRMNPQKAIVKIARRLVNRVYFVLKYEKEYVSCIVK

SEQ ID NO: 308174 - protein, 341 aa, unidentified
MKQYEFSCGIDISSQDFTVTMSKNPGKVLSGPSMFGNNLAGFEEFKLWIKEHNLPSKQLILCMEATGVYGEALCYFLHNLGYSVAVEAPLKVKRAFQPDGHKTDAVDSLQIAEYAIRFSDELKLWSPREEIVEQIKSLLSTREQLVKQRTASKNILKALERKVISSKIAMRSLHKVIKNLDNEILNLEKEIEKLIKSQPPLQQTMSDLKSAPGTAMLLAANLLTITNGFTHTMTARQIASYLKICPYRHESGLSIYKSPRSKKYGPSTMRKLLHLAARSVVTHDRNFRKYYLRKLEEGKPKKVVLNNVANKLLKVLCAIIRDQTPYNDNYKSINPIFLNNA

SEQ ID NO: 308175 - protein, 428 aa, unidentified
MIESIAIMPSEAIAAYIGIDWADEKHVVALRSAAEAAKIEHRLVDQRPEALMEWIGQLEQRFGSRGKILVCLEQSRGALIYHLMGYELFELYPVNPLQLARYRETFSPGGAKDDLPDADLLSELLYCHRDRLKAWKPDTELNRKLAFFNEGRREAVDQGTRLSNAIKSQLKVYFPLALELLDDDTSTILAADLLLKWPTLEALQKQNSHSLRKFFYAHNCRGESKMLRRLERVQQAKPLTQDQAVIEPAVLRVQMLARQLKALLPDIARYEEHIAELFAAHPNHFLFDNLPGAGRALAPRLCSALGSDPDRWQSAQEISTFHGIAPVRRASGKKTGKRASIHFRQACPKFLRQSFHEFAACSIRYCTWAHALYDTQRARGNGHHAAVRAVAFKWIRILFACWKHRIPYDPQRYLQALHHRGSPLANAC

SEQ ID NO: 308176 - protein, 385 aa, unidentified
MAPPRMPEAVIGLDVGKLSHWACVATRDGEILLSAPVANREGDLDSLFGRFPDALVVVDQSRNIGALALARAKAAGMSAAYLPGLAAHGAARLFAGDAKTDERDAMVIAKTALGIPDALLPVGDPGPTVAAARALAAQRNFLTCENTRSKNRLRSILLESCPAFEALVDLSDGPQLRLMASLGGAWSVADAGPRRAAALTRGAARGKIEALVRSTASSTRPDAAAVAAEDRAVRLLARRISENSAEIDVITAEISALLEGDDTYRCLLTVPGIGPKTASELAISIDIEDFPSHDRLASYCGLAPRNRQSGTSISSVTASRQGNKRLKNLLIFSCNCLTRTEGRWGDYYARCRERGMPHGKALKALARKRLKVIYAVMRDRVPYAA

SEQ ID NO: 308177 - protein, 355 aa, unidentified
MNAVGIDVSKGKSMVAALRPMGEVALLPQEFLHTEVGLEQMAYTIIALGEDTRVVMEATGRYHEPVAAALHEYGIYVCVLNPLFIKQSGGGSIRKVKTDKADAMKIAKYGLDNWVDLREYTPMDTVRQQLKLYSRQYDLYMKTVVSLQNNLISLTDKTFPGVNELFSSPERADGHQKWVDFVMTFWHCDCICRVSEKAFTERYQKWCKRKGYHFCTEKALDIYAESCGHFTTLPKNDNTKLLITTAAQQLLAGKMTLAALRTEMTHLAKQLPEYDTVCAMYGVGETTAAQLMAEIGDVRRFPRRSSIVGFAGVDPAVDQSGKHEAQSSPTTKRGSPHLRKTLYQIVYLSAESSGR

SEQ ID NO: 308178 - protein, 405 aa, unidentified
MKNNSSSNKQKMAVQVEVREQTPLEKSNSSAKRLKTVKAVKEFGEQKLFAMAAVGGCPRLTIGLDTGDRSSCWCALGADAEVIARGEVITERQPLELFFGRIPASLVALEVGSHSPWISRLLKKRGHEVVVANARRVKLISESSRKNDQVDAELLARLARADRLLLSPVKHRGEEAQADLMGIRVRAQLVELRTQTVNAARGLVKPFGQRLRACDCDSLKRADAGDLDVAIRGHAERLLGVVEELTKQIDACDKELERMAKDRYAKETAQLRQVPGVGPITGLTFVLTLDDPARFEKSRDVGPFLGLRPKSSQSGNSEPEMRISKEGDGYLRTLLVQCAQYILSRRGPDTDLKRWGLEIAAKGKKKAKKRAVVAVARKLAVLLHRLWVNGEVYEPLRQGSLSVAA

SEQ ID NO: 308179 - protein, 322 aa, unidentified
MSLPNPLCVGIDVSKATRDIAATSAFAQFTTNNDADGFDAIIAELRKHSVALLLMEATGGLEAAVACSLQAEGFELAVVNPRQARDFSSAMGYLAKTDRIDARVLAQMAEVIHRHPERERFIRVLPDAECQVLAAMVVRRRQMIAMLVAERNRLHPAHPQSRKSINTIIKALEDELARIDDDMNNHIRSHFKELSERLSSIKGVGAMTVVALLAGVPELGHLSRREISALVGVAPVNRDSGTMRGRRTIFGGRAGVRTALYMAALVATRYNPVIKVFYTRLVAAGKPKKVALVACMRKLLTILNAMLRKNEEWNESYHHVAP

SEQ ID NO: 308180 - protein, 343 aa, unidentified
MHKRSHTFVAVDEAGRKLGELMVKADPGGHDKAIRWARQQFGGELTWGIEDCRHLSARLEIDLLTANEKVVRVPPKMMAEQRRTARTRGKSDPIDALAVARAVVRQPDLPVASHDEASRELKLLVDHRDDLVRYRTGVVNRFRWHLHRIDPTVDPAPKSLNLAKTRARLAGFLAPLEGIDARLARELLDDIAELTQREKALEKEITGLAAQRAPQLLEIPGCGALTAAKIVGETAGIARFANEARYAMHAGVAPIPVWSGRTAGRVRLNRSGNRQLNAALHRIAVTQTRLGGLGKAYYDKRIAAGDTKTEALRCLKRRLARIVFNVLKPTTAAATGTCLPAAA

SEQ ID NO: 308181 - protein, 369 aa, unidentified
MRLFVGLDVSSFDMKVCILNGEGEKLNAFTVTNDLPGATLLKERLLDCIGDQEVDVLKIGLESTSVYSFHPSMFLHHDEDLKVFGAKVFVMNPKQIANFKKSYSDMNKTDEIDAFIIADYLRFGRNQMSVVKESQYVALQQLTRSRYRLIRMMTKEKQHFLQHLSYKCNTFSQEVDSSVFGSAMMELFLEKYSLEELAHLPLEELAAFLQEKGKNRFGDPKCVATSIQKAVRSSYRLDKVVEDSMDVILGTSIEVIRTFQKQIKEIDKAIKKLMAGLTNTLESIPGIGPVFAAGIIAEIGQIDRFDDETKVAKYAGLYWRKHQSGRFTAEDTSLSRNGNHYLRYYLVEAANSVRRQVPDYRDLLREKVQ

SEQ ID NO: 308182 - protein, 342 aa, unidentified
MTITTIGIDLAKNVFQIHGVDHSGKAVLKKQLRRNQVLTYFIKLSTCTIGMEACGGAHYWARKLTAMGHTVKLMAPQFVKPYVKANKTDAADAEAICEAVTRPTMRFVAIKNAEQQAMLSLHRARQGFVKARTAQANQIRGLLGEYGITIPQGIKYVMKDMLTLLDAPEHELPGAFTDLLKRLHVHLMVLEEQVSDLETQINIWHSNNEYSQRLCKIPGIGPLTATALVASIADANCFRNGRELAAWLGLVPRQHSSGGRPMLLGISKRGDTYLRTLLIHGARSVVRVAKNKSSPTDKWTNEMLNRRHQNVASVARANKNARIVWALLAHGRDYNAEYKIAA

SEQ ID NO: 308183 - protein, 419 aa, unidentified
MLRRLIHKDTLGNRTAADRKVLKLFFWRYMPMNYVGIDISKHKHDVFVISDFGEVVNAGFSFTNDAKGFAQFLKLLTDYGGASNNRIGFESTGNYAINLKLFLEKNGFLFMEINPLLVKEYIKSETLRKTTTDKICARHIAKYLLEKAYKPHQTGFYDNFALKQLTRFRHSLVKTRSKYLVGLTNVLDCIFPEFKPFFDGFSVTALYILAHYPTPAAIANMKSPTYDKLRSVSRGHFSMPQFVELKSLAKNTVGVYQKHYGIQLETLMDLHSQIDCKIDEVETEIKEIIRELNPPTLSIRGVGETSAAVIVAECGDFSRFANPNKLLAFSGLEPGKFQSGTLAHDGKMVKRGSSHLRFTLMNCANTVCLHNEVFAEYYHKKRNEGKEHNVARNHVAKKLVRIIYALETQNISFNPDLLR

SEQ ID NO: 308184 - protein, 320 aa, unidentified
MMAQNDLVVVGIDVAKDKVDACIRAFALRQVFPSTAHGNRKLVGWLRKHKVNKAVMEASGGYEREWRKVLHNAGIEARIVDPKRVRSFALSAGRLAKNDAIDAEMIAWYAETFSGAPSQTLDVAHEELRALVKARKSLLDVKTRLQSQNEHAAPGPVQKAHARILKSLTAEIAKLEAAISAKIKATPHLAERAEIIESVPGLAETASATLLAGMPELGQVSDEIAAALIGLAPYDDDSGKRRGERHIKGGRRWVRNAIYMPCLGAATQNNPVLKAFYQRLIAKGKPPKVALTACMRKLIIILNAMIARRQKWHPTRYAVA

SEQ ID NO: 308185 - protein, 400 aa, unidentified
MDPVIGLDVAKGESQVQAFLQRKETYKQSFKFTHDLPGLQSFHSFYQELEQISGQPPAIIFESTGHYHEPVLHFLEDNDIAYYLVNPVISFEARKTNLRQVKTDKADAYHLGELYYKEDLEIYQKKTEKALNLRLLTRQHSALTDSYVQIKLQFQVALDQVFPEYHTVFSDLYGKLSLNTLLNYPTALDVHKITDEKLAEGMRQFGAKRSHEWFLDKAQQLKLAAKRNPFQSQISHGQLISLRMYIQMLFQYQEHLSKLLKEISVLAKSFEEYRLIQSVPGIGDKIAATILSEIGDINQFENPKKVVAYAGLDPSVFESGKFKASINRITKRGSSRLRQTLYTAVQCGLAKDRNKKLMAFYERKRNEGKPHKVAIIACANKLVHWLYAILKRQEVFVDQV

SEQ ID NO: 308186 - protein, 357 aa, unidentified
MLSSNVKYIGLDVHKEAVAIAVLNGAGKLVMESIVETKAGTLLDFLKGLRGELHVTLEEGTWAAWLYDVLKAHVAELVVCNPRRNALLKEGSKSDKVDARKLAELLRSGMLRAVYHGEHGLGTLRELVRSYLTISKDQRRVMSRLKALYRSWGIPCSGKQVYTPRHREQWLDKITQPGVRRRAELMYQQMDGLSVVRHTVRGELLAESRKHAAVKILRQVPLIGPLRATLLLALMQTPHRFRSKRQLWTYSGLALETHDSAQHRYVDGQLQRSKKPQQIRGLNQNHNHEMKEIFKSTAVSASCCAGPLQDFYQGLLAKGMKPDMARLTLARKIAAITLTLWKKGERFDAEHLKSQAA

SEQ ID NO: 308187 - protein, 346 aa, unidentified
MKQVIRIGMDTSKHIFKLHGVDADEQPVLRKRLRRKEMVLFFAKLPPTVIGMEACGAAHYWARVLSGLGHQVKLIAPQHVKPYIKRNKNDGRDAEGLCEAMSRPTMQFVPAKTEDQQAALMLAGVRQQLITRRTQLSNAIRGYAAEFGLTTGKGLDKIEPLLARIAQDSRVPELARELFAFQGRDYMRRQTELKVIEARLMAWHRTNACSKRLAQIPGVGPISATALVMKTPDPRAFPSGRQFAAWLGLTPKDHSSGGKTRLGKITRAGDEMLRSLLVAGATAVIQQARKARGRPSRWLLDLLKRKPPKLAAVALADKNARIAWRLMATGESYDSARMSGISASAA

SEQ ID NO: 308188 - protein, 388 aa, unidentified
MFKTVERPDAPAAIRVDIGAIFVSLELSRSTWLLTSVSPGAGEKISQHATPAGDLRRLFECLAELERKARARAGKSYPIIVIQEAGLDGFWIHRALEKEGVESHVVDAASIAVPRRRRRAKTDRIDGKTLLRTLMAFKRGEPRVCAMAKPPSVEEEDRRRLGRERKTLIAERVEHVNRIKGLLFTQGAVDYQPLRRDRRARLEALRTGLGDPLPARLKGLISRELDRLELLLAQIKAVETERGALLVEQSRQAPAAAPMLLAFKGIGPEFATVLWLEGLFRSFANRRQVAAYAGLAPTPWRSGSIEREQGASKAGNPRLRATLIELAWLWRRHQPRSALTLWFEDRVKANGGRAKKALIVALARKLLVALWKYVTTGLVIEGAVMKTA

SEQ ID NO: 308189 - protein, 324 aa, unidentified
MFYLGIDVAKKKLDCMLLDTSTGKMKSKGNLPNTAAGFVQLLEWLEEKKAVDPHIVMEPTGMYHEAAALALADAGLTVSLVNPAQLRAFAQGLGVKNKTDKEDSTVLARFGAAQNPAPWQPPSPSARHLKALLARRDAVADDLQRECNRKEANDFSSVPEAVSDSIAESIAFLKAELKRLEKMIAKHINDDPDLRNRKELLETIPGVGPRVSTHMTTLFAGRTFERAEQLAAYLGLVPVVWESGTSVRGRPHMSKAGPAYIRKVLYMPAVVARSCNPHIKALNERLLAKGKSKMAAIGAAMRKLVHLCFGVIHSGKPYDAKFAT

SEQ ID NO: 308190 - protein, 366 aa, unidentified
MKKTSTVRVNGNMIFKGHKLTIGLDLGDRWSFCCVLDEAGEVILEQKLPTTAEAMKQTFERIPRSLIALETGTHSPWVSRLLRELGHEELVAHAQKVQLISKSNRKDDRHDARTLARLARIDPELLGPVRHRSAKAQIHLTVIRARAELVSARTALVNAARGLAKSYGERLHKCGTQQVSRELAVELSVELREVLEPLLAEIESLNERIKEYDVRMEKIARESYPQVELLKQVKGVGTQIALTYVLTLEDPHRFAKSREVGCFLGLRPGRRDSGESQPQMHISKEGDPYLRTMLVQGAHYILVPFGEDSDLRRWGLKLAARGGKNAKKRAVVAVARKLAVLLHRLWVSGEVYEPLRNNHKAMRAAA

SEQ ID NO: 308191 - protein, 446 aa, unidentified
MFANEYSGHADKLLAIFLSKNVECIPIPDEKELVMTATNQFAAHAGLDWADKKHDVCVQFKNGERVFHVIEHTAEALDVWLTELHQKVKGRIAIAVELKKGPVVYALQKYPFITIFPVHALSLARYRQAFSPSGAKDDPQDAELALELMLRYPQKIKAIEPDNADIRLLQQLVEQRRQLVEDKRRFVNRIINTLKQYYPQPLEWFSHRGSLLLCELIIRWPSLQQLKRARRDTIRNFLNAKGGRAIALTEQRVASIDNAIPLTTDPSVIEANALMATALATQIKVVSEIIKTYDERIEALFDTLPDAGLFKSLPGMGPCMGPRMLAALGDNRDRFNSAEEIQNYAGVAPVTERSGQKSWVHWRWQCAKFVRQTFVEWAAKTVTSSYWARLYYQGLREKGKSHQSAIRALAFKWIRIIYHCWKTRTQYDEAKYLLALEARHSPLLKP

SEQ ID NO: 308192 - protein, 321 aa, unidentified
MSKYSETYGVDISKDVFDVANTTGFYRQYPNTVTGFRKFIKELGKSAIVVMEATGYYHYCLAQFLFESGQPVSVVNPLSVKRFIQMRLSKVKTDKSDAKAICDYALINPVPLYTGKDQNQAESLQLLRLLELYLKQRTQLKNKIHGEQALGIPSKAVFRSLNRSKRTLDKEIKSLETRLLSLVKEEHQQQLTNLKSIPGLGDKTAALLIVLTDGFTKFETASQLCSFAGTTPTIRQSGSSVRGKSRISKMGNQKLRNLLFLCAFSASKYNTACRKIYERIIAKGKSKKLALIAVINKLIKQAFAIAKSGLPYDPNYATKLN

SEQ ID NO: 308193 - protein, 409 aa, unidentified
MEQLVERVAGLDVHKKTIAVCVRVPGERGERAQYVRTFGTTATELVTLRDWLEAHPVTHVALESTGIYWKPVDYVLEEVMTCLLVNAMHVKKVPGRKTDVQDCVWLAQWLEHGLLRGSFVPPPPLRELRDLTRYRKVLLQERTREANRLHKVLEDAGIKLAAVATDILGVSGRAMLQALVGGTTDPDVLADLARGTLRKKLPALRQALAGHFRAHHAFMVSQHLAHLEYLDEAVTTLSTRIGEALAPFASELARLDTIPGVAQRTAEVLIAEIGVDMSRFPTAQHLASWAGLCPGQNESAGKHKSARTRSGNKWLRVALIEAASMACRTRNTAFAARYHRIARHRGHKKAVVAVAHAMLVTAYHLLARQVDYQEPGADYFDRRHPERATRRAVRALERQGYRVTLERAA

SEQ ID NO: 308194 - protein, 342 aa, unidentified
MTAIGIDTHKATLAACAVDELGRAIGEATFANDPAGHVAFIAWARSIASEATIGIEGSSSFGAPLAWAVHHARLSVREVPPHLSRTERQRTRRPGKSDPGDALAIARVTARETNLPPIRLPDRTSELKLLLEAREDLVAETTRVRNRLHAHLLALVPGYGGTVANLVAARHRITVGRLLRGNTAVQAELARALLARLARLERETGALTRRIGALVDGHPLLGLPGAGPITVARLIAEVGDVRRFRTADAFAALAGVAPIPASSGQIQRMRLNRGANRQLNRALYVIAVSQSRFHPPAKAYVTRRIEVDGKTWREAIRALKRLLVRPVFRLLVQGSIVPAEAA

SEQ ID NO: 308195 - protein, 317 aa, unidentified
MRRLSEALRFVGIDVSKDRLDVHVLPEGRAFSVPHTRRGLWRLIAELGAAEPALVVLEASGGYERACADLLAESGFAVAVVNPRQVRDFAKSLGRLAKTDRIDAAVLALYGERLRPTGRHLPDAARSRLSALVARRRQLMAMHGGEARRLDQVADKDLRRDLKRHLRWLAKEIAGLEQRVTQAIAAHPAWAELAARLTSVPGVGDKTAATLIAELPELGTIEHKKITALVGLAPLNRDSGKMRGKRTIWGGRRQVRAALYMAALAAGRFNPKLAAFRQRLLDKGLAPKAALIAVARRLLTILNALVRSGQSWNPNQA

SEQ ID NO: 308196 - protein, 402 aa, unidentified
MTDRPLVWVGIDVGKATHHACVMDPTGKIVFAQKVVNDQAAIEQLVARATKTAHEVRWAIDLTSNAAALLIAVLIATGQQVVYVPGRVVNRMAGAFGEGKTDAKDAKVIANTARMREDLTPVTVTDELVVELTRLTAHREDLMADWVRGINRLRDLLTSIFPGLEREFDFSTRSALILVAGFCTPEEIRAAGVEGVSVYLTEHGAWRKGIPAMVDTALAAAAAQTLRLPGEATTTVLVKKLARQLLELDRDIKNTDKLITSVFRAHPQAEIIESLPGLGPILGAEFLVATGGTLAGFAGSGKLAAYAGLVPVPKDSGRVSGNNRRPKRYNRRLRRVFYMAALSSLKVSGPSRVFYDRKRGERMIHTQALLALARRLVDVLWALLRDGRTFTPVAPPIATAAT

SEQ ID NO: 308197 - protein, 439 aa, unidentified
MRKRDEVMVFPNAAGIDVGASSHWVAVPPDATADSVREFGAMTGELQAMADWLLGCGVDTVALESTGVYWIPVFEILEQRGLKVWLVDARQMKYVPGRKSDVQDCQWLQKLMSLGFLRAAWRPDGEVCVVRAVARQREVLLAEQASWVQRMQKALVQMNIQLTEVLTDVMGMTGQAIIRDIVAGERDPKALARHRHGRVKASAEEIAEALTGNWRDEHLFVLTQALAMYDDITRHLSECDAKLQALLTDLGQSKVDLGKVPRAGSKLRMEFDARQMLANWAGVDLTRIDGLGVTVVLKILSELGPDLSRFETVKHFCSWLGLCPGTKISGGKVLSAKTKRSANRVRQALKMAAMTLSHSDSALGAFYRRLCSRMDKPRANTAVAHKLARMVYFMLTRGEAFVDQGQQHYEEQQRQRSIAALKRRAAALGFEINPASTPA

SEQ ID NO: 308198 - protein, 369 aa, unidentified
MTKNILFIGMDVHKESIEIAIADGENTEVRRYGKIGGTHDAMRKTLSKLVSLGKPLHFCYEAGPCGYELYRYLVSEGHDCWVVAPSLIPKKAGNKVKTDKRDAIQLARLFRAGELTPVYLPDREDEAIRDLSRAREDAMLIQKSARQRLKSFLLRHDIRYQGKSSWTEAHLRWLADEVRCPSPAQQIVFQEYVNTVTEAQQRLQRLNEQIEVFVKQWRLQPVVEALMSMRGVKMVVAVTVISELGDLSRFDNPKQLMSFLGLTPSEYSSGQRQTRGRITKMGNGHVRRILIEAAWCYRYPAKVSPEIQKRQANLPLPIRDIAWKAQLRLTQRYQHMQRKGKPHNITVVALARELAGFMWAIANEVKYPR

SEQ ID NO: 308199 - protein, 373 aa, unidentified
MDYTTVFVGMDVHKETFSLCCYTNEKEKVEHERKVTGHYSKVLNYIDAMRTYYGDDAIFVCGYEAGCLGFTLYHQLTTHGVRCIVIAPTSIPVPAGQKKMKTDKRDAALIASCLAFHSYREVHVPTDGDEQVKEYIRMRDDHKLMLKKIKQQILAFCLRHNLQYDATKNYWTQAHLKWLRSLKPDMVYKEILDEYLVTFSYLTDKINRFDQRIEEFASQDEYREKVAKLSCFLGIKTVTALSTIVETGDFNRFSCAEKYASYLGLVPGENTSSDDRTNLGITKAGNRHLRRLLVEAAQSYSRGQAGHKSKLLADRQKGNSPTVIAYADRANERLRRKYYRMVLSRNKRSNVAKTAVARELACFIWGMMTDNIA

SEQ ID NO: 308200 - protein, 325 aa, unidentified
MHYIGIDVSKAKLDCLWLRDAEKNKVKTKVHENSKSGHGRLIEWLDKQVASPRENVFITMEATGVYHEYLAHTLNKAGFKVSVVNPARTKEFGKGLGIQHKTDKKDSYVLALYGCRMNPKLWCPEPPEISELKVLIARIEALEGDLRREENRLEKTVYNGSTDIVIESLNNMIQHLKVEKARLEKEIDDHINRHPHLKKDRTLLESIPGIGPVLSRIMLSVIHSRPFERASQVAGYLGLIPVQNESGVFRGRSRLSKTGPSKVRSKLYMAAIVASQHNADVVRQKSRLLEKGKTKMQALGAAMRKLVHICFGVIKTQTKYCPQAV

SEQ ID NO: 308201 - protein, 416 aa, unidentified
MKKGQDTRGYQRYMALDIHREYILVGAWNKEQDWVLTPRRVSIEKFAEWAKKNIRTGDIVVLETTTNVWSTYDIVVPLASRVLVANAAEVGEIANARVKTDKEDIKRLLKLLIGGIVPEVWVPPMHVRELRAFVSYRSRLVKTGVMIRNRLQSLLHKHNLPLSETGLLDQSWWEGQKNISALEKLQIRQELALLQEVEKLKAAVDEELQRQSTSSIWSKQALQLMQLPGVGFVVAMTVISAIGDISRFETAKQLVGYAGLGAGVHDSGKTHKEKKITKKGRRELRWAMVEAAWRAVRMSPFWKAEYEKHLKRMRKPNQAIVVIARKLLTAIWHVLSKEETDIYASEEDLAYKMLLLSWSLNEDVRQGLTYKQFAKYALMQLGVETDITRFVRKDVPRRLAPREEVLARMTELGLTV

SEQ ID NO: 308202 - protein, 380 aa, unidentified
MKYIKTLGIDLAKNVFQIHGADGKGKCVERKRLTREKFIDYMSNLPTCTVAMEACTGANHWARKFRAMGHTVKIISPHFVKPFVKSNKNDRNDAEAIVEAASRPQMRFVAIKELEQQDIQTIHRVRELIVKQRSALANQIRGLLAEYGITIAKGIGHIRKQLPNILSEENKGLTARSREIFSEQLERFKSLDDQVDTYDKRLGTIAKQDERCQRLMEIEGVGPLIATAAMSTIGNAKVFKNGRELAAWLGLVPGQRSSGNKIHLVGISKRGDRYLRTLLIHGARAVVYTSPKHLDPRNQWIADKVKKKGSNKTAVAVANKNVRVIWALLTSGERYQKFKVGMRKYFSCATSGKKEVNTPNCSAEESLHPAFAAQSSAIGI

SEQ ID NO: 308203 - protein, 351 aa, unidentified
MIIIGVDYHPSDQYIALVDTETGEYEERQLNHREGEAEKFYRELATRGVSVRVGIEATGYSRWFERLLAELGMELWIGDAAKIKTKRVRKQKTDREDARLLLRLLRENNFPRIWVPSPENRDLRQLLWHRHRLVQMRTRIMNQLQALAMNEGQRRKKKLWNEPGRAQLERLPLALWASRRRKDLLELLDRMNPTIEELTRAVEQEARKRPEAQRLVTHPGVGPITALAFVLIIGTPERFPCGKQIGSYVGLIPEEDSSAGHQRLGHITKQGSSLLRFLLVEAAQAAARCDADWRRRYVHLAMRRQRNIAKVGMARRLGVRLYWMWRNGWEYAEWVKFSSHAGQLGSGHGVQ

SEQ ID NO: 308204 - protein, 355 aa, unidentified
MIMIGADSHKRSHTVVALNEVGRRLGQKTVSTDIDGHLALLQWSGQFDDVQFALEDCRHLTRRLEGDLLAAGQRVVRVPTRLMADARRAGRDRGKSDPIDAEAVALAALRHPDLPVASLDGASREVKLLSDFRRDLVRQRTQVCNKIRWYLHELDPSLHIPSRGLRRRCVVDRIARELDRFDGVVARLARELVARCADLNRQITGLESELRTLVRQLAPSLLAVRGCGVLSAAVLVGETAGVDRFKSKGHFARFTGTAPIPVWSGASQGKVRLNRGGNRLTNTALHMIAITQSRTDGPGRTYLEKVQARGKTRTEAIRLLRRRISDAVFAALRADIELIKLAVPSTPHHTMPSAA

SEQ ID NO: 308205 - protein, 397 aa, unidentified
MIAVGIDISKSKSTVAILDSYGAALVTPFNMAHTQPEMNALVSRLKAFDEPVTILLEYTGHYHYPVLKKLQDEGFSVCVVNPYQMKKYGDMEIHRAKTDKKDAIRIATFALEKSYRLVPYSFMEQKYEDLKFLSRQYQQRISFVAKLKVQLINLLDQTMPGITKILELRSRNPEKCALLLFIKRFKSFDEIQRIGKTRFLSAYTTLMKKTPDRYAPQKGLAIYELARESITTRGEDPYIWAAQDQCVDLLSTAQNAADEIITQMQNIAETIPEYKVLRAMNGVGDRLGPVILAEIGDVRRFHSAKALNSFAGNDAPPYQSGQFESRNRHISKRGSSALRKACFEVMQALKLTKPQDDPVYQFILKKEQEGKPYNVAKMAGVNKFLRIYYARAMELYR

SEQ ID NO: 308206 - protein, 352 aa, unidentified
MARKRTLSTLDTSIAYEAVGLDLAKEDTAIAAFGPDHEGPYLIDRMPYDKLYELLADMAPTLVAMEPCSGAHQIAEQIQELGHEVMMISGRHVQAWVKDHCNGQKTDLNDAFAILNLAYDRWLTPIRGKTREECRLLALQASYRQLKGQRTKTMVHVEATLHAWGFPIRTGSFNQKALHELIDANREAFGDEVVETLHLMINRVHDLDHDIATVLKLLTEATQRDPRASLLRSIPGFGVLTTSRWCAVVGDIARFDTPKQTMAFIGLVPNNRITGHHTETSSGREARGQGKMSKRGDKMLRSLCILGAGALCLMVRNDRLPDCPFVASIKGRLHRLDLGSKCLFMSQQSWCA

SEQ ID NO: 308207 - protein, 472 aa, unidentified
MTPRKPGKGKSFPKVPNASDPLKQIHEHAAGIDAHSKEHFVAVPPGSTPAGFVNPSPNLPPFVRVFGTNTADLEALVLWLQQCGITTVAVESTGVYHEALVAIVQKHGLAIIVVDPRQTANAPGRPKTDVLDCQWIQRLHSYGLLRASFMPSPEIRQLRAYQRQREMLVRYAAAHVQHMQKALELMNCKLPEVVSDIVGATGMLIIKAIVRGTRDPLRLAKYRHENCKASEAAIAAALQGTWQEEYVFELRQALKLYEEYHRRLSDCEAQIEACLQKFPDKSEGKALAPKPRKRSKAKNAVRFDGRTLLLKMAGVDVTVLEGIDETTGLVLLSELGSDLSPFPTQGQFTSWLGLCPNHRGSGGKIKKRQVKRSASRANQAFRMAASGCHHAKNAMGAFYRRIAARSGGAKAVVATARKIAERFYRLLTKGGDYVRQDMAHYEQTYRTKLTKNLMQRAQELGYHLVPITPLIS

SEQ ID NO: 308208 - protein, 463 aa, unidentified
MAQKVQSGEGGKADKPKIDWKALDIVHPAAAGIDIGGSEHWVAISPDRDAEPVRRFQCFTQDLQRMADWLWDHGVRSVAMQSTGVYWIPVFQILQQRGLEVYLVNARHTKNLPGRKSDIAECQWLLKLHTFGLLNNSFQPSDEVRRARTLWRHRGGLVAQASSAIQRIQKTLTEMNIQLCNVLSDLSGASGMAILKAILAGQRDPRALAELADPQVKAPKEVIAKSLEGNWREELLFVLEQEMALHHAYREQISACDRQLKQQLRSMAPRVDLEGQPLGPRPKGKRASGNAPKFDLRTELYRITGVDWTRVDGMDVVVAQSVIAEVGTNLDAFPTERHFASWLGLCPRNETSGGKMLNRRTPKVVNRAKTALRQAATALLRSQSYLGAQYRRLRTRLGAPKAITAMARKLACLFFRLLKQGQQYVDKGIEYYQQRHRDQQMRSLLKRAKQLGVQLILPALANH

SEQ ID NO: 308209 - protein, 408 aa, unidentified
MDLTPMHKRVIALDVHQAKITACAVVEHDDGRVEVTKRDFGAFKRDRRALAQWALEMAPEVVVMESTGVYWKSPFAALEAVGLIAWVVNARHVKAVPGRKTDMADAQWLATLARAGLLRASFIPPVQMRQLRLVARQRQKLVGMCSAEKNRLHKVLVDAGIRINVLVADIHGQSARAMVKALIAGQPMHEVLDHKGRLRASRQELCEALSTEQFSAVHRFVAQEIVQHIEQIEQRIARMDQYLLQGLQPWQPQLRLLQTLPGIDEQGAAMLLVEIGADMSVFGSAERLASWVGICPGNNESAGKRKTGRIRKGNAWVRRLLCEFAQAAARTRCALKAKFDALTIRKGHKKSVVALAHKMLRTIYAMLSNASHYQDKEVDYEALNVQRNAPRWIKMLRKHGFIATPAAA

SEQ ID NO: 308210 - protein, 425 aa, unidentified
MPNRIAGIDVHKKMLAVVVADIAVEGEYKFSRRRVGTRPSELRALAEWLVAEGVDEVVMESTAQYWRPVWEALERSWAPQCRARPGAGAQSGSLHLAQAKSNRGARGRKRDFPDAERLVKRLVAQELTLSFVPEPEQRLWRTVMRRKYQFTRNRVQLQNRLESLLEEAHLKLSSLVSDLLGLSARRMLQALADGETEPARLAELADRRLRATPEQLCDALGACADLNPVYRKLVQMTLEELRLLEEQSAQLDEEMAHLLGEHQAAVQRLAEVPGLGVDSAQQIIAEVGASAETFPSAKHLASWVGVCPGEHESAGVSYSHRSPKGSRPMRRLLNQAANAAVKTKGSFFQLVYRRLVPRLGHAQAIWAVAHRLCRLIWKILHQGVDYEERGPDVSRARSKRRIAKMIRDLRKLGYHIEPSLRGDPA

SEQ ID NO: 308211 - protein, 308 aa, unidentified
MEVFVGIDVSKDRLDVHVRPGGEAFAVARDGEGLTVLVGRLRDLAPRLVAVEATGGFEMTVSAAIGAAGLPLAVVNPAQVRHFAQALGKRAKTDAVDAEVIACFAEATRPEARPLPDAETQLLADLMARRRQIVVMIAAERQRAPRLPKRLRRSCERVVAMLEKELATLDQDIDTSVRGSPAWRAKEDLLASVPGIGSLTARVLIAELPELGTLDRRKIASLVGLAPFTRQSGQWHGKAFIGGGRRSVRASLFVATMAAVRHNPLIRDFRNRLLAKGKPKMVAMIACMRKLLVILNAIAREQKPWQPA

SEQ ID NO: 308212 - protein, 327 aa, unidentified
MMFIGIDISKEKIDLSWLRDQLTNKIKTKVFKNKHQDFEKIEKWLLNTTKSVASELVITLEPTGVYHEALMYFLHEQGFNIILANTGKAKKYADALNIIHKTDKSDATMLAHYGCAKHVVVDYWQPEALEVRELKALIRRLDALESNRQREANRLEASEFSNVSARVRQSIKVTIAFLDDEIKQLKSDIDDHIDNEPGLKRNRKLLESIPGIGPVLSRELTYLFAAKKFNKAKEAAAYCGLIPRHNESGKLKGRTTISKLGPARIRCKLYMAAIVAGQWNKRIKRHKLTLINNGKTPMQAVCANMRKLIHICFGVIKNQEAFKLQES

SEQ ID NO: 308213 - protein, 397 aa, unidentified
MYYLGIDIGKKTHVASLIDEKGKVLVRAVKFENSASGVEKILGRISAISQNTEEIAVSMEATGHYWLAVYASLTDKNFSVSVFNPYQIKSFRGAYTNRNQKNDATDSVLIAQYLRVFGSADTVLPQDDLLSLKQLTRFRTHMVEQISALKNTAIGLLDKIFPEYHKAFSDVFGVTSKQILLNCPTPEDIIKINSKKLLNIISKNSKGKLGKPTADNLKSLAKSSFGVKLTVDACSFEIKQIVNQIIFIESQIDELNAKIKQIYDSLDSHLKSVPGIGSTLAPVILAEIGDIANFEKPSKLLAFAGIDPSENQSGEKKSTNEKTSKRGSPYLRHAIYTAALVAMSNDETLRAYYDKKIAEGKHHFVAMAGISRKLITIIFHVLKQKRDYIPFSLKSAK

SEQ ID NO: 308214 - protein, 435 aa, unidentified
MEEVEDEPLFCDRVAGIDIGKARIMVTVRVTSETRMRGRQQETREFGTTRRELLALADWLRTWQVERTGMESTSDYWKPVYFLLEREGFDCTLYQASQVKALPGRPKTDKQDSVWLAKITEQGSLSGSFVPPEEIRRLRTHTRYRRKLIQMRTAQKERCEKLLEDAHFKLSSVISDIHGVSGRDMLAAIIAGERSPKVLADKARGVMRRKTSQLEEALDCSFFTPEHAFILQMMLDSIDQLTGQITVLDEKITEMCKPYEQQIAQLDDIPGFGITTAQDLIAEIGIDMSVFPTAGHLASWARQTPRTTESAGKRKGKNATGRGNPYIGGTLGEASISVGRTQTFLGVKYRRLCTHMPKKKAQTAIMRTQLVITHALLSDPDARYEDLGTDYYERKADIRRRARTHVRGLERLGYKVTIEAADPETGELLPVTTTR

SEQ ID NO: 308215 - protein, 347 aa, unidentified
MKRIAVDLAKSVYQVAESIHVGRVDRRRRLDPEAFRRYVQEQPEPVEWVMEACGTAHYWGRVAQARGHRVVLLHPRYVRPYRRRNKTDRNDCDAILEAARCAGIHPVPVKSHEQQQVQQLHNLREAWKKTRVQHINLLRGILRELGVAAPSGTQAFLRQACELIERPEVCALRGALQMVLAEISLCEQSMRDSEEQLARWHADDDIVHKLDEVSGIGLLTASALKTAVGKPERFASGRHLSAWLGMTPNEYSSGERRRLGCISCKGNTYVRTLLIHGARAALLAAKRCQTRTPERLTQLQRWALQTAERIGHNKAAVALANKLVRICWAVWCHERRFSGDWRSARPA

SEQ ID NO: 308216 - protein, 343 aa, unidentified
MEIVRIGLDLAKNIFEVCGVDMRDHVVLRKTLRRDAVPQFFAELPPCLIGMEACSSSHYWAKVLTDLGHQVRLIAPQFVTPYVKSNKNDRNDAEAICEAISRPSMRFVPPKSSEQLEIQAVHRIRQRLVSSRTRLVNQIRGLLAEHGVVIGRDISRLRRALSQIAEGSDRNLGDLMQELACDIHHELPALDERISSYNRRIRDLFRTNEMCQRIGKIEGIGPITATALVAAVGDQSCFKNGRQFAAWLGLVPKQRSSGGKSRLFGISKRGDRYLRTLLIHGARAVLGKADGKQDARSAWINRMRERRHPNVVAVALANKNARIVWSVLSKNEEYRGPEMIQAA

SEQ ID NO: 308217 - protein, 408 aa, unidentified
MEVLHARCCGLDVHKKTVVACLLTLRLDGQAVREVRTYGTTTGELLALMDWLVANGCTHVAMESTGSYWKPMYNLMESTFELLVVNAHHLKAVPGRKTDVRDSEWIADLLQHGLIRPSFIPSRPERELRELTRYRTTLVRERASEVNRIQKVLEGANIKLASVASSVVGVSGRAMLSAMVAGVVDAEAIAEMARGKLRNKIGALKEALERRLGPHQRFLLAAQLRHVDELGKLIDEVSAEIEERLWPFEEDLARLTTIPGVGRRTAETLLSELGTDIGRFPSARHLASWAGICPGNHESAGKSGTGRTRKGSPWLRSALVEAARAAARSRTYLGAQYHRIAARRGGNRAAVTVAHSILVIVYHMLSTRRDYHDLGGNYFDERHREQVSRRLTRRLEALGYSVSLSPAA

SEQ ID NO: 308218 - protein, 457 aa, unidentified
MGDTKKTRSAEGNALPVVHRHAAGIDIGSTFHMVAVRSDVDPQPVRRFESFTGDLHRMADWLTQAGVTTVAMESTGVYWIPAFEILEARGFEVLLVNARDVKNVPGRKTDVTDAQWIQRLHEHGLLRGSFRPSQQVATLRAFVRHRERLVEAAASAVQHMQKALMQMNVQLHHVVSDMTGVTGMHILRAIVAGERDPAVLARLRDVRCQATVETIQAALTGNYRPEHVFALQQSLELYDVYQEKIRGCDAKIEEALRLLHDQGSVRPDRRPDARPSRSKRPQKNEPRFDIRSALHTLLGVDLTQIHGIGPYAALKLVSECGTDMHRWPTAKNFTSWLTLAPGSKITGGKVLSSKTRRSSNRAAHLLRLAAVSVGRTSTALGAFYRRLARRIGKAKAVTATARKLAILFYNTLRHGAAYVDPGATYYEERYRQRTLSNLRRRAHSLGYQLVAATPDGA

SEQ ID NO: 308219 - protein, 348 aa, unidentified
MDTIGVDLHKRETQLCIGQADGTITEQRIVTSRERFTAVLGQRPPARILVEASTESEWVACHLESLGHEVVVADPNYAPMYATRSRRVKTDKRDARTLMEACRAGTYRPAHRLSAARRHVRAELAVRDAVVRTRTRYVALAKALVRRDGLRVPSSAAERVGAHLAALAGSPPLAAELAPLLTLLPPLHATIAAADQRLAELEHTDPSVALLMTAPGIGAVTASALVATIDDIQRFASAHQFEAYLGLVPGERSSGELRRIGPITKAGNRRARWLLVEAAWRILRSTDAAGAPLRGWARPIVARRGSRIAVVALARRLAGILYAMWRDGAPYEAGKIRRPRSARQSPAA

SEQ ID NO: 308220 - protein, 397 aa, unidentified
MISVGIDISKGKSTVCILRPYGEIVKNPFEINHSENDLQALSDLILSFKDEVKVIMEATGHYHYPILNYLISKGIFVAVVNALLINKYCNISLRKGKTDKKDSIKIANYGLDLWNRINCFEPKQRIYEELRLLARQYYQTVSIKVKCKIRLLELLNQTMPNIEKLLSNNTKTPGKCKLNDFVKHYWHYDNIKKMSERKFATSYNCWCKKMGYQQSESKAKEIYVFAQNGIPTIPATNASTKMLVTESVRMLEEIEHSTVNILSQMEELAKQLKEYETVLSMNGVGKKLSVLLIAEIGDISRFHSSKALIAYAGIDSPPHQSGVFTAKKRRISKRGSKYLRNIGYEVMTAININKKESCPIFQFMKKKMDEGKAAGVAKIAGLNKFLHIYYARVKELG

SEQ ID NO: 308221 - protein, 377 aa, unidentified
MHSENIAAYVGLDVHKETLAVAIAAPERLGEVRYYGTINNEAQAVRRLFQKLQGLYGNILSCYEAGPCGFGLYHQLTAMNIKCQVIAPSRIPKSPTDRIKNDHRDAISLARLLWAGELTPVWLPDLTHEAMRDLIRARAAAKRDSRVARQRILSMLLRTDKRYAGKHWTGKHRTWLANQSLSQPSQQIAFQHYCQSLEQIEDRILQLDQEISRLLPEWSLCNLVCQLQALKGVGQLIAITLVAELGDFSRFSNPKQLMAFLGLVPGEYSSGNSIRPRGITKVGNSELRRLLYEAAWSYRTPAKVGAWLIYYRPDSVTQYSKDIAWKAQQRLCSRYRSLTAKGKKSQVAITAVARELTGFMWDIALAAQSSFSQQKQN

SEQ ID NO: 308222 - protein, 357 aa, unidentified
MNVTHYIGFDVHKKTVNYCVKTADGQIVEEGKLTAARAKLREWAAARPCPWQGALEATLFSAWIYDTLKPFAERLLMGHPARMKAITAGKKKSDRLDARTIADLLRCNLLPACYVLSPEMRDRRRLLRYRNLVVQESVRMQNKIAGLLMETGTPFVKEKLHGKKYFASLIQTLEEVPESVKDLLRMSRGTMEMFQSTQKRLVQSLLADRKLGPRVERLASIPGVGPITALTWALEIADPQRFSSNSDAMSYCGLTSALRSSAGKQQRSPISKQRNRWLQTALIEAAKLAPRWNPQLAAVHARALERGHRNRATLQVARKLVAYLLAVDKSGQPFQLRTVPADQARLINQEAAAAPAA

SEQ ID NO: 308223 - protein, 355 aa, unidentified
MCHHRVGEPNHERAAHVELKRISIDTSKHIFTIHGVDQQERPVLRREIRRTQFASFFAKLEPTEVALEACAGSHHWGRLLSRMGHRVKLIPPQYVKPFVKRSKNDRNDAEAIGEAASRPTMRTVPLKTTEQQAATIIVKHREMLVGQRTQAINALRGHAAEFGIIAAKGCPNVTALLAVLAADETVPASARAMFEEMGQHVADLNTKIEESDRQLLDQHKVNPVSQQLAAIPGVGPITAITMALTVDPSNFESGRHLAAWLGLTPREHSTAGKHRPGKISKAGNERLRQLLVVGAMSVIRVAKPGRPSASGWLLQLLERKPRKLAAVALANKMARIIWAMMARGEAYRRQPATTA

SEQ ID NO: 308224 - protein, 315 aa, unidentified
MSAEMNVGIDVAKATLDVAERPDEVGWGTTNDDAGIGTLVARWTVSRPARIIVEATGGYEMRLVTALVEAALPVVVVNPRQSRAFAKATGQLAKTDKIDARTLAHFGEAMRPAVRPLPDAQTRALSALLARRRQLIDMRTAERNRLETVDRPIEREIQTHLRWLNKRIDAMDRQLDKAIKASPVWRQKDTLLQSVPGVGPTVSRTLLADVPELGTLDHKKIAALVGVAPFNRDSGTFRGRRCIWGGRASVRTVLYMAIISAAQHNPVIRAYHQRLMAAGKPFKVAQVACMRKLLVILNAMVRDGAHWQQNHALAA

SEQ ID NO: 308225 - protein, 339 aa, unidentified
MNEDTVIGLDIAKQIFQVHAVEARSGEIVRTRLRRTQVLEFFARQAPARVALEACGSAHWWARQLSALGHRVTLLPPRAVRPFVLRNKTDAADAQAIWTAARQPGLKAVAVKTPLQQGILALHRLRSQLLKMRIMQSNALRGLLYEFGVILPESYRAMRQQLPARWADLERELPAFLLESLREQWTRVGELDAQIAALDRRLERICQHDPHCEALSAIPGVGVLTATASVAAMGDPASFRSGREFAAWLGLVPRQTGTGGRIRQLGISKRGDAYLRTLLMHAARTVIVHRPHSPWLSALLKRRPFNVVVAALANKLARTIWAVLAHGRSYQPPANVALA

SEQ ID NO: 308226 - protein, 496 aa, unidentified
MTFLSKEARQLEGVRYFGIDLAKRETQIAVLDMDGKQIEQKRFATSRENFLAIARELREGDTAALEVTTNSTSIARLIRDNSPARVIVSNPIKTKIIAQAKIKTDKIDARVLAELARVGYLPEVWLPDEDTEALRQFITDRTSLVRRRTECKNTIHSILHRNLVRQERSDLFGATGRRWLESMIKGTAALSTPVPELDRMRIGSLLNEIERIDALVADLESVIASYVASRPHLKEQMDRLLSITGVNLVVATGLIATIGDISRFSDKKRLAAYFGVVPSTYQSGDSSRHGRITKQGRAEARWLIIEAAEILRRSPGPMRALYSRIQRKRNHNVAVVAVARKLVELVHHLLTHEEDYIYRLPRLTQEKRARWRYLAKKKIGVEIKSAASKAAGRSALYGTGIGIQGRKLKSQIAKQAALDAERLYSAIVGQRTARLTDKNAPLISTDNLVFDPTRPNETDWERILSQSTERLLARELARSNARLCSKRSITDKENIA

SEQ ID NO: 308227 - protein, 358 aa, unidentified
METRERRSKDFTNKNIFIGIDNHKKNWKVNILCEAIDHKTFTMDPAPEILNKYLHKNFPRGNYFSAYEAGYCGFWAHEQLEQLGIKSIVVNPADVPTMDKERRTKNDKVDCRKIARSLRSGELMSIYIPSREVQEDRTLLRLHVQLTKEQTRIKNQIKSILGFYGKTIPEEKTNSNWSRAFIRWLETIEFKTESGRLALNIQIERLLSIRKTIASLLIQIRQLSKTDRYRESSELLMSISGIGILTAMHFLVEIVDINRFTNLDELSAYIGLSPGEHSSGDKIITGKMTKRGKSHLRYLLIEASWIAIKKDPALMMAYTDYKKKMIAQKAIIKIARKLLNRIRFVLKNKQRYEISVTN

SEQ ID NO: 308228 - protein, 369 aa, unidentified
MKFYTLKAAPAASAVELKNNHKSTKAKRILVGCDVHLRGYQGARKVDEGAIGVVDNFRSEEALLLYIEKQRQQAEQVVVVYEAGPLGYTLYRKLRATGVLCYVCAPDSTPQRKKRRKNNQIDARSLTSKLFNYLNGDQHALQLARVPSEAQEQQRMASRQHDQLVEERKRLGAKGNAMLLSQGMGSWSNWWRPKAWSQLSRVAPPWLLERLQIWVDVLKILDEKISQAKAALARACSGPRPKGVGALSQMQLQSEVLDWSLYSNRRKIACLAGMVPSEWSTGDKETRGSITKVGVPALRRIIVEMVWRMVLFQPQYQPVQKWQEVLKGPNPALKKKAVVAIGRQLMVDLWRLQTGRVTAQDLNLIMVEN

SEQ ID NO: 308229 - protein, 350 aa, unidentified
MEEVSVIGIDLAKNVFVLCAQTASGEIAWRKRLKRRAFKQFMAATAPRCLVAFEACGGAHYWGRFLTALGFAVKMMAPRAVKAYRQGPHKNDWRDAEAAAEAGSRHPVRAVRVKSEAAQAVQVLVRLRALQIRQLVQTGNHLRGILNEFGIVLPKGHKRLREAIARLRQEDPASAALPASVRRTADRLCLQLAEQARRVTEATSELEAAIKDEEDCRQLRTVPGIGPINAAALSVALEAPQAFPNARAFAASLRLVPRQHQSADKQIMLGIGPLSANETRRHLVLAGQSLITMVRRFQQPPADKFLLWVYRLDRRKHRNVAAVAVAAKLARIAWALMAKDQIYQPRRATA

SEQ ID NO: 308230 - protein, 409 aa, unidentified
MNSLFVGIDVSSKSNVVYIMKPDGAKHSSFTVQNNLSGAKILSQRVVSAMINSSYDNVVLGLESTSVYGDNLVCFLREDFDLSRFERKIHVLNAKQVNKFKQSYPDLPKNDFVDSFVIADNLRFGRIASEVYMDDYRYKALQNLTRARFFAVQNLTKEKQRFLNYLFMKFSTLTTEKVFSNVFGATSLAVIEEFLTVDEIAYMDLDMLIEFINHKGKNRFPDSEATAKALQAAARDSYRLPKTVNDSVNQVLAISMSSIKAIGEQIKAFDKAISEQIKIIPNTLESIPGIGAVYAAGIIAEIGDINRFDNQAAVAKYAGLAWSQYQSGSFEAQNTRLIKSGNRYLRYYLIEAADSVRKRNSEYANFYNLKFKEVNKYQHKRALALTARKLVRLVFALLKTNRLYIPSER

SEQ ID NO: 308231 - protein, 432 aa, unidentified
MEKIRNNVSGIDIGAKKVFTAVEGQPVISHFTFTEDFLKLRDYLIRHKVESVAMEATGVYWVILYEILEEAGIDVWLVDGRQTKQVPGRKTDVKDCQWIQELHSYGLLNRCLVVEADIKELRSYLRLREDHIRSSSMHINHMQKALTQMNIRLKEVLSQLHGKSGIAIIEAILNGERNRDVLVNLCHVSILKGKKDLVYKSLEGRYTESGLFALKQAYDAYKFYQHQIQQCDARISTVLNRIGKSGQGQNNDQKRKPIRHHKPQVDHLGSNLLNIFEGKDATLISGITDYSWVQLLSEIGNDLGKWPSEKHFTSWLGLSPGQNDSGGKKRRVKKKGRPVAGQIFRTIAQGLINSKNIAIGAFGRRLRARKGASIAIKAMARKLAILYWRIMQKGLDFVEKGIKKYEEQLAAQKLKTVMRLANELNLDISHYN

SEQ ID NO: 308232 - protein, 423 aa, unidentified
MNRMHSTPAGAVLVAIDMSKHRQEVLIERPEGGRRRRLTVMATKADYDGLAELLEAIGRPIVVGFEATGNYHRTLAHRLLTAGFELRLISSVALARTREALHNGWDKNDPKDAQVILHMLRIGATQRYVDPLAAGINDLQELSKTHEAISKAKMQTWHRLLTHYLPLYFPEIASFAGNSRSDWFLALLERFPTPASITTLDPDDFAAEAWPLVGRKVSKARLINDIYATATTSIALPVQLDSVAIAMFRMVIAEARSLIHQRDRIEAIAHATLAEHRDYQLLRMIPGIGPINALTILAEAGDLRRFSHHRQFLKFCGLDLATCQSGTFRGRTKLSKYGNARLRRTFWMAAQVAARQRDNSFRDKLGRYTAGHADDADRRRKAMTALTAKMARVAHAVVKTGTEYRPFLERPAARWKDPSLQVP

SEQ ID NO: 308233 - protein, 417 aa, unidentified
MAQMKMKKANSSRKEKVIEGLPVMGRNRAGCDLGSKSHGVCAPTVEGSEREITEFGCTTGELLRMAAWLKERKVESIAIESTGVYWIPVHEVLEAAGVEVLLVNTPQLKQVPGRDKKSDPEDCQWIQRLHSCGLLRGSYRPKEEVCKLRTLVRDKGILTAEAGDWVRRMQKSLDQMNVRVHRAVSDVDGVTGMAIVQAIVDGERDPMKLAKLRDARCRKSEEEIAAEVTGHWREDHVFSRKESLKMYATIQERMGDYEKEILRQLGEMERLELRGQPAAEWKNKNKAKAIRRRGEEGMRQAYYRMSRVDLATIDAVGVEALQVVLSEYGPDWSRFPDEKQFASPIRLVPHSPTSGGKPVKKKMRRGTSSRTAAVLRMADAVAAQRPYGIRCTLPKDGAQKEPGPCGFCYGLEMGPSD

SEQ ID NO: 308234 - protein, 384 aa, unidentified
MEVIHPRCAGIDVSKKDAKVCVRIQGRGRKATSSTVTTWTSMTGSILALREHLLAERVTCVVIESTAAYWKPFYFLLDEALNVMLVNARHARNVPGRKTDVSDAAWLAELGAHGLVRASFVPPEPIRVLRDLSRARTTIAQARTKEIARLETLLEDAGIKLSSVACEITGVSGRAMLEALIEGQHDPGELADLAKRQLRKKIPALTEALQGRFTAHHGFMVRLYLDRIDAHEADMSVYPTAEHLASWVGVTPRANESAGRIKSAKTMPGNRHLKAALGVAALSASRSTNTYFGARFRRIAGRRPVRPGTKKSRRQSAAGQTAIVALEHKMLTCAWHMLVNGTFYQDPGPDYYTRNHPAQTKAKAIKQLQALGYDVTLQPHTDAA

SEQ ID NO: 308235 - protein, 425 aa, unidentified
MNYKQNEKINQVKESTLVVGIDIGSTTQYARAFDWRGIELGKVFTFSNSREGFEAFKAWMQYLQDKYRKSDVIVGIEPTGHYWFDLGAYLEDEGILLVMVNPYAVKQTKELDDNSQSKNDRKDPKVIAKLVTEGRYSAPYTPDGVYADLRIMVANRKRLIREMTQIKNRFARWFAIYFPEYTDVFGDYEAQSSMLLLKKVCTPEAIVELGAEKINQIWRDAKLRAVGMKRATTLCETAKRSIGLKKGSSAARYEMKLLLEDYEYKKAQLDAVMEEIEKLCRKIPESEQMLAIKGIGVITVAGFLAEVGDVRRFESPRQIQKLAGLSLRENSSGKHKGQTTISKRGRSNLRAVLFNAAIPLIAKNPEFKSLHEYYTTRANNPLKKKQSVIAICCKLIRVFYAILAKGVTYDAQKLISDIHRQPQVA

SEQ ID NO: 308236 - protein, 448 aa, unidentified
MEKKNVKMEMVNPNAAGIDVGSRSHFAAIGQGDNDIREFGVYNEDLNTLTQWLLDNQIKTVAMESTGTYWQSLYATLQAAGLEVVLCNGKFTKNIKGKKTDVKDAKWIQKLHTIGLLSGSFLPDEATEQLRTFCRHRTNLLEQSADTTRKMQKYLRLLNLRLDVVVKDITGLTGLSIINSICNGESNAEKLASLRNGNCKKSEDEIAKALQTNGRNDYLFTLKHEYQLYLNFQDKMKECDIEIEKMLNECINNDNEKKQHYIDKKVHKRINKNTPKNIDINLLSYQYFEGVDLLAIEGVSHATVLTLMSEVGNGIQKFDTAKQFASWLRLVPNNRISGGKVLSNKIPKGSNRLKIALRNAANAIGNLKDTTLANFFKRIAFRKGRVSAISATARKLAVIIWNMIVKKIPYKPETSYEFLDQKRKRKVQEMKMLIHKFDISINDLGLHL

SEQ ID NO: 308237 - protein, 459 aa, unidentified
MPIARKHKKYTVSAPRLESLKQIEPNAAGVDAGATELYVCVSQDRDPQPVRVFETFTCDLHDMAAWLKQCGVRSVAMESTGIYWVPLYEVLEEAGFEVRLINAREAKNMPGRKSDLLDCQWIQQLHSYGLLRASFRPSKEIVAWRSLVRHRDNLIAARAAHIQHMQKALHLMNIQLDNVLADITGVSGLRILRAVVAGERNLDVLASYRDPSCKNSAEVIRRSLEGNYQPEHLFQLKQSLELYDYYSGLIQECDREIEKQCQRLSAQATPPAQPLPPSRKPRQKKKPRKSEPTFDLRSHLYQMAGVDLTAIDGCNASTIQVVLSETGVDMSRWRTSGHFASWLGLSPHNDISGGKVLRSRSKRTRNRAKTALRLASYSLTHSDSWLGAYYRRMRSRLGAAKAIIATAHKIARIIYFMLKHRCEFRDLGADHYEAQYRWRQVASLQKKAASLGLQLVPAA

SEQ ID NO: 308238 - protein, 396 aa, unidentified
MLKIVYRICCGMDVHKSFVVACIASTNEQGVTSYKSKRFSTFTGDLRRCAVWLAENNCKDVCMESTGKYWIPVYNILEPTCNIVLAHPKYVKAIRGKKTDKKDAKWIADIFKHDLVAGSFIPPADIRQLRDLVRYHWKLTNFNTGEKNRAQNCLTVSNIKLDDVFSDVFGKAASAITTRILENPMEKITDVSGFRTKGMKATNEQVLAAVDGEMCAEQAEKLRIIRSHMDNLELCKLNLESLILSTAEKYLPQLNLVMTAPGIQSFSAIGIISEIGVDMSVFPTSKHLCSWAGLTPQNNESAGKKKTTRISRAGAYIKPLLVQCALCAVRAKQFPEVRSRYLALKKRRGHKKAIIAIARMLLTAIYNMLKRNEPYNPELYRKGDRPPARIYLIIGL

SEQ ID NO: 308239 - protein, 349 aa, unidentified
MRYIGVDLHKTNFVVCFLNQDESFRLETFPLSKAGISRFTSELSKDDAVAVEVTQNIYYFYDQIKTYVGRIVLVDTYRFAIIAASKKKTDKADAQALARFLKLDHLPEVPVPSEKVRQLRHLLQARETIVGMRTKLKNLGHAALTRNGIALSRSAFASGVARERLRKRDDLSAADRVILDSALRQIAELDKEIKQLEAEIVRLGKTLAGIKRLLQLHGLNLLSAISLLAEIGDIHLFETSKQLVAYSGLATSIRQSNQTTRQGHITKQGRKRLRTVAIRAVLSMVSRTNTPLMDFYSRKKREKGSGKAICATARKLLTIIFVMLKKELDYWYLEDRLYNRKLRQLNAVA

SEQ ID NO: 308240 - protein, 340 aa, unidentified
MKHIGMDVHSTTTEVCVRNGRGKIVLRRRIESTKRGMEEFVLSIPGPKRVVVEESQMADWVTRALQPHVDEVIRCQPQHNRLISKSEDKCDETDSEALSELLYLDRLKPVHHPEAVYRELREAVRAYWIASQELTRAKNRLKAFFLFNGLHEIGGAMFCLRKRDRHLKRLEEKEASVKLARLLYERLDHCRQLKGKHIRVLRDSAEPMQELVRVLKTIPAIGPISAYTLVAYLEDGRRISNKRKLWRYAGLSLRRHESRGIGTEGASHTGNRHLKHVVMSAAITVVSRREKNALSRLWEKDIRQKVDPKRARRNLARKIIVIAQHLLRLKQEYKDELVTA

SEQ ID NO: 308241 - protein, 433 aa, unidentified
MLKLNYMSTLFVGIDVSSKTNAVYAMDFEENKYISSSFGNNQPGADQLVNMIAECMQKHKNLDTVLIVLESTSVYSVHISNFLSASEVLMPYRPYVFCVNPKAASNYRKSYIGMEKTDPTDAYLIADFGRVGRTKKLEPWRGGQFIALKRLTRHRMHLSECITREKTYMVSNLYLKFSELQLLEGDDKPFGSLYGATSSAVLTEFLSPQEIIDMPEEELLTFLAGKSRNRISDLSKTSELLRKAARDSYRLDKCMYEPLNISLASSFNCIHAYQKEIKLIEQAIEKCINGMNPNALLILQSIPGIGPIWASGILSEIGDITVFHSSDALAKYAGLYWPKGDSGDFTSEDNKMSKAGNPYLRCYLGEAANSVRKHIPEYADFYARKYAEVTKHQHKRALALTSRKLVRLVFGLLVKNQLYTGEKLDAEYNIESN

SEQ ID NO: 308242 - protein, 424 aa, unidentified
MKTYILRDPKTVEAQNPPPNLTPKPFREDPAVAATVETNLGRPGAPAGPVLFIGLDVHKDSIAVSIAPSDSTEVRRYGVLGGTHDDVLRLAKKLQAAHPGTELRFAYEAGPTGFPLCRFLRAHGHRCIVVAPSKIPRKPGDRIKTDRRDADQLARLYRAGELTAIHVPDPQDEAVRDLLRARYQVSRQQHRARQQLKMFLLRQNIRYAGTTAWTPAHLRYLATVKLPFAEQQFLFQEMVNVISEAGQRLERYEKLLPGVVAGWRWEPVVQALMGLRGVALLTATILVAELGDLHRFETAGQLMSYLGLVPSEDTTGGDRQQGGLTKMGNGFARRAFIEAAWNYRTPARISRTLLARQEGLPKAVVEAAWTAQTRLHARFKHLTRVRHKKSTVAAAALGRELAGFIWAIGRMVQPHPSQPAAPKS

SEQ ID NO: 308243 - protein, 321 aa, unidentified
MTKDKEIYGIDISKKVFDVYSKASGHFQLSNDVKGFKNLLKTFPRTALVVMEATGYYHYRLAQFLHKNGVLVSVVNPLSVKRFIQMKLAKVKTDKSDAKAICEYGQMNEVPLYNALTDVQSECLQLFRLLDSYVKKRTATKNKLKGEEVLGKPSKTVYGSLKRDLKHLDKEITMLETRLLDLVKQDQQEQLTLLQTIPGIGMKTALFLIVVTDGFKKFETASQLCSYVGITPTIRVSGSSVRGRSRISKVGNKKLRNLVFLAAFSACRYNAACKALFNRLVAKGKSKKLALIAVANKLLKQAFAIARSGLPYDENFVSKLA

SEQ ID NO: 308244 - protein, 349 aa, unidentified
MNIKRIGIDLAKTVFQLHGVDSHEQPVLRKKLKREQMLSFFRTIDPCLIGMEACSGAHYWARELQKLGHTVKLMAPQFVKPYVKANKNDAKDAEAICEAVSRPTMRFVTIKTIAQQDLQASHRIRKELVGQRTAKVNQIRGLLAEYGIVVGQAIEVLRKALPCLLEDAENGLSADFRILLKGLQEDLLALDERVAELDKRIHTLAHTHEDAKRLLQIPGVGPLTATAIISAVGDGSQFKRGRDLAAWIGLTPRQNSSGGKEQLLGISKRGDHYLRTLLIHGGRSVLRVAGGKDDPRSRWLKGVSERRHKNIAAVALANKNARIIWALLTQKTDYEQKAGELSSGESVCA

SEQ ID NO: 308245 - protein, 451 aa, unidentified
MLPGVAVSKSSPTQGDVTLSKRAQRHGQVKRQGQVKELPGPVKASKGPIPDGIVVVGLDIGSETHVARFWAAPGEREAARSLANTAAGVAGLLAWLDERTGGDRSKGVVGFEPTGSYWQGFVGRLVGAGVGVRVIAPAHTKKYQELLDNSPNKSDAKDAGGIAELTKRGHGLWLRLPQGAYAELRALNEGYHRATQRMTAVQNQAREVAFGLFPELVAAIDPFTATGRALWAATPTPAAWLAKRQSTRERLVRQASRGRLGAAFVAALTAGARDSLGATEAVAPRVAELSFLLAELDALAAHRAALEAALVATVDACPEGEWLASVPNLGRVSAARILGETGPLADFGSVQAVLKHAGLNLYASASGKRTPDRVVYRITKRGRSRLRHVLFFAALRLVQRGGIFHAAYRRLVDENGVVKIRALVAMMRKLLRVLTALARDRVAYVPASTPA

SEQ ID NO: 308246 - protein, 373 aa, unidentified
MAYQHYWVGLDAGHLETAVCLIDAEGGILFEAICETTSGPIRDILRRFGVEAAQCLTIEAGNGTQMVRELRSYGFPVQVVDVRKSSKFLAIRRQKTDVHDARGLAELGRLGRSIGSPVFVKPMEHQNIRTLINVRRTMLKNRARTDALIQSIFRLHGGNVKLLNGRGALAAEVNDQVRKMRQHGLEIGVNLQPLVDISEALREQISALDRQMRDIASNNLTCRNFQTIPGVGAVIALSFYSAIGDPHRFERSRDVGAYLGLTPTLYQSGATSRRGRISRHGNKLTRMHLITAATVLLCRIEIESRLRTWGLELAQRVGFLKARVAVARKLAVIMLGMWKTGSPFRPDGAPSLFLQQEEAGLDPVLISGTQISL

SEQ ID NO: 308247 - protein, 329 aa, unidentified
MKVTAIMGIDVSKKTLDCHLFVQQKSLPAVSNDSKGFKAIKRWLKKELKSLDGLLVVMEYTGIYTYQVERFLQQHGIQFVKRPALDIKRSLGMVRGKSDKIDARFISKYGWMRKEELQPMSVLSDTQLELQQLMGHRDKLVADHASYQCKLKEMISQMGEKINEKLITSMKLVMEVLKQEIKETEKAIKELIGSDEPLQTNYELACSVTGIGFATAVHMLIATENFTRFSDVRKLICYCGVAPFEHSSGTSIRGKVRVSHLANKKIKSLLTMAAISAIQHDPELKAKYEQKLKEGKAKMCVINIIRAKLIERVFAVIKKQKAYEVRLAA

SEQ ID NO: 308248 - protein, 407 aa, unidentified
MEVLYPRCAGLDVHAGSVVACVRIAVDATVTYEHRTVSASTRGLLDLSQWLTAHGCTHVAMEATGVYWKPVWHVLESDFALILANAMHIRNIPGRKSDTNDATWIADLLAHGLIRSSFVPPAPIQELRDLTRTRKQLMREIGRHTLRIQKTLEDANLKITRVVSDILGTSGRAILTALVAGETDPERLADLTRGRLKAARVDLVDALHGRVTSHHRFMIQLHLTQIDALDAAVRDLDARVGDALGPFRAAVSLLTTMPGLSDTAARVLVAEIGTDMTRFPSAAHLVSWAGLCPRLDNSAGRPRSTRVRQGAPWLKTTLVTAAWAGTRKKDSYLRAQFLRIKSRRGAKKAILAVANSMLTAAYHMLRDGVEYHDLGSQHFAHRDRDQMAKRLLQRLRDLGVVVEVKAA

SEQ ID NO: 308249 - protein, 417 aa, unidentified
MNNENYAALVTLDWGETEHAFATHVGESPVETGTMPATPETLHGWLEALHERTGGGLVAIALEGGKSAVVHALLAHPWLVIFPVHPATSDRFRKAFVPSGAKDDVPDAIVLLKILTQHRDQLRPLKLDSAETRKVAALVAARRRAVDERTRLACELGTTLKTYYPQALELCGREPATALALDFLARWPELRSLKAARPATLLAFYAAHNSRRSDVIDGRLALIAQARALTEDRAVIEPAILQVKMLVDILRPLQKNIALIEERIAEAFDAHPEAALFQGLPGAGPATAPRLLAAFGTDRSRYPDASSLQKYAGIAPVKQKSGRQLWIHWRWNAPKFLRQTFVEWAGQSVPKCAWAKAYYQQQRAAGKHHQATLRALAFKWIRVLWRCWHDRVPYDEVRYLASLRQKKSPLAARLAIT

SEQ ID NO: 308250 - protein, 392 aa, unidentified
MKFVGIDIAMDKHDIIIIDDTGEIIYDHFIIQNNRFGFKKLHTVIRSCTKSVNEIRIGMEATGIYHENLRDFLISKGYTVYCTNPMLVSLSRKAASPRRTKTDKIDAMAVCRHLMHNLDRLHPYTPPLYHLQELKQLTRDYNTNREKIAKSKTELKRLLQTIFPEFLKHFDPFASWALELLDDYPLPSDYKGLHVDKLADRIQMHSNRWSQAVLLKQIAKDSIGKSDDLNSHLLRFCVSDLLHFDSQNKVLRKVIASTMNLYPKILSVPGVGPINGATILSETGNINRFSNKHKYTSLYGIDPIVHESGKYKLKHSHLSKRGNKFLRTAIYSAARVACVAPNVRPNKFRTKYLEMTARDNKHHNTIIFAIAKNMVHSIYKLLKTDSFFDDLK

SEQ ID NO: 308251 - protein, 340 aa, unidentified
MSIVGGLDVHRAQITYDHLDTETGEVEVGRIVPATRCELRDWLSRFEGQDAVFATEGCTGWRFVVEELQHAGVEAHLAEPADTATLRSRKKRAKTDRADARHLRRLLIEDRLPESWIPPGHVLEVRTKGRTYLALMDHRRAWQQRIGAQLFHQGVEKQRGLLTVTGRAHLDDAELSAAGRQLVEVALRIIDALGAEADQLRSELKAFARRQAGCRTLIDKLYGVGELTAPIIWAEMGDTRRFSSSNQAVRHTGLDITVRESDGKHSPGRLSRQGPAALRWALFEAALAATRKSSPDHAYYQQVTERLGAKRAYLSVARKLARRIHHILRRLGDAAFEEVT

SEQ ID NO: 308252 - protein, 439 aa, unidentified
MKTMKTTPLRKIRPHAAGIDLGSEEIFVAVEEQPVRRFETFTASLVEAVAYLRSHSIKTVAMEATGIYWIPLYELLEEASIEVYLVNGAHLKQVPGRKSDVSDCQWIQQLHSCGLLSSGFVPAEDIRTLRQYWRLREDHIGLAAQHILHMQKALELMNIKLHKVISQLTGASGLRIIEAILAGERDAERLAELCDGRILANKQERVVRSLQGHYRAEHLFALGQALAAWRFYQGQIAECDTMMAAWLTEHTIDLPEQPLEGKPKQIRHNAPEIENLHGELMQLTRGTDPTVLPCINDRTLLGLIAETGLDMRKWPTRQHFCSWLDLAPKTDTSGKRRRKRRQPHYNRAGQIFREAAHSLGASKYPALAGFYRRLRAHRGPQIANKAAARKLACLYYDLLRYGRDYVEHGLEDYERLYREKQLQRLTKQAQAMGLQLLTA

SEQ ID NO: 308253 - protein, 348 aa, unidentified
MAHFVGLDVSVKETSVCVVDDTGKVILEQKVPTEPADIITLLSSLGVSYGRIGIEAGPLSQWLVNALTVADLPVICVETRHMKALLTAQQINKTDRNDARGIAQMMRVGLFKPVHVKTLVAQEQRMLLTSRKLLQRKLLDLESDLRGTLRNFGLKVGVVSGGRYEARVRELIAGFPRLAAIAEPLLKVRQVMRQQLAVLHKMLLETVRDDPVCRRLMTAPGVGAVVALTYRATVDQPQRFVHSRAVGAHVGLTPKRYQSGEIDYDGGVSKCGDALLRTMLYEAAQVLLTHGSKWSWLKAWGVRVVQRRGMRRAIVAVARRLAVVLHRMWVDGSEFRWSKDSAAVPTAA

SEQ ID NO: 308254 - protein, 344 aa, unidentified
MKIKLLGIDLAKNVFQLCALNQANNVLFNRAVCRAQLRSTIAKLEPTTIAMEACSSAHYWGRAFEAMGHTVSLVPAQHVTPFVRGGKSDARDALAICEAAQRPNIHLVPIKTVEQQDIQLLHSLRQRQVQHSTALANQIRSLGREYGVIFPAGIKPLISHLPEVLEDGSNELSPVARHALADQYQCLLDTRQALGAFLLQIEQLAAQYPAYDDLQILPGIGPMTASAYIAAIGNGRQFKRGRQVGAWLGLAPRQYGTGGELKLGGITKSGDRHLRTLMIHGARAVITRGLKTRPELAQWVQPIIDRQGFNKAVVALANKLARIAWVIVTTGEPFDMKQAFKPAS

SEQ ID NO: 308255 - protein, 354 aa, unidentified
MADIILSIDLGEFRSVCCWYDPETKQCDFATVVTSAFEFRRVLTQRPVLKVVFEAGSPAGWVHDLCCELGLPCLVANTLGAAWAWKNVKRKTDRDDAIKLAKLAAINELPTVTVPSKPMRQWKSLVGLRKRLISERVRGQNRIRSLLVTQGWPSLAGARAWTRLGIAGVAQFAKPFSECGPEDLWRGELKTLLTRHESLTSQIDEVETVLDRLADASPTVQLLLSVPGIGIRTAEIIAVYLGDATRFNNSNEISAYAGLVPRQYQSGETDRRGHITKRGPKVLRSAMVECAWGCLRLNAWARATWERLIANGVGKKKAIVAVARKLLVRCWGMLKAGKSWRNPLSAVVVGPTPG

SEQ ID NO: 308256 - protein, 399 aa, unidentified
MDFDSNRLINMKPVPNAVSGVEQMESMILAVLEANSQFKYLLIAMESTSFYGVHVANYLSTSDRLKPYAVKVFCLNPKEVANYKKSFTGLGKNDGLDSFIVADYVRVGRIAIDPWRGAQYLALQRLTRQRRHVTEAITREKNYVLNNIFLKFSELALLGGEDSPLSSKFSATAEAILTEFKTTEDIANTPIEELVEFVTKASHGRFNDPDQVAELLQKAARNSYRLDKALYEPITTSIACSFNCIHAFEREKKSLDKAIEETVKGLNPTEYQILRSIPGIGPVYAAGILAEMGSVKCFPSNDALAKYSGIVWRDNQSGEFDADDTPMMKAGNRYLRYYLIQAAGSVATYCPEYTAFYEKKYAEVKNHPHKRALALTARKLIRLIFGLLDKNQLYSAAKE

SEQ ID NO: 308257 - protein, 403 aa, unidentified
MNSVGIDISKGRSTVAVMRPFGEVVISPFEVRHTDSELSELARQLKSLDGETRVVMEATGNYHTPVAKLLHDAGLYVSVVNAKLVHGYGNNDLRRVKTDKKDAVKLANYGLDRWLTLPRYITEEDTRLLLKNCYRQYRQYSKVQTVLKNNLISLLDTVFPNANRLFSSPIRGDGSEKWVDFVAEFWHCRCVSEKSEKAFANKYQRWCRKYGYNFNEAKAHTIHAEASGHIGVMPMSETTKLLVEQAVAQLRATSTALAALKHEMQALTSMLPEYPVVMDMFGVGPTLGPQLIAEIGDVRRFYSKKALVAYAGLDAPPNDSGDVTGRHKSMSKIGASSLRRTLFLVMSVYLQTAPLDEPVYQFMDRKRAEGKPYRVYMMASANKFLRIYYATVKAYLESLEHTA

SEQ ID NO: 308258 - protein, 362 aa, unidentified
MKQALAAASICSPQTQLREVIGIDLGDRWSRYCVLDQAGTVIAEDRVRTTPETFTAKFGDLPPTRIVIEVGAHSPWVSRLLQGQGHDVIVANPRKVRLIYESDRKNDRLDARMLARLGRVDVNLLSPVQHRSSEVQADLAIIRSRDALVAARTQLINTVRGMVKSMGGRLPRSTTGVFAEKVGMLIPAELKAALEPLVRSIRSLSEQIRRYDERVEKLADKKYPETRLLRQVKGVGPLIALTYVLTIEDPTRFGRSRQVGSFLGLRPKQSESGDSAPQLGISKCGNNHLRWLLVQAAHYTLSRLAPDSRLRRWGLALASRGGKNGKRRAVVAVARKLAVLLHHLWVSGELYEPLYEVQPQSA

SEQ ID NO: 308259 - protein, 338 aa, unidentified
MLYCGLDMGKKSSHFCVVDKGRRVIDDGQVCNRLADIEKCFGDMPPMRIVIEASTKAFWMADRLEELGHEVIVVDPGRTKAIGAARIKHDKLDAKILAELCAAGLLACVDRPSESQRLDRLIVVSRDGLVKSRTRLIAMVRSILDSEGIELKSCATDRFVDAVTDIAEDLPEAMWLSIEPVLTGIHLLSEQIEACDEHLKQVVADDQDVKRLKTVPGVGTIVAACFLAAVRSPERFTSGRQVGAYLGLVPSLYQSGKTCRRGKITKHGNGQARWALCIAANVLLRTRKRTALGDWGRGLVARLGRKKAIVAIARKLAAVMWSMLKHGSDFEPRLQNAN

SEQ ID NO: 308260 - protein, 483 aa, unidentified
MKTKNTRSGSGSKASRHRKSKRQSWKVVHPHAAGIDVGATEHYVAAPPDSATAGAATVRSFGCFTEDLDALVEWLKACGVDTVAMESTGVYWVTLFQKLEGAGMEVVLVNAHTLKHVPGRKTDVQDCQWIQQLHTYGLLRASFRPDEVTCRLRSLVRHRANLVSSGAEHILHMQKALTQMNVQLHQVVSHLTGETGLRILRAILSGERDPAKLVELRDPQIRRSTQEEMRKALVGDWRPELLFVLEQSLRAWEFYQEQMKACDVQIERQLKEMPSAAPPRSEEVKAAPDPLASSAPRPKGKQSRKRNDPEMDLGPELARICGVDLTAAHGLRLLTVLVILSEVGVDMNKWRSAKAFASWLGFCPNNKISGGRILSSRTRKVINRASTALRMAALGVADTETWLGSFHRRMRARLGPAAATTATARKIATVVYHLLKYKEPFVDRDLIAYEARVYRHKFARLQKQAAALGYQLVQTSEQKQFAE

SEQ ID NO: 308261 - protein, 424 aa, unidentified
MKVTFQTCCGVDVHKSFLVATIIKTTGGIEPSYQKRRFSTFNNSILEFKKWLLENECLYVCMESTGKYWIPVFNLLEDEINVTIANPKWVKAVKGNKDDTKDSKWIGDLFRLGLVRGSYIPCKKIRILREFTRYRYKLVSCRSSEKNRYQNALTVCNVALDSVVSDVFGKSSTSIIDYLLEQSGTSIDHEVIASKLLKRLKAKEDAVIESIEGYQMTDSQKYRMHLVRAHMDYITAAINDVDSEIESLISSVPDYQNAAELLCTIPGVKHDSAITVISEIGIDMSQFCTSKRLCCWAGLTPGSNESAGKKKSVRITRAGVYLKPALVQCAHAAVKSNKSPYYKKKYESLVKRRGKKRAIIAIARMILTAIFQMLTTGETWNPCDLYKIDMPEALLEKQKQKAIKQAQKLLIREGLLPPTEPIAS

SEQ ID NO: 308262 - protein, 326 aa, unidentified
MVDSSGKIVCETKVASEPEALLQHFADLGLPVIRVGLEAGPLSQWLREGLGDAGFEVVLLETRHVKAALSAMPVKTDRKDARGIAQLLRMGWYRPVHAKSADAQEVRALLVGRKLLQAKLLDVELSIRGILRGYGLKVGEVSRGRFEARIRQLIEGHDMLAMVIGAMLQARAALWNEFTRLHRAMLKIARADPVCHRLMSAPGVGALVALTYRSAVDNPGRFAKSRTVGAYFGLTPKKYQSGETDIDGGITKVGDSMVRTALYEAAHIMLTRATRFSALKRWAMDVAKRRGMKRAKVALARKLATVLHRMWADVSQFRWGKDTVAA

SEQ ID NO: 308263 - protein, 452 aa, unidentified
MAKKRERRECKAVVLEPDASGIDIGAEEIYVAVPPDRDEESVRMFSSFTCDLHALADWLQKCRIRTVAMESTGVYWIPLFQILEARGLEVYLVNARYLKSVPGRKSDVSDCQWIQYLHSVGLLRASFRPGMDICAVRSLWRHRASLLQMASEHILHMQKSLSQMNLQIHHVLSDLTGASGQAILDAILAGERNPVLLAQLCNCRVKSPREKVAKALEGDYRPEHVFTLKQSLDGYRYYQRLIAELDREIQRLMQTLPSAVETEQEIPQRTKHSAFQRQGNDPGFDLRGQLYRIAGVDLTDIPGVSAVTAQVILTEVGPDLHRFRNASAFASWLGLCPENRVSGGKILSCKTRRVKNRAALALRLGANSLCRAKGYFGEFFRRMRAKLGTAQAITATAHKIARVLYHVLLTKEPYAETVFHKSDEHTRRRAEMRLRKHAALLGFQIIPVNPAT

SEQ ID NO: 308264 - protein, 370 aa, unidentified
MVKRSMFVGMDVHKESIDISVAEEGRQGEVRHYGVIAGDLEALAKVVRALRAPDRVLHFVYEAGPCGFGIHRYLTAQGEDCVVINPSSMPKRSGDRIKTDRRDGDALARLHRAGELTAIYIPTPDDEALRDLVRAREDAVGLSTQAKHRLKAFLLRQGRRYPGRAGWTLPYRRWLADLSFPLAPQHIALQEYRDTIDETERRAARITDQLRQLTPAWRWAPVVEALQALRGVSFVTAVGLVAEVGDFRRFQHPRHLMAYLGLVPSEYSSGPSVRRGGITKAGNPHARRLLAEAAWAYQGIARIGRQMLYRQEALPKSICDIAWKAQLRLTSRFRRLVARGKAKPKVATAVARELTGFIWAIAREVPAPPA

SEQ ID NO: 308265 - protein, 367 aa, unidentified
MKKISTEAVKQNRNFSEQKLTIGLDLGDRSSWYCVLDEAGSVLLGQRLSTTPKAMKEALGGMPRSRIALETGMHSPWVSRLLSELGHEVIVAHARKVRLIGESRKKDDRLDAQTLARLARIDPQLLCPVRHRSAKAQADLTVIRARAGLVRARTALVNTARGLAKSYGERLRGCNVRNMNPEKAEGLSPELQRALEPLLAGIESLSERIGECNEGIEKLAQESYPQVARLKQVKGVGTLIALTFLLTLEDAQRFRKSRDVGCYLGLQPGRRNSGQSEPQMHISKEGDPYLRTLLVQGAHHILGPFGADSDLRRWGLKLAERGGRNGKKRAVIATARKLAVLLHRLWVSGEAYEPLRNSNQRVMPAAA

SEQ ID NO: 308266 - protein, 355 aa, unidentified
MNSRKYIGMDVHKESISIAVRNDAGKIVMECVIETKASMILQFIDGLRGDLHVTLEEGTWAAWLYDLLKPHVTKLVVCDPRKNASMREGNQSDKIDARRLAELLRLNHLSPVYHGEHGLRSLKELVRSYLTITKDLGRVMSRVKAIYGSWAIPCTGKQVYAPRHRAEWLGKIREPGVRRRAEFYYQQLDALRILRQQVRRDLLVECKKHPAWKRLRQIPSIGPIRAAVLLGILQTPHRFRTKRQLWAYSGLGIETHSSADHRSVNGQLRRVKKQISIRGLNRNCNHDLKNLFKGAAIVASSKPGPFQEFYTALLTKGIRPEMARLTLARKIATIVLMVWKRGVSFDAQHLKPQTA

SEQ ID NO: 308267 - protein, 451 aa, unidentified
MSRPQVIDDEDHERVHDRVAAVDVAKDTGMVCTRTPHPSRPGARRSTVWTVKARMKAIRTLGRQLKKDGIEIVTLESTSDYWRIWFFVLEACGLAVQLVNAAQARNLPGRPKTDKLDAQWLARLTEMGLLRASFVPPAAIRALRDYTRARTRLVQERTRCWQRLEKLLESALVKVSSVASKLTTESAKDMVRAMIAGQRDPRTLAALARGRMKAKHDDLVEALDGMFDDHHGELAQMLLDQIAFCDARIGQLTARITGSVEAMPEAWGIDGDGTTGPDAGTGPDAAALPAAARLAQIPGISPDLARSVIAETGLDMSRFPTAAHLVSWAGLCPSARQSGPRTRAGKKGQGNGYLRGSLGQAAIGAARTNTFLSERYWRIARRRGKAKAQVAVARSILIIIWHLLADPAARFTDLGPGYYQARTDKDKKIKNHIRQIEALLGHPITITPTAA

SEQ ID NO: 308268 - protein, 391 aa, unidentified
MIYVGIDVAKDKHDCFITNSDGEVLFKAFTISNNLDGFNELYQKIESVMEDTTKVKVGLEATGHYSYNLLGYLIDKGLPTYVINPLHTNLYRKSLSLRQTKTDKVDARTIASMLMSDVNLKSYSDTSYHNEELKSLTRYRFDKVKERAKLKTSVSRLVCILFPELEKLVPTLHIASVYAMLSEFPGAKQVANAHLTRFTNLLSEASKGRYGKETAIAFRDAARTSIGSNMPAKSLELKHTIKLIQELTSEIDEIEHEIKLIMDEINSPILSIPGINYRMGAMIIAEIGDFTRFDSPDKILAYAGFSPSTYQSGQLDGAYSHIEKRGSRYLRYALYNAAKYVCIWDPTFAEYLAKKRSEGKHYTVAISHAVKKLVRVIYHLEKTNQQYIKAA

SEQ ID NO: 308269 - protein, 366 aa, unidentified
MFSERTSVVLDVHARSVAAAAIDGVTGELFQARLTPSHDHIRGWIGALPGPVAVTYEAGPTGFGLARALRADGIRCVVAAPSKLQRPSGDRVKTDANDAVHLARLLRMDEVTAVVIPSADQEAARDLVRAREDCRGDLMRARHRLSKLLLRHGIVYDGGQGWTGAHDVWLRRQHFDAPTVQMAFDSDYDAVLATGARRDRLDAAITAMATDSEFTPVVRRLSCLRGVSTLTSFALAVEIGDWRRFTGNTIGSFVGLAPSEYSSGASRVQGSITKTGNTHARRLLIEAAWHHRTRYRPGSTMLARWDLASPAARARGDEGNRRLHARWARFDEHHKRPVIANVAIARELAGWCWSLAVLEEDAVMAC

SEQ ID NO: 308270 - protein, 387 aa, unidentified
MQSVTSATAVATTARANNITLFASLELSKSKWVVTINSPGSEKFSKHVVEGGDGACLLDLLSRSRAKAEQRYGVPVKAMVIQEAGLDGFWIHRLLLANGIESHVVDAASIAVDRRHRRAKTDAIDGETLLRTLMAWARGERRVCSMVRAPSPEDEDRRRLTRERGTLLKERIRHTNRVRGLLSGQGIGDYNPLRRDRFERLEALRTGDGRELPPMLKAEIRRELDRIALVTTQLAAVEHARDALIRTDAEERNSPAALLLKLKGLGPEFASLLWMESLFRSFGNRRQVAAYGGLAPSPWQSGGVERDQGISKSGNRRLRKTMIELAWLWLRHQPDSALSRWFQARVGAAKGRIRRIAIVALARKLLVALWRYVTQGVVPEGAVFKAA

SEQ ID NO: 308271 - protein, 343 aa, unidentified
MHTPYHFIGLDVHKRTVAYCEKRADGKEIASGTFGMHKQDIEAWVTQRTRPWVGGMEATLFSGYLYDMLMPHAVEIQVGHPFRIKAISSAKHKSDELDAETLANLLRADLFPQCYMASSLVRELRRVLRYRNFLVRQAVCMKNKTTGILMETGVQYDGRRIHRESYFNELLSSLEDVPNSVRELLRTTRTGLEMFQATQKQLLNALIKHPELHERVERLMSIKGVGEITALTWVLEIDDPARFANLKRVQSYCGLCSGQNESAGKSKTGPLSKQRNPHLQTVLIEAAKLAPRWNPQLKQVYTTALEKDKNRNRATCAVARKLVAYLMAVDKSGKPFEAPVPKH

SEQ ID NO: 308272 - protein, 344 aa, unidentified
MDSYVGLDVSLREVSACVVDEAGTIQSERTVAADPDVIAAWVHAQAPTVRRVGLESGPTSAWLWRELAKRGLPVICIDARHAKAALSMQINKSDRNDAAGIARIMQTGWYREVQVKSPHSHAIRGLLNSRSLLVKVQRDLENQVRGLLKSAGLIVGRAKDGVFSARTKQLLAAHIDLAAIALPLLEAREAIHQQLVQLERRVRQLAKEHRQTSAFMTVPGIGPMTALAFLATVDDPRRFRRARAIGAYVGLTPRRYASGEVDWTGRISKCGDTMLRTYLFEAAGVLLTRVQKWCALKAWGLRLAKRSGMKKARTAVARKLAVILLRMWRDGTQFHWTAAPPAAS

SEQ ID NO: 308273 - protein, 426 aa, unidentified
MPYKIAGIDVHKRMLHVVVSDVEVDGEYEFTRRVFGSYPEALRSLVGWLVNEQVEEVVMESTAQYWKPVWGALERYWKPICEKRESARRRSGTLHLAQALSNRGRRGRKKDFRDAERLVKRLVANELTLSFVPDVEQRLWRTIMRTKYQLTCNRVQLQNRLEALLEEAHIKLSSLVSDLLGASARRMLKAIAEGETDPMALAALADERLRATPERLRDALGVCQELNSVYRRLIEMALEELASIDKRIDELKQAMADLLCPHEDQVKRLVEVPGLSVDSAQQIIAEVGATASTFPSERHLSSWVGACPGEEESAEVNYSRRSPQGNRHMRRILNQAANAAVKHKGSIFQILYRRYVPRMGHNQTIGIIAHKLCRLIWKILHLGAHYKEQGPQVNEACKQKRTQRMIRNLRKLGYRVEMTSESVLPA

SEQ ID NO: 308274 - protein, 345 aa, unidentified
MNISRVGVDIAKSVFHVHGVDRHDQVAWCGKYKRDKWLDAIVKRVPAGAEIGMEACSSSHHWARALQARGYRVKLIAAQFVKPYVKSNKNDRADAEAICEAMARPHMRFVTIKTVAQQDVQAAHRIRSELVQQRTAKANQVRGLVSEYGLVAPTGMGQLRATLPCWLEDAENGLTDDFRILLAGLADDLRYLNERIAAMTERIEQHALTDPVAKRLMTLRGVGTITASALAGALGDAKAFKCGRDFAASLGLTPRQHSTGGRERLLGISKRGDSYLRTLLVHGARAVVRYTGTKDDNLSNWLRHLTERKHVNVAIVALANKTARMAWAITHHDTSYDPDMAAQAA

SEQ ID NO: 308275 - protein, 389 aa, unidentified
MPTEVDRAETPIAIQTHFAAIFISLELSRSVWLITSLKPGGGERMSKHSVRAGDVAALLSQLSDLKQKALARTGKSFPLVTIQEAGLDGFWLHRVLKKEGIESHVVDPASIATSRRRRRAKTDKIDGEALLRALLAYKRGEPRVCAMVKAPTPEEEDRRRLSRERKVLIAERVEHVNRIKGLLFTQGIADYKPLRRDRRQRLEELTTGDGRPLPTHLKTQITRELDRLELLLDQIKLTEADRDALLATQQTTSPAPAGRMLLDFKGIGAEFAVVLWLEGLFRHFDNRRQLAAYAGLAPTPWQSGSIDREQGVSKAGNARLRTTLIQLAWLWLRHQPHSALSRWFHERVKRDGGRVKKTTIVALARKLLVALWKYVTTGVVVEGAIMKAA

SEQ ID NO: 308276 - protein, 410 aa, unidentified
MDLVSAELPARTLVVAIDPGKSTHRVLLADGERGLIGEPVSLPTLREGIERLCELIDSQAAPETVIAIEATGSLHLPWVAELERRHPGSTRLFAPSETQAARTQLGSRRFKDDDRDCAALVSLARQGRGRPAQSGTLDALLDAVRHRRRLIAQRKVARQHLHHQLNALCPGLSAPAGHGRVLGLETPTGQAALACAVDFAGRAPAPRSLIARAPGRLSRANAAYWSERWRGCLAPPVDAELRAERLGRDVRRWRALEADVDAVEAQISMLLTETPGHVLTTLPGVAAMRAGALAVHALPISRFPTAERLYSFTGLAPARYESATIRKARAISRQAPGERRDALMGIAWGLSQHCEPFKERDRELRARGMRPIEARVALARHACRLCHRMLQTQQPFDEERYARTRHRRGR

SEQ ID NO: 308277 - protein, 310 aa, unidentified
MAAVSVGIDVSKDHLDVFVRPGGESFRVVREGEGLDELVEQLQALEPTVIALEATGGLEAVVAANLGAAGLPVIVVNPAQVRSFAQALGKRAKTDPIDASVIAHFAEATKPELRALPDEATRLFSELLTRRKQIVRMIVAERQREQSLSDPRLKKSVRRLLKALERELKAMDKDLDDAIRKTPAWREKEDLLKSVPGVGPIVARTLLAEMPELGTLSRREVASLAGLAPFTRQSGRWRGKSFIGGGRANVRAALYMGALVAVRHNPVLKRFYEQLLARGKAKKLALVAVARKLLAILNALLRDQKSWVSA

SEQ ID NO: 308278 - protein, 385 aa, unidentified
MSVVSKPTTRNGDKHMKTKNKYVGLDVHKDTTVIAVADGGRDGEVRLYGEISSDLGALEKVLRKLGGEGITLHVVYEAGPTGFVLYRRLQQLGIECVVVAPTKTPQEKGPRQKTDRRDALLLARLHRAGELTAIHVPDAVDESIRDLTRARADAVHDLTRAKQRLKSFLLRQGYRYSGKANWSEAHQRYLRELVLPLPALKAVLEECLLAIDQATQRVVRLDELLAVQVPQWRLYPAVEALMCLRGFQLTAAAVLVAELGDVRRFSHPRHLMAFLGLIPREHSTGSTRRQGSITKAGNAHARWILIEVVQHAFLPPKVSAPLALRQQGQPAVFRELSWKIQVRLHKRAWHLLHRGVMKAKVTVALARELAGFVWDLLRQVRAPQP

SEQ ID NO: 308279 - protein, 405 aa, unidentified
MEVLYKRCCGIDIHKNMMVACIFTSVRKKEIRQFSTITEDILQLVSWLKETDCEMVAMESTGSYWKPVYNIFEEEQIPIMVVNAQHIKGVPGRKTDVKDAEWIADLVRHGLVKASYIPNRDQRELREITRYRQEVIEERARELNRIQAVLEGCNVKLSSVITDISGKSGMTILKAIVSGETDPVVLSELAEGRARDKIPEMQKSLQGRISEHQQKMLKHQLGHIESLTALIMDLDADIKKKTESINWAIEALDDMPGIGRKSAERILAETGVEMEHFQNESRFSSWAGLVPECKESAGKKMSTRIRKGNKYLKATLVECARAGIRNKQSYLYSRYQRIAARRGGKRALIAVAHTMLIAIYHILKEKVPYHDLGADYYSVINQEKIINRNIRTLEKLGVNVMIQPK

SEQ ID NO: 308280 - protein, 413 aa, unidentified
MSLSELSVSFFVGIDWGATEHAVCVVDENGRGKTAFTLTHTAAGFTDLIRRLSKLGDPIEIPIGIERPDGRLVDALLEAGFPVVPVKPNAIKAWREAEVLSGAKSDTADAAIIAEYLRLRQHKLRPATPYSPQTTALRTVVRTRDDLVTARVAAANQLAALLDTHWPGAKAVFADVESPIALEFLTRYPTAASATSIGPVRMAAFCVKHGYSGRRSAAELLTRLHTAPAGTTDPTLTEAIRDAVLAMVSVLRTLGTALKDLGRSVTAHLSEHPDNAIFTSLPRSGQINAAQMLAAWGDARQAYDHADAVAALAGLCPVTKASGKHHAVSFRWACNTRFRQAMVTFADNSRHASPWAADLYRRARSRGCDHPHAVRILARAWVRVIYRCWLDRKPYDPALHGAAQQTTEHTAAA

SEQ ID NO: 308281 - protein, 357 aa, unidentified
MTQVKQLDFTGTTIFCGTDVHKKNWRVNIQDDEFELEDFSQNADVVILYKHLNRKYPGATFKVCYEAGFSGFSAQRWLNSHGIECLVVNAADVATNDKERRQKSDKIDARKLCEHLQSRKVKAIYVPSVKWEHGRSLVRARIKIMRNQTRCKNRIWQLLYFSGLALPKGYDAGQYWSKRFIKELQSMDCGTDELKITLSLYIKDFLQTRTLLLEATRAIRKLCKQPEYQPWIVLLRSIPGIGEINATIILFELQDISRFKRFDNLCSYVGLVPDTEDSGETRKSKGITNRSNNYLRTALVESSWSVVRKDPALLMKYKTYCRCMEKNKAIIRVAKHLLSRISYVLKNKKEYISGVIA

SEQ ID NO: 308282 - protein, 407 aa, unidentified
MNMNAVGIDVSKGKSTVTIRRPGDVVLMPPRDIPHTKSAINELIKQIQSLDGETKACMEHTGRYYEPLAAWLSDAGIFVSAVNPVLIRDFADDSLRSPKTDKADSKKIARYTLDRWAKLKQYGSMDKTRNQLKTMNRQFSFFMAQKTAMKNNLIALLDQSYPGANDLFDSPARSDGSQKWVDFVYTYWHVDCVRGKSLSAFTEHYRKWCKHKGYNFSAEKAEKVYEASCDLIAVFPKDDNTKMLIRQAVAMLNTASETVENLRIKMDETASALPEYPVVMAMNGVGSTLGPQLMAEIGDVTRFTHREALTAFAGVDPGKNDSGKHVQKSVRTSKKGSPHLRRTLFQIMDGLIKRSPIDDPVYVFMDKKRAQGKPYYVYMTAGANKFLRIYYGRVREYFASLPETGEN

SEQ ID NO: 308283 - protein, 388 aa, unidentified
MQIAAVRPQAPTAIRTDLGAIFVSLELSRSTWLITSLAPGGGEKMSKHSVRGGDVAGLLERFVQLHEKARARTRQCFRIIVIHEAGLDGYWIHRVLQAEGIESHVVDPASIATSRRRRRAKTDKIDGEALVRALLAYKRGEPRVCAMVKVLTPEEEDRRRLCRERKVLTAERVRHVNRVKGLLFAQGITGYEPRRRDRRERLEELQTGDGRRLPEHLKAQVRRELDRLELLLEQIKAVEVERDVLLAAEYAVTPAPAAMLLDIKGIGPEFAAILWSEGLFRHFDNRRQVAAYAGLAPTPWQSGSVNREQGVSKAGNPRLRTTLIQVAWLWLRHQPDSALTHWFHERVRLNGGRLRKTTIVALARKLLVALWKYVTAGVVIEGAVMKTA

SEQ ID NO: 308284 - protein, 314 aa, unidentified
MGGVNAAIEVGKQQLVVQLGSQGEQFTEANEPRAIKRIAKRLSQAGCERVLIEGGSYQSVLIAGLRAAELPVVIVNPRRVREFAKSIGQLAKTDKIDARILALYGEQTQPPLRELPDEQSQALRALWVRREQLIEMLGMEQNRLEHVAEKAKTVRHNLRSHIDYLRKQIKQADDDLDREVRNSSLWDKYEVLSSVPGVGMVLSVALLSDLPELGRLNRGEIAALAGVAPFNCDSGTLRGKRKIDGGRSHLRRVLYIATIAAVRCNPVLKPFYLRLRAAGKPAKVALVAAARRLLTILNAMLKTKTAWRPPCLVA

SEQ ID NO: 308285 - protein, 357 aa, unidentified
MKILALDLGKYKTVACDYELATGEHEFETIATTPQRLHDLLVAREPDRVVIGICSIAGWVCDLTRALEIEIEVANSNDERWRWKRIKKKTDRTDALKLASLSALKQIEPVHVPVREVRQWRALINYRQYLLRRRNKMKNHIRDLLAREALLLPRGRSAWTQEGMLALEQLARPLAEVAGDALWRGELSIELGELRRAEEPLKQVEQKLDKLAKANQNVQLLQTIPGVGPRLAEALVALIDDPSRFAHGKEVGAYLGMVPKQLESGETSRLGHITHHGNRLVRALLVEVSWLGLRYNPWVREVYERTRAGKSARRKIAIVAVGRRLLIRSWAMLRDQQPWHGPVKQAPSKKEKLKRAA

SEQ ID NO: 308286 - protein, 342 aa, unidentified
MEHFAGLDVSVKETSVCIVDDRGRIVREVKVASEPDALLSVLTNPTYHFKRIGLEAGPLSQWLFSVLAEAGLPAICVETRHMQAVLKAQINKTDRNDARGIAQMMRAGLYRPVHVKTLRSQKLRMLLTHRKLLQSKAIAIENDLRATLRNFGLKVGIAGRVKFEARIKELVENLPDLVVLVEPLLIVRRVLREQIVILHRRLLAIVRDDDVCRRLMTVPGVGPVVSLTYRATVDVPARFRKSKAVGAVFGLTCSKYQSGEVDRNGRISRCGDEMMRVMLYEAAQSMMNSKKWSWLKAWAMQIARRRGMKKAIVALARRLAVIMHRIWVDGTEFRWTRETVAA

SEQ ID NO: 308287 - protein, 333 aa, unidentified
MHVLGLDIGKDTVFAHLIRMDGATHSLAAVPNTAVGFRQLLTWARTHGAPRATLHVVMEATGVYWERCAQYLFEQGCTVSVENPTRIRYFARSKARRGKTDAMDAALIAAYGSTMAPRTWRPPSAALHELKLLCRERSTLVVTLNAEQNRLHAMNHRAVVTQRLMALIQERVAFLQTQVETLERSMRTLIEGDPALAEPLQLLLTIPGYGFLTAASVLAETDGFALLETGRQISAYAGIAPAPVESGTSVHGHSRISKIGNAHLRRTAYLAASGARKSKGRVGEFYRHLRAQGKPPKVALVALGRKLLRIGLAVVKSGQPYQEAYRRCTPSVP

SEQ ID NO: 308288 - protein, 329 aa, unidentified
MRTMNPQGGVASEVARLNVGIDVSKQFLDACWGTREERFGNDAPGWDGLITKLRQADVDLVVIEATGGYERGLLCALQGAGIDVARVNPRQTRDFAKSMGVLAKTDRVDARVLRDFADVVARHKERHKYITLASTPEREQLAAMMVRRRQLVDMQVAEHNRLDLANARAARSIRSVLKTLEKQLADMDRDVDDHLNRHFKQQSKLLDSVKGVGPVTILTLTSCLPELGRLDRRAIAKLVGVAPLADDSGHRKGPRRTWGGRAEVRAVVYMATLTATSHNPVIKAFYQRLLAAGKLKKVALVACMRKMLTILNAMLRDQSAWNPLRHAQS

SEQ ID NO: 308289 - protein, 359 aa, unidentified
MQTQSNKIDFTGQNIYIGFDVHLKSWTVTVMTERLTHKTFSQPPKPEVLYNYLAKNFPGATYYSAYEAGFCGYWIHNKLVELGVNSIVVNAADIPTTGKEKVMKTDPRDSIKIARSLRNGDLKPIHVPSIKTLEERGLIRMRSTLVKDLTRYKNRIKSFLYFHGIEYPEVFNRPKTHWSNRFNQWLEGIEFNDLISKATLDMLLGQSNSLRGSVLQITRQVRELAKTDRYKMQEKLLRSIPGIGILTAMIILTEIETINRFSNIDQLCGYIGLIPSTCSSGEKEVIGDLTPRGHSILRSAIIESSWVAARLDPALNKSYHDYCKRMEPNKAIIRIARKVSSRIRFVLKNNQPYVFSVVK

SEQ ID NO: 308290 - protein, 341 aa, unidentified
MEHYAGIDVSMEFSSVCVVEATGKMVREGKVASEPEALIAWLGSLGMNLARIGLEAGPLSQWLFAGLRDAGLAVELLETRHVRNAFKTMPVKTDRKDARGIAELMRLGWFRPVHCKSMAAQETRVVLTARKQMQSKLHDVEMSLRGILRGFGLKVGKTTPKTFDGRVRELVAGHPTLESVAQELLCVRTALLRAFNAFEKRVRAMARQDARARLLMTTPSVGAIVATTFVSAIDDPARFKSSKSVGAHFGMTPKKYQSGETDYTGRISKIGDSRVRTALYEAAHVMLTRPVKGSALKSWATKLAKRAGYKKAKVALARKLAVIMHRMLVDGKPFNLAAPAA

SEQ ID NO: 308291 - protein, 437 aa, unidentified
MEMETVDYAAWIGMDWGSYKHAICLQAAGSSSVARYTLEQKPEALHAWFMNLHARYGGGKVAIAIEQTRGAVIHFLLGFDFVHVFTIHPKSLKNYRDALHPSGAKDDPTDAELLLQFAMIHQDKIKRWVPAEPEIRLLLRLSEFRRKTVGKRVRLTNELTQIIKDYFPGALDFAGGLDTVMACDFLSKWTTLKKLQKSKPETIRRFYQEHGSRRAQLTEERLSQIRSALPLTTDQPVIESSALAVKAIVPPLRSAIEAIAEFDGRIEEVFQKHPDSDIFSSLPGAGSALAPRLLAVMGSDRSRFNSSEEVAKYSGIAPVTERSGKAKWVHRRFACSRFVKQSFHEFAAHSILQCDWARAYYDRKRAEGKGHHEAIRALAYRWIRIIYRCWKDRVPYNAQTYMESLRRKQPSWLASLEGSESLNAQSGPRRSKNHVSS

SEQ ID NO: 308292 - protein, 410 aa, unidentified
MDWIACVGVDWSDQKHDYALRGRDGELEQGKFPSGPAEVHAWVARLRAQYPTGTIVVALEQSRGPLLYALSMYDFVALVPINPRAATAYRESLHLSGAKDDPVDAALIRDFAAAHLDKLRVWKADDALTRRLRLLAEFRRKLVDHRTGLTQAFTDAVKQYFPQILEWFSNGVLARAFLSEWPTLEQAQNVSDQSIRTLVRSCSRKSQAKIDELIVKIRAAVPLMSDQAIIAAMVIRIRSLIALIEELDEQVRAHDQAIAQAWIEHVDQKLFDSFPGAGPVLAPRLAAAFGSDRTRFEDASEMHNYSGTSPVTERSGKRCWVHARWQRPKFLHQTFHEFAEASIPHCAWARAFYQRQRQRGAGHRAAIRALAYRWIRVLFRCWKTNTPYDEATHIESLRRRRSPLVDCLAA

SEQ ID NO: 308293 - protein, 389 aa, unidentified
MTRRRQSRIRKEPVEMETISYVGMDVHKGSISVAVVKRGERVGREWRIANTAAEVRKLGRRLVRESGGEVRACYEAGPCGYGVQRQLQGLGAECAVVAPSLTPVKPGERVKTDRRDARKLAVYLRDGALTEVHPPSEAEEAVRDLCRARTDAGEDLLRCRHRLSKMLLRRGVTYGGRHTWGAAHRQWLGSIQFEHEAQRIVFADYLFAVEQLEERIKGLDAALAAQAEQEPYRERVGWLRCFRGIETVTAMTILTELHGFERFASPRELMAYLGLVPSESSSGERRQRGGITKTGNRHARRVLVECAWHYRLKPSVRRTLLRRRRGQPAWVLTIADRAQQRLHRRYWHLVLGRNKTSQKAVVAVARELVGFIWAVLQGPGEVRESQAIA

SEQ ID NO: 308294 - protein, 388 aa, unidentified
MTQTPVPCPVPAAPDYDRTLVLAIELSNASWVLAAQVPGLPRVKAKRTIEPTADALLAAIQGYRERAKTAGRRVERVVATYEAGWSGFWLARWLATHGIETHVVQPSSVPVDRRARRAKSDGIDAELLLRTLLAWLRGEPRVCSMVPIPAEADEDARRCVREREELVAERVALVNRIGAVLATLGVGEYNPLLRNRRERLDALRTALGTSLPPHAHAKISRMLDRLDLVRAQIAALEQERDAVLEDEVPDRAGKMIQQLATLRGIGVQSATVLVREAFVREFANGKALGSYAGLCATPYSSGGTEREQGISKAGNRRLRTVMVELAWLWQRYQPGSAEVTWFRARASGTGARMRKVMVVALARKLLLALWRFATQGVVLEGAIMKPAT

SEQ ID NO: 308295 - protein, 398 aa, unidentified
MLSIGIDVSKGKSTVCGMKPGGEIVYTPFEVQHTREGMSELVSLLRGSGEEVRVVLESTGSYHCPVVAALLENGIFVSVVNSLRMKRFCSQSIRRVKTDQIDAMQIALYGLAYWQELQPTRLPENTYRELQLLARQYYQMTSLLIKAKVDFNAICDQVLPGMQELMSDHAGRHKLSDFVLRYRHTTHILKMGETRFRKDYCKWAEKKGYRNHERMAALIFATAQNGIPVLPDAPSTQIVITEAIRVLHTVEASRDAILTQMQALAKTLPEYSLVREMPCIGDTLAPRLIAEIGDVRRFHSKRALIAYAGIDAPPYQSGKFSANNRHISKRGNRYLRKTGYEVMQSYVMHKPANDPIFTFIEKKRSEGKSGKLAMVAGLNKFLRVYYGKVTELYRSLPQ

SEQ ID NO: 308296 - protein, 418 aa, unidentified
MAKIRKYQQTCNSQTMIVAIDIGKAKNCVRFRDLDGNDSRPYEFSNSRAGFDKFHSLIQWHKIKYDAKHVVVGFESTGGYGVPLAHFLAKHNIKTFLINPCHTKRLKELYDNSPNKTDEKDPGVIADIIQLGRTLTIIIPKGVAADLRALVHTRERANSMIKIYRNQMQEIVFQVFPEFHYHIKNHLSKTALYLLQHYPLPDQLTELTIEELSALVKKKSRGKYSSEKASQLLNAAQNTVGIKEGTSVFALEIGKLIQSIIDIQDYISDLEKQIHKHLQKVPFSRSIMSIRGIGKVTTAIIIGETGGFDGFTHAKEIEKLAGLNLYEISSGKHKGQLRISKRGRSLLRKAFYFAAINVVREHGVYHDKYQTYLERGMPKKKALISISRKLVRVIFAIAQKNTEFDVNYEQKKSHKEAA

SEQ ID NO: 308297 - protein, 423 aa, unidentified
MEVMNERVAGLDVHKEAVVCCVRIVAGGKASRECRTFETTTAGLEALLSWLTQSGCTHVAMEATGVYWKPVWNILSDGKFELILANAAHIKNVPGRKTDVNDAMWIADLAAFGLIKASFVPEEKIQELRSLMRARKQLVREQTRHIQRIQKTLEAANIKLDSVISDIMGLSGRRMIEAMVAGVRSPQKLAQLADRRIKASPKALYDALHGRLTDHHRFMLQLHLGQYDALGSSIAQIDAQVDAAIARIDEEAAAGRGSFRDLTALLDGIPGIASLAATSILAEIGTDMSRFASDGHLVSWAGLSPGQNESAGKRKSSRLRKGAPWLKTLLVQCAWAAVKKKDSYYKAQFNRLKSRRGPKKAICAVAASMLTAIYHMLKNGVEHNDLGASHFDRRPAAIKANRLVAQLAKLGFRAELQPLAQAA

SEQ ID NO: 308298 - protein, 352 aa, unidentified
MPEHPSPSQSYFAGLDAHQEYVIVAIVDKQGTLVHEARVRTAQPATLVSTLASYHSPPHPLTAVVETSPFWPWIHDQLVPQGMRFVLAHAQELEAIARAARKSDQRDARLLARMLAAGLIPPAYPKPPAQREAACLLRHRAALVRMRTQLANRIHSQLHAVGLALPRERLLRKATREWLVTTAGPVLSTEQRLLVDTHWVLMRRLTRHLATVDARIASAAAVHPAAGLLASIPGVGPYRSLLLATELLPLTRYASVHKFVGYAGLAPITRTSADTVRHGPLPRAANRWVRGALVSTIPTHLRLAPESHLSRYYARQKARLGWQVARVATARQLARIVYSMLASGECWREAEA

SEQ ID NO: 308299 - protein, 429 aa, unidentified
MKEKANFNQFAALLGLDWADEKHDVALRTPDAATVEHSTFAHTPEAIAAWVGSLRQRLGSGPIAICLEQSRGALLNALSSHAGLVLYPINPQTLAKFRTALHPSGKKDDPVDAGLLLELLEKHGDQLSPWQPEDPATRQLALLVEARRGFVDRRTALINQLQSVLKSYYPQAFELMGEDLGSPMATAFLKRWSTLAAVQNAKPSALRAFYYGHNSRSADLLTERLRLIKNGLALTKDTAVLAAQSLAAESLAAELAALRPVIARYDQQIERLFAAHPDAPIFASLDGAGAVMAPRLLAAFGTDRNRFADAQAMPCYSGTAPVTEKSGKQKWVHRRWSRPIFVHQSFLEFAGHSVRFSAWAKRCYEGLIQKGKGHWAALRVLAVKWQRIMWRCWQDRRPYDEAIYLQSLHQRGLARYADLVVAGAKTHGE

SEQ ID NO: 308300 - protein, 366 aa, unidentified
MKKTSTVRVNGNMIFKGHKLTIGVDLGDRWSNCCVLDEAGEILLEQKLPTTPEAMKQTFEKMPRSLMALETGTHSPWVSRLLKELGHEVLVAHAQKVNLISKSTRKDDRHDARTLARLARIDPELLGPVRHRSAKAQIHLTVIRARAELVSARTALVNAARGLVKSYGQRLPKCGTQQVSRELAAELSAELREVLEPLLKEIESLNERIKEYDARMEKIARESYPQVALLKQVKGVGTQIALTYVLTLDDPHRFPKSREVGCFLGLRPGRRDSGQSQPQMRISKEGDRYLRTMLVQGTHYILGPFGEDSDLRRWGLRLAERGGKNAKKRAVVAVARKLAVLLHRLWVSAEVYEPLRNSHKAMRAAA

SEQ ID NO: 308301 - protein, 320 aa, unidentified
MSEPYTVGIDVSMDRLDVAILPGGQRLFVANDAAGWAELVGRLQRCRIAAIGLEPSGGYERGVVRALLAAGFSVRRINPNKLRQFARARGVLAQNDRLDAQLIAEYVAIMPTRQVQSDPTAERLAEIVTMRRQLCDEHVAAENQASHLEDAMLRRIAKRRLARIEADIRLLEKRLAELVAAEPGLARRFRLLCSMPGVGATLAYTLLALLPELGAIGRKQIAALVGLAPYDFDSGKFRGQRHIYGGRMAVRNVLYMAALAAFRFNPALKAFHRRLLAAGKKPKVAIVAVMRKMIGVLNAMLRDETDWVDHTADRHIVPAI

SEQ ID NO: 308302 - protein, 351 aa, unidentified
MIVIGSDPHKRSYTFSAVVAATGELRSSETVLATAAGHARMVAWARGVDAERVWAIEDCRHVSGKLERFLLARGERVIRVAPKLMAGRRRGSRQRGKSDPIDSLAVARAALEEGIDTLPVARLEGPAREIKLLLDHRDDVVAERTRIQNRLRWLLHDRWPELELPTGCLDRLVWLDRLAERLRRTEQSADIRVMRAQVRRLRELSREAAVLQRELLVLVRGLQPRLLALPGVGTLTAAKLIAEIAGIDRFRSQAKLARLAGIAPIPASSGNRTRVRLDRGGNRQLNAAVHRIAVTQLRIHPPAQDYIARRLSDGKTKREALRCLKRHLIRTIYNTMNNTDANAPAPALALT

SEQ ID NO: 308303 - protein, 341 aa, unidentified
MSYLGVDLHTNSFTVCRRTKQDKESIRTFQIARIADFRKTLRKRDLLAVEATGNTAWFVSQIRDRIRKVTVVNPFQFEVIRRSVKKTDKNDAKTLAFYLSKGMLPEARMKTKENAQLHSLATTRDKLVKQRTALINKIHNVLNSYGIKFKKESLGSEKGLKSVWAYEWDVIVKIELEVLIEQIRGFNKSIKILDKEMVEHGQKLKGHESLTSIKGIAGRSATVLLTVIGNVNDFADENKLAAYFGIVPRVSDSNETVRHGRITKHGSKLGRTTLVQCTLVAKRYSPYLRQYYERIKSHRGSGKAIIATARKFLGIIYNTLKNGWVFEDFPNFVLASSCVKK

SEQ ID NO: 308304 - protein, 360 aa, unidentified
MFTERTSVGLDVHARSVVAHALDTITGEVLRARLCPDPVEVTRWVKGLPGPAAVIYEAGPTGFGLARVLGSEQIRTVVAAPSKLQRPAGDRVKTDAHDAEHLATLLRLDAFTAVTVPDEATEAARDLVRAREDCRADLMRARHRLSKLLLRHGIVYSGGKAWTGTHQAWLRRQRFDSVLTQAAFDEAYDTVASITARRDRLEQRINVLAGDSQYTAVVRRLGCLRGISTLTGLGLAVEIGDWTRFSGNSIGAYVGLIPSESSSGQSRSQGPITKTGNSHVRRLLVEAAWHHRVRYVPGKTMQDRWDLASPAARARGDLGNRRLHQRWEQFQARKKRPTVANTAIARELAGWCWSLAVLDP

SEQ ID NO: 308305 - protein, 353 aa, unidentified
MNAWAESSPYPASASTRWTSCGEVFCERGMGGVDVSKEGLDIAVRPGDEAWSEQNNQAGIKALTRRLKKLAPQRIVLEATGGYEYELALQLGKAGLPVAVINPRQVRDFAKAVGRLAKTDPIDAKILSHFAEAVKPPCRLMKDPKLEVLDQLVTRHRQLVEMIVAERNRRMSLRGEAQNDIDVTIRFLKGRLKQVDERLKALIDKDPEWNRRAALLNSVPGVGPVLISSLIAELPELGTINRKQIASLVGVAPFNNDSGKSRGRRHIWGGRAHLRALLYMSVIAGLRFNATIRGVYQHLRQVGKPAKVALVACMRKLLVQLNAMAKSAQTWNAHLPIPSVLASAELIPVKLPA

SEQ ID NO: 308306 - protein, 405 aa, unidentified
MEIFVGIDWAEAHHDICVLDETGTVLAKRRITEGLEGVGQLHALLADHAAEPNQVMIGIETDGGLLVGALLAAGYEVYAINPLAASRYRERHVTSGAKSDPGDAKVLADLVRTDRHNHRPVAGDSELAASLQVLARAHQNLIWSRQRLVNQLRNNLREYYPAALAAFGTELAHPVALGVLDAAPTPTGGRTLSQSKLAAILRRAGRERGVEEKAAAIQAQLRAPQLAAPALVGEAYGKTVASTVRLLREMNAELSHLEAELAPSFEKHPDAEIYRSLPGLGIVLGARVLSEFGDDRTRFAHPKARKNYAGSSPITKTSGKSRVVLARLARNRRLADACHQWAFCALTGSAGARDYYHRLRQRGKTHHQALRALANRLVGILHGCLDHRQIYREDIAWPRSLTVAA

SEQ ID NO: 308307 - protein, 345 aa, unidentified
MSTIVAHHYPYGIGVDTHAATHTFAVLDNTGVRHDMQTIPTTAAGMRRALAWAGRRTAGDLAALWVIGGIGSYGGQFAQAVETAGYTVVEAARMTKKSRNDVGKNDAIDAHRIASTVLSLTTGQLRKPRDNKGVQAALKTLLSARDVMGRERTRAINALTALLRTTDLGIDARRALSKRVITQVAQWRTRQEALATATARVEAIRLAKRVREADQDLRDNDAQITELLKHTPAAGLTQETGVGPVSAATVLVAWGYHGRIRSEAAFAALAGASPLPASFGTTIRYRLNRGGDRKLNRALNVNAIHRMIHHQDTRDYVKKRLAQGKPIERYAEHSNDILRADTTAI

SEQ ID NO: 308308 - protein, 371 aa, unidentified
MKEAITSYVGLDIHKDTVAIAVAGVGRTAPRFIGSINAFPAELCKALRRQRCTPNNSLLVYEAGPCGYGWARYLCKQGWRCEVIAPSRITRQAAEKRLKTDRRDAMLLARESRAGNLTAITVPDARDEAMRDLCRGREDIVAARLKARQQLKAMLLRHGHVYQGKSSWTQAHERHLSTIRFEHPAQQIAFDEYRQAIKEAQERIDRLSQALHEQCESWRMRPVVKALMCLRGIDFLAAVTLIAELGDLTRFAHPRSLMAYLGLVPSEFSSGGNRHQGSITRAGNKQARRILVESAWTYRFNPRISRPIEVRQCGQPKVIRDIAWKAQTRLAYRFKKLNAGRKMTQNKCCVAVARELAGFIWDIARHVKVPA

SEQ ID NO: 308309 - protein, 456 aa, unidentified
MRAESTPGARGPVFCGVDTHADSHWLCVLDWRGRRVLSRQFPADAAGYEALAGAIAATGEPACIAMEGTSSYGAGLTRHLASLGLPVREALSPARTQRRRPGQGKCDEADAERAARAAMSGSKLGTPKSQDGWVDGVRCMLAARSGAVKARTSAINTARSLLTTAPEGLRSRFRGMGGPRLMGELPSVRAEGALGAALGALADLWAAARDAALDMERAIEASLEENCPALLAMYGCGPVSAAKLAVAAGDNPGRLRSEASFAAICGACPIPASSGKTVRHRLNRGGDRQANSALHEIARQRVMRDPETAEYAERARGRGKSDREVMRCLKRYVAREAYRALMRPHEIRRPEDASELVAARRAAKVSQVRAASILGTSEKYISMLERGQRELKPIRRAYEAWVEAGLPLDWDRQAFEAERKMDSKNTLPNRSVRTQRGSPHEVRSEPLCMSEDTNLI

SEQ ID NO: 308310 - protein, 353 aa, unidentified
MGRPREKRVGKKEDLFVGIDLHKQRWHVTIRTSDVELFSASIPGDWGSLRRIFDRYAGHRLQAVYEAGYFGFRLHDQLMEANIECLVTPPSLVPQEYGNRVKTDRRDSRKLAHLLAKGMLKRVWVPSEEELFHRQVIRRRRQLVRDRVRTQSRIKAELRFYGIHLEEPRGRWTQIYFAKLRRLDFGNRWMQESFNRLLEQYEFLSAQIDKQTQLLQELSETVLYRERVKILQSIPGIGLISAMELLLELQDVSRFRRAEQLAAYVGLTPSQYSSADKVRMGRITGIGKNTLRSLLVEASWTLIRKDQAMQEKYDRIKIRSGGKRAIVAIARTLLLRMRRMLLDKQIYALKLAA

SEQ ID NO: 308311 - protein, 401 aa, unidentified
MTHAPAKQSHTPPPAPGATGRAVGLDIHPDSFAAAILDGRDPLRARVVHSITRQPLEALGAWAARHTTAGDVLILEASANSFTIAERLTALGRQVFILESHRAGQIGKSYLANDKVDAAKIARIYLSGLAIKVWPPDAATRQRRELLSTYQRCVKESTRAQQHLRSFLNEHALRLPKGFRLCRPEALARLLPLKEWSPRQKLLLGEMHGSLLAARERRTRLRRMMALEIEETPDFLRLYKLAGLSLVTTYALVAIIGDITRFASSKKLVSYLGLNPSVVESGHFEGGGALHQHGRGSLRALLIQASKRLLTCVNPLQKWGLSVALRRGQNKAAVAVARKLTVAVWHVMQGHWNKTLEETTTLLTKLTKLATALGVSTLRDLGYASKLAFQEQKLEVLRTHP

SEQ ID NO: 308312 - protein, 339 aa, unidentified
MEKVTTVGIDLAKNVFSLHGVDAAGKAVLRRTVRRERLVETVASLSPCLIGMEACSGAHEWGRRFQQHGHTVKLMAPKFVAPYRKSEKNDGNDAEAVCEAVSRPNMRFVPVKSTEQQALLAVHRVRQGFVVERTALINRLRGLMSEFGVVLALRSVTVRRQAAQAAEQLPELARGAIGDLLEQLRVLDERIAKYDKQIEAQARLSEPARRLMQIRGIGPTTALAIVATVGDAREFKNGRQFAAWIGLVPAQHSTGGKSRLGHISKRGDAYLRNLLVQGARSVLQVAGAHQDRISRWALELQQRRGYYRALVAIANKNARIAWALLAKRESVRRAQPNTL

SEQ ID NO: 308313 - protein, 412 aa, unidentified
MEVVHRCCCGVDVHKDTVTACVAWAEPNGKKRHEKRQFSTVTRELLALADWLRGYGVTHVAMESTGVYWKPVWHVLEGSFELLLVNAQHVKAIPGKKTDRRDSVWLAELLQHGLLKSSFVPPAPIRELRDLTRYRVTLCQECNRIANRIQKVLEDANVKLASVATDPLGASGRAMLKAVIAGEEDPTKLAEMARGLLRRKIPALQAALDGRVTTHHRFLLQELFDHLEFVEGKIARWETTIADRLRPFEETVRRLCTIPGVDRVSAWGIIAEIGLDMNRFPDARHLASWAGLCPGNWESAGKRTSGRIRKGSAWLRRHLCQCAWGVSTKQKNYLSALFRRLAARRGLKRATIAVAHALLGIAYHVLKHQVEYRDLGPNYFDSLDPARLKRRLVKRLEGRGFQVTLAPQSLPA

SEQ ID NO: 308314 - protein, 370 aa, unidentified
MKETITSFVGLDIHKDSIAIAVAEAGRSAPRFVGTTPSEMASLCKALTRCAKRDNTLLVYEAGPCGYGWARHLSRQGWRCEVISPAHITRKAAEQRSKTDRLDAVLLARESRAGNLVRVVVPDERDEAIRDLSRAREDASGARLRARLQLKAMLLRHGRAYQGKTSWTAAHQRTLGTIKFAHLAQQIAFDEYRQAVRDAHERLERLTQALREQCEHWRMKGVVRALMCLRGVDFIAAITLIAELGDLSRFAHPKALMKYLGLVPSEYSSGNTRRLGPITKTGNKHARRILVEAAWTYRFNPRVSRPIEVRQEGQPKAIREIAWRAQLRLAYRFRKLNAGRKMTQNKCCVAVARELAGFIWDIARHVNIPA

SEQ ID NO: 308315 - protein, 321 aa, unidentified
MNTTMPLGIDVSKAKLDCALWLGSKYRTKTFANTPEGFSRLSEWLHQHGADQVHACMEATGIYWEAAALYLADAGQRVSVINPALAKAHGQSLGLRSKTDAVDAKLLADFCREKQPPAWTPPSGAERRLRALVLRHQSLVEMQTQEKNRCESLREEVRTSVETHLAWLAAELERIEQAIAKLLDDDDHLRGQRELLASIPGLGERTIAVLLAYGVSGERFQSARQFVAFAGLSPRLHESGSSVRGKPHLSKIGHACLRRALYMPAMVTLYKTAWGQRFRQRLATHGKPPKLIIGAMMRKLAQVAFGVIKSGRPFNPAFHGA

SEQ ID NO: 308316 - protein, 368 aa, unidentified
MKKVSTAAAKASRNISRQTLTVGLDLGDRNSWYCVLDEAGQIQLEQRVGTNAKALREVFGAMPRSRIALETGTHSPWISRLLSELGHEGIVANARKLRLIGESRKKDDRLDAQTLARLARIDPQLLYPVKHRSAQGQADLAVIRARAGRVRARTAMVNTARGLAKSYGERLRGCNLRNLNPEKAEALSPELQAALQPLLAALESVSQQIREYNQQIETLAQERYPQTALLKQVKGVGTLIALTFLLTLEDPQRFGKSRDVGCYLGLQPGRRNSGKSQPQMHISKEGDPYLRTLLVQGAQHILGPFGVDCDLRCWGLKLAERGGRSGKKRAIVATARKLAVLLHHLWVSGEVYEPLHNSRRRTTVAAAA

SEQ ID NO: 308317 - protein, 403 aa, unidentified
MKSVLSIDVANGKSEVLLITEHGEILIEPYEVKHCLNEFNQLKEKINTFNLDDLTIFMESTSTYHLPIQRFFTNNYFKVQVINPILGKNNTRNLRKTKTDIEDCYNLADLFFKNTVKIHTKEMNTIYSNMIELSRQEKHLTENIVRSKNRFKQIIANAFPEYTKCFTSNDIYGETSLNFIREFPHADIIKSKRIDVLANNIYKSTKGYLPYSRCLIKAKKIKNLAKNSYPGIEINSCEVKNLINIIDIIIYNSNKLNEVKQNIISLAKQTPYFNIINSIYGIGETSTAQIIAELGDINRFENIKQLNAFCGLDPTIVRSGKSINYNGPISKRGNRNVRKILFITCCSIIRSSVLHNIDTDILIYYRKKQAENKHFKECIIACSTKLLRIIFAMCKNNSLYVQK

SEQ ID NO: 308318 - protein, 423 aa, unidentified
MDILHERVAGLDVHKDTVVACVRIVAEGKTRRECRTFATTTDALGELRAWLEQCRCTHVAMEATGVYWMPVFRILGDGEFELIVANAAHIKNVPGRKTDMNDGMWIADLLACGLIKGSFVPDEEVQHLRALTRTRKQLVREQTRHVQRIEKTLAEANIKLSSVISDIMGASGRRMIEAMINGVHQPNKLAALAGKQIKATPKELYDALHGRLTDHHRFLLGLHLKQWDNLDETIRTLDREVDQRIARMEAPAEGGGTPFRALIELVTTIPGVNTVAAPSILSEIGADMSRFPTAGHLVAWAGLCPGHNESAGKRKSSRLRKGAPWLKTMLVQCAWAAKRKKDSYYRAQFFRLQSKRGPQKAICAVAASILTAIYHILKNGTEHHDLGANYFDRRPVAVTASRLVARLKKLGFTVQLQPIAEAA

SEQ ID NO: 308319 - protein, 429 aa, unidentified
MKIIYPRVCGIDVHKQFIVAVICISESVEPIYLKKRFSTFHNDLIRFRNWLIQNDCQNVCMESTGKYYIPVYNVLESHISNIVVANPKWVRAVKGEKDDDKDAKWIADLFKFDIVRSSFIPQKDFRILRELTRYKYKLVNMRSSEKNRFQNALTSGNCKLDMVFTDVFGKSASNIIDLILSDNPYTDEDILSKVHKKCKASPDMILDSVNGTDLTPVQKSRIELVNDHIKQLSSNIQRLDKLIDLMIEPYEDYISFLCQIPGVSRNSAIIVLSEIGVDMNQFTSTRRLTSWAGLTPSSNQSAGKKKSVRISRAGVYLKPCLVEVAHAAVKDKNHPYYANKFNKISKRRGKKRAFIAIARKILVAAYHMLLTGEIWNPADLAEVETPVEQRIKYVKNNLKSDIKQLLDIGLTVEELTLMIQQNANIIATQ

SEQ ID NO: 308320 - protein, 339 aa, unidentified
MKTHVGVDLHQRFCYLTAVDASGRLVRQGQVVNEAAALRAWLGEVPSPRQVVVEASSFWPAFVRAASPVSDRLVMVHPQRMKAIASARLKNDRVDSETLAQLSRADLLPEAWMAEEAVQQLRLLTRLRIVLGQVRARAKNQLQAVLHQEGFLKPVSDLFGRRGRAWLGDIALSAAGRRAVAVWLAQVDHLDAEIAVQQRELERLAAADARARWLQTVPGIGAYSAMVILAEIGDIARFPAKRALASYAGLTPVVRESAGKRKRGGIGHHGSATLRWIMLQVAQVAARCSPAVRAWFLRLKQRKPAQVALIALARKLLAAVWALLRNGVCFEERRFALPG

SEQ ID NO: 308321 - protein, 354 aa, unidentified
MLIIGCDYHPSFQQIAFVDTETGEVKERRLEHREEAEKFYRDLAAQGRQVRVGMEASGHAGWFERLLAELQFELSMGDATEIQRKRGRKQKTDRQDAQHILGLLLKNDFPPIWVPNWENRDLRQLLWHRHRMVQARTRIRNQLQAVALNEGLLFRKRLWRERGRQQLEAFQLAPWASRRRHDLLELLDRLNPTITELSQAIEREVEKCPAAQQLMTHPGVGPLTSLAFVLIIGDANRFQCGKQVASYLGLVPLEDSSGNRRRLGHITKQGSSMLRFLLVEAAQVTVRSLPEWRRKYAHLMMRRGRKTAKVAMARRLAIRLYWMMRQGWDYQQWNEFGSHAGQPGHRDGVQSNIE

SEQ ID NO: 308322 - protein, 416 aa, unidentified
MVDDVRWFVGIDWATQSHCVCLLDAEGRQVGQREFAHDGAGLTELRDWLLEKTKAAPGQIAVAIETPHGPVVEMLVEHGFVVFAINPKQLDRFRDRFTVAGAKDDRRDAHVLAGSLRTDREAFRQLASDNPLVIELREWSRLTDELQQERTRLANRLRQQLWRYYPQAAKLTDDVAEDWFLALWQKVPTPASAAKVTEKAIARLLHEYHIRRLDAAAVLETLRKTPLFVAPGTTEAACAHIRSLAARLLLVNQQIKEAQQSLDRLCTKLEEERSSGQSFEQCDVTILRPWPGIGRTNHATLPAEATEPLRRRDYHALRALAGVAPVTRRSGKQRFVIRRLACNRRLQNAVHHWSRVAIQRDAAARRRYEALRQRGHGHARALRGVGDRLLYALCTALQRQTPYDPNYKKLQMAAQG

SEQ ID NO: 308323 - protein, 400 aa, unidentified
MISVGIDVSKEKSTVCILKPYGEVVSRPFEVCHVEKELSELTSMLLRLNDDVRVVMEATGIYHLPVLCYLKEKGLFVAVVNPFEMKEYRCQGLRRVKTDKQDAITISNYGIDHWYRLKNYEAEESVYAELKLLGRQYRHYMRMRVESVLELTHLLDYTMPGIKTLLKGWNETNGKDKLGDFAEEYWHYDNITKKSEEQFIKSYLKWAKEKGYHQSQDKAIKIYALAKEGIPTVPSDTPSTKMLVQEAVRVLREVDNTLMTILTQMQALAKSLPEYPVVRAMGGVGNVLAPKLIAEIGDVRRFHSGKALIAHAGIDAPPYQSGQFIGTERKISKRGSSSLRKIGYEVMRCLKTHKEPEDAAVYRFILKKEKEGKSKRAAKIAGLNKFLRIYYARVMEVYQN

SEQ ID NO: 308324 - protein, 343 aa, unidentified
MDHFAGLDVSVKETSVCIVDDTGRIVREVKVASEPEALLAVLTNPACHFKRIGLEAGPLSQWLFSALAEAGLPVICVETRHMRAVLKAQINKTDRNDARGIAQMMRVGLYRPVHVKTLRSQKQRMLLTHRKLMQSKAIAIENDLRATLRNFGLKVGVVGTVKFEARIKELVENLPDLVVLVEPLLIVRRVLREQIGILHRRLLAIVRNDAVCRRLMTVPGVGPVVALTYRATVDVPSRFRNSKAVGAVFGLTPSKHQSGESNRTGGISRCGDEMMRMMLYEAAHIMLVRSAKWSWLKAWAMKIARHRGLKKAIVALARRLAVIMHRIWVDGTEFRWTREVAAA

SEQ ID NO: 308325 - protein, 352 aa, unidentified
MIVIGVDVHKQSVTAVAVDEAGRMLDERTVPVGSDALVGWAAELDGERLWAIEDCRLLTPWLERPLLGLGEEMVRVSPKLTVPERRAGRVRGKSDPIDALAVARAALREPDLPRPQPGEHVHREIKLLVDHRDDLVDERMRTQQRLRWHLHELDPTLVVPLRRLDRASHLERVGRWLARREQEVQVRIARELVRRIAELTRRANELERELASLVAAQAPALLELPGCGTLTAAKLLGESAGAERFRGDAQLAMHAGAAPLQASSGNRNRHRLNRSGNRQLNCALHRIAATQGRHHPPARAYLARKEAEGKSRKEALRCLKRHLARTVYRTLTAPTKEKMKASNQAALTPALT

SEQ ID NO: 308326 - protein, 410 aa, unidentified
MDSLHTDCAGLDVHKDSVVACVRHLRNGKAATSVKTFKTTTGELLKLSDWLSAEGVTHIAMEATGVYWKPVWHILADGEFDLLLANAAHVKNVPGRKTDVKDAVWLADLLAHGLIRASFVPDEPTQHLRDLLRTRKQFTRERTSHVQRLQKTLEDANIKLDSVVTDILGLSGRRMIEALIAGQTDPQTVAALAHRNLRATPTALEAALRGRLTGHHRFLLKLHLDHLDAVDAAIAAIDGEVDRTVEPFRAAIERLTAIPGVSALSAEVIVAEIGIDMTRFPTDAQLISWAGLCPGNGESAGKRRSTKLRQGSQWLKTALVQCAWAATRTKGSYLQAQFLRLRSRRGAKKAICAVAASLLTSIYHMLKNGVPYKDLGAAHFDRISRQRKVNTIVHRLRNMGYAVKIEPLAV

SEQ ID NO: 308327 - protein, 460 aa, unidentified
MNPKRSKSRNGGKMPMVHPNAAAIDVGATMHMAAVRADRAPEPVRSFGTFTVDLHRLVDWFTECDVETVVMESTSVYWIPIFELLDARGFTVFLVNARDAKHVPGRKTDVSDAQWLQRLHSFGLLRASFRPKGQIAELRAYVRQRERLLEYAASHIQHMQKALTEMNLQLHHVVADITGATGLRIIRAILAGERDPEALACLRHYSCHSSAETIAKALTGSYRAEHLFALEQALALYDAYQEKAFACDARIEAVLKKLSIHRGHGHGSAPRASRRRNRTDQANALAFDVREALFALLGKDITTIDGLGPYLSLKLIAECGDDLSSWPSAKHFTSWLGLAPSNKVSGGKMLSSRTRRSGGRAAALLRLAAVTVGRTDTALGAFYRRLSARIGKAKAVTATARKIAVLFYNAVRYGMDYVDPGASSYETRYRTRVINNLHRRAKAFGFVLQPLEPKVGAAVS

SEQ ID NO: 308328 - protein, 427 aa, unidentified
MAAREKVGEPEFVAFVGIDWADQKHVWCLQPANSRKREGGELEHKPEVVEAWVSELRQRFGHGAIAVAVEQVKGALVYMLGKYECLHLYPVPSTMSASMRQALYPSGAKDDPRDADLLLDLLLQNRDKLRRLTPDNEATRRVQNLVEERRKLVEEKTAQLNRLIGYLKVYFPQMLEWFAKLDTKLACEFLERWPSLEELQAASPAEVRKFFRQHRGRHPELTEWRLQGIGQAMSAIRDGAVIEAKRMVVQVIARVLRTLLEGIAALDAKITEAAEAHPDFFIFQSFPGAGAALAPRLLAALGSQRDRYASAEEVQKYSGIAPVTERSGKKKWVHFRWACPKFLRQSFHEWAGHSIAQSVWARAYYQQQRQRGKDHHAAVRSLAFKWIRIMFRCWQDGAAYDENRYLATLAKRGSLLIPVPATAATSL

SEQ ID NO: 308329 - protein, 343 aa, unidentified
MDHFAGLDVSVKETSICIVDDTGRIVREVKVASEPEALLKVLGKKEAWCFKRIGLEAGPLSQWLFSALAGAELPVICVETRHIQAVLKAQINKTDRNDARGIAQMMRVGLYRPVHVKTLRSQKLRMLLTHRKLLQSKAIAIENDLRGTLRNFGLKVGMVGKAKFEARIQELVENIPDLGLLVEPLLIVRRALREQIVILHRRLLAIVREDEVCRRLMTTPGVGPVVALTYRATVDVPARFRKSKSVGAVFGLTCAKYQSGEIDWSGRISRCGDEMMRVMLYEAAQSMLRSKKWSWLKAWAMQIARRRGMKKAIVALARRLAVIMHRIWVDGTEFRWTRETAAA

SEQ ID NO: 308330 - protein, 353 aa, unidentified
MTGTKYIGMDVHKESISIAVRNDTGKLVMECVIETKANVILEFIHGLRGELQVTFEEGTWATWLYDLLKPHVTKLVVCDPRKNSRQGNKNDRIDARELADRLYMNKLSSVYHGGAGVRTLKELARSYLTISKDLGRVMSRVKAIYRSWGIPCAGKQVYAPRHRAEWLAKITEVGVLRRAEFYYQQLDALRVLRQAVRRDLLTESKKHKAIKLLRQIPSIGAIRAALLIALIQTPHRFRTKRPFWKYSGFAIEMHSSADYRSVKGELQKSKKQISVRGLNRDCNHDLKNLFKSAATIASVKPGPFQEFYAALVAKGMRPEMARLTLARKIATIVLIVWKRGVSFDAKYLKPQTA

SEQ ID NO: 308331 - protein, 478 aa, unidentified
MTKRKLSTFERLWSGRLGRKERRELERRLKSADPRLPVIHADAAGIDVGNESHFVSVPEERDAQPVREFGSWTAELESMATWLKACGIGSVVLQSTGVYWVAVYDVLQRHGLEVNLVDARATKNVPGRKSDVQECQWLRRLHTYGLLRPCFRPAEAIRAVRTVWRLRDEQVKEAGRAVQHMQRALIQMNVQLHNVISDLSGVSGQAIVRAILSGQRDAVQLAALRDGRIQASEEEIIHSLRGDWKEDVLFELQQAVAAYDFHRQQIAQCDQQLEKYLAALPSRKATVNNPQGSSISVRTSERKRKPKGNQPAFNLAAELERILGVNAKSIEGLDVMTIQTVLAEVGPDLSAWKTERHWASWLNLAPKRDVSGGKVIRHVRIHRTNRVGNAFRMAAQSLLRSNSYLGAKFRYLRAKLGGIKAAKAMGRVLACLFYRLLTQGQKWIDRGMEEFERKKQQRELAALQRKAQTLGMQLLPAS

SEQ ID NO: 308332 - protein, 383 aa, unidentified
MTYSMLNLIAASQIGKIELSLNHFTLKGDTAMSEYNIGVDYHKKFSYLVVKNSKGKTLRSGQIPNDKKVLENFLSPFRNDSKAVVEACRNWCVMHDWLEDIVDDVILANPFKVKAIAEAKIKTDKIDANVLSDLLRADMIPQAYIAKRDVRDMRSILKQRMYFVRLRTMSKNRITTIFDRYPEETKQWKAQTDLFGKVGREQLEVINLREADRALIDRELNFIDLINVFIQEVEEVINLNFKESKNAKILQSIPGIGKFFAMLIDAEIADINRFRDAKKLAAYAGVVPSTYSSGGNTVHGRILKGGNKLLRWAFVEAVAPAIRSSEELRMEYDLLRTRMNWNKAKTAMARKLLTIVYKCLKEQRNYKKLNKIELEYKKFRRVS

SEQ ID NO: 308333 - protein, 370 aa, unidentified
MKKRITFVGLDTHKNSIEVALADEGANSEVRLYGSIGGDLDSLDKMIRKLRQPGAELRFVYEAGPCGYEIYRHLRAQGLHCDVVAPSMVPRRSGDRIKTDRRDACNLTRLYRAGELTAVYVPHEDDEAMRDLVRGRQDAINAQRKARQQLGGFLLRHGVRYPGKCLWGLAHGRWLAGIKMPHPAQQIMMQEYIHTVEECTQRVLRLNEQIQQLLPDWRMHPLVAALQALRGVAPVVAATVVVEIGPMGRFKNPRQLMAYLGLVPSERSSGGSVRRGAITKTGNGHARRALIEAAHSYRHPARISRTILKRQETLAEPIRQIAWKAQLRLCARFRRLIARGKSRNRAVTAVARELSGFMWAIAKQVPVPQG

SEQ ID NO: 308334 - protein, 352 aa, unidentified
MQTPQLFIGIDVHKKNWSVSIRTDLFDHKTFNMPSDPETLINYVNQHFQGYPVECCYEASCCGFFPYRQLSLAGWQVKVLNPSDIPQSAKNRDQKSDRVDCRHLAKQLHSGHLTGIYVPDEQQEQLRSLFRQKDNLTKVVRKLKSQIKAELLYYGIKIPLQYDTPRWTMDLTAWLNSVEWKYSPGHSSMQSKLRHLEFARQEWLSLNTDLRRYVCANYKEDYYLLMTIPGIGPTIAIGLLAEIGDIRRFKKFDQFASYVGLIPSIYSSGETVQVRGLTYRSKSLLRSYLIESAWVSVRRDPTMQDYYRSHKGKQPNKIIIKVAHKLLRRVWHVIKTGEGYKIGLKENSPEAK

SEQ ID NO: 308335 - protein, 347 aa, unidentified
MMLHAIDLHKTVLQIASMPSDGNQVVAEKRLAASEAALTAYLARWPASQHRIVVEATGGWYWIADFCRARGIELTLAHPWKLKAISGAKVKTDDVDTHTLLTMFRLDLIPRAHQVSPERREPRDLLRLRLRLVQKRTACLNSIARLLEKFNCRSVEELPELAQLQVRFHQAQIATLERQIRTIVKTLHRRLVADEDVQRLLRIPGIGRINAFTIYLEIDDVARFPALKNFLSYSRLVPGADNSAHSVRGKRSRAGNRYLKLAFSHAAVRAIQLYPEIRDEYRKRLRRKSKPLAQAWVRKQLACIVFHVLKDRRDFTGEFRGRKLSRTKTSQWPLRASPPRQLVAAGA

SEQ ID NO: 308336 - protein, 359 aa, unidentified
MDSPTSPNAEVSVTLGVDTHKDAHVAVALDELGKHLGALSVPTTVTGYKRLLGWARGFGTVEHAGVEGTRSFGAGLARFLRVEGIEVFEVIRSKRRDQYRSGKSDPIDAEAAARAVLAGTATGQPKGANGEVEMIRTLRSARRSALKARTQAVNQLRALLITAPEELRSELRGLSTARLVARASRLRPGANPPDVEAATKFALRSVARRYHQLSEEISELDEQLDRLIAQAAPELLALESVSTDTAASLMITAGDNPERLKSEAAFAHLCGVAPIPASSGKIVRHRLNRHGNRDANRALYVIALGRMSRDERTRAYVARRTKEGKTKKEIIRCLKRYIARELYRILTSSSTSACPITVP

SEQ ID NO: 308337 - protein, 530 aa, unidentified
MLVKISTCVVISLPIDIVSKLRYNLSLNRMIIGFLLRMVSSPIPVIKSINSFNSALRFGWLGALWSYLYHMLGCCSYCVEMDTYSKGNTNMSQVVKPFISVGIDVAADSSDMAIALPSQEFLDKRSFRIYHNKPESLTAALEKIKKAEEEHAMKVRIFMESTGNYHYPLFCFLRDAGFDVDIINPLITNSSRNYNIRKVKNDNFDARRIAKVGFDPNLKVSNMPTELVMNLRNLTREYYSLVDFRSSYVLKLGTQIKISFPQFKGIFSDLTGKTSLMILKKYTSPHEILKADPDVLAEEIAITSRRRSTAASKRDLIIQTATDALTFGAGVETNFLLIKRFIQIIEFYDQEINDILQQMKSIVDSHQDDLFIKQVELLQSVKGIGFLSALTLMCEIGDFSAFSKPKQLFAYFGLDPSVNQSGKFNGSRMKMSKRGSKFARRVLHMAAVQSVGTTKKGVPKNSVLRDFYLKKCHEGKAKMTALGAVSHKICNIIFAILRDHKPYIMKSPEQHCLNYTSELDTSITTLNLVA

SEQ ID NO: 308338 - protein, 330 aa, unidentified
MKTYNVILGVDVSKLTLDISCAERLLHIKIDNNSKGFGIFKKWCKTNGIDLKEVLVIMEHTGGYEYRFIQFCQSLAIDYRRVPGLEIKNSMGMVRGKNDKDDSFRIGKYGEQRIKELKASKSLDDNMLKFKHLLSFRKRLVRETAGLEATVGERKHMYELKKKDTITSIAMKKIAANKKYSLEVEKEIMELIRADEAMLLNYRILTSIKGIGPINAWMALAYTENFTLFTDARKYAVYVGVIPFNNRSGTSLKGKDRVSHLANKEIKQELNQAARSAITYDSEIRAYAERKLKNKPYSLVLNNVKFKLILRMFSLVNRGELFVQNYNRAA

SEQ ID NO: 308339 - protein, 640 aa, unidentified
MSQVCSSSNVVIGVGIDTARYGHHVSFLNPDRSTAFRGFRFPESRAGYQRLHDTLKQLADKHQNQVLFRIRIDAAGQYATNLETFIRSLPFNLAFSVGEPKRNQDYKNAHYPKSKSDPVDSAACARFAVVEQPPHVAPTPQQFLVIRDVVATLISQSRHTTRCTNQLHKLLARVFPELPLLANNINEAWVLSLLERYPTPARLAAARSATLCQISHVTPERAANLQQAARSTTGSFTGHFAEKLVIQAVQAVRDSLTREAQTLAWIELALEELPSGGHRHVISIPGIGPRTAAVLIAKIASIERFQTAAQLVSYFGIFPELNSSGVDKSGAPISRGQQRMSTRGCDFVRQMLWMAALSAIRANPPIKALYQRQIAAGKPASVALGHCMRKLLHQVFAIWKTDRPFDKCFQSRPRRTGHSSLPQAPVTQVPVTQTPIHPTPEESAVRDTPSKCQHDDRKQKAAAGRKGVEPQGKAVTATATLLRTRKLSAAAAPCNSKPAPPKDRPLQQPSPNGLVDYADLRQRVSIAQVLIELGRFDQFTGVGYQRRGPCPVHDHSGTQVGARHFSVNLERNVFRCLHPDCQVKGNALDLWAAVKKLPLYAAALDLAEALQIPLTKPSGEHAPDTHSNLQPPTDSNSQVS

SEQ ID NO: 308340 - protein, 419 aa, unidentified
MTVDFEWYAGIDWASEQHRVCLLDGGSRRAGEREFAHSGDGLAELCAWLIAMSGCEPQKIAVAIETPHGPVVEMLIDHGFAVHSINPKQLDRFRDRFTVAGAKDDSRDAQVLGHSLKTDAHAFRRLVVDDPMIIELREWSRLGDDLKQERNRLANRLRQQLWRYYPQMLELGGDDIAADWLLALWDEAPTPAKAAEISTQVIAPLLKAHRIRRFEAADVLRILRQTPLTVAPGTIAAASAHIRILAERLRLVNRQVKETNRKLDRLCRKLGQAPESEAGNRPEQRDVAILRSLPGVGRINLAALLTEASEPLKRRDYHALRLMSGVAPVTRRSGKACLVIRRLACNARLARAVYHWTRVASQCDPISQKRYAALRQRGHSHGRALRTLGDRLLGLACTLLRRQALFDPDYHCKEVAAAA

SEQ ID NO: 308341 - protein, 313 aa, unidentified
MATSSYVGIDVSKDRLDVAVLGKERVWQVENTQEGIVQLVQRLEELQPELIVVEATGGYQRAVVEALFWAGLAVAVVNPARVRQFARAYGLLAKTDKLDAQVLAVFGQKVQPRRYESKSEAGKHLSALLVRRRQLDEMLKAEQNRLRTISQSLKDSVQRMISTLKAEKKSLDEQIQQFVAEQEAWQEQQKILKSAPGVGKVTTATLLAELPELGKMDRKKIAALVGVAPMNYDSGKKRGYRKTKGGRGDVRSVLYMATLVATRRNPLIRTQYQHLLKRGKLKKVALIACMRKFLTILNAMLRDRQPFRCAACA

SEQ ID NO: 308342 - protein, 355 aa, unidentified
MTSAKYIGMDVHKETISIAVMNSMGKLLMESIIETKAGTILQFFAGLRGDLHVTCEEGTWAAWLYDLLKAHVTEIIVCNPRKNALLKDRNKSDRIDAQKLAELLRLNYLKPVYHGEHGLRMLRELSRTYLAINKDLVRVMNRLKALYRGWGIACSGRSVYAPSCREAWLKKIVEPGVRLRAEYFYQQLDTLLRLRREVRRNLLIESRKHSATKMLSQIPTIGPIRSAHLVALIQTPHRFRTKRQLWAYSGLAVETHDSAQFRYVDGQLFRSRKPQQLRGLNEDHNHDLKNIFKGAAQKATGGTGPFREFYERLLAKGIKPSMARLTLARKIAAITLAVWKKGVRFDPEQLKLQAA

SEQ ID NO: 308343 - protein, 343 aa, unidentified
MKLSRVGIDLAKNVYQLHGVDRSGKTVWKRRLKRHQWFKALLDRTEPGCVIGMEACASAHHWGRELQSRGYTVKLIPPQFVKPYVKSNKSDAKDAEAICEAMSRPNMRFVTVKTVEQQDIQATHRIRAELITQRTAKANQIRGLVAEYGLVAPKHMSSLRAAIPCWLEDAENGLTDDFRTLLHGVWNDLLGLDDRVGEMDQVIKRLAENHEDCVRLQQLRGVGPMISTAMIATVGDARQYRTSRQMAAAIGITPKQHSSGDRDRLLGISKRGDVYLRTLMIHGARAVVARAKYKDDRLSRWVTGIATKRHPNVAAVALANKTARMAWAMLRHETDYDPDFAIR

SEQ ID NO: 308344 - protein, 337 aa, unidentified
MEREYVGIDLHRRRSVIVRKNADGELLSKTRIMNDPLEMARAVGAAGPEPEVVLEATFGWYWAADLLEEMGAHVHLAHPLGNDWGNRRVKNDVRDANDLVDLLRLGRLAEAWIAPPEVRELREFVRYRAKLVRLRSGLKAQVHAVMGKHGVLPSRVDMFGLGGTAQLDSLQLPAAYDWRLKSLRDLIATYDKEVTRLDRAIAARMKNDRGYRAIQAIDGVGPVLGAVMVAEIGDVTRFASADRLCSWAGLTPKHRESDTKVRRGKISKQGSRLLRWAAVEAASKNHAGGDFKIAYRRIAERRGKNIAKVAAARRLLTLVFYGLRDGEIRCLANPARG

SEQ ID NO: 308345 - protein, 343 aa, unidentified
MQTITTIGFDIAKSVFQVHGVDAAGEVVIRRQLKRRSVLAFFQKLPPCLVGIEACASSHHWSRELQALGHTVRLMPPAYVKPYVKRQKNDMADAEAICEAVTRANMRFVPTKTPEQQSCLMLHRTRHLFIRQQTAVINSIRAHLAEFGIVAPVGRKGVMELLHVVADPGDKRVPEVARACLAALGTQLLRLKEQILEFDRMIMAWHRSNQTSKRLHYIPGVGPMLATALVASVADPRTFRSGRNFSAWIGLVPKQHSSGGKDRLGSISKQGDRYLRSLFVAGALAVIRYAKIHGTKHRPWLTALLGRRPTKVVAIALANKIARMAWAMMAKGERYKQPVALAA

SEQ ID NO: 308346 - protein, 315 aa, unidentified
MHIQQSFMVGIDVSKAHLDVAVEGKRAVVRFDNDAPGCAALATAVAGAELVVVEATGGYEMAIVRTLMAAGIPVAVVNPRQVRDFARASGRLAKTDQVDARVTLHFARAMRPAQIPHIDDGRIALAALVTRRRQLIDMAVAEKNRLEHAPEAVAALIGETLAALKAQLARVDAAIALAIEAEPDMAARRNLLLTVPGIGEVGAAVLIAELPELGAIDDKKLAALVGVAPMAHDSGTWRGQRHIAGGRATVRCALYMATLSAIRCNPAIKTFHKRLRDAGKPPKVAIVAAMRKLIIMINTILKRRTPWNQPQQHGC

SEQ ID NO: 308347 - protein, 339 aa, unidentified
MSTGEQRPGGALELVLGVDTHLDAHVAVALDQLGRRLGAAILPTTAKGYEELLSWAEGLGPVRRAGVEGTSSYGAGLARYLSSRGIEVLEVERPKRRWRGTRGDGKSDQADAEAAARVVLAGEAAGVPKSSDGEVEIIRVLRAARRAAVKARTQAANQLKTLVVTAPDGLRGRLRELSTKALVATAVRLRPGERPDNPEEATRFALRSVARRYRALSEEIAELDAQLARLVAEASPGLVALPGVGTDHAATLLVAAGNNPERLRSEASFASLCGVSPVEASSGKVVRHRLNRGGNRDANRALHSICVVRMGWDRRTRAYVARRTTEGKSKREVMRCLKR

SEQ ID NO: 308348 - protein, 422 aa, unidentified
MKNSTAEKLRQIPAGYLIAGVDAHKMKHAVVLRTQDAVVHSRFKVNNSREGFNELLERTRRGIGVARARGVIFAIEAGGNYWQPLAYFLDGNGVPFRMVNPFTLKRRREGDDVDRRKNDYHDAETAAELLRTGTFTESRLAEGEYAELRATYHGYHRLSEEISQVSNLLGSLLDGVFPEFCRVFRDIDSKTALAVLEAYPLPRMMAAMRGAEFRDAMLERYKGKRITRKKLAAIHEAACSSIGMLAGSTAVSHEILMLVQRLRLLHCQKEKVVSYLEGLVESMPESRYLLSVDGIGHITVAGLLGELGPVRNYRNAKQLVKMAGINPIQSESAGKRGSRTPMSKKGRPMLRHCLWEACTGLLRHNEQFKSWFNRLVARPVLSHPLNKREARGAMCRKLLHLAFALVKNSTDYRREEMVSATV

SEQ ID NO: 308349 - protein, 371 aa, unidentified
MKSIIYIGMDVHKKTYSLCALLKETGEIIGETKIPADVSLIIKFIENAKKSVDSDDVQIKTGYEAGCLGYSLYWQLAEKGIECDILAPSTMHRSAKNKVVKNDRRDAKNIAANLANGTYKSVYVPTDEDVEIKEYIRMMHDFKIELKKVKQHINAFLLRFGHHYPGKSKWIPAHIKWLKELELSDMYREILDEYLSQLEILSEKIERFKHRLEELSQKETYNEKIGQLRCIKGIDTTAAMTMHAETSDFDRFPTANAFASYCGLTPGEDSSGESYHRLGITKQGNSMIRTTMVEAAQVLVRGTIGKKGKKVKSKQKDQDVKVIDYADKAVVRLQKKYHRMIFRGVKRNIAITAVARELACFVWGIETGHIS

SEQ ID NO: 308350 - protein, 391 aa, unidentified
MSLYFVGIDISKYKHDCCIISATDQKVISKFTIKNDKAGFEELITTFNSLSSPEDIRIGFESTAHYALNLELFLENAHHSFMEVNPVLIKEYKKSTTLRRTKTDSVDCESIARWLMTVEYKPHSKGFYHAYSLKSLTRLRDRLIRQRSFYLVKITNVLDHTFPEFKPFFNERLSKTALYLLENYGSAEKMARMNSVSYEKLRSISRGKFSPQQFIALKNLAANTVGINNSIFDVELNSLLTLYKTLVTEINSLEKEINLLIEEVHPHYLSVPGIGPISAAIIYSEYGDISNFDNPGQMLAFAGIEPGINESGTESHGGRMVKRGSSQLRYALINCCLPLIRFDMTFATYYAKKRAEGKPHRVAITHVAKKLIRVIYALERQDTDFCAQKLR

SEQ ID NO: 308351 - protein, 377 aa, unidentified
MEKFSRYVGLDTHKDTIAVAVADASGGQARYFGEIANRPGAISKLMKRLSPDGEVVSYCYEAGPCGYGLYRQIRDAGHECAVVAPSLIPTRPGDRVKTDRRDSESLARLRRAGELMAVWVPDEEQEAMRDLTRAREDMKHLERQSKQRLNAFVLRHGQNYTTGKSKWTQAHWRWLERLRFSQPVQQIVLQAYIDCVKQQQLRVKELELEMARAMDDWRLAPVVKGLMALRGCQLITAMTTVAELGDITRFDSPRQLMAFLGLVPSEDSSGPRKRRGGITKTGNGHVRRVLIEAAWCYRFPAKKSAPLQRRAEQSSAAVQAIAWQAQKRLCARYRHLNQRGLMGVKISTAIARELCGFIWAIACEVQREQPQLMGARG

SEQ ID NO: 308352 - protein, 353 aa, unidentified
MILETTTARKKTYNHFIGIDVSKNTLDYAVRKGDKLLFHEQGKNEPEKILDFITRLKGLEGFVLTKCLFCFEHTGFYTNHLLNFLKKIKANVAMVPGLQVKNSLGMMRGKDDKADAKRLAVYAQKNSAELKLWMAKRPVVLELMNLVALRRRLLNVSVVLSTPLKEQTRFVKNGLQKQSVQLCRRTNAAIKDDLTAIDLVIDSLINADENLKKLNQLITSVPSVGPVTAIHVIISTNEFKDINNPKKFACYAGVAPFKVGSGLIEGKARISHLANKNIKALLHVCALNAIRCDQDLKAYFERKTKSEGKPKRVVINAIRCKLILRIFACVNQNRTYAKERKSQYEITAGEPAN

SEQ ID NO: 308353 - protein, 319 aa, unidentified
MTTDQWVGIDVAQATLMIGVWPEERTWETANTPDGVDALVRTLRELAPARIVLEGTGGLQAPVAAALGLAGLPVVVMNPRQIRDFAKSKGQRAKTDRLDALVLAEFGAAHRPPVRPLADAETEQLSALVTRRRQLVEMRRAEEQRLARLEAQRASRRVRGDVAAHIAWLTRRIEGLDDELGTVIEKSPLWHAQATLYQSVRGVGPVVARTLIAQLPELGRVSGKAVAALVGVAPFTRESGVWKGRGRIAGGRIEVRRVLYLAAMSGVRTNPVLHAFYARLVARGKPKKAALIACAHKLLTILNAMARDQRPWTPEIATT

SEQ ID NO: 308354 - protein, 413 aa, unidentified
MLFIGDDWAEGHHDVVVQDEAGKMLARRRLPEGADGIARLHELVASHLGGDGEPDPAQVIVVIETDRGPWVKALAAAGYRVYPANPGQAARHKESIANSGKKDDFFDAGCLADMGRTRRHQMRELAADSDVAEAVKIAARAHQKLVWERTRHQLRMRSALLEYFPAALEAYKDLGLAGRDTLELLAKAPDPESAARLTTAQVTAALNRAGRRGDLPERAREIQAVLRAPRLGQPEVIAEAYAASVQAGAAMITALNEQVKIMEARVSSLFRRHPDAGAYLSQPGIGDITGARILGEFGDAPGRYASAKARKNYAGTSPLTIASGKKKAVHARYIRNRHLTDALHAQALSALTASPGARRYYDQMRGRAIGHEDALRRVASRLTGILHGCLKTGTSYDEATAWPPSADETPQAA

SEQ ID NO: 308355 - protein, 338 aa, unidentified
MAIVGGFDLHRRQITFEYVDTASGEVCRGRVAPADREHLRAWLRRLKGQEAAFAVEACTGWRFVVEELERAGAQADLAEPADTAALRGPKRRAKTDRADARHLRELLMAARLPESWIPPAHVSDARTQIRLYKTLVDERTAWLQRVHAILFQLGAPAVPGLARASGRGRLDLAALPPAARLAVEVALRSVDRVNDELDTLRPELARLSRAQSGCRALQAHYGIGPLTSVAIWAELGDCGRFSSSSDAVRHSGLDVTVHSSDSRRARGHLARQGPGVLRWALFEAAVCAARPASPDHAYYLQVKARLGHQRAVLSVARKLTRWCHHTLRALGDQALAPA

SEQ ID NO: 308356 - protein, 352 aa, unidentified
MGQVTMADQQSHVTVGVDSHKDVHVAAVIDQVGQILATTSMATTDRGSGQLVRWAQRHGQVDRFGVEGTGSFAAGLTRYLRARGYQVLEVNRPNRQTRRRRGKSDTVDAESAARAALAGQASTPKAADGTVEMIRALRVARRSAIKARTQAANQLDSLVITAPEELRVQLRGLATARRVEVAAAFRPGSLTTPVAATKLALGELARRHLALTAELERLDTELAKLVRKAAPKLVARRGVGTEVAGRLLVAAGDNPDRLRSEAAFAHLCGAAPIEASSGKTVRHRLNRGGDRQANNGLWVTAMCRMHSDQRTKDYVARRTKEGKSKKEIIRCLKRYIARELYRDLVTAVLDKP

SEQ ID NO: 308357 - protein, 317 aa, unidentified
MRASAAFFVGIDVSKEQLDIAVRPSGESWTVAHEEASLSALVARLRDLAPTLIVLEATGGWEVPVTGALAAAALPVAVVNPRQVRDFARSTGLLAKTDRLDAQLLAQFAEVLRPAPRPLPDAQAQELTALLQRRRQLVEMLTAEKNRLPLAARRIRPQLQAHIAWLHQQIAQFDEDLRQLIRSSPLWREKDDLLRSTPGVGPVLATTLVAALPELGTLSRRQIAALVGVAPLNRDSGTLRGRRTVWGGRAQVRAVLYMSTVVAVRHNPVLIAFYQRLRAAGKAPKLALTACMRKLLTMLNAMLKHHRRWAPVRAQHA

SEQ ID NO: 308358 - protein, 379 aa, unidentified
MNQISCSATSSHTLHCALELSKKSWLLAIQFPDREQPSVYSIKGGDTEKLMAKLTAARDCWAKVSGSLPVITVCYEVGYDAFCLARFLKARGIECLVIDPGSLQVNRRGRRVKTDRIDVKVLLRTLIAWCRGERHVWSLVRIPSIDEEDLRRSHRERGRLVRERTAHINRIKGLLFGQGIRRINVKSKYKTLAVDKLVTGDGHRLPPRLACEITREIQRLAVVQEQIAEIERERDAAPTSCEATERKRHLLLRLKSIGPGISALLSREVYYRQFTNRRQVGSFLGLTPSPYNSGEQEHCQGISRVGSGHVRAVMIETAWLWIRHQPKSALTQWFVERTAGQSKRMRKIMIVAVARKLAIALWRYLEQGLVPQGAILAGR

SEQ ID NO: 308359 - protein, 341 aa, unidentified
MEQYVGLDVSMRETSVAVRQNGKRVWRGKCPSDPKALADVIRQRAPDAVRVVLETGPLSTWLYHALKAEALPVVCIDARHAKAALDMAPNKTDANDADGLAQIAEVGFYREVRVKGYAPMLARTLVGARGQLLRISIQLSNQIRGVMKTFGLIVPKGAGRVFETHARALLGTNEAVARVVLPLLEAWRAVRARAAELDRQLIAAARTSPACRRLMTIPGVGAVTAASFVAAVEAPENFGTSRAVGAWLGLTPRRHQSGEADYDGHISRRGDGHLRALVYEAAAAVLTRTRTDSALRSWGLELKEKVGFKRAAVAVARKLAVIMHAMLKTGAAFDPAPNTTA

SEQ ID NO: 308360 - protein, 402 aa, unidentified
MYNAVGIDVSKGKSTVAVLQPAGVIIRKPFNVNHTSSELDELAKYIGSLEGETRVVLECTGRYHEPVVKTLSEAGLFVSAVNPHLIKNFGNNSIRKVKSDPADAKKIARYTLDNWIELRQYSSMDNTRTQLKTLNSQFSFFMKQKVAAKANLIALLDNTYPGVNKLFDNPVRDDGSEKWVDYAYSFWHVDCVRKIGLKTFTERYQAFCKKHHYNFQPTKPAELFLASKDLIAVFPKEASYKLLIQQSIQQLNLASSHVEELRSKMNELASTLPEYATVMGMYGVGKTFGPQLIAEIGDISNFSHREALTAFAGVDPGVDQSGTHNSKSNKASKCGSNRLRKTLFQIMSTLLQTAPENDKVYQFLAKKRAEGKPYYVYMTAGANKFLRIYYGKVKECIHNLEQ

SEQ ID NO: 308361 - protein, 354 aa, unidentified
MNTTQVFEKRKIAVAIGIDLAKDHCDVVAYNADNKICFTKANWAYPHLMEWLANAQPAVVLMESCKGCHVRARDIADLGHDTRLVKGADVKALRNVCQKNDIRDADYIARLLYVPGTKFVFVKNQRQQSLQFLQNEYKSIQELRIQVGNQIHAGLEEFGCPGPKSKKFIQSRMMAHLEKNAEPISDEVMSSFLRRREMWLNLFEQEEEAKKRMEEIAKTDDDAKRIMTIPGGGAQTAVGMLVHIGGDIGRFKNSGQFAASIGLVPKQNSTGGNTTLNGITKCGPKRLRANLVQCGQVILMHADKLKGNFGDWVRKLRDSGKKRGVIVCAIAAKIARIVYRLMKDKVDYTPVPSR

SEQ ID NO: 308362 - protein, 375 aa, unidentified
MNAITKCVGLDVSKEKIAVAVADQDASPRFCGVIPNTREAIRKQLRRLGESHELRVCYEAGVTGYGLSRFLQTLGIECVVAAPSKIERVPGPRVKTDRKDALMLAEKLRKGDLVSVWVPDEGDEALRDLVRARKARMEDRTQARQRVSMFLMRHGIVKPDTMTPWGNPYRTWLRSLTFVNRASQTAFQEYVIAVEETEMAIRRLEQEIHEIATHSSYAPMMQALQALRGFKEIAAATVVAEIGDFTRFAHPQQLMSYAGLVPRESSSGNKVWRGAITKTGNPCLRWILTESAWSYRYKPSVSASMAKRMEGLSPHVQAIAWKAQNRLHRKYMRLLSRGKSRPVALMAVARELLGFIWAIAQQVSHESNGSAGLVA

SEQ ID NO: 308363 - protein, 421 aa, unidentified
MSNSTLSKKLASVKPGTLFVGIDLALDRNVAVVLSEQAEQLIRFGFPNERDGYDYFYRRLAAIQEQQQAPAVLVGMEPTNYFWKLLAADMEHQQPDYGYRLVNPYTVKKRREGDQLDRSKDDNRDAFTIADLLRTGKYTETQLLHGGYAELRQYVTLYARLQRDVRRQKTLIRNVAGQLFPELPRVFKDLAGLTALAMLRNHAAAAVVRKMSQDAFTAGVRSDLPGQRVQVAKLRRAHVLVRRSVGLTEGVEALQLALRLHIEALEALEQQLEEVYKALVDAFLALPESAYLLSVHGLGIITAATILSEIGDPSHYTNARQLVKLAGTQPVPNTSGRKSRSKTPMSHKGRPRLRTALFFAVMRLVQIDQAFARDYLHLQTREENPLTKMQALGVLMNKLLRILWALMRQRSSYDPELQLAV

SEQ ID NO: 308364 - protein, 421 aa, unidentified
MTHVSHEAFAAFVGIDWADAKHDVCLQPAGSATCECFQLEHTPEAIDAWVTTLRTRFNGQPVAICLELNKGPIVSALRKYDFLVLFPLNPLTLARYREAFTPSRAKDDPTDAALQLELLLTHRDKLQPLQPQSPTMRALAQLVEHRRRVVGDKVRITNRLTSTLKNYFPHVLHWFQEKDTAIFCDFLSRWPTLKAVQLARRSTLDTFFRAHHVRYADVIAQRIQAIKAATPLTTDEGVIAPNALLVQALIAQLRVTLQAIADFDTAIAQCAQNHPDFSLFQALPGAGPVFASRLLVAFGEQRERYASAAELQKYAGIAPVTERSGKKSWVHWRLQCPKFLRQTFVEWAAESIRHSFWAQLYYQQQRDKGKAHQAAVRALAFKWIRILYRCWQERTPYDEAVYLQALHHRGSSLIQNLAKAS

SEQ ID NO: 308365 - protein, 441 aa, unidentified
MTSGLRTCLFFILLPRPYGCDWNQSDAFRADWGLKERCRVWFKPWAIPRERDLSTYIGKRMQTNSDTTKALYIGLDVHKEQTVIAILEGERDAEPRLYGSVATAQHALERAIRRIARQQRRRLADLHVCYEASGCGFWIARRLLQMGVRCDVIAPSLIPTRSGDRVKTDKRDAAKLAKSLRSNDLVAVRIPDSVDEAVRDLCRGRTDAVDDLRRAKTRLLALLRRLGYRYDGKTHWTQAHQNYLRGLKLPDAAHNRVLEDCIATIDFHVERIDRLEAEMLQLLADWQRRPLVEALMAFKGFQLVAAMVTVSEIGTFSRFEHPKKLMAFLGLVPSENSSGKSRRQGAISKCGNPHARWLLVEQATHYRVPPKISPQLSERQRNTPRWIKELSWKTQTRLSHRFSALRKRQMHHNKIKVTIARELVGFLWELGTRFESQQAHP

SEQ ID NO: 308366 - protein, 394 aa, unidentified
MIYVGIDVAKDKHDCIILNSNGKVVFDVFTIQNNIDGFEDLLFKIKTTEKCPDKVKVGLEATGHYSCNILGFLKNKGLSTIVINPLYTSLSRKSISLRKTKTDKVDARTIACMIMSDLNLKPYSDTLYLNEDLKSLTRYRFNKVAQRAKLKQSVSRLVNILFPELEKLVSTLHGKAVYELLSEFPSAQHIASANLKHLTNLLHTASKGRFQRASADEIRQAARKSIGSYLPAKSLELKHTIKLIRELNSEITEIEAEIKKIMDVIDSPIISIPGIGQNLGAVILAEIGDFYRFESPDKILAFAGCSPSTYQSGQLYSSHAKMEKRGSRYLRWALLNAAAYVCKWEPTFATYLAKKLAEGKHYYVALSHAAKKLVRVLYHLETTGKTYQPTSILS

SEQ ID NO: 308367 - protein, 313 aa, unidentified
MAQMVTNAGIDVSKQWLDVALWPKRDEVSRFKRDAAGLEELAFWLRERQVVRVGLEASGGYEREVIDALEAQGLEVALLNPLQVRRFAQAKGRLAKNDRVDARTIAQFTAVMIEAPQPSRRRELDSLSEYLLFRRQLRAWIDDCGNRLEHLRDKALRRKIEAKRVKLRAELAAHDKALAKLTAEHADWNGLAKRLRTVPGVGPVLSQTLIALLPELGHLSRRAIASLVGVAPFDNDSGQRSGKRHIKGGRGAVREVLYMAALSAKTHNPIIAEFAKRLAGKEPKVMLVACMRKLLVILNAMVRDGMDWQVKTA

SEQ ID NO: 308368 - protein, 358 aa, unidentified
MSVYVGIDVHRKRSQVAVIDSGGEVLANRNVPNGTETILGVIGGLPPGTPAAFEAAFGWGWLLELLEDYGFDPHLVHPLQCKAIASARLKNDKVDAAILAQLLRADLLPEAWIAPPAVRQLRALLRHRAQLVRLRTLLQNRIHAVLADHGQDRPSGCWSGPGRGWLASLELPAVSREVVEDDLALIDALQVPIDRLDAEVRQRARSDPRVKILTQLPGVGTFTALVILAEVGDITRFGSARKLASWAGLTPTVRGSDRTVRHGHISKQGSAWLRWILCEAAQTAKRHPDYAASYAAIARRRGKKIATTAIARKLLARAWHLLADAERTASHQATATTSAAAPPAGMPATSREGSPSPG

SEQ ID NO: 308369 - protein, 322 aa, unidentified
MAMLSFCGVDVSKERLDVMVLPEQQRFSVGNDAAGWAELVERLRGLSISAIGLEASGGYERGAMRALLAAGMPARQVNPFKLRQFARASGVLAKNDPLDTRMIASFVAIMPTQPAQPRAPAIERLTEMLAVRRQLNAEKVAAENASRLLEDPMLQRLSRRRIRRLAADIDMLDRHLTQIVGTDAALAHRYRLLTSMPGVGLVLACTLIALLPELGRMSRKQVAALVGVAPYAFESGKFKGRRCIWGGRAPVRNVLYMAAMSASNWNPVFKGFHDRLKAAGKLPKVVIVAIMRKMITALNAMVRDDVVWADHLSGRHTVPTAR

SEQ ID NO: 308370 - protein, 349 aa, unidentified
MIIIGADYHPAFQQIAFVDTETGDCGEQRLEHCEGAQKFYRDLATQGKKVRVGMEASGHARWFERLLGELNIELWVGDAAVIRAKRGRKAKTDRQDAQHMLNLLLKDDFPQIWVPSWENRDLRQLLWHRHRMVQARTRIMNQLQAVALNEGLRCKKKLWGEQGREQLEAFRLAPWASRRREDLLQLLDEINPTIAKLTLAIELEAEKCPQARLLMTHPGVGALTALAFVLIIGKAERFQCGKQISAYLGLVPIEESSGERRRLGHITKQGNSLLRFLLVEAAQATTRTIPEWRSKYIHLMMRRGRKIAKVAMARKLAIRLFWMMRQGWNYQQVSKFGSHVGQPGNRHGV

SEQ ID NO: 308371 - protein, 386 aa, unidentified
MMFDPRDARQEFEKFLSGRNLNERNLNLANGCEAFFLVPGVERQPLKKLKTDEHALLALLERWRGEAMRSGNAITRIVVAYEAGRDGFWLARWLRAQGIEAHVIHAASIAVSREHRRAKTDRLDTELLKRAFLGWLRGERDHCKMVAIPTVAEEDARRPGRERESLVGDATRIINRIKSALARLGIRTFKPTLKKATALLNDLRTPDGDPIPPNTLDEIKRDMERRQLICEQIRRIEQERVKRLEQAPDTGPNVMVHLLARVMGIGIETADTLVREVLTRNLRDRRAVARYGGLTGAPSRSGNINREKGLARSGNPRVRRCMIGLAWRFVRLQKDSPLVKWFELRTANARGSRKTMIVAVARKLLIALWGLVHEGVVSEGMVMRPA

SEQ ID NO: 308372 - protein, 397 aa, unidentified
MYIIGIDIAKRKHEAAVIDGEGAVIIKPFSFTNNCSGYNRLLAMLTKANLPLDEVSFAMEATGHYWLALFTRLQKEGFRVQVINPVQTNSIRSFYIRQAKTDPRDALLIAEVIRFGHFSESTLHPENIYELRELCRGRHAIVSMQADVKRKVVALLDQVFPEYETAFTNLFGDTSMAILQTCPTPKELSEMRLEELCHLIEVSSHKRFRMAKAQELQALAHGSFGFAMAGDVFSTMIRLYAKHLDFLKQQVREMDLKIAEIMETLDTPITTITGIGPTLGAYILSEIGDISRFSSAAKLAAYAGIDPTMRQSGEYNGVRNRMSKRGSPYLRHAIWLAASSAVLHDPALKLYFQKKRDEGKPYMASVGHACRKMVSIIYAVMRDNKAYTPYIPNEISA

SEQ ID NO: 308373 - protein, 332 aa, unidentified
MNTQASSTAANAVDLLYVGIDVAQDKLDLARDDAGPVQTFTNDPAGIAQVIELFNAAKPAVIVVEATGGLERRLLDALLEAELPTALVHPGRVRYFAKGLGILSKTDRIDARVLRRFGQLAAPRLAEKRGKNQVELQALVVCRRQLNVTRAQQYNRRGATSNKAALRSVDAVIGALDKQIDSLDKQIRQLVDADDDFKHLDKLLQSVPGVGPTLSATLLAELSELGQTDRRQIGALVGVAPFNRDSGKFAGKRAIRGGRTAVRCVTYMATLAAMRFNPLIKAFAQRLKEAGKLNKVVIVACMRKLITLLNAMVRDGLTWQQLETVKKFAATH

SEQ ID NO: 308374 - protein, 343 aa, unidentified
MNISRIGIDLAKNVFQLHGVDRRGKTVWKRRLRRNQWLKALLAQAEPSCEIGMEACGGAHHWARELQSRGYTVKLIPPQFVKPYVKSNKNDANDAEAICEAMSRPTMRFVAVKSVAQQDIQATHRIRSELMTQRTAKANQIRGLVTEYGLVAPLTMRALRTAIPCWLEDADNGLTDYFRSLLHGLWTDLATLDDRVLDLDRQIKKLANSNEVTRRLQQLRGVGPMVATALVATVGDGKQYHKGRQMAASLGLTPRQYSSGDKHRLFGITKRGDVYLRTLLIHGARAVVSQAKHKDDRLSRWVTGIAQRRHPNVAAVALANKTVRMAWAMLRNETDYDPDFAIS

SEQ ID NO: 308375 - protein, 369 aa, unidentified
MKHSIIFIGLDVHKDSIDIALADDGRNGELRFYGTIGGDLDSLDKAIRKFRRSGVELRFVYEAGPCGYEIYRHLTAQDFHCDVIAPSMTPKKSGDRIKTDRRDALSLARLYRAGELTPVYVPREDDEAMRDLVRGRGDAVNATRKARQRLSAFILRHGFRYSGRNAWSAAHLKWLADIKMPHPAQQITLQEYINSIEEDSERVDRLTEQILKLISAWRMAPVVAALQSLRGVAAIVATTMVVEIGDLRRFENPRQLMAYLGLVPSENSSGQTTKRGGITKTGNSHARRALIEAAQTYSFPAKVSRELRKRQEGLPREIKAISWKAQVRLCGRFRKLMAKGKNRNRTVTAIARELSGFMWAIAKEIPMPA

SEQ ID NO: 308376 - protein, 441 aa, unidentified
MQIENVDREEEFVAFVGIDWADQRHSWALQMTGASDIEQGILQHSPEAVEEWASRLAQRFNGRPVAIAIEQVRGSLVFMLSKYRHLVLFPVHPAAMASYRKSFRPSGAKNDPDDAFLLLDILTRHGKKLRQLNPDTEETRTLQFLVEERRKFVHEKTRHSNRLTAYLKQYFPQILDWFADVSSPVVGDLLERWPTLQHLQTAKPSTLRRFLAGHNCRHAELIDKRLSEIRHAVPATGDQAVLSSLSTAVTAVVRILREVRQAITDFDGQIEKLAQQHPDFAIFASFPGAGPVLAPRLMAALGTQRDRYTSAHQIQCYSGIAPVMESSGKQHWVHCRWACPKFLRQTFHEWALQSVKYSDWAKAYYEQQRARGKSCHTALRALAFKWIRILFRCWQDRRPYNETLYKGSLRCRTDSQQVGESSVQIVWKNVVGFSKVSAVRT

SEQ ID NO: 308377 - protein, 445 aa, unidentified
MHPQAPASPRLVNMNCSPSSAIQTEMKTNDYAAYLALDWGDSQHAFALQMADTQKTEKGQFAARPEAIHDWLKELGSRCSHGRVACAIEAGGDALVSALLEHKWIEIYPVNAAMSARFRKALVPSGAKDDVPDANVLLTLLLRHGDQLKPLQLDSAKTRELAALVLARRGAVDRRSQLGNQLRAVLKGYFPQALALVGDDIHGVMALDFLERWPDLATLQKARAATVQSFYVLHRVRRPELIKSRLELVAQAQPLTQDSAVIGPAVLQVQMLTAMIKTLQRHIARFDESIQERFAAHAESALFRQLPGAGPQLAPRLLVAFGDNRQRYPDATSLQKYAGLAPVKEKSGRQLWVHWRWNAPIFVRQTFVEWAGQTVVYCDWAGVYYARQKRAGKGHHAIIRALAFKWIRVLWRCWHRQEAYDEARYLTALRQRRSPLIQDLDLALS

SEQ ID NO: 308378 - protein, 342 aa, unidentified
MQISTIGLDIAKNVFQVHGIDAAEKVVVRKRLRRRQVLEFFKALPPCLIGMEACATAHYWARELTKLGHRLRLMPAKDVKAYVKRNKNDAADAEAICEAVRRPTMRFVRIKSAEQQGQLMQHRTRDVLIRQRTQIINALRAHLAELGVVAAQGNAGVNELRAIVTDEQDTRLPIAARASVIVLAAQLEALESVIGAIEKRIKMQHRSSEASQRVEAIPGIGVIGATAIVATVTDPTIFRSGRDFAAWIGLVPRQDSTGGKQKLGPISKQGDRYLRRILVVGAIAVLRRAQENPGKYPWLTQLLARRPFKVVAVALANKMARMAWALLAHGGTYRAPELAETA

SEQ ID NO: 308379 - protein, 340 aa, unidentified
MEEITRIAIDTSKSVFTLHGSDAEGRAVLRRNLRRQDMIGFFGKLPPLEVVLEACGGSHYWGRTLAAMGHRVRLLAPQYVKPFVKRGKNDRNDAEAISEAASRPQMRSVPVKSAEAQAAAMLLSVGELLMHKRTQLINALRGHSTELGLVAAKGDKGLAELRAEIVTGDGLPPAAIYALQQLGREIDQIEGRLAAIDKTLAAQHRANAQSRRLAQIPGVGLLGALNFTLRVDPGQFRSGRHFAAWLGLTPKEHSTGGKQRMGGISRAGDERLRQLLVLGATAVISHVRKDRPGVSAWLLNLLERKPRKLAAVALANKMARIIWAMLTSGQTYRQTTPITA

SEQ ID NO: 308380 - protein, 432 aa, unidentified
MKHNQSSKQNQRIERISETTLVIGTDIAKNNHVARAFTYRGIELGKRCLFQNDEQGLLNLLAWAEALKQEHGMNDVILGVEPTGHYWFPLFHFLKGHGIQVVLVNPHHVKKSKELDDNSPTKNDIKDAKVVAKLIIDGRYSEPQLPEGIYADLRVLMNQRERLNGDLNRVKGRIHNWLDRFFPEYTQVFKDWEGKASLITLGQFPLPQDVVSAGETTIVAAWKKNGVNRAVGPKRAELLYRKARKSIGLTEGAAAARHELAMLLEQYAMLCRQMDQLMALVAELVEQIPGAAEMMTIPCIKLITVAGFLAEVGDLSRYDHSQQIVRHAGLSLREDSSGKRKGETTITKRGRCRLRALLYRAALTLVAKNPEFRTLHAYFTTRRDNPLKKKQSMIAICTKLIRVLFELGRKKKAYDAGKVLGPHREAQLQAAA

SEQ ID NO: 308381 - protein, 420 aa, unidentified
MNQNINYPQSVTPQAWIGLDWGHKTHAFALQDRSGHTEAGTLKHSAESLHHWLSDLAKRYGGCPVSLAIEASRGAVIHGLLQYPWLTIYPVNPVTSARYRTAFTPSGAKDDLPDARVLLELVRDHAHKLRPLEAQDPQTQKLARLVEVRRHLVDRRTQLLNQLTSLLKDYYPQALELVGALNSDLAVDFLERWPDLVALKAARPSTIKHFYYAHHIRRPEILEARSKRIKESMVLVQDYELVQVSVLHLRVLLDQLRAFRKHLPVVEEEIKTVFAAHPEAYLFRDLPGAGAQLAPRLCVAFGTLRGLHPDPASLQKLAGVAPVREKSGNQIWTHWRWLAPTFLRQTFVEWAGQTVVFSAWAKVYYQRMIAKGIKHHAVLRALAFKWIRVLWKCWQTRTAYQESRYLRQLLRRKSPNAATA

SEQ ID NO: 308382 - protein, 384 aa, unidentified
MNKHSIIFIGLDTHKEFHEVAYCEEQRGASPVHYGRIPSSKVSVKKLLRQFESKYPGATLHFVYEAGPCGYWIYRLITSLGHCCYVVAPSLIPKKPGEHIKTDRRDALKLVKLLKSEDLTPIYVPEPEDEAVRDLSRAREAAMKDLKEAKYQLKALLLRNNIRYEGTANWSKKHLRWLTELILPHPAQQIVLQEQLQTIEERIRRLERLDNELTHHVYQWRYYPVVKAIQAMRGVRLLVAVGVIAELGDLHRFDHPRKLMAYLGLVPSEQSSGGKRHLGAITKAGNGRARRLLIEGAHSYRYPANVSTELQFRQEGLPKDIVDIAWKAQLRLCKRYQRMSKKGKHYNLIITAIAREMAAYIWAIAREVVLTPVNPKLRLSRVPA

SEQ ID NO: 308383 - protein, 356 aa, unidentified
MNHVSKLDFTGQQIYVGMDVHKKSWSISIYTNQFEHKTFSQPPEVGVLVNYLKRNFPGAVYKSVYEAGFSGYWIHDRLQEQGVQCLVVNPADVPTKDKERAGKTDRVDCRKLARSLRNGEIEGIYVPSRPKVEDRSVLRTRNGMVRKQTRCKNQIKSILCFYGINIPDDFINGSWSKRFINWIESVRMERASGNLSLKIHLDELKHLRKIIAEMNLAIRTLANSADYRNNVRILKTVPGISTLTAMTLLTELYEINRFKTLDKLCSYVGLIPNTNSSGEKDLKTGMTGRKNAQLRFVLIESSWTAVRKDPALMMAFNELCKHMTKTKAIVRIARKLLNRIRYVLRNQQEYVPAVIQ

SEQ ID NO: 308384 - protein, 415 aa, unidentified
MKTFTELAYFAGLDWAKDHHDVVIVNRGGLMVLELTFPHSVEGWQRWQQCVQEYPVMGVAVETSSGPAVERLLQSGVTVFPIHPKSAKAYRERKCPSGVKTDRLDAWSLADGLRTDGHAWRALAPLDPLVQELRLLTRDEVSLIEQRTALVNQLQQALNEYYLTALDAFDDWTVPYAWAFVEAFPTPDALVKAGRRRWEKFLHAHKLWRPQTCEMRLAQFAKAADFPASAAVVKAKSRLAVSLVKTLMTLEKQLEQYRAAIVQLFAEHPDHDVFGSLPGAGHKLAPRLLSELGEDRGFFDDLQGLQCVAGTAPLSFQSGQMSRVRIRWHCNKHLRYTVHLWADCSRKYCVWAQSYYRAHRAKGNSHASALRRLGNRWLKILWTMWHEGEPYDSERHMRNQQRHGSWVIKLETVKP

SEQ ID NO: 308385 - protein, 346 aa, unidentified
MEHYAGIDVSLELSSVCVVDAQGKIVKEAKVASEPEAVVAFFEALGFAVKRIGLEAGPLSHWLYAGLKEAGFETVLLETRHVKAALSAMTVKTDRKDARGLAQLLRMGWFQPVHAKSMASQEVRALLVGRKQLLGRLIDVELSIRGILRGFGLKVGAVTRKGFEARIRELVTGQATLERIAEAMLSARAALKAEYEKLHKAVLAIVREDAVCRRLMTVPSVGPLVAITYKSAMDDPSRIAKSKAAGALFGLTPKKYQSGEKDVTGGITRTGDEMVRTALYEAANVLLSRITRFSKLKRWGMDVAKRRGSKRAKVALARKIAVILHRIWIDGTTYRWAEAKPIAAQA

SEQ ID NO: 308386 - protein, 341 aa, unidentified
MKLKAITIDLAKNVFQACGVNEQIKPQFNKKLKRSEVFDFMRQQEPTTVVMEACYSSHYWGREIAKLGHDVKLIPAQHVTPFVRGNKNDHNDAFAIAEASQRAHIRFVPIKTEHQQEISCLHRIRERLSKNKVALSNQSRGLLSEFGVVFPCGHAALLIGLNNVIDNPQYSERLQNMVKDMLSEYKAVIKHLKKIEKQLAEFVDGCESGKILRSIPGIGVINASALLAAIDKGQAFSHPKEFAVWLGLTPKQHASGNMNKMGGITKRGDRYLRKQLVHGARSVVSRAAKNTDPLSLWATKLRVTKPFNKVAVAMAHRLARLIWILLTRQEYYSATPITVSA

SEQ ID NO: 308387 - protein, 411 aa, unidentified
MRLFVGDDWAEDHHDVEVMSEAGKVLAKRRLPEGVAGIAQLHELIGRHLGEDADDAEVVVGIETDRGPWVAALVSAGYLVFPVNPLQASRYRARLGVSGAKSDAGDAHMLADMVRTDSHQLRAAAGDSAEAEGLKVLARTHKTLIWERTRAVQRLRHQLREYYPAALEAYDDLDAPDTLELLGKAPDPARAAKLTRAQVSAALKRAGRRNITDRATAILAALRSPQLGQPAAVTAAYAATVRSLIAVITVLNEQVKILQGQVEENFGRHPDAEIYRSQPGMGAVLGARVLAEFGDDPHRYADGKARKNYAATSPITRASGKKKVVAARFIHNDRLVDALNAQAFTALRASPGARALYDDLRARGIQHNDALRRLANRLVGILHGCLKTRTLYDEATAWSHRQNLPQSSVAA

SEQ ID NO: 308388 - protein, 432 aa, unidentified
MKHNQTSKQNQRIMRISETTLVIGTDIAKRNHVARAFNYRGIELGKRCLFTNDDNGLNNLIAWASSLQKEHGMNDIIMGVEPTGHYWFPLYHFMKCRGIEVVLINPHHVNKSKELDDNSPTKNDVKDAKVIGKLVIDGRYTKPQLPEGVYADLRVYMNQRERLNLDLNRAKARIHNWLDRFFPEYTQVFKKWEGKASLITLEHFPLPQEVVQAGETSIVATWKKNGVERAVGAKRAALLYRTASKSIGLTEGVTAAKHELAMCLEQYTMLSRQLDQLMELVEALVKQIPGAEEMMSIPCVKLTTVAGFLAEVGDLDNYVHSQQIVRHAGLSLRENSSGDRKGETTISKRGRCRLRALLYRVTLTLVAKNPEFRALHHYYTTRMDNPLKKKQSMIALCNKLIRVLFELGRKQKKYDSTKVLGPHREAQLQIAA

SEQ ID NO: 308389 - protein, 341 aa, unidentified
MDGYNYFIGLDWAQANMAVAILSNAHDKPRIFDMPSNIRKLKDMLKALKGKKLMTLEETTTAQWLYTELKPCVDKLVVCDPRRNSLLKEGSKTDKIDALKLAILLKNNLLREVYHSNDFFVDLRKLVSAYEDLVNYGVRFKNQRSALCRSCGQDKGFSEFDGKIEKFIISIIDQNIANYVDQKQEYEKYFGSLFKKYSLLRMLKTVPGIGGIGAIKILSTVVTANRFADARHFLSYCGLVKLERISGGRNYGKKNSHYSSRLKAVFKIAALAVLAGGTNTVFYPYIKYLKNYKRYADHIVRHALARRIAVIVYGVLKSKKNFNKELVLKVNTDEHKNLGTE

SEQ ID NO: 308390 - protein, 505 aa, unidentified
MVTGVYDNIIGEVRLYYPVWKIVADSTPAPQHIILQLSWEKNDMNKYTPREPNQSKIKRVGSKAGLPKHLEHINTMAAGIDIGSKSHFVAVPEGCADVCVREFQSFTSDLHELANWLESCGITTVAMESTGVYWIPLFELLESRGFEVLLTDARHVKNVSGRKTDVIDCQWLQQLHTYGLLSGAFRPSEQVCALRAYIRQRNMLIQQMSSHIQHMQKALSQMNLQLHNVISDITGETGMMIIRAIVNGERDPKLLATYRNYRCKSPLSIIEKSLTGNYREEHVFALSQALELFDVYQNKIAACDEQIEKQLTTFEGKEIAERVNLKKQPNKKSKNAPAFDLSSHLFRMVGVDLTIIPGIEAYSALKIISEIGLDLTRWKSSKQFASWLGVCPGNKISGGKRLGGKSKRTGNYAASALRMAASTLHSSQSALGAFYRRLKSRLGAPKAITATAHKLAIIIYNMIVNRREYIETGADYYEKQYRERLVKNMSMRAKILGFELVKIAT

SEQ ID NO: 308391 - protein, 485 aa, unidentified
MSRQKEHSAKPDTEDVQASKTGKGKPGRRRKGMCLEDRPVLEANAAGIDIGAREIFVAVPPNRDENPVRVFATFTEDLEAMARWLVNCGITTVAMESTGVYWIPLYDVLEQHGVKPCLVDARGMKNVPGRRTDWHECQWLQYLHSVGLLRAAFRPESDVCAVRALMRHRGDLAEMSHQHIQHMHKALTQMNVQIHHVISDITGLTGLSIVDAILGGQRDPGELAKLRDPHIHASEETIRKSLVGNWRPEHLFTLKQSREIYRHYQEQIAACDEEIEKLVIRFPPRVDPETRPLPPDRKNRKRDRRNPKQKADSKPAFDARMESYKLFGVDVTQIPGLLMVFRLFSEVGRDMSRWPTAAHFVSWLGLCPDNDISGGRVLWKGRRKVKNPAGQLFRMAAYALHHNQTPMGDYLRRMKSKLGPAAATTATAHKIAIIFYTMVKNQVEYDATLWAQRDTERDKRIEAKLKRQAHERGYKLVPIEEKPAA

SEQ ID NO: 308392 - protein, 407 aa, unidentified
MRYVEAGAVHDGYGVYLGLDVGKEGHHAVGLAPGGKRLHDAALPNTEARLRQLFDKLARHGTVLVVVDQPASIGALPVAVARACGHQVAYLPGLAMRRIADLHPGAAKTDARDAYVIADAARTLPHTLRRVDVGDEALAELEVLVGFDDDLAGEATRVSNRIRGLLTQIHPALERVLGPKVHHKAVLELLSRCGGPVGLRKAGRRKLLSIVAVHAPRMGERLVEQIMTALDEQTVTVPGTQAAETILPRLADSLRDVLRQRGQVAGEVERILDAHPLAPVLTSMPGIGVRTAARILLEVGDGTAFPTPGHLAAYAGLAPITRRSGSSIRGEHPPRGGNKNLKRAFFLAAFAALADPVSRAYYDRKRAEGKRHNAALICLARRRCDVLYAMLRDKIPYQPRPTSPVPA

SEQ ID NO: 308393 - protein, 371 aa, unidentified
MQTLKEYTLEATPVASAKELKTQKRPKAKLIAVGTDVHLRGYQAARKVDNTAIGAVTNLRSETELLLYIEKQLEQAEEVVVAYEAGPLGYGLYRKLTARGVKCLVCAPDSTHQKKKRRKNNQIDARTLTSNLSNYLNGNEGALQLVRVPTEEQERVRLVSRQHDQLVEERKRLGAQGNALLLSQGFGSWKNWWRPKTFSRLEQLLPGWLFEMLQSWVDLLRALDEKIQVAKAALTKRWSGPRPKGAGANSLVQLGSEVLDWELYTKRRKIACLAGMVPSEWSTGESQRRGSITKVGVPAIRRIITEMVWRIILFQPQYPPVQKWQEVLGGTNRTLKKKAVVAIGRQLMVDLWRLQTGRASAQQLKLVMIGG

SEQ ID NO: 308394 - protein, 360 aa, unidentified
MKVQRTSVGLDVHARSVVACGLDGDTGEVFERRLSPDHAEILSWLGDLPGPVATTYEAGPTGFGLARCLNTAGIRCAVAAPSKLQRPVGDRVKTDVRDARHLARLLHLGEIVEVQIPSVEQETARDLFRAREDCRQDLMAARNRLSKLLLRQGIVYHGATTWSQVHQRWLRAQRFTNPALAMAYDTALDTVLATTDRRERLDAAITTLAADSEFTAVVLRLGCVRGVSTLTAFGLAVEIGDWHRLTGRTIGSYLGLVPTESSSGATRSQGGLTRTGNTHARRLLIEAAWHHRRPYRPGIVMRRRWQAASPAARARGQAANRRLHARWLHFDQRKKHAVVANAAIARELAGWCWSLAVMSD

SEQ ID NO: 308395 - protein, 412 aa, unidentified
MTETNQFAAHVGLDWADKKHDVCVQFKNGERTFHVIEHTPEALDVWLTELHQKVKGRIAIAVELKKGPVVYALQKYPFITVFPVHALSLARYRQAFSPSGAKDDPQDAELALELMLRYPQKIKAIEPDNADIRLLQQLVEQRRQLVEDKRRFVNRLINTLKQYYPQPLEWFSHRGSLLLCELIMRWPSLQQLKRARRDTIRNFLNAKGGRAMALTEQRVVSIDNAIPLTTDPSVIEANALMATALATQIKVVSEIIKTYDERIETLFDTLPDAGLFKSLPGMGPCMGPRMLAALGDNRDRFNSAEEIQNYAGIAPVTERSGQKSWVHWRWQCAKFVRQTFVEWAAKTVNSSYWAKLYYQGLREKGKSHQSAIRALAFKWIRIIYRCWKTRTQYDEAKYLLALEARHSPLLKP

SEQ ID NO: 308396 - protein, 370 aa, unidentified
MTHVTSIGLDVHARSVSACAFDPFTGEVVQRSFGTDAGEIAAWIKGCEEPKAVYESGPTGFALCRQLRALGVDCAVGAVSRMQKPAAEKRRKNDRRDAAFLARLLATRNVVEVWVPPAEAEAARDLSRALDDAREDLQRARQRLSKFLLRRGHVFDETDALGRRRGAWTRAFWRWAEGLRPDEPAAASAFDHYATCVRCAESDKRALEKLVLAEARSERWAGVVGALSCIKGVDAVTAFCLATEAGCFSRFATAGAYASWLGLTPSEHSSGEKEATGGITKTGNSASRRALVEAAWHYASCSPKPKAAPAGYDVPPRIRGRAADATRRLRARHEALRAAGKRPCVANVAVARELACWVWEIGRSAEGTLG

SEQ ID NO: 308397 - protein, 348 aa, unidentified
MDVGKRKCVACVMNQDGNISETYSYPNTTADASEFARCLVKKYGECKAVVESTGNMWMKTYEAFEEAGIEVKLANPSKTRVIAEARIKTDRIDCRVLAHLLRADLVAGCYVPTKQLRDTRYTLTHRMNITRDRTRIQNRIHSLLHKYDLQCEYGDIFGTHGMDWLRTLRLPAIRDRQILDSLIRQVEFLNCEEETVNSEIASDAVNNRYVAIIMSMTGFDYYGASVLAAYIADISRFPSPSRLVSWVGICPSVHQTGESLHMGKMKDGNTKVRWIMSQAANVAAKCDPRMKAYYERKLRRHHHNVAITHVANKMLRILWHMLRDDTLYNERKEQLYHRKLIRMARTAS

SEQ ID NO: 308398 - protein, 350 aa, unidentified
MFCAGIDTHKDFHVLVIADELGREMYHESFSADEQGICSLTNALSNAGECIVCGIEGTGSYGATLAEHLLAEGFPIVEVSRPKRSRIKGARDKSDHRDAHRAALRALAGEGVSVKPRGGDAQAVQCLLAAYKRLRDTCTSLSNCICALIVSAPEPYRARFTGLKGAKLMDAIARTRVGAGGKSEAQQATLTSLKTLERTWRTAHEQAEKILSQMEAIIVDHAPALLDIFGVATVTAAEFIALGGENPSRIKSESAFARAAGAAPIEASSGRVVRHRLDRGGARSANAALHTVVLCRMARDERTHAYVERRTKEGLSKREIMRCLKRYVCREIYRVLCAEERRRNQQKEAS

SEQ ID NO: 308399 - protein, 416 aa, unidentified
MSTTDPLTSPVDPCGFTYVVGIDVGSEHLLYTICQPDKRAVVKPSQINNDRVGFGQLDQALHALGSEPSRILIGLEATSRYNENLYQFLAEQGYTLCLLHPRQTHQFAQQRGLRAKTDRLDASTIARLLLSGEARVGYVPDELIASYRELERLHSQLTAESARYQNEIHALLTVLFPEFTQVFADPCGATALGVLKRSPGAAAIATAGVEALTATLRELARRRYGRPTAVELVRLAERSAASGVATSARALSLKVLCDQLEHTLVNLAHREQELDRVLGGDEGASRLSSVPEFGRQTLAVLRAELGDVTRFSRIDQAVAYVGLDLEVRQSGKWKGQVKLSKRGSGRVRRVLSMAALRSLTLPDSPFAAYYHRLVARGLKGRKALMAVMRKMLLVACHLLRSNESYDPAKVCAVTGP

SEQ ID NO: 308400 - protein, 410 aa, unidentified
MTETNIAQNAPILVAIDIAKARHEVLIAIPDKKRRRRLTVLNQLDDFNRLVASLASYGRPVRVAFEATGNYHRALAYHLAAAGFEMKLVSSVSLARTREALHNSWDKNDPKDAQVILHMIEIGNTQFYHDPLACGTNDIQELSKTHDIVSRSKTELWHRIMTHYLPLYFPEADRFHRSSRGDWFFAFLERYPSPHLISAMDRDAFIAEAWDVVGRKVAKERLLTDIYETAKTSVGLPVGRESDAVGMFRLVLGEGRGLIAQRSQIEARAVELLKDLPDYQLLTSIPGIGPINALTILAEAGDLRRFNHHRQFLKFCGMDLATIQSGTFRGQTKLSKYGNARLRRTLWMAGQVAILQKTNSFRDKFERYIAKDRHNSHLRRKAYTAIAAKMARTVHGIIKHGEPYRPFFEG

SEQ ID NO: 308401 - protein, 401 aa, unidentified
MPTMRDNATRVKRFRELKTTLRTNRARLLVGLDIAQAEHVVHVRHAHTRVVTPALTIPNTTRGFAQLWARIQQAQRVTGCREVVCGLEPTGTYHEAVARFLETHGADVVLISSSVAYWNRRTQDGTWDKHDRKDAANCAELLEQGKVLFYSQPEGPLAELRRLVKCLRRARVELAACKARWRTTLRPALGPMGEPLPNRLRAELPALLQAWERAAPGRPAVAKGRLPLGLATACADLAAQVTAVQARIATIEQALTPLAERLPATALLRTIPGIGPTVGAILLAEIGDIAWYTKFSQLRKLAGLDIVRVQSGKFAGQARISKCGRSLLRWALYHAAMGMARTVAGRARLAVLKAKRHGDRYAGFKAIVELAAKVLRVVWGVWRSGTPYDPLRTGGLRRQPR

SEQ ID NO: 308402 - protein, 416 aa, unidentified
MKIIRFNCCGMDVHKNSVVATIGITNKDTQITRYIQETFSTLNTDLLRLKQWLIDHQCFDVCMESTGKYWIPIFNILEDTVKVHLTHPKYVKAIRGKKTDKKDSKWICDLFKHDLIRFSFIPTKEIRALREIARYRYKLVAMRSSERNRYQNCMTVSNIGIGSVFSDPFGKSAQAVMKEVLESKVIEDDRILKCIHGACKNRDKILDAIKHCHVGSDQRFKMNESMRHLEELQIHINNCEIEMIKRASRMFDSFMHITQIPGINTLSAILIISEIGIDMTQFESDKQLVSWAGLAPANNESANKKKSVRISKAGQYLKPLLVQCALGAIKDKESYFGIKYARIKKRRGHKKAIIAIARMILVSIYHMILTGESFNPSDYQSFKAPNSKKVIELTKESAIEFLRKSGFDVSKLTKLE

SEQ ID NO: 308403 - protein, 416 aa, unidentified
MEDDFGMRALYRRVAGIDVHRMLHVVTVLLEQADGSMQRQTRQFGGFRRDCRELAAWLAELRIELVVMESTGIYWKSVYAHLENAGINAWVVNAHRVKHVPGRKTDVADSEWLAVLARFGMVKASFIPPKDLRELRLVSRYRRKLNAMRASQINRLHKILDDGGIKLGGVVSDIDGVSARAMVSALIAGQPIEQMLGLARGKLKQKREELGASLDGDLSARHLFVLGHIQAHIETLQRELAEIDSYMLNALQPYAWAHELLQTIPGIDEIAAALILIEIGDDMTRFGRAQSLACWAALSPGNNESAGKRKSGRTSHGNSVIRCILCECANAARMTKSTLAAKYRSLMVRKSHKKAIIAVAHKMIRLIYLMLSRRQPYIDQGIDYAAMSAKKNAPRWIKQLKSIGRWPSPKPAAASV

SEQ ID NO: 308404 - protein, 400 aa, unidentified
MRVVFGIDVSKANSEVTILVNGEKVHGYTIPNDAIGFNRLLGDLKTVHEPEIVFEATGVYSRRLQAFFEDNSYAYTRLNPLESKKQLDSLRVRKTDRIDAEKLAASQFILNRKPSYVQEALYQELRDLSRFYQNLTEDIVCTKNRLHKVLQVTFPELENILSAPTGEQYWNLVMTFPCNSFVLESDDATLTAIIRQSTAKRISEKRVTYLVDKLTKLANQSYCAVKKTSPVIEEVKYYAGELLRLSEHRQGVLEEMVALAQSLPEYEILLSIPGIAETTATSIIGELGDIRRFHSANQINAFIGIDLRHYESGNFLAKEHITKRGNPYARKILFKCIHNIASASHTNPCHIADFYEKRKRQSQVTSTKPHTIASIHRLIRTMYYLITHNKLYDYTSTQNR

SEQ ID NO: 308405 - protein, 390 aa, unidentified
MALFVGIDVSKDTFDACGIDEGGEKVFSLTSGMDKKGFEKLIAHLKGNHSLLLGLESTACYHLALFSYLTAKGYRVVIINPLLIANFAKLQLRKTKTDKKDALTIAQFLMLRKEALENQTFSADLMELRDLARRRERLTDQVTKLKGNMKRILSVTFPELEHLTGVFAESILQLLIRFPSADALRKADVATVAALVVPRSWGRKSRAWVETLMTPAATSIDVSSPAKELVLKQDAALLLYVQEQIKETTEVLTTLCTDRMKKDVEILDSIKGIGEATALNFMVEIGGDITLYKNDKKLIAASGLDPSTYQSGKYEGSRKISKRGNRHLRRVIWLMARGVIFSNDLFRTSFYKRRNEGLCYKMAMLATAHKLIRVMFAMLGHQTCFVQGEK

SEQ ID NO: 308406 - protein, 382 aa, unidentified
MAGDPTRAGIRTLFAAIELSKKNWLVALWSPVADRVSLHRLPAGDAKALLACLERAKASAEEALGQEVEIMSCFEAGYDGFWLHRVLTSAGITNLVVDPASIQVDRRARRVKTDRIDAQALLRFLMAHHRGEVRVWSVVRVPTPDEEDAKRTHRERQNLIKERGRHVNRIKGLCAQQGIFDYEPMRSDRRERLGCLITGDGRAMPPRLLAELRRELDRLEFVIGQIKAVEAERDAVEPCSGDPTPGSQANRLARLRQIVSIGPETAAVLGCEVLYRCFENRRQLAAYVGLAPSPHMSGGLRVEQGLSKAGNPRARTALVELAWLWLRYQPGSALSEWFVRRVGKQRGRIRRIMVVALARKLLVALWRYLETGLVPSGAVLRR

SEQ ID NO: 308407 - protein, 334 aa, unidentified
MDKVTTVGIDLAKRVFALHGVDGAGRVGLRKTMRREQLMQTVAALPPCLIGMEACSGAHEWARRFQELGHTVRLMAPVFVAPYRKSGKNDGNDAEAICEAVARPNMRFVPIKSTEQQAVLSLHRVRQGWIEERTATINRLRAVLTEFGVVLPNRAQHVRRGARAAAEALPELARRAVEDLRAHLGVLDERIAAYDRELEAHARASEAARRLMQIRGIGPLTAVAMVATVGNARDFRSGRQFAAWLGLTPRQHSSGGKTRLGHISRRGDAYLRCLLVQGARSVLLTAMRHSDRMSRWALSVQARRGYHKALVAIAAKNARIAWALLSKNQTLQTV

SEQ ID NO: 308408 - protein, 412 aa, unidentified
MEIIHRCCCGIDVHAKTAVVCLIKNGRKEIRTYSTMTDDLLLLCDWLVSEGCRHVAIESTGIYWKPVFNVLEGSLEVILVNARHIKAVPGRKTDVKDCEWLADLLRHGLVRASFIPPLPVRELRELTRHRCTLVSDQTAVCNRIIKLAESANIKLSQVASNALGVSGRAMLRELSQGERDTTKLASLARGALRSKDTQLRRALRGNLTRSQQFVLRELLDQLEQIEAAVARVSEEIRVQMEKNSDPFVEDAARLLQTIPGVGERVAEVILSEIGTDMTRFPTHRHLSSWAGMCPGNNESAGKKKSGKTTKGSNYLRAALTQTAWAASRAKSTYIAAQYQKFVRRLGKKKALVAVGHTVLVIAYHILKNKVSYRELGGDYFDRQSVEVLRDVYIKKLQHLGLKVSVELIAQPA

SEQ ID NO: 308409 - protein, 412 aa, unidentified
MSVPEALFYVGIDWATETHAICVLTAAGRIKAQFMIDHTAAGFAELVRRLGRLTGSAGDVPVGIERPDGRLVDALLEAGFPVVPVSPNAIKTWRDGEVLSGAKSDAGDAAVIAEYLRLRAHHLRPATPYSGQTKALRTVVRTRDDVVDMRVAATNQLSALLDANWPGATAIFADVESAISLAFLTRYPTYLSAEHLGEKRLQAFCVKHGYSGRRSAAELLARLRAAPAGSTDEALTDAVRDAVLAQVAVLTALTAAEKKLDRSVVAHLGEHPDAKIFTSLPRSGRVNAAQVLAEWGDSRAAYDHPDAVAALAGVSPVTKASGKYRAVHFRWACNKRFRKAITCFADNSRHSSPWAAKVYADAIARGHDHPHAVRVLARAWIRVIYRCWNDGVPYDPNKHGNAGKLREIATAA

SEQ ID NO: 308410 - protein, 416 aa, unidentified
MNAVGIDVSSRKSTVAVLRPLGEVVCLPFDVTHDIAGLASLAEKLKAIDGETRVVMEHTGRYYEAVAKALHEAGFFVCAVNPLLIKEYGANSLRRVKTDKADAIKIARYALDNWADLRDFTPMDAIRYDLKTLNRQFQLASKQRTASANNLIALLEQSFPGIRKCFDSPVRSDGTQKWVDFAHSFWHVDCVRKQPFAAFCERYRKWCKRHAYLFKLSNAEEVYALAKRAVVLTPKSKVVKVLVQEAANQLISISRSVEVYRAEMDRLAAMLPEYPVVMAMYGVGKSYGPQLMAEIGDVRRFERKQALVAFAGIDPMPNQSGDKNVRSNKSSKRGSPYLRKTLFNVIRTYLQCAPQDEPVFQFLNRKRAEGKPFYVYMLAAANKFLRRYYAKLRDYFASLDTLQPVDPIPTTLKASL

SEQ ID NO: 308411 - protein, 329 aa, unidentified
MTNESQESVFVGVDVSKAVLEVALSDKGASERFDNDEHGIAALIESLKQVHAGLVLMEATGGLERKLAQALYLQNFDVMVVNPRQAHDFGKAMGYLAKTDHVDARVLSHFARTLHQSERRDKLLLKLPSQQQQHVAALVMRRGQLVQMRVAESNRLEQAHPLLAKSIAAMIKALDKQIDVLDDDIGGRLKMHFKRQTELLKGLKGIGPNTQAVLMGMLPELGQLSRREISKLVGVAPLARDSGKSRGKRSIWGGRADVRSALYMSTLSAMRHEPVIMQFRDRLRAAGKAPKVVIVACMRKLLTIVNAVIKSGQPWSATYSQAGNALQTA

SEQ ID NO: 308412 - protein, 400 aa, unidentified
MRNNAFVPSDYDVFSGLDVDKRSISATFNNQQGHIRSLRMPNSVEHLVNHVRKHFPDQKVAFVYEAGPTGYGLYDGLVAQGYRCLIASPSMIPKAPGQRVKTNRLDSVGLAENLRGGQLKSIHIPSPVYRDLRNLTQLRDTFVSAMVGMKQRIKSLLLLEGIEFPPAPAGSQWSIVVKHKLRKLPCSCTVRFKLDQLLDSLEFNEKQVVKTTQQMRRFCQNDPELSRCMEYVMSVSGIGRIVASQLLARIGDWRELKNVRQLGGFLGLVPTEHSTGDRTDRGSITQTGDGRLRSKLIQASWSAIRQDAELRESFASVCKTHARHIAPRVAIVAVARKLSVRISVVLMKQRPYVVREKVHSAPLTQEETSPQGTTRRKPEPGEPKLLTVRPLRQRSRGLVP

SEQ ID NO: 308413 - protein, 395 aa, unidentified
MPKHSTDMKKSPVALDQDSTLIAVIEMSEASWLVAGIVPGIARQPLKKLAPDAEALLRLLERWRAEAERAGRAVTRVAVAFEAGRDGFWLARWLRARGIEAHVIHPSSVAVSRTHRRAKTDRLDTRLLMRAFLGWLRGEADHCTMAAIPSSAEEDARRPSREREALVGERTRLVNRMKATLARHGVRGFNPALRKAPGRLAALRTPEGTPLPPDTAAELARAMARYRLVTEQIREIEAARAARLCAAPAEAPQARPHAMVVLLARVHGIGIETADMLVNEVLARDLRDRRAVARYGGLTGAPDESGQRRREKGLARAGNARVRRGMIQLAWRWLRFQPDSVLARWYRARTEDIAGDRRGVRKRLIVALARKLLIALWRLATTGEPLEGARLRPAA

SEQ ID NO: 308414 - protein, 461 aa, unidentified
MTPKQKSAGKKARSRRAKKPKTTTAQPFIHPHAAGIDVGATELYVAVPSDADPEPVRTFATFTEDLHALADWLMRCGIQTVALESTGVYWIAIFQILEARGLEVYLVNARHVKNVPGRKTDVRDCQWLQYLHAVGLLRASFRPPARVCALRTYWRQRDTFIRYASSHVQHMQKALTQMNIQLANVISDLSGKTGLAIVDALLAGERDPQKLAALRDPRIKADAQTIAKSLVGDWKEEHLFSLRQARATYAHYQQMIAECDMQIALQLRGFESRVDVAAQPQRKKTSRPRQNEPTLDLRRELYRILGVDLTEIPGLEVTTAAAFLSEVGASVERFATAKHFASWLGLCPDNRITGGRILRVATRKVKSRTAHALRLAAQSLHHSRTALGDYFRRMRTKLGAPAAITAAAHKLARILFHLIKHRCPYDASVFAKEEELHRQRREKNLRKQAALFGYQLTPVPL

SEQ ID NO: 308415 - protein, 391 aa, unidentified
MEARTVNNLPPAGTHDDAVRCLLAIELSKKSWIVAVNTPLSDKISRYTLKPCDGKELLDLCERIRTRVARETKQRVEIVSCYEAGYDGFWLHRLLEAHGIRNYVIDPASLQVDRRARRAKTDRVDVERLLRSLMAYLRGEPKVWSVVRVPSVAEEDDRRLNRERGRLINERIQHVNRIKGLLAIHGIYDYQPLRRDRMQQLERLRTADGRTLPPRLKAEILRELQRLVLVVGMIKTIEAERDAIASAKIETEQQHSSAKRIQDLAKIKSIGPEFATTLVGEVFYRSFDNRKQLGSYVGLTPAHFQSGAMCRDQGISKAGNGKARTVMIELAWLWLRHQPDSPLSVWFRDRVGKLKGRIRRITIVAVARKLLIALWRYLETGLVPKGAALKV

SEQ ID NO: 308416 - protein, 349 aa, unidentified
MLIIGCDYHPGFQQVAIFDPQTGKIVQRRLAHPQEAMEFYRGLPAGVLVGIESTGFSGWFEGLLEGLGHQVWVGDATQIRAAMTRQQKTDKRDAEHIVKLLVEGRFPRIWVPSAADRDARQLLMNRHKLVQWQTQVKNQLQFLALNQGLQLKWRLWTRSGRQQLEALPLARYAGQRRATLLGLLDQLEQQIANLDTAVLGEAEARPEALRLMTHPGVGPVISLAFVVTLGPAQRFAGGRQGASYFGLIPRERSSGGKQRLGGISKQGNSFMRYLLVQGGHSAARRDPELRRFYGHCKHSHAHAGVAKVAVARKLAVRLYYMLRDGISYAEWRSRRRSHAGEPESFCGRN

SEQ ID NO: 308417 - protein, 382 aa, unidentified
MSLIRPFGQRTCAVDKAPLFQAPLFRSDGIQGRAMPLIPCTRLPDAERCGVHQQQGGNVPDATLGVDVSKVSLDANCIKGLQKRAKTFANTPEGWKAMVAWLTNMGTKQAHACMEATGRHSLGLALALHDAGHVVSVVNPAQIRDFGRTKLGRNKTDKVDANLIREYAELFTPGPWMPPSRAMRRLSELETIRAGIVGSRTEWSNRIKSGLGDSIATKLATATIEHFAAQLKAIDKAIRQTIEGDAELRGRRDLLLSVTGVGETLAALLLAEMPEPGVLRRSGELVAYAGLNPSHHRSGTSIDRPTRISKIGNAALRSSLYMPALSAMRFNPAVAALAARLKSAGRLKPKQIIVAAMRKLLVLCFGVLKTGRPFDPAIAMRA

SEQ ID NO: 308418 - protein, 336 aa, unidentified
MSHYCGIDLHSNNHVLVVIDEEDKRLYEKRLGNDLSLTLKALTPYRETLHGIAVESTFNWYWLVDGLQEHGYDLQLVNTAAVKQYDGLKYSDDHHDAFHLAHLMRLGILPTGYIYPKEQRAIRDLLRRRLSLVRTASAQLISVQSQLWRSTGIRIQSGELRKLEFAPPLVDDYTLQAVQAGLAVYQVIQREIDALEKTAHQAVKLTDAFKILQTITGIGKILGLTIMLETGDIHRFAGAGNFASYCRCVDSKRTSNGKKKGEGNAKAGNKYLSWAFSEAAHFAVRFEPLAQRFYERKKAKTNGIIAIRAVARKLARASWMMLKHQVPYDARRMFPG

SEQ ID NO: 308419 - protein, 342 aa, unidentified
MRIVMLGIDLGKNLCSLAGLDETGAVVLRRRMKRASVLPFTAQLEICTVAMEACCGAHHLGRQLVAQGHVVRLMSPAYVQPYVKAQKNDERDAEAIAEAATRPTMRYVEIKSEAQLEVQSLHRVRGRLVAERTALINQLRALMLERGIAVPQGRCKLARYLPEILADERNGLGPRLRQLIEDIREEWRSIDQRIKGYDDELAEQVRNEDTAKRLISIPGIGVLTATALVAAVGNAQTFSCGRDLAAWLGLVPRQATTGGKPRLLHISKRGNGYLRMLLIHGARTALPGLAKKDTPLGRWVKALLARAHRNVVTVALANKLARIAWAVLARDRQYVTVQAIGK

SEQ ID NO: 308420 - protein, 409 aa, unidentified
MQVLFNRCAGLDVHKATVVGCVLITAANGSVTKEVRTFGTVTRDLLALGDWLKGHQVTHAAMESTGSYWKPVYNLLEGHAELLVVNAQHIKAVPGRKTDIKDAEWIADLLRHGLLRGSFIPAKPQRELRELVRHRANLVGRRAQAVNELQRTLESTNIKLGNVVTDITGVSATEMLQAILGGQTDEIALAKMARGRLKEKEEQLRAALQGKVEEHHRLILSQLLADIAGYEEQIAEAGALIAQRLQNQQELLDRLDDIPGVNQRVAQVIAAEVGTDVKRFPTSQHLISWAGVCPGNNESAGKRHSSRIKPGNRSLRAAIVEAANAAGRKKNCYLSAMYHRVASKRGRKRALIAVARTILQSSYYMIQRGAKYQDLGADYYEKRNPEGLAKHLAKRIQKLGYTVTLAKAA

SEQ ID NO: 308421 - protein, 355 aa, unidentified
MNDVKYIGLDVHQATISAAVRDATGNLVMEAILETKTETILQFFHGLRGSLHVIFEEGTWSAWLHDLLRPHVARVVASDPRKNALLQDGNKNDRIDARKLSELLYLNKFNAVYHGEQGLRTLKELARSYLTITKDLTRVMARIKAIYRSWGIPCAGQQVYAPGHRREWVAKLSEAGVRRRAEIYYQQFDGLAPLRQQARRELLVESRKHAAVKLLRQIPAIGPIRAALLVALLQTPNRFRTKRQLWAYVGLALRTYTSGEYRFEGRQLKRSKKVLAIRGLNRNHNHDLKNIFKGAAIWAAGNTGPFQNFYEACLARGLKPHLARLTLARKIAAITLLVWKKGVCFDAKHLTQQAA

SEQ ID NO: 308422 - protein, 403 aa, unidentified
MNMNAVGIDVSKGKSMVAILRPYGEIVSAPFEIKHTSGYIQSLIEQIKSIEGESRIVMEHTGRYYEPLARELSLADLFVTAVNPKLTKDFGDNSLRKVKSDKADAVKIARYTLDSWTELKQYSLMDEIRNQLKTMNRQFGFYMKHKTAMKNNLIGILDQTYPGVNTYFDSPARNDGSQKWVDFATTYWHVDCVRKMSSNSFVDHYKHWCKRKKYNFCKDKAEEIYGTAKELVPVLPKDDLTKLIVKQAVEQLSTASKTVEELRTLMNKTAAKLPEYPVVMEMKGVGPSLGPQLMAEIGDVTRFTHKGAITAFAGVDPGVNESGTYEQKSIPTSKRGSSVLRKTLFQVMDCLVKTKPLDDTVYAFIDKKRAQGKPYYVYMTAGANKFLRIYYGRVKEYLMSLPE

SEQ ID NO: 308423 - protein, 390 aa, unidentified
MSATHVTQSTATSAPVLYLALELGWNSWKLAFTIGMGQKPRLRTIVGRNTSQLLFEIAMAKRRFGLPEQASVLSCYEAGRDGFWLHRFLVAHGVENRVVDSASIEVNRRKRRAKSDGLDAHKLVEMLIRWHNGESKVWRLVNVPSAEDEDLRQPHRELMELKVERTAHVNRIKGLMASLGLTIAVDAKLPERLLELRQWTGAVVPPEMRQRILREFVRWQLLERQIHELEAKRTADLRNDQTPGVDKMRQLHRLNGIGDNGAWILVREIFGWRRIRNGRELGSLAGLTPTPYDSGGTRCEQGISKAGNCRVRGIMVELGWSWLRHQPTSELSRWFQRRFGKGNSRLRKVGLVALARKLLIALWKYLENGEPPKGARLKGQKLTVRLKKAS

SEQ ID NO: 308424 - protein, 367 aa, unidentified
MEMYIGMDIHCKKTVYMIQECSGKVVAQGSVPTSVEGFSKMVDELGVPSGTKIGLESGPQSWWVSGVLSGLGMKPVVIDAREVRAKARRINQKSDFRDAFEICDGLRRGIYTAIVYVPEPQIQRLRQVLSRRRHFVKICTSQVNAAKFLLRSVGLSREAAFLKSNGAWQRLMRRPAVRPLNRYLEMHRDLWQLAQEKVVALEKELDQALEPFRETCGLLRSVPGIGPITSASYIAVLGKPDRFPDSSHLVSYIGLAVSTYNSGERERHGHITKRGSGELRMLLCEAAHHAANARHPLNPYFRRIAARHGYKKAVVAVAQRLARILFQMWRKDQAFDVGQLNVVSARQSRVHRVYWRIKETKEEVVSV

SEQ ID NO: 308425 - protein, 417 aa, unidentified
MLTASWFVGIDWASEAHEVCVLDREGHVCERRQVRHTVPDLQTCVDALLARAHGDATTVAIGIEVPRGALVELLVERGFGVYAINPRQLDRFRDRFAPAGAKDDRRDALVIGDSLRTDPQAFRPVRLDHPLIIQLREWSRIDEDLGGELTRLTNQVRDLVYRTAPEVLTLCPAADEPWFWAVLRDAPTPAAQRRLSARRLERLLRDHRIRRLTAAQVHAVLQQPAVFTAPGVVDAVAAHLEVLLPRVELITTQRRAAERQLARLLEALERELPSAGDQREHSDVAIVRSMPGIGTRVAARMLAEASQPLVDRAYHVVRVSMGVAPVTKQSGKRRRVSMRYACNVRLRNAAYHWARTGAQNDPASRTYYATLRARGHSHGRALRSVADRLLRILMTLLSRGQIFDPTHGHQLPVATGA

SEQ ID NO: 308426 - protein, 428 aa, unidentified
MDEVNRNRLEEFRQLRQEVRHSEEYLIVGIDIAKEQHHAFFGTATGETLLRRLVFSNDHEGFRKLLDHAEALRVRHGLKKVVYGMEPTANYHKPLGEYLITLGRTVVLVSGVTVKRNRESLDGRWDKHDVKDSANVADLISQGKCLHYEHPSAELRGLRGLLSLKKRLKKQEQGYRVRIRNQLIAQYFPEMDREYERLGAEGLSIVRWCLPASQMTELDVEPFIERVTSRRITMEKRRRLEEVWEKAGMSIGCDGVPGVEHEAKVMVEGLKQIREMIKETEGKIKELCEQFPEYHYILTIPGFGPDVSAKVLGAVGDPDRFQNGKQVLKLGGLDLSADRSGKDSDQAIPQISKRGKADLRYALYQAALIASTRNREFMRYYTERLRGRDREKGIQMKMRVKLSAKMLLIAWTLMKKKEAFDPAYLNVD

SEQ ID NO: 308427 - protein, 311 aa, unidentified
MNKVFVGIDVSKDILDVAIHNGKKGSFPNTDQGFEEVYAFIAPFDPALVVIEATGGYQFRVVEHLAIHAIPVAVVNPRQVRDFAKATGKLAKTDRIDAAVIAHFGEAVKPEPQALKDDQAQKLDALISRRRQLVEMITAEKNRFAVAKSWVKDDIGATIAWLTRSVEKINKEIDRLIKNSPLWLEKDQLLQTAKGVGAIVSSSLLCDLPELGSLNRHKIAALVGVAPFSRDSGTYRGRRTIWGGRAHVRSILYMATISAIRFNPLIKPLYERLIERGKVRKVAIVASMRKLLTILNAMVRTNTPFRVPSCT

SEQ ID NO: 308428 - protein, 724 aa, unidentified
MEKLYLGVDLHKRSCWVTVLDADGHLLESRRIGTEKWELGKYFGQVRKPAAVAVEATFNWYYFLNVIEPLGLELHLVHPWKTRAIASARIKHDRLDSRVLAELLRTGFLAEAWIAPRPVREERQLLRYRVHTVQWATRAKNSIHGVLNRNGIRSPLNSPFGPKGRPFLEEVELAKTDRWEVDGQLQRLDLLGAQLAALDREIRKKAKASPAARALEQIPGIGPFIASLVIAEVGDIRRFPSAKHLVSYTGLAPSLYASGEHRWGGPITKQGNSHARWMLIEAAQHLDKHPGPLGVFFRRIANKKNRNVAVVATARKLVVIALFMLRENQPYRYAQPATVKAKLARLRLAGGGRFEGRFSSRQPGRPAFTRQGHLSLTGSGFPLASLQPLFPPTLRLGGDLATAVTGDWQADGRVALDGTARVGAGSLRWRDENGEVRVPVQAAQLHVGWKDAALRAELAVALTGVGRIDGRLRLPLPARLPLAPAAGGALQGEFTANVTEHGLVAVLLPGVIQESRGRLSLTARLGGSWRQPVWDGALTLRDAAAVVPAAGIRLQKIALQARLAGDEVRIDSFEVSSGKGKLSGTGRLTLRGWRLQSFSGSVKGKDFQLIHLPELEVAVDPDLSFSGTREQLKVRGRVLLPAVLVTGPQRGLTLRPGSGVGVGDRPEGVKTTRFGVWKFARLSRLKNSARNCRLRRSWSVVFVSMDRSQVARPGPLRLSRPRFP

SEQ ID NO: 308429 - protein, 445 aa, unidentified
MHYKRLLALIDSVSSYLSVGLDVGADFTWMSIALPNGSFIGKPFKIVHSDPRSRDLAVAKIKEAQETYSLKSRCFLESTGIYHIPLLCFLRDKGFDCSVINPIITKNSTNINIRKLHNDKFDSKKAALVGLNVSLKTSILPDDSVVDLRNLVRDYYYFKDLQSAVALKLTAELKVSFPAYAKVFSKVTTQSSLKLLSSYPLAGDMLAASKDDIVKIIRSTARFGEAYALRKYDAIIAAAQDAAVFGRALPSNAVRIRLYIDTYQEYQKHLDSLLKALHEMVEQLQDTLVYDQICLLQSLRGIGFLSAVVLIAEMGDFKLFSSPKKLYAYFGLDPAVKQSGKLNGDKVHMSKRGSILARRVLHMVALNNVKVDKGSGTPVNPVVYDYYTRKCSGKKKTVAMGAVMHKICNIIFAMLRDNKPFEVITPEEHCRRFAVDHPDKIRKAA

SEQ ID NO: 308430 - protein, 423 aa, unidentified
MKFKSQDRQNQLIEKITAQHLVIGIDIAQQTHVARAVNFRGIVVGNPLSFSNDEEGFQILLRWIQSLQTAHALTAAIVGMEPTGHYWLNLSNWLSDHQFEVVLVNPHLVKKNKENRDNTPSKSDKKDALVIADMVKNGYYSFIRNTPEAFEELRVYLSNRDSVVTRLVSAKNQIHRWVDVVFPELRQVFKNIMCVGSLATLRLFPTPEELSKLQPQDVLRGWKSLMKRHSGDRKARALLSIASRSVGSKQATHAYKLHLKQLLDEYDLACLQLKTVEMEIVSVLERIPFAKSMLAVKGISAISLAGILGEAGDLSGYVHGNALLRHAGLNLAEASSGKWTGQMKISKRGRSRLRRFIFMMTMSLVANNTEFKAMHTYNVQIKKIKKMRSIMKLCGKLARILVGMARRGEAYNPPKTLPIQLAA

SEQ ID NO: 308431 - protein, 345 aa, unidentified
MRDVSITRYNVGVDFGSEQMDAKLAAQYEDGIRKILFSRRFENKDSGFKNLDGWLKEKCKYKGVEIRINCEATGVYHERCCYFLDGLGYYVTVEVPSRVKSYKKSCGFNSKNDKIDATALAYMGLERNLRKWEPINSFYYELRMLTRYHESVQQMHTSACNQLHAMQAGMRTSKLVVKQLKANIKLYEKQLAELEKAIEEKIASEPEVKRKIDNIIEDMKGVNVMTVAVVIAETNGFSWFTNRRQVVKYSGYDVVEDQSGKRRGKTKISKKGNAHIRRALYFPAINLVTHNVKPFVDKYERIFERSRIKMKGYTALQKDLLLMLFTLWKKDQKFDPSYQNQQKKK

SEQ ID NO: 308432 - protein, 359 aa, unidentified
MGSLWAGVDVGKTHHHVCVVDDDGTVVLSEKIPNDQQAIGGIAGRLGKRRKPIRWAIDLRGGPASLLLAVLFDRGADVRYVSGTVTSRMAEAFHGERKTDAHDAYVIAQTLRMRANLPTLTVADGVQQQLKLLVSRRLDLVADRVRITARIQDLLTMISPPLEKVLNLRSKGALRLLAQWQTPGGLRRAGEARILAHLCQDGVRAAKALTTKVLTAARTQTVAVAGEATAAVIVAEMATDLEAVNERITAIEATIAAVVAEHELGEIVTSLPGIGTTLAAEFLAHAGTLTTYASPAALAAHAGLAPVSRDSGRRQGHQVRPHRYHRGLRRVFSLDPWTRAGPLWLGRRGNMTRVPSGLG

SEQ ID NO: 308433 - protein, 340 aa, unidentified
MTDVTRIGLDLAKSIFQIHGVNADEVVTIRRSLRRGQMLAWFAKLPPCLIGMEACAGAHYWARELSQLGHTVRLMPPLYVKGYQRRNKTDAADAAAICEAVSRPSMRFVTPKTAPQQAAAGIHRVRASLTKQETMTMNSLRGLMAEFGIIAPQGRKGIAELLAILNDPQDTRIPQPLHGALQALAATLRSLAAQLKAVDKALAAWGRADTTSRHLSTIPGFGVVTATAIAAHVPDPSVIASGRDFSASIGVVPRQNGTGGKVRLGAISKKGSHYLRRLSVNGAMSYLRSKRGRQDPWVVKMLARKPMKLVAVALANKNLRIAWALMVRGEDYRAATVAAA

SEQ ID NO: 308434 - protein, 343 aa, unidentified
MKGLYYIGFDVHKKTIAYCAKDETGRVVERGTIAANRAGLGGWAESVGMPWTGAMEATLFTGWIYDFLKPYAVELKVAHPAMLKAISASKKKNDRDDAEKIADLLRCDLLPECYMASQEIRELRRILRYRNLMVREAIKMKNKTAGLLMEVGAEYNKKSLHRKKYFAALLETIEDVPGSVIDMLRLNRNSLEMFEQIQKKLVKQIREHEEIKERVERLMTIGGIGEITALTWVLEIGDPCRFSNNRQAISYCGLCSAQRESAGKEKRGPLSKQRNKHLQTVLIEAAKLAPRRNAELAEVYIRELARGNHNRATLAVARKLVAYLLAVDKRLTGFMPRDQFLAA

SEQ ID NO: 308435 - protein, 399 aa, unidentified
MANQARFVGGIDSHKDTIHVAVITELGVAVDDREFPTTTTGYRDATGWLSRHGSLTAVGVEGTSSYGAGIAAALLSCGVHVIEVNRTRPAERRKQGKTDQLDAYRAARAVVAGEATTEPKRASIEPLRALMITRRSAVKAQQAAWRQIGALLVNASAAVRDQYRDLPETKLLATLANTRPGAIIDADHADTLFALRTLARRHHDLTAEITQIQDRMRARATAANPALLAIKGVGPIVGAQLLITAGDNPDRLRHEASFAALCGAAPVPVSSGRTDRFRLSRGGDRAANCALHLIVNNRMSNDPRTRTYRDSHLAQGWTKKAVYRALKRAVAREVFRALTGHCTVPDYSDLRPARQAKNLPLSAAATHLGVWPTAISQLELGKRRNDDLANAYRTWLHAA

SEQ ID NO: 308436 - protein, 366 aa, unidentified
MASVSHLAPVHLGLDVHRDTISVGILEPDQQVPEVERIAHDEPSVRRLVGRLGDPRRLRACYEAGPTGFELARLLHSMGIGCQVIAPSLIPKAPGDKVKTDKRDCRRLARLHRAGELVAIRIPTLAEEAVRDLCRTRADMVADRTRARHRLSKFLLRHGRVWRGGATAWTQAHERWLCCQRFEEPALQATYAHYRVVLQSRDAHLDAIEADLAGWYDRPPFAAQVARLSAYRGVTRLGALTLAAEVCDWRRFARASQFMGFCGLVPSEYSSGTQTRRGHLTKAGNAHLRAQLVESAWSYQHRPGVGAQIAGRQEGLDPQVIARAWATQLRLCGRFHRLAARKTSKNVVVAAIARELAGCLWAEMTA

SEQ ID NO: 308437 - protein, 456 aa, unidentified
MPNYYLGADISKGYSDFIMLDATKRPIEDSFQLDDTFEGHHQLYSFVSKFCNDHPRARIYAAVESTGGYENNWFDALIKFQSSLPLKTARLNPCGVHNNSKAGLERNITDPISAENVAKYMIAHPEKVTYQQQDPLYSLRKQWSFIKMLLKQKTQLLNQLESNLYAANPEILAYCKNSTPKWVLSLLGRYPTAAKLAKAKRSSLTLIPYVTQPKANALINSAKKSIASATDQISAQIIKATVKQIQHLTKAIEAQVKIITKNCSVPEVELLKTFAGISDISAIGLMLEIGSVKRFAKAKKISSFFGLHPIFKKSGDCAWGFHMSKKGHVVPRYIFYMVAMSAIQCNPLIREIYLKHTAKGMKKKAALGVCMHKICRIIYGMLKHNMAFDPSVDRKNTHKSPQGKTKISRDKRRRYQSFDTKAPISGRQNKKRKERKQSQSVNNAQCGIIKAPVPIS

SEQ ID NO: 308438 - protein, 408 aa, unidentified
MNPLYVGIDVSSKSNVVYLMLPDGSKHSNFSVANSHDGSTQLVKRILSAITSLSLDTVIIGLEATSVYGDNLVYFLREDATLVPYDKKIHVLNPKQVKNFKEAYNDLPKNDYVDSYVIADCLRFGRINKEVYQSDYRYKALQNLTRARFFAVQNLVKEKQRFINVLFKKYSTMTQEKVFHDTFSTTALAVYEEFESAEALASMDLQELTDFIMEKGKNRFPDPDAVAKAIQKAARSSYRLPKTVNDSVNQVLSISITSIKALDAQIKEFDKAIKAQMELLPNVLTSIPGIGPVYSAGIIAEIGDINRFPSQAQLGKYAGLAWTQNQSGDFEAENTKLIQSGNRFLKYYLCEGALSLVRCDTEYSNFYHSKYKEVNRHQHKRALALTARKFVRLVFRLLKDNRLYRAAE

SEQ ID NO: 308439 - protein, 369 aa, unidentified
MKEITTYVGVDAHKKDLFIAMLIGNERTPVAWTVPNEPNAVRRLVRKLEREAPGPVRMCYEAGPCGYALQRQVATARVSCQVIAPSLVPRKPGERIKTNRRDAKKLAELFRAGLLTEVRPPTPDEEAVRDLCRARDDAREDLQRSRHRLGKLLLRRGLHYSAGRNWTRGHRRWIASLQWAHPSERVVVDDYLLAIDHLEARLIELDARLVEIADTEPYRERVGWLRCFRGIDTLTAILMLAELHDFQRFPSAPALMAYVGLVPGEDSSGEKQRRGRITRMGNALVRRLLVETAWHYQHRPGTGVALRRRRKGQPSRVIAIADKAQQRLCRRFRRLAEHHKPAPKIAVAIARELAGFLWAALQPAPAGTN

SEQ ID NO: 308440 - protein, 408 aa, unidentified
MNTLFVGIDISSTKNVVCFMDGSGNRLANFSVDNNKKGAKQLILSIIEYMEKLCYTKLSIGLEATSIYGDLLIYELRQNSRLSNFILSIHLLNPLQVNRFKKIYPDLQKNDFIDAFVIADHLRFGRITDAIYHDDYRYKALQLLTRARFSAVKNLIKEKQRFNNYLFIKCSSLKQKSPISPTSATMYALVEAFDSVDDIVYASLEDIAAFVDKHSRSHFSNSKTIATAIKQAADMSYHLPKTVNNSINQAIAISLASIRALEKQIKMLDKAIEENFRVIPNTLTSIPGIGAVYSAGIIAELGNVNRFHSQASIAKFAGLVWTQYQSGNFEAENTHLISGGNRSLRYYLVEAANSVRRCDPEFNRYYKIKYNEVNKNNHKRAIVLTARKLVRLVFRLLKDNRLYKVPEL

SEQ ID NO: 308441 - protein, 392 aa, unidentified
MRISVGSDIAKEKHWVTVLDADGAVQIDHELRNTPAEIASLADRLTAFGGTVRIGIDVIGGIAGLAEAMLAQAGFTLVHVPGLAVNRARQATVGGENKSDPRDARAIAEQVRTRSDLRPVEPATEIDLEIRLLAGRRRDLVDAQTQRLARLHDLLVGIFPGLEACLDLKTKGPLHLLTRYVTPAELRVAGRKRLVRHLQAAGGLPNPDALADRARAAAVEQAFAVPAERMTARLIRELAAEALASRARLLEVDRELKALLERHPDAALIRSLPGMGVVLTAELIAEAGNLSRFRSADALASAAGIAPVLRQSGRTRFLRRPNGGNKGLKRIFYQSAFCSLGHHDSRAFYDRKRREGKRHHQAVIALARRRVNVLWAVVHSRTPFQQGFKTAA

SEQ ID NO: 308442 - protein, 432 aa, unidentified
MEKIHKNAAGIDIGSTKVFVGTEDEEVRSFETFTADFKALAQYLKDKNVNTVAMESTGVYWIILYDILVESGFEVWLVDGRQTKQVPGRKTDVKDCIWIQQLHSHGLLSRCFVAEGSLKELRSYQRLREDHIRSCSMHINHMQKALIEMNIRLPEVLNQVHGKSGLALIEAILSGERDRTTLLSLCHERIQKSKKEAILKALEGHYTEAGLFSLRQAYHAYHFYKKQINECDAKIEQVLQRINKDKDHDLNEPSKRKPIRHNAPDVENLGGHLLKIFASKDPSILPGITDYTWLQLYAEVGNDLARWATEKHFTSWLGLSPGQNDSGKKMKNARKGRPQAGQIFRKIAQSLLMSKKIALGAFGRRIRSRKGPAIAIKATARKLAVQYWRLMVRGSAYVERGVTFYQEQLVNQKKRLLNKLALELDMEVLQKT

SEQ ID NO: 308443 - protein, 340 aa, unidentified
MDKPLYFVGIDVASATFTSAVGQMSEKWQIVVRPAQFANVYDSFPKYLAWLQEHAVKPDNSVICMEATGVYNEVLAHFLVANQYAVAIEPPLKVKRAFHPEGHKSDPVDSCQISEYAYRFWDELSSWAPRHELLEQIKTLLTTREQFVVEKTGHMNSLTALKRKAIHTPLAEKMHEKAIGELKEHIRQIEEEIQRLIDQDPDYRNLVGLLISIPGVGLLLAAHMLVVIQSAPLPLSPKFLAAFIGICPYEDSSGTSLRHAATSRHYGPPGLRKLLFLAALSISMHNPQFRIYFLRKVQEGKPKQLVINNIANKLLKVMVAVVRTQTAFIANYRSVNPGLL

SEQ ID NO: 308444 - protein, 317 aa, unidentified
MPKIANFVGIDMAKNDFYACLSDVIEPRKFNNDAKGIKSFFNHLKRHDFQKENTLLGVESTASYHLKLCLETCERDYKIKVINPLIVRKQNQTDLRRVKNDKKDSRLIRFCLIGGAGYLFDNDPEAMILKSLIRQRDSLVFSKLKFTRQQDDIRLKEKCLKQDISPVYAEVINVLEEKIDFLKTELRLYRPKEQYLLESIPGIGPITAASFISEVGDINRFKKPEQLVAHAGIDPRVHQSGTSINGKGYISKRGNKILRTRLFNAASVAVLHDNMFKTFFQKKKDEGKPYRVALVATMRKMTHVIYAVWTRGTPFVN

SEQ ID NO: 308445 - protein, 365 aa, unidentified
MQFIGVDLHTNRFTCCYRSEGKEGKETATFELTDYGMVQFYQTLTKETYVLVEATNPTFTFVRLIQSMVKEVVIANTYELKQISLARKNTDKIDADILCRILKMQVLSGEQAVSPVTVPPCAIQDLRSLFTTYRLYRKQTTQIKNRVHSLLKEKLYGFTQEEIFGKKDREKIRKLENNTVMAFQINQLLDNLEYLEVQIDELEDKIKEYAEPYMREIEILTSMKGIGVFIAIAVIADIIEVNRFKNSKAFTSYLRSAPKVSNSNTSKPTLGTNKKGRKLAATLITQSLNHVLSASPKLNRWYLHLTQLKKKGLVRTGLRRRVFAEMYQMLKKGEYHYGRDAGLHEAKMLQYKRFLEKRKNLLISA

SEQ ID NO: 308446 - protein, 400 aa, unidentified
MDRVEQGWIGIDAGKGHHHAVLIDRDGQRLLSRRVINDQPDLVALIDTVQDRVVDPVWAIDLAGGSASLLIALLLQHGQRVVYLPGIAVNRATAAYRGEGKTDAKDAAIIADQARMRRDLRELHMLDEDIAQLQLLSSYRADLAADRTRSINRLRGLLTGIFPALERVLDFTNRGPLILISGFQTPTAIRQLGAARLTGWLKRRGVRGASRLAHAAVEAASRQTAHVPGQAAAASLIVRLAQTVLDLDRQLTDLDREVAGIFRTHDDAAIITSLTGIGDVLGAEFLAVVGGSLAGFASADHLAGYAGLAPAPHDSGYRTGNLHRPQRYNRQLQRVFYTSAMISLQRSPASKAYYNRKRAEGKRHTQAVLALARRRVNVLWAMLRDHRPYQEQPPSHVLAA

SEQ ID NO: 308447 - protein, 348 aa, unidentified
MLADELDYVLGVDTHRDEHVVAVVTAPAGAVVAGAAAPANAHGYRELLRVAERHAPGRRAWAIEGTGSYGAGLSRYLHARGESVLEVSRIARGERRLRGKDDALDAARTARAALASDTLALPRRGERREALRLLLVARRSAVDVRREALTQLRAVIVTAPELLRQELCRLPKGKLLDRCSRFRRSSSSADELATRIVLRSLARRIRTATIEADELEQEILAHVRALAPALLDEAGVGPIVAAQLIVAWSHHGRLRSEACFARLAGVAPVPASSGQTTRHRLSRGGDRQLNRALHTIVLHRRQHDPATRDYIARRISEGKSPRDATRLLKRYLARHLYRLLENQEPLMA

SEQ ID NO: 308448 - protein, 409 aa, unidentified
MRYYLGVDWADQTHAVWVVDESGTKITARAVAHTAEGLGEWGRALDEWRAQGIALWAAIERPDGRVVDFLLDHGVVVYPVNPKALDRARDRFRQSSAKSDPFDARVLADFLRTDHAHLRALLPSSEAAQELKLLTEDCQRHIRQQTRLVNQLTATLKAYYPRALEVAEVTSALAREFLPAYPTPAAVTALTERQWQRWARAHGLSAARAGDLWAVLRQPHLPVPAHVVRAKARLMQALMEQLMPVVAAVAQYRKAIDDFFARIPAARWARTLPIGKHGITAPTLWARLGDAPGRWESFRHLQAHAGAVPVTKRSGKQQVVHFRFACDKALRHVVDQVAFLSLLSSAWARAYYDQQRARGHSHRQALRALGAKWLKIIFVMWQRQVPYDEQYHLATMTRQQLPQGQTQFA

SEQ ID NO: 308449 - protein, 354 aa, unidentified
MSMLADLVEVVIGVDTHSQTHTAAVVEAGTGGVLARVTVTADPDGYAELVALAEQYSGLRAWAMEGTGGYGAGLARHLAARQEMVVELDRPKRPARRAGAKSDPIDAERAARDALARTRLAQPKSGAERAALQMRLTARRAAVEAAGTAQRQLLAMVITAPEPVRARFRGQSTRAMIATAAALRPRASSADVEALTALSVLRDLARRVRFLQAEALEHEKAIRTIVRTWRPDLLELTGVGPIVAATVLAAWSHPSRCRNEAAFAMLAGVAPIPASSGKTVRHRLNRSGDRQLNRALHTVVLTRLQRDERTRAYAERRRSHGKTDREIKRCLKRYIARELYRHLESPPQRRLDAS

SEQ ID NO: 308450 - protein, 428 aa, unidentified
MKNSFSSTLFVGIDVASRSNYVYAMDFWGNKLLSFSTSNNQPGAERLSSNLIQCLLDNNFSFVVIAMESTSFYSFHIANHLSCDEGLMWFKPKVYCLNPKIIKAYKKTFVDFDKTDPLDALAIADFARVGKIKSSPWSGAKYIALQRLTRLRLHLVESVNREKLYMLSNIFLKFSELAVLDKDNHPFSNTFGATSTAILTEFFSPEDIANTSLEGLIDFIVLKGKNRFSNPKATVKLLQKAARDSYRLDKALYDPLNASIATSFNCIKTFDKEIKTIDKAILQAVKALDNHEFECLTSIKGVGPVFAAGIISEIGNISKFNNQASLAKYAGLTWRKNQSGDFTGEDTHLTKTGNKYLRYYLVEAVSSIIKYNQEYKDFYFKKYNEALKHQHKRALALTARKLVRLIFALLNNHQLYIPNKGDDKYKIS

SEQ ID NO: 308451 - protein, 361 aa, unidentified
MKKPSKHLIAEVPRSVARIGMTIGIDLGDVWSHYCTLNEDGEVVDRGRFRTTLAGVDKWFTDGPRARVAMETGTHSIWVSEQLRELGHEVIVANVRELRAISHSDRKSDTVDAEKIARYARLDPEILRPICHRTVAQQEALTLIRARNLIVRLRTAAVNSVRGLAKPCGYRLPASSTLCFAKRCMAVLPPGLAQALGPVLEQIAAMAVKIRHYDRLIKRLTETEYPETQALLQVYGVGQLTALTYVLTLGSKERFKRSRDVGCYLGLRPRRSQSGDRDPQLGITKAGNIYLRSLLVECANHVLGSRGKDSTLRRWGLHLASRGGKQSHNRAIVAVARKLAVLLHRIWITQEPYMPFYATAA

SEQ ID NO: 308452 - protein, 350 aa, unidentified
MTNAIPMDVIIGVDTHKDVHAAAAISGAGVHLATTVIPASSKGYGALEAWAKSMGAIQAFGIEGTGSYGAGLSRFLRERGHTVVEVNRPNRQLRYQHGKSDAVDAESAARAVLAGQAAGQPKSGTGTVEMIRHLKIARDTAVKARTQAMQTLKAIIVCSPDALREQLDQVSGKMTLLRRLAALRPGPLTSTLASAKTSLRAIARRWLLLDAEIKQHDAHLEILTIARAPELLEAHGMASGTAAEMLLLVGDNPERIHSEAAFAKLCGACPIPASSGKTIRHRLNRGGNRQANAALYRVVITRMRGHQPTLDYVRRRTAEGKSRSEIIRCLKRYVAREIFGYLCTSRGSRY

SEQ ID NO: 308453 - protein, 464 aa, unidentified
MYLGGFSPRLFNVDELPKRTAVCCITQVKSTSSKVRIPTRATPSLHISGRDLMQDILTCAMGLDVHRDVIVACLARGELGTEPEIEIRSFSTLIPEMRKLRDWVLEVECRHVAMESTGIYWQPIYEMLEPCFDGQINILVVNARHMKNVPGRKTDMRDAQWIATLLRAGLLNGSFIPDKTFRELRHLTRYRKSIVHDITAQKNRIDKFLQSSGFRFTAFLSDAFGASGRNIIRHLMEYGDISREALDKCLKTQTRKRIDEILVALNGSLSEHQRSFLRMIFEHLESLERHRHTVEDAISEEIVKHEAALSLLCSIPGIDVTAAASIIAEIGTDMSAFPDSQHICSWAGLSPGNNESAGKRKSAHINKGDPYLKSMLCEVGWVISGKRTLYLSGWYWRVKQRKGAKRATIALARKLLTLIYTMLKTGTPYNEECFEIRRKQSERKRAGRMVNELQKLGYFVVAPD

SEQ ID NO: 308454 - protein, 410 aa, unidentified
METIVERPAALDVHKAQVTACVRVPEEGGGREQHIAEFPTTVSGLLTLRDWLAAHRVTQVTMEATGVYWKPVWAILEDEFKCVLVNARHVKQVPGRKTDVSDAAWLCQLAEAGLLRGSFVPPKPIRALRNLTRYRKTQIQERQREANRLHKALEDTGIKLDCVATDILGVSGRAMLGALIEGTTDPEVLAELAKGRLRAKLPALKEALEGRFDHLHSVWIGAILAHVDFLDQQIAGLTEAIGEQIAPFESAVELLRSIPGVQRRTAEVIVAEIGTEMSVFPTAKHLASWAGQCPGNDQSAGRRRSGNTRKGSKWLDWALEEAALAAVRSNSTYLAAQYKRLRPRRGHKKALGAVKHSIICAAWHMLSTGELYNDLGREYFQRRDPERTTKRLVRQLEALGHSVTLEAVAA

SEQ ID NO: 308455 - protein, 391 aa, unidentified
MIFVGIDVAKDTHYAAVSDDSGAVLVKPFAFQNNAEGFCLLLKKLSEFDRSKLLIGLESTGIYSENLICFLYESGFRLAVINPIQTATLRKTAIRKTKTDKVDTMLIIKSLMVNSYRLYSQRDAYSLKLRTLCRFRQNLKKSKARLKIQLAGYVNLVFPEFGKFFKSGIHIAASYALLKKYSSPKEIAALRTSTLCTLLSKASHGRFGKDTAEALKSLALSSVGVKNPYISIQIAQTIAQIELLEQQIKDLNSAIEEAMESINSVLMTVPGIGAVNAACILGEIGDIKRFSKPCKLLAYAGLDPTVRQSGQFTAKSTRMSKRGSALLRFALINSAWQLTLNDTTFKAYYDLKRSQGLNHYGALGHVAHKLTRVIFKLLTSDTPFIPAKLVA

SEQ ID NO: 308456 - protein, 486 aa, unidentified
MKTTRERTQERAKAAAGSAPSKSQRMNRKQRRELARKIQADDVNLEVVHPDAAGIDIGNECHYVAVPSKRDSEQPVRRFGCVTAELKAMAEWLKQCGIRTVAMQSTGVYWIPVYDILEAAGLEVYLVNARETKNLPGKKTDVQESQWLMKLHTYGLLRNSFRPTAEIRRMRNYWRQRNDLIQSAARHIQRMQKVLTQMNVQLANVISDVSGVTGQAIVKAILDGERDPYQLAELRDPRVRATKEQIARSLEGNWQEDLLFILRQEHEAHGFCEKQIAACDQELKEYLNEREDRSQGAHLEEEKRRNRRMKKKGHKPQQFDMREALFRMTGVDLTRIDGIDVMTASTVISEAGWDMSKWRTEDHFVSWLRLCPDNKVSGEKVIGKGRLPTNNRLTTALKIAATSLKQSETYLGAQFRRLRTRLGSPVAIKAMAAKLARLVYRMLRYGMRYVDRGAQIYEEQHRQRQIIFLKRKAAELGLKFVETAAA

SEQ ID NO: 308457 - protein, 319 aa, unidentified
MDCKRVIGVDIGKRSLDVAREGASGVERHGNEPAGIAALVRSLDRQRDIVVFERCGGYERALESALAAANVPWAVVHSLRVKAFRTAQGIKAKTDALDAELLRAFGRDRLVAGDLRLGRVEDVTLDALMARRRQLKAALQAEHCRHDTAAIAAVRASIERMIMHLEAELAVIEEELAVHEADDPQLGFKQQVLCGRIGVAQTTARALLAELPELGRLDRKEITALAGLAPRTYRSGITQWRRGLVPGRTTIKVILFNPARAAMRFDPDIVAFCARLRAHGKPGKVILVAVMRKMLVRLNAALRDALAERLAEPAAQAAA

SEQ ID NO: 308458 - protein, 473 aa, unidentified
MGKGSGGNGMTRGDRRRNARRERLRAMLPRDGAVIGIDLAEDKQALAVIDHDVRVLARKTVRVKVFRLGAALDWAVGQARAKGFGQVTVACEPTGARWLQVQRLCAERGLPLVCIQPLISHIAREQQDFTRHKTDESDCVMIARLAVELHCYVPEELDETWAHLRHLGRRRAQLITAATASAQRIRDFLSVAWPAVPETCARPLESVTWLAALQVVTARCGADPGKLAAMGEQEFTALVRGAVCGWGGQKAHGPISGRVFAALTDTEGVVVSSRRGLLRRVADELGDLQRTRAQLRAVEADMVAVLDELGLSRLADIPGLTAVGAAAILAETGDPHRYDNSSSLVKHAGMSPSDNASGAFSGQAHISRRGRPGLRLVVWRAVWPMLQFNPVMAAKYQAMTRAADTAAADAGPQQGKAAQATARARRAKARVACAASLLRWIYCMVVHDTSWDPAAASGAASRHDAPHTQAEAA

SEQ ID NO: 308459 - protein, 355 aa, unidentified
MSQEKYIGMDVHQATISVAVMNSSGKLTMECLLETKAATILEFIQGLQGTLSVTFEEGTSAAWLHDLLQPHVQRLVVCDPRKNALLKDGSKSDRIDARKLAELLRGNQLHPVYHGEHGVRTLKELGRSYLTLTQDVTRVMNRIKALYRSWAIPCSGTTIYAPRHRAEWLSKLVEPGVHQRGERLYQQLDLLQSVRQQARHDLLVESRQHHAVKRLRQIPSIGPIRAALLVAWLQTPHRFRTKRQLWAYSGFAVETHDSGEFRYVRGKLQRNRERITVRGLSDNYNKDLKNLFKGAAISASTRPGPLHDFYVALIAKGMRPTMARLTLARKIVTITLTIWKKGVDFDAKQLDRQAA

SEQ ID NO: 308460 - protein, 438 aa, unidentified
MSNKVIFNLDDLFISVGIDVGADFSWMSIALPNQQFVGKPYKILHNSIDSLTTAVSKIKEAEELYSLESRIFLESTGIYHYPLFCYLRDKGFNCSVINPIITKNSTNINIRKVHNDRFDSKKAALVGLKPDLKVSLMPSDLALNCRNLCREYYDLMDNRSAYVNKLQGELRMAFPQYLGIFSKVTINTSLTLLETYTSPSAFLEADKQEIIDIIKSTARFGLTYAQNKYNAIIQAATDANQFGYIIDSNIKRIRLYISFIRKYDEEINSILESLHELVDANEDADFVKQIHLIETIKGAGFLSAVSIMGEIGDFSAFSKPKQLFAYFGLDPAVKQSGKFEGTKVQMSKRGSAIARRVIHTLTLQSISISRNGEAKNPVLREYYLKKCDSKPKLVAMGAVSHKVCNMIFAILRDNKPFKIIAPQEHIKQYNSAKCDIAA

SEQ ID NO: 308461 - protein, 407 aa, unidentified
MEADRIAVEIGLEMDLGREASPGAPECFAILPPCILPLPADAKPERLSVDGSPQPPRAIEPVKKQGAPPTGSAGNPNSRLGRKASPHSQGRVMEQPPTSPGFVGIDVSKDRLDVHVRPSGQAFAVARDGKGLEQLTNDLRALAPALIVLEATGGFEITVAAALASAGLPLAVVNPRQIRDFARATGRLAKTDALDAQIIALFAERIRPEPRPLADADSQALAELVARRRQVVEMISMEANRLRQARNPRVQRMIRATLKTLEAQLAKLDREINDTVRGSPVWRAADDLLTSVPGIGEVTARTLIADLPELGQLDRRRIAALVGVAPVNRDSGQMRGRRTIAGGRTDVRNALYMATLSATRWNPVISQHYKNLVERGRPKKVALVACMRRLLGILNAILRTQTPWQTA

SEQ ID NO: 308462 - protein, 411 aa, unidentified
MDTLSPRCAGIDVHKGNVVVCVRCGDRPGKVFEEVRTFATMTADLLALADWLAEHRVTPVAMESTGVYWKPVFNILEGSVAVILVNAEHIKQVPGRKTDVKDCQWIAQLLQHGLLKASFVPPQPIRELRDLTRQRTQLIQERSAAANRIQKVLEDANIKLASVATAVLGASGRDMLEALIAGETDPAKLADLARKRLREKIPALRLALQGRVTDHHRFLLRMHLDHVTHLEELIARVGGRIEEALAPFAEAEERLQTIPGVSQRVAETVLAEVGPNMEQFPSAGHLASWAGMCPGNNESAGKRRSGRITKGNRWLKRILVQAAWAASHTKGTYLAAQYRRLARRRGRKRALVAVGHTLLVIIYHVLKRGTTYTELGADFLERLEPARLTRQLVKRLETLGHKVTLEPRPAA

SEQ ID NO: 308463 - protein, 422 aa, unidentified
MDVIHDRVAGLDVHKDTVVACLRVMSGAKAERTCRTFGTTTVELGELRDWLDGNGCTEVAMEATGVYWKPVWNILSDGRCGLILANAAHIKAVPGRKTDINDAMWIADLVACGLIRASYPGERQAELRSLLRTRKQLCREQASHVQRIQKTLEEANIKLASVISDVLGVSGRRMIEAMIAGVRNPHRLAELADRRLKASPKQLYDALHGRLTNHHRFLLQLHLGQYDALGTAIEEIDRQVDTAIAKLDEEVATPQASFRALIALLCTIPGVSSLSATTILAEIGRDMSRFRSAGHLVAWAGLCPGQNESAGKRRSARLRKGAPWLKTMLVQCAWAAKRKKDSYYRAQFHQLSRRRGPQKAICAVAAAILTAIYHMLKDGTVHHDLGANHFDRRPTQAKVKHLVARLAKLGYQVQLQPLPEAA

SEQ ID NO: 308464 - protein, 338 aa, unidentified
MENYVGIDLHSTNCYIGIIDQNGTRIFNKRVINDLNMIISTLNPFKEKIKGIVIESTFNWYWLVDGLMDDGYHLHLANVCAMKQYEGIKHTDDQSDAFWLAEMLRLKILPTGHIYPKEQRPIRDLLRRRLQLVHHRTALTMSMTSMIQNCTSINLSRYDKKNLTHHEITGLLDHPYQVMSANSINNVVLEINENISKIEKEINMKVKVMQRYKKLNSVWGIGEILATTIMLETGDIRRFKDVGNYASYCRCVPTIKLSNGKTKGRGNKKCGNQYLAWAYLEAAYCMQRAYPEAKKWFLRKLNKKGRFVAIKALASKIARACYLIMKNNIEFEPSKLFA

SEQ ID NO: 308465 - protein, 347 aa, unidentified
MNFYTQQHKHYCGIDLHARARYVCILDEQGTKLVHKNLPTTPEAFLRLIAPYREDLVVGVECMFTWYWLADLCSQEGIAFVLGHALYMKAIHGGKAKNDKIEAHKIAVLLRGGMFPQAYVYPSEMRATRDLLRRRCHLARKRAELLAHIHNPNSQYNLPEIGKRLANKSNREDVAEHFPDPSVRKAIEVDVALIDQYDQLLGEVELYLTRSAKAHDVQPFARLQSVPGIGQILARVILSEIQDIARFPRVQDFVSYCRLVKCAKESNGKRFGTSGKKIGNVHLRWAFAEAAVLFIRQRQPGKEYFAKLEHKHGKAKALTVLAHKLGRAVYYMLSREHAFDLKRFVTA

SEQ ID NO: 308466 - protein, 347 aa, unidentified
MALATISVLGVDLGKNVCSVVGLDASGAVVMRRKMRRETLIGLAEKLPACVVGMEACCGAHHLGRVFAAHGHDVRLMSPEYVRPYVKAQKNDDRDAEGIAEAATRPTMRFVDLKSQDQLDIQTLHRSRDRLVGERTALINQLRAILLERGMVAPQGKRKLEQFLTVLMDEQGGEGLSPRMILLVADARAQWAELDRRIAAFDTEFIRWAKENDNARRLTTIPGFGAIVASALVAAVGHAESFDHGRDLAAWLGLVPRQFTTGGKPKLLGISKRGNKYLRKQLIHGARAALPYVAERDTPLGRCAKALMARTHHNVAVVAFAHKLARIAWAVLRRGEPFAVTGIPAAG

SEQ ID NO: 308467 - protein, 343 aa, unidentified
MAYFAGLDVSVKETSVCIVDDAGKIVREVRVASEPEALLQVLTNTIYRFKRIGLEAGPLSQWLYSVLAEAGLPVICVETRHMRAMLKAQINKTDRNDARGIAQMMRVGLYRPVHVKTLRSQKLRVLLTHRKLLQSKAIAIENDLRATLRNFGLKVGMVGTVKFETRIRELVESVPDLAVLVEPLLIVRRVVREQLGILHRRLLAIVRDDDVCRRLMTIPGVGPVVALTYRVTVDVPARFRNSKAVGAVFGLTPSKYQSGENDRTGAISRCGDEMMRMMLYEAAQSMLVRSTKWSWLKAWAMKIARHRGMKKAIVALARRLAVIMHRMWADGTEFRWTREVAVA

SEQ ID NO: 308468 - protein, 400 aa, unidentified
MIAVGIDVSKYKSTVAIISNTGEILLPPKVYTHTYSALLSLVSLLKKQKDDIRIVMEATGHYHYPILKLLLDNHFFVSVVNPYIIKKYNDNNLRKVKTDKQDAIRLAFYALEKSYCLNAYVPAGEKYADLKFLYQQYTQRIHIIQKEKINLCHLLEESMPGLYDMLSTSVRNPSKNLLYSFVKRFKSFNRIKRMGKERFLNSYFKMAAEIGSRRRKNYALDIYEMAKDCIATGSTEPYSTMAQEECLRSLILAEEAANRLCEQMNSIANTLPEYPLVRSMYGVGDKIAPQLIALIGDIRKFKSGKALNAYAGNDAPPYQSGQFESKNRHISKRGSTELRKVCFEIMCCIKVHKSPEDPIYKFMQKKESEGKAKKVAIMAGINKFLRIYYARVSEVYQKAL

SEQ ID NO: 308469 - protein, 357 aa, unidentified
MTQVKKLNFTGSTIFCGIDVHKKNWRVNIQDKEFELEDFSQNADPVLLHKHLKRKYPGATLKVCYEAGFSGFSAQRWLNSQGIDCQLVNAADVATTDKEKRQKTDKIDARKLCEHLQTKKMKGIYVPSLEWEHGRSLVRARSRIVSNQTRCKNRIWQLFHFSGLAIPKDYIAGQYWSAGFLKELQAIDCGTQELKTTLNLYLKDFVQTRALLLEATRAVRNLCKQPQYQPWIVLLRSIPGIGEINAAVILFELQDVSRFKHFDNLCSYVGLIPETSDSGETRRTKGITDRGNHYLRTALVESSWIVARKDPALLMKYKGYCKTMEKNKAIVRIAKHLLSRINYVLKNKQEYVSGVVA

SEQ ID NO: 308470 - protein, 366 aa, unidentified
MKKVSTAAAKQSKKILQQKLTVGLDLGDRNSWYWVLDESGQIQLEQRVRTNAKALREVFGEMPRSRIALEIGTHSPWISRLLSELGHEVVVANARKVRLIGESRKKDDRLDAQTLARLARIDPELLYPVKHRSAQAQADLMMIRARAGLVRARTGLVNTARGLAKSYGERLRGCNVRNMNPEKAESLSPELQAALEPLLNAIESLSERIVEYNERIENLAQQSYPQVALLKQIKGVGTLIALTFLLTLEDPHRFRKSRDVGCYLGLQPGRRNSGQSEPQLHISKEGDPYLRTLLVQGAQHILGPFGIDCDLRRWGLKLAERGGRNGKKRAIVATARKLAVLLHHLWVSGEVYEPLHNRSRLIVAAA

SEQ ID NO: 308471 - protein, 389 aa, unidentified
MNMGYTLVNEEPSTEPKIRRQVMKDSITVVGLDVHKNSIEIVTADADGAMEVRRFGRIGGTMDALDRAVRKLVSRGSTLRFVYEAGPCGYEIYRHLTGKGFSCKVVAPSKIPKKSGDRIKNDRRDAETLARLERAGELTSIYVPREEDEAMRDLTRAREDAVQSLKTARHQLNAFLLRYGKRYPGKAPWAPVHMRWLSDIALPHPSQQIVLQEYISTVLVGTERTTRLTDQIVRLLPEWRLYPVVKALQALRGVAPIVAATTVAEIGDLSRFENPRQLMAYLGLVPSEDSSGESTHRGSITKTGNGHVRRALVEAAHAYGFPARVSRHLLKRQEGLSETVLAIAWKAQVRLCGKFRRLMARGKLKNKIVTAIARELSGFMWAIAREVEV

SEQ ID NO: 308472 - protein, 356 aa, unidentified
MSIPIPSVQHAHVARLPATYLDTSKSVFQIHGINESGKAELKRKLRRSDLIAFFEKQERCTVVMEACGAAHHWARILSGLGHTVKLLAPEAVKPFVKRGKKNDAADAAAICEAASRPDVKFVPVKTVAQQGILALHTARSLLVKQQTMLANAIRGLATEFGHVVPKGLHNLEPLVALVDADEDMPTQARQAIAELHKRFGELAKGIQACEAEIVKHARTDPTARRLATIPGIGPITASLIAATVVDISRFKSARQFAAWLGLVPRQHSTAGKTRLGRITKAGNREIRKLLVLGATSMLGRAEGWHSAVGSWLRDILQRRPARLVTVALANKMARIAWSVMTRNEVYRPQGGVAAKA

SEQ ID NO: 308473 - protein, 430 aa, unidentified
MKSNTQNAKIEAITEKTLVLGIDVGSKTHYARAFDYRGIEYSKKPFKFSNTEAGFVTFKEWILDLKERHEKDKVVPGMEPTGHYWFNLGKFLQDNEMKPVLVNPHHVKKSKELDDNNPTKNDRKDPKVIAGLVREGRYMIPYLPDGVYADLRTASNIRFQLQAELTRIQNRISRWFNIYFPEYKTVYGKPDAKSGMLILKAAPLPEDILTLGIDGVNQIWRDAKLRAVGKARAKTLIEAAEHSVGSKEGAVAARMEIRMLLEDYESQNMRLQEVMVLIEELVKEIPMAEKLLEIKGVGIRTVSGFLAEVGDISRFNNPKELQKLAGLALVENSSGKHKGETTISRRGRKRLRYLLFEVAMSLVAKNPEFRELHNYYTTRRLNPLKKMQSLMAIAAKLIRVFYAMLTKGVDYDPKKMISDIKRPTVYLQAA

SEQ ID NO: 308474 - protein, 411 aa, unidentified
MDELIARCCGLDVHKAQVTACVRLLVDGVVSEIVETFGTTTPDLLALRDWLRAHAVTHVAMESTGVYWKPVYYMLEDEFEVLLVNAAHIKHVPGRKTDTIDAAWIAQLLAHGLLRGSFVPPKPIRRLRDLTRYRKALIEERARAVNRLHKLLEDAGVKLACVATDVMGVSGRAMMRALIEGKADPEALAELAKGKLRKKLPELRKALTHRFSEHHSFLLERMLAHIEELEEDIDALSGRIEEEIHPFEPAVELLRSIPGVERRAAEVLIAEIGTDMSVFPTDKHLASWAGLCPGQNESAGKRKSGKTRKGSKWLRKTLLESARAAARTKETYLSERYRRLAARRGDKKATVAICHEILTACWHMLTTGELYREQGADTLRQHDQDRIRRRAIAQLEKLGHKVILEELPKAA

SEQ ID NO: 308475 - protein, 398 aa, unidentified
MTESSDYESVQVFIGVDVGKDTHHAVAVNRSGKRLFDKALPNDENKLRSLISDLKQHGHILLVVDQPATIGALPVAVARSEGILVGYLPGLAMRRIADLHAGEAKTDARDAAIIAEAARTLPHALRTLKLADEQIAELSMLCGFDDDLAAQTTQASNRIRGLLTQIHPALERVLGPRLDHPAVLDLLQLYPSPEKLASLGEKKLAIQLCKLAPRLGKRLAADITQALTEQTVVVPGTNAAVVVLPRLALQLITLRKQRGEVALEVEQRVLAHPLYPVLTSMPGVGVRTAARLLTEVACRAFASAAHLAAYAGLAPVTRRSGSSIRGEHPSRRGNKTLKRALFLSAFAALRDPISRAYYTRKMSQGKRHNQALIALARRRCDVLFAMMRDGTFYTPTAS

SEQ ID NO: 308476 - protein, 347 aa, unidentified
MHSVGVDLHKVNTQVCELDEAGAVAREVRVPTGRKHFAKLFAKRERLRILLESSTESEWVARYLEELGHEVIVADPGYAPMYPHRVRRVKTDQRDARALAEACRNGIYRRAHRCSEVHRRVRAQLAVREALVRTRSRYISIVRALLRSEGLRVRSGDASTFVERVGELQLPTHLEETVRSLLEIMEDITERLREMDHGLDVIAHSDAVVRRLCTAPGVGPVTAINFKAVVDRIERFSNAHRLESYLGLVPGEKSSGEKRHRGHLTKRGNTRARWLMVEAAWCVLRGKAPGTQGLAAWGNRIAARRGKRVAVAALARKMTGILYAMWRDGTDFDRDKLRVSRVVIRAA

SEQ ID NO: 308477 - protein, 353 aa, unidentified
MFHQPGEATTMKITTIGLDLAKNVFQVHGVDEQGKAVLRKQLRRNQVAAFFANLPPCLVGMEACGSAHHWARKIEQLGHTVKLMAPQFVKPYVKTNKNDAADAEAICEAVSRPQMRFVPIKNAEQQAVLALHRARQAFVKARTAQANQIRGLLGEYGIIFPQGICHITKRLPAILEDGENELPGSFRALLARLGEHLKELDRQVGELEVQIHHWHRENEASRKLEQVPGIGPITASALVATIGDANSFKNGRQLAAWLGLVPRQHSSGGKSVLLGISKRGDSYLRTLLIHGARAVIRVAERKEGYAQSWLGQLLGRRHKNVAAVALANKNARIVWALLAHERNYQADYAPSAL

SEQ ID NO: 308478 - protein, 382 aa, unidentified
MEVVHERCAGMDISKRDAKVCVRTPGARAGTYRKQLSVHGAMRRDITALGDHLVAEHVTLVVMEATGDYWKPFYYGLEDRLDLMLVNARHAKNLPGRKTDISDAQWLTELAAHGLVRGSFIPPWPIRKLRDLTRQRTLLTAQRTREIQRLEKLIESTGIKYTSITTRTLGVSGREFLEALVAGEHSPVALATLARGRLRNKTDDLRVALEGDFTSHHGALVRMGLDRIDLLNQHIATLTRLTEALLAEHGLGWARDLLASIPGISTTGAENILAETGADMTAFETAAHLASWAGVCPGQHESAGRSGHSHARPGNPHLKGTLGIAAMAAARTNGSFFQNRYRKLAARRGPNRALVAIQHSLLTAIWHILTNHEPYREHRTAA

SEQ ID NO: 308479 - protein, 375 aa, unidentified
MREKVRFLGLDVHAETIAVAIAEPEGEVRSLGTIPNREDSLRKMIKKLGPPDKLRVCYEAGPTGYVIYWQLAELGVKCEVIAPTLVPVKSGDRVKTDRRDAEKLARCYRAGDLTAVWVPDEGSEALRDLVRAREAAKQDQLRARHRLSKFLLRSGQRPPSGVRSWTRAYLIWVAQLRFTQMAQEATRLDYLHEVEHMRERVERLELAITEAVKLASPALQQVINDLQALRGIADISAVTIAAELGQVSRFESARQLMGYCGAVPSESSSGKRTRRGSITKTGNAHLRRIVVEAAWSYHRPPGIWYGLRKRQESISEEAKEIAWKAQHRLHKRYLRLAAAGKDKRKITTAVARELLGFIWAIGTRAETEVRQRIAA

SEQ ID NO: 308480 - protein, 313 aa, unidentified
MSKAEVFVGIDVSKNELEVMCRPNKERWTVANSENEIVLLCKRLKAMKPSLIIMEATGGLEVPLVSELAAAKLPVFVINPRQARDFAKGVGRLAKTDKIDADTLAFFGETIRPDVRPLKDQETQELAALVTRRRQLVDMLTAEKNRLQQSPKTVRENIKTTIESLNKLLKDIDDELKKHMGNNPTWQKKDAILQSTPGIGQVTSLTLLSFLPELSTLNRRQIAALVGLAPLNRDSGKSHGKRCIWGGRANIRSVLYMATLSATRFNPVIQEFYNRLINAGKEFKVAITASMRKLLIILNAMVKNKTEWQTKNA

SEQ ID NO: 308481 - protein, 355 aa, unidentified
MTSTKYIGMDVHKESISIAVMNAAGKLVMECVIETKASTILQFIHGLRGDLHVTFEEGTWAAWLYDLLKPHVTEVVVCNPRKNALLKDGSKSDRIDARKLAEQLYMNKIKSVYHGEHGLRTLKELARSYLTITKDLTRVMNRLKALYRSWGIPCAGNEVYAPRHRSEWLSKITEAGVRRRAEHYYQQLDVLRLLRQEVRRDLLAESRKHKAWKLLRLIPGIGPIRAALLVALIQTPHRFRTKRQLWTYSGLGLETHDSAQYRLVDGQLNRSKKSVTLRGLNKDHNHDLKDIFKGAATRVSSSSGPLRDFYEALLAKGRKPTMARLTLARKIAAITLIVWKKEVRFDANYLKPQAA

SEQ ID NO: 308482 - protein, 459 aa, unidentified
MTRKKKMELDIINPNAAGIDVGSRSHYAAVGQSLEDVKEFGVYAEDLTALCLWLLSYGITTVAMESTGDYWQNLYAELMKHGIDVILCNGKFTKHPKGKKTDVKDCRHIQKLHALGLLTSSFLPDETTEKLRTYCRQRSNLLSSAAGASRKMQKYLKFLNFRLDVVVKDVCGLTGMAIIEDICKGNLDPESLSKHRHYNCRKSKEEIAKALYGNNREDFLFGLKQEYQAYRFFQKQIDACDKQIDKFIKEELRKSPEKSKLKTTDKPYKRQNKNAISIKNFNQVAYQYFGGVDLMAIEGLSHATVLSIMSEIGPDGFIKFDTSKQFVSWARLAPNNKISGGKVLSSKIPKGSNRLKIALRQAANAIGNLKDTHLSDFFKRVAFRKGRQAAVSATARKLGVIIWTMVTKQVPYNPPEQYLFLDQRRKMGIAKRIKKQMAKFDIKPEEIGIGNSLIPNYNF

SEQ ID NO: 308483 - protein, 396 aa, unidentified
MPRIWAGVDSGKRTHHCVVIDETGTVLLSRPVENDEIALLELIGAVVELAGDGEACWATDLNSGGAALLIALLAAHAQRLLYIPGRTIHHAAATYRGDGKTDAKDARIIADQARMRHDLHPIRNTDQIAVDLQLLTARRTDLVCDRVRTINRLRATLLEFFPALERAFDYSKSKAALTLLSGYQTPDGIRRLGQTRLAAWLQHRGARNSATVAEKAVAAAHAQHTTLPAQTVGATLVAALAEQITAIDQQIAAIEARTEERFRDHERAAVLLTMPGFGPVLAATLLANIGSIDAYDNVDRLACVAGLAPVPRDSGRIRGNLHRPHRFNRRLLRTCYLAALSSLKNSPASRRFYDRKRAEGKSHKQALIALARRRLNVTWAMLRDNTPYREPAPLTA

SEQ ID NO: 308484 - protein, 455 aa, unidentified
MWIPHEVTIEFQGRKVLWTYSVSRGTITVSTVFYGRKSTHVGGSTPPASRGSCCVNWAVYVCFAPKATELLRSNEMTRMGWTGRAPAPDGSESTWGLARIRSTAMSRTSTVHAVTTIGIDMGKNTLHMIGLDTRGGIVLREKVSRGRITLRLANLPPCLIGIEAGMATHYVARELAALGHDVKQVPPAYAKPFRQGHKNDFRDAHSVAEAVQRPTTRFVPAKTDEQLDLQALHRVRSRLVSERTAVINQIRGFLLERGIIVRQGLRFLRQALPDILAKRTDVLSPRMVRIVADLASDWRQLDERIEPVTDEIETLAKSDDGCRRVMTVPGIGPIISSAMVAAIGNGAAFARGRDFSAWIGLVPKQMSTGDRTILGRITKRGNRYLRTLFVQAARVILLRPASWPKHSFGVWLARAAQRLHRNVLAAALANKLARIAWTVLAQERSYEARIMKAAA

SEQ ID NO: 308485 - protein, 329 aa, unidentified
MDLHRRRSVLVRMTETGQRLETVRIVNDSERLAAVMARAGEAPEVVLEATYGWYWAADALADLGAQVHLAHPLGVAAFSYRRVKNDERDAADLADLLRMGRLPEAWIAPPETRELRELVRHRAKLVHLRSSLRCQVHAVLAGQGIAVPVSDLFGLGGLKLLERAPLSAAARARIDSLLRLVEVFDTEIDTAAKTTAGQLREHPGYRAVQAIPGIGPILGAVFVVEVGDVTRFPDPTRLASWAGLTPRHRESDTTVHRGRITKQGSRLVRWAAVEAVQRTGKHTRIGAYRDRVTERRGRNIGVVAAARELIECVYYALRDHTVRRLATPT

SEQ ID NO: 308486 - protein, 414 aa, unidentified
MDVVVERCAGLDVHRDSVVATVRVPGTGKSRRRREQQTRSFGTTIGQLEALADWLAGFGVTLVGMEATGVYWKPVFYVLERRFECWLLNAQHLHNVPGRKSDVIDSAWCCQLVEHGLVRPSFVPPPEIRRLRDLTRLCIAQVEERTRAIQRLEKVLQDAGIKLSSVASASYSASARAMLEALLAGVSDPEQLAELAKGKLRAKIPQLQEALANRFELAHHGVLVAGLLAHIDALDQTVATLDARIAAATEPHAELVELLRTIPGVGVNTARVLIAECGVDMSVFPSAQHLVSWAGICPGINTSGGRRRSGKTRHGNRWLRKTLTEAARAAARSKNTYLASHYWQIRGRRGDAKAIGATRHDILIAYYHITRDRVPFRELGPDWLARRHSPEHRTRRLLRQLEALGHTVTLEATA

SEQ ID NO: 308487 - protein, 367 aa, unidentified
MKKVSTAVAKQSRNISRQRLTIGLDLGDRNSWYCVLDEAGRIQLEQRVRTTAKALQEVFGAMPRSRIALEIGTHSPWISRLLGDLGHEVIVANARKVRLIGESRKKDDRLDAQTLARLARIVPELLYPVKHRSAQAQADLMMIRARAGLVRARTGLVNTARGLAKSYGERLRGCNVRNMDPEKAEGLRPELQRALEPLLATIEELSEHIVEYNDRIEALAQTRYPQVELLKQIKGVGTLIALTFLLTLEDPHRFGKSRDVGGYLGLQPGRRKSGQSEPQLHISKEGDPYLRTLLVQGAQHILGPFGIDCDLRRWGLKLAERGGRNGKKRAIVATARKLAVLLHHLWVSGEVYEPLHNSSRTTVAAAA

SEQ ID NO: 308488 - protein, 339 aa, unidentified
MNEVTLIGIDLGKHSFHLHAQDAAGRMVFRKKLSRQQLLRTLANVPCCRVVMEACAGSHWLARQLAGMGHEPRLISPQFVRPFVVGNKNDFGDAQAICEAACRPSMRFVSPRNEAQQTVSAMHRLRERLVRERTATVNQIHGFLLEFGISLPRGAALMSRLPTVLDHETLPPRLVGLVVRLRAQVHYLEEQLRQVVQDLKASLREDDKSRRLLEIPGIGPITASALAVELGDARQFANARQFAASIGLVPRQYSTGGKPTLLGISKRGDRNLRRLLVQCARAVMQHTASRTDALSLWVKTLSTRRHSNVVACALANKLARIAWAVLARGTHYQARALTT

SEQ ID NO: 308489 - protein, 390 aa, unidentified
MSKVIMIGCDLHDRSMLLRYSVGEGAPVQASFFNDLSGRARMIRQMLALAKKVQSDRIVFAYEASGQGYGLSDLLDAHGIECYILSPTHLPKTPKSAKLKTDAKDAQMLLEQVRGFVLAGNHLPVVWTPPQRLRDDRELVRARVDAADEITRIKLQVLSMLKRRGIVKPTWYTARWSKRFMKWLRADIVAHLDSVVAVVLENLVDRYEFYHREQLKFDKAIQALATTDRYQASHQELRKLAGVGLLSAMTFLTEMGDVNRFHNRREVAAYLGLCPSSFESGKADNRKGRITRQGPSRLRKMLCQAAWVSLSHCEESSQTYQRIKQGQSKRTKKALVAVMRLLSIKMWHRAVSCGVSDELWGRGGPHAPEADHPPQGNTAFVSVLPVGGGA

SEQ ID NO: 308490 - protein, 422 aa, unidentified
MLGIGIDWAEEFHDVAFGTPEKGVVEQFRISHGPDGVGALIDRALRLEPDPAEVRVVLETRHGLLVEALIDAGFTVLPVNPDLVARRRGPARKKDDAEDARICCLLALDRHAGLKALVPHGELGGELRAIARDDERAARDQRRLLNRLRADLQTTYPAALTLAGADLGAPTVLRLLERWPTQPELAQASRDDLISFARAGRHGWPDRFADQVAAALATPSLPTRDYLVRAKAAGIRLAAVQLLALHEARRGWEQRMAELLLGGRRTGRDHTVKDPDPGNAFPGGAIYLSMAGLGDRLAARVAGEIGEHIEQFTSPNGLQCYAGQAPVTRRSGKSDFVVARRLAHNRYLGDAVHQWAFCSLRQSGWAREFYDQKIAAGKSHHIALRALGNRWLEILWHCLTKGVLYDEAVHVANRKRALGRAA

SEQ ID NO: 308491 - protein, 357 aa, unidentified
MSRLRTDPVLVFLMPERLVERPRAGSHTQGRDMKTMSGSSVMVGIDVASTHVDVAAIGAELPATLNHVGNDAEGHSALADGLARLNPELVLMEATGGYEAALACALQAAGLRVAVVNPRMARDFARAMQRLAKTDRIDAATLAEFAGVLARRPDCARFIRPLSEPEQQDLAALVTRRRQLVSMQLAERQRLRLARPVARPSIEALLAAIAHQLDDVEAEMARHVEQHHGQMAKLLQSVAGIGRVAAATLVAELPELGRLNRRQICALVGVAPYAHDSGASRGRRHISGGRFEVRRAIYMATLTATRHNAAIRAFYERLVAAGKLKKVALIACMRKLITHLNAIARDHLNAQARLTIA

SEQ ID NO: 308492 - protein, 317 aa, unidentified
MQTFLNVGVDVAKDAVVVSCAAQSFPVHSVTNQRAALLAWLKLLPAGTRIGLESTGGYHELLADLAHAQGHVVFLLNPLDTKHYARAMGNRAKTDRVDAELIARLIAQEHTHLRPYTPPTANQRKLDRMIRRRAKIVRIKSSLKLTMSNLSGFTTELKAVLLKLDALIARIDATMSAIAARSPQHEEAQQRLQTIVGVGPVVGMALANTLERVPFHNADAFVAFTGFDPRANDSGHKIGRRRLSKRGPGELRRLLFNAAMSAAKTRVWKPIYEHYRSQGWSTTAALVIIARKIARAAWSIHHYNSIFNPERITKCLT

SEQ ID NO: 308493 - protein, 409 aa, unidentified
MDQLIERGAALDVHRKTIAVCVRVPDERGDRVQHVRTFGTTAAELVTLRDWLEAHRVTHVALESTGVYWKPVYYVLEEAMTCVLVNAAHVKQVPGRKTDVQDCVWLAQLLEHGLLRGSFVPPPPLRELRDLTRYRKVLIQERTREANRLHKVLEDADIKLATVATDILGVSGRAMLQALVSGTTDPELLADLARGTLRKKLPALRHALAGRFRAHHAFLVSQHLAHLDYLDEAVVALSARIEEALAPFAPELARLDTIPGVAQRTAEVLVAEIGVDMRQFPTAQHLASWAGLCPGQNESAGKHKSGRTRAGNKWLRVALIEAASMACRTRNTAFAARYHRIARHRGHKKAVVAVAHAMLVTAYHLLARQVDYHEPGADYFDRRHAERTTRRAIRTLERQGYRVTLESAA

SEQ ID NO: 308494 - protein, 348 aa, unidentified
MRQETKVYVGLDVHKEFCQACVMNESGKVLSNERFLSTQEALDKFLDRFEDAKFVLESTGIWEFIYEGIEKRGFEVVLAHPLKVRAISEAKVKTDKVDAEMLAHLLRADLIPRSHVPPRDIRNLRQLVRHRAYLVRQCTSIKNRIHAELLRRGIRRPDSLKKTFSHKHVGWMRSLGILTITSSLNCLEGIQAQIREVESFLLAEYNSRKDAQLIATIPGIGFYGALLILAEIDDIHRFSHPEKLCAYAGLVPTVHQSGATSYHGGITKNGSPHLRWILIEAVHVHTNYCPGSKLSKFHAKVAQRRGKQRATVATARKLLHTIYWMLLNKEKFHCQGFNLVEKAATLIA

SEQ ID NO: 308495 - protein, 320 aa, unidentified
MDAVLGIDIAKAKFAAALLRPDGKIRHKSCANTPTGFVDLAVWLQRQGVTHVHATLEATGTYGEALATWLHDAGHIVSVVNPSVIHAYARTQLARSKTDRIDAELIARFTASHQPAPWTPPALEIRQLQALVRRLDALQGMRTQELNRLASGVTVAEVRASIEAVVANLDAQIAHVHQLIRDHLDRHPGLRAQRELLTTIPGIGEATAAVLIAELFDKRYASARQAAAFAGLVPRLVESGTLRGRSRLSKIGPGRLRKALYMPAVAALRWNPTIRAVRARLHAAGKPPMVIIGAAMRKLIHLAYGVLKSGRAYEPTCAHP

SEQ ID NO: 308496 - protein, 430 aa, unidentified
MTKRSSTPADAVLVAIDMSKHRQEVLIERPEGGRRRRMTVMATKADYDRLAADLADIGRPVIVGFEATGNYHRTLAHRLLSAGFELRLISSVALARTREALHNGWDKNDSKDAQVILHMLQIGATQRYVDPLAAGINDLQEMSKTHEAISKAKTQTWHRILTHYLPLYFPEIERFAGNSRSDWFLALLERFPTPTSMTALSQEAFTREAWSLVGRKVSKARLINDIYETACASVALPIGEDSVSIAMFRMVIAQARSLIRQRDEIERTAHALLSENRDYQLLRMIPGIGPINALTILAEAGDLRRFAHHRQFLKFCGLDLATCQSGTFRGRTKLSKYGNARLRRTFWMATQVAIRQRDNSFRDKLGRYVAGHANDPDRRRKAMTALTAKMARVAHAVIKTGTEYRPFLERADTRWKDPSLWCREGAAATL

SEQ ID NO: 308497 - protein, 314 aa, unidentified
MRTQVFVGIDVSKAQLDVAFRPEGRVSVPNDEAGCAQVLERLRAVPPTLVVLEATGGLEIPLTGVLAAAGVPVVVVNPRQVRDFAKATGRLAKTDTLDAQTLAHFAEVMRPELRPLPDEQTQALAAILARRRQLVEMLTAEKNRLGSAPKPVRKSLRTHIAWLERELRHTDSNLAHAIRESPVWREKDALLRSTPGVGPVMTTTLLANLPELGTLTGKQIAALAGVAPLNRDSGTWRGKRTVWGGRAQIRATLYMAALVAARFNPVIRAFYQRLCATGKAKKVALTACMRKLLIILNAMLKHRTPWRTELVPCA

SEQ ID NO: 308498 - protein, 318 aa, unidentified
MKKAFFCGVDVSKDKIDVCFLTSVASEKAKFETLPNNYDLIKVYFDSFKNDEILVVFEATSNYHLALQKALSDLNIRYNVTNPYKASLFLKHLSTIKTDVNDSYGLAVYARNFKSEILPDKYNAEYLQIKSYNSTLNLLQKLNTQLKNFKQSQKFVKNSVVDEVIENLINEIAKLQSMLQKLAFDLVKKTIPETEEIIKSNKGFGIDLALNLFPQLHFNRDKSEKQFVSFLGLSPRIFQSGSSVYKSQKINKMGSSNIRRILFMSALCAIRFNEKFKARYDRLIANGKKKMVAIVAVMCAIVRYLKSLFPFNAEIKAI

SEQ ID NO: 308499 - protein, 344 aa, unidentified
MQTMYYVGQDVHKRMISYCVKDGSGAIHAEGTIPATRFDLDRWMRALPQPWTAAMEATVFTGWIYDHLRPHAAALKVAHPLMLRAIAAAKKKNDRIDANKICDCLRCDFLPECYMASTAIRERRRTLRYRNLLVRQMVQMKNKISGLLMEAGVSYNKQRLHKTGYFRELLATNPDIDEGLVSPLRLCRETVVRLQRTESALVRSLERDSLLIDRVERLMTIPAVGPITALTWALEVGDVQRFSSIKKAISYCGLCGAEKSSGNTVQRTPLSKQRNKHLQTTLIEAAKMAPRNNPELAMLYDKEKQKGNANRATLAVARKLVAYLMAVDRGQRNFQVVETNCIAA

SEQ ID NO: 308500 - protein, 362 aa, unidentified
MNEKKLNHLGIDVGKRKCRAALKDERGKILDEFFFGNNSDGILELIKRIHNHKMKKCNAVLESTGNMWMRIHDTLEDNGIDTILANTFKTKIIAQAKIKSDKLDARILSDLLRTGLISESYVPVKEFREKRSLVRHRIVLSRTKTKLANKIHAILDKYEYRTELTDIFGIHGIEWLKILSVSPIDKIILDTTLASIESIDNQIQIISKEIARYAWHDSKDVKILLSITGIDIFSAMLISTEIVDIKRFVTPWKLVSYAGLAPSIRESSGKIKTGRITKQGSPLLRWILVQCALSAIRYEHHMRTFYERIKQRKGHGKAIVATAKEMLVIIWYMLTRHQLYKYINISRYEQKLERLKKIGSQR

SEQ ID NO: 308501 - protein, 350 aa, unidentified
MGASTRKITTVGIDLAKNVFEVHGIDARGKAVLRKQLRRAQVAVFFGNLPPCVIGMEACASAHHWARTLQRFGHTVRLMAPQFVKPYVKTNKNDVADAEAICEAVGRTNMRFVPIKNIEQQAILSVHRVRQGFVKARTAQANQIRGLLGEFGLVIPQGIYNVAKRVPEILEDASNELPVPFRHLISRLTEHLKELDRQVKEFEKEIVAWHRSSELSRKLDKIPGIGPLAASALVASIADARSFKNGRQVSAWLGLVPRQSSSGGKPTLLGMSKRGDAYLRTLLIHGARSAILAATNKVDNTQGWLTDLLKRRHPNIAAVALANKNVRTVWAILAHGREFRPDYVPTRMAA

SEQ ID NO: 308502 - protein, 401 aa, unidentified
MNNTTMFYVGIDVSKDKSDICIKDQNGNDLIQRFKITNSKADLDRLYETIERIKSRTQEKSDVVFGMEATGIYSLPLYSALKRDGHKVKLYNPIQTNGFRKINIRKTKTDPIDSAIIADMLRFSEPPQVSDIQDMNLYQLRELVRIRHRLIEKQTLCKIQLVRNIDTVWPDYNSVMKRILGTTSIAILRKYSVPSKVRASSFDQFYELVKKMSRSKISRIQAEEIYAHAGNVLTIPELESVITFEIKTLIKQLELYDEQIESIEIRIDQMMKNIDSKIMSIPGIGYTLGPIILGEIGSVTRFSNVKKLVAFAGLDPVVSQSGRFENMSGPISKRGSPLLRQALFLAANVARMNDDNLKRFYDKKRNEGKHHFSALNAVAAKLLRITYWVMKNNKEYQTQPN

SEQ ID NO: 308503 - protein, 482 aa, unidentified
MAMRKLSTFERLQPGRLNRQQRREVGRRIAAADAGLAVVHPDAAGIDIGNQSHFVAIPPDRDPVPIREFGAWTAALQELAQWLTAHGIRTVALQATGVYWIAVQDVLEQAGLEVYLVNARGTKNLPGRKSDVQECEWLRKLHTYGLLRNSFRPPEVIRAVRTIWRQRDRWVQEAARAVQHMQKALTTMNVQLANTISDLSGVTGQAILRAIVAGTRDPWALAKLRDRRIAASEEEIAHSLQGTWREEVLFELRQALEAYDFYQGQLAACDRELAKYTAAVPSRERPAPPEGPDGAAPRLPAKPARRAKSRRQGHPGFDLAGELHRTLGVDLTRIDGIDVLTAQVVFSEIGPDFSAFPDENHFASWLTLAPQRDISGGKVIRHVPAAGRNRVANALRMAAQSLCRSDSYLGARYRRLRARLDGPVAVKAMARYLACLVYRLVTKGQAYVDRGAAHYEAKRQERERRALERRAATLGLTLVPAA

SEQ ID NO: 308504 - protein, 346 aa, unidentified
MKHSVGLDVSVKETAICIVDEAGKVVREGKVATEPQAIIAFLSSAGVEYARIGLEAGPLSQWLVNRLSEAGLPVICVETRHMKAVLKAQQVNKSDRNDARGIAQMMRVGLYKPVHVKTLASQQARMLLTSRKLLRDKLQDMENELRGTLRNFGLKVGVVSPGHFEARIKELVAGQPPLEMIVVPLLTVRRVVREQLAKLDKMVLDQVRDDKLCRRLMTVPGVGPIVALTFRATVDQAQRFARSKTVGAHFGLAPRRFQSGERDYDGRVSKCGDAMMRTALYEAAQVLLTRTRTWSWLKAWGMQVARRRGAKKAIVALARRLAIVMHRMWVDGTEFLWRKEADTAAT

SEQ ID NO: 308505 - protein, 394 aa, unidentified
MIYAGVDIAKTDHVIGAVDERGAETCRPMPFKNTEAGLERAVAWLEGLAGSPSDVVVGMEATGHYWMACYSFLVARGYSVAVINPMQVKAVRKLKGLDKVKNDRVDAWLIAETLRIGQYDETRLATDEVASLRSLSRYLQSLRGMAAELKTQCVCLMDAHFPEYAGIFSDMFGAGSRAVLSKSPLPFELARRRADSLARDIAEASRRGGKSAGYAARIKAAARSSIGVRLGQEAASFQVKSLIRQIEFADSECAKVEARVRALLDEVEPLVLTIPGVSYATGAQIVSEIGDVSRFRNASALVSYAGLNSSVSQSGQFDSGGGPITKHGSPYLRRALWLAANRARQYDPGLRAFYDKKRAEGKPHRVAVTAVARKLCHIVFAVMRDQVPYDPGRE

SEQ ID NO: 308506 - protein, 381 aa, unidentified
MTTAAPHNEHGNITEATLFVAFELSEKTWKLGFTTGHGQKPRERTVTARQQERVLDEIAQAKRRLGLPESATVVSCYEAGREGFWLHRFLQAHGITNQVVDSSSIEVNRRRRRAKSDGLDVRKLLSMLIRYAHGERQVWQVVKVPSVEAEDHRHLHRDLETLKQERASTTTRILGLLRSQGLRVTSLTKLPEQLEALRLWDGSPVPPGLRRRVLRVYAHHTFLSEQIAAVEAERRAQLHASTDARIDKVRQLMLLKGIGINGAWLLVMEFFGWRAFKNRREVGGLAGFTPTPYQSGESAREQGITKAGNRHVRWMTTELAWSWLRFQPDSALSGWFRQRFGSGGKRLRRIGIVAVARKLLIALWRFLETGVVPEGAVLKEG

SEQ ID NO: 308507 - protein, 353 aa, unidentified
MRTYYVGMDVHRATIAIVVLNGAGKVVEQLVVETSATRVRCYLKQLQGRVYVTFEEGTQAQWLYDVVQPLVTEVIVCNPRHNKLLKAGNKSDRIDAQKLAELLRNGSLKAVDHRDHGVRALKELVRNYDCLVSDTTRVMNRLKAMFRQQAIACGGHEVYRQDRREVWLAKLTERGAKARASSLYRQLAALKALRHEAKLAMVREARRGAAYLWLMSVPRLGAVSVAQLLAVVGTPHRFRTKRQFWSYVGLAVVTSSTADMEVVDGVLRRSRRPVATRGLNRNHNHLLKRVFKNAATSACQSAPFKQHYERRLQQGMDPALARLTVARQLSAITLSLWKRGEKFQAERMKRQAA

SEQ ID NO: 308508 - protein, 383 aa, unidentified
MKKSNSGFVEMKATSIEANANGTDPKGIGTPQGRDYHAVVGLDVGDRRIHYCVLDLGGELAVEGAMATQEAALRVQFEGKARMRIALEAGTHSPWISRLLVQWGHDVIVANPRKVRLIAQSNSKNDQADARTLARLARVGPELLSPIQPRSEKTQVDLALVRARDVAVQSRTRLINSVRGIVKSTGRRLTKSSTLTFARKAREACPEILQPALLPLLRMIEELTKEIEAYEKLVIHKAESEYPETKAIRTIYGVGPITALAFVLLMNNDRSRFQKSRDVGCYIGLRPKQRESGQSAPQLGITRVGDSLLRCLATQCAQHILGPFGKDSALRRWGLSLALRGGKNAKKRAVIAVARKLVILMHRIWITQEVYEPLRGIAKPTAA

SEQ ID NO: 308509 - protein, 410 aa, unidentified
MELLHRRCCGLDVHKETVVACLRLVADGKVTTEVRTFQTTTADLLRLSEWLADLVWTHVAMEATGVYWKPVWHILDDGEFVLVLANAAHVKNVPGRKTDVNDAMWLAELLAHGLIRASFVPDTQTQEMRSLLRTRKQLVREQSSHVLRVQKTLEDANVKLDSVLTDLMGKSGRAMLEALIAGETNPVKLAGLADRRVKASPEELREALRGRVTKHHRFLLRLHLNQIDALDAAMATLDAQVEASLGPFRTAVELVTSVPGVKNLGAHVIVSEVGIDMSRFPSAEHLLSWACICPRNDESAGKRRSNRMRKGGTWLKTTLVQCAWAAVKKKDSYLQAQFYRIKARRGPKKAIMAVAATIRTAIYHKLKDGTMYKDLGRDHFDRRSTDRQKKRLIKRLTDLGYAVTIKPLAA

SEQ ID NO: 308510 - protein, 354 aa, unidentified
MIIIGVDFHPEFQEIASVDTDTGEYQEKHLAHPEEAEQFYRALASVGQMVRVGMEASGPGRWFERLLEELRIELWRGDAEVIRAKRGRKQKTDREDARHIFKLLLKDDFPRIWVPSWENRDLRQLLWHRHRMVQARTRVMNQLQAVALNEGLRCKKKLWRTHGRQQLESFRLAPWASRRRRELLELLDRLNPTIAELSRAVDEEAEKCPEAKRLMTHPGVGALTALAFVLIIGNAERFRCGKQVASYLGLVPLEESSGNRRRLGHITKQGSSIVRFLLVEAAQVTVRRLPDWRTKYVHLMMRRGRKTAKVAMARKLAVRLYWMWRKGWDYEQWKKFGSNVGQPGHRDGVQQNTE

SEQ ID NO: 308511 - protein, 367 aa, unidentified
MKKVSTVAAKPGKKISQQKLTVGLDLGDRNSWYCVLDESGQIQLEQRVRTNAKALQEVFGAMPRSRVALEIGTHSPWISRLLVELGHEVIVANARKVRLIGESRRKDDRLDAQTLARLARIDPELLYPVKHRSAQAQADLMMIRARAGLVSARTGLVNTARGLAKSYGERLRGCNVRNMNPEKAESLSPELQAALQPLLAAIESVSERIAEYNERIEKLAQESYPQVALLKQIKGVGTLIALTFLLTLEDPHRFRKSRDVGCYLRLQPGRRNSGQSEPQLHISKEGDPYLRTLLVQGAQHILGPFGVDCDLRRWGLKLAERGGKNGKKRAIVATARKLAVLLHHLWVSGEVYAPLHNSIRVTVATAA

SEQ ID NO: 308512 - protein, 371 aa, unidentified
MKEFTKYVGLDVHKETIAVSVAEANGGELRYFGEIANTPEAMEKLVKQLRKGGAELSFCYEAGPCGYGIHRQLSDLGWDCQVVAPSLIPKKAGDRVKTDRRDSLMLARLHRAGELTAVWVPDGAQEALRDLTRAREDMKHLQRQAKQRLLAFLLRHGKHYGGKSNWTQAHHRWLEVVKFNHPVQQIVFQEYIDTVKVMTQRVEALDKQIESASKESVFWPVIEGLMALRGVSVLTATTIVAEIGDLRRFASAPQLMAYLGVVPSEHSSGATKSRGGITKTGNGHVRRVLVEAAWTYRHPARKTAYLQRRAERTSEVAQEIAWKGQKRMCSRYRLLEARGKLKVQVCTAIARELAGFIWAIGQAVPQPTAKA

SEQ ID NO: 308513 - protein, 339 aa, unidentified
MTVKTVGLDLAKDVFQVHGISENGRVIFNRDIKSAKLLRFFETLPPCRVGMEACGSSHHWGRQLRKLGHDVKLMPAGYVKPYVKRGKSDAVDAEAICEAVRRPTMRFVEIKTEEQQAILSIHRTRDLAVRQRTQLANMIRSLLREFGHILPIGIEAVTAFAKRHLDGDCPDMPEIANGMLGIQCYQLIGLNERIDGYSKMVQQHALLNADARRLMRMPGIGPITASAIVATIGDAKQFRTGRDLAAWLGLTPLNKSSGGKERLGKITKQGDRYIRKLLVVGMTSRAVMAKRSPEKVDLWTARIIADKPFRLATTAMANKAARATWAMLTKKQEYRQPAF

SEQ ID NO: 308514 - protein, 355 aa, unidentified
MSQEKYIGMDVHQATISVAVMDSKGKLMMECIIETKAATILEFIQGVRGTLAVTFEEGTCAAWLHDLLQPHVSRLVVCDPRKNALLKDGSKSDRIDARKLAELLRGNQLSPVYHGDHGVRTLKELGRSYLTLTQDLTRVMSRIKALYRSWAIPCSGTTVYAARHRSEWLAKISQPGVRLRAERFYQQLDLLRPLHQEARSDFVGESHKHPAVKLLRQIPSIGPIRAGLLVALLQTPHRFRTKRQLWAYSGFAVETHDSGEYRYVRGKLIRNRERISVRGLNDNYNRDLKNLFKSTAISASTRPGPLRDFYLALLAKGMRPTMARLTLARKIAAITLTVWKKGVDFDAKQLDQQAA

SEQ ID NO: 308515 - protein, 407 aa, unidentified
MELLHRRCCGLDVHKETVVACLRLVSDGKVTTEVRTFQTTTADLLRLSVWLAENDCTHVAMEATGVYWKPVWHILDDGEFVLVLANAAHVKNVPGRKTDVNDAMWLAELLAHGLLRASFVPDTQTQEMRSLMRTRKQLVREQTSHVLRVQKTLEDANIKLDSVLSDLMGKSGRAMLEALIAGETDPAKLASLASRRVKASPEELREARVTKHHRFLLRLHLNQIDALDAAMATLDAQVEADLGPFRTAVELITSIPGVKNLGAHVIVSEVGIDMHRFPSAAHLISWTGICPRNDESAGKRRSNRLRKGAPWLKTMLVQCAWAAVRTKDSYLQAQFYRIKARRGPKKAIVAVAASILTAIYHMLKDGTMYKDLGRDHFDRRSTDRQKRRLVKRLADLGYSVVIKPLAA

SEQ ID NO: 308516 - protein, 427 aa, unidentified
MDRFLLISQQVVTFSSTRNVRNLNMRRAYTMYIVGIDIAKRKHEAAVIDGEGTVIIKPFSFTNNCSGYNRLLAMLTKAKLPLDEVSFAMEATGHYWLALFTRLQKEGFRVQVINPVQTNSIRSFYIRQAKTDPRDALLIAEVIRFGHFSESTLHPENIYELRELCRGRHAIVSMQADVKRKVVALLDQVFPEYETAFANMFGDTSMAILQTCPTPKELSEMRLEELCHLIEVSSHKRFRMAKAQELQALARNSFGFAMAGDVFSTMIRLYAKHLDFLKQQVREMDRKIAEIMETLDTPITTITGIGLTLGAYILSEIGDISRFSSAAKLAAYAGIDPTMRQSGEYNGVRNRMSKRGSPYLRHAIWLAASSAVLHDPALKLYFQKKRDEGKPYMASVGHACRKMVSIIYAVMRDNKAYTPCIPNEISA

SEQ ID NO: 308517 - protein, 332 aa, unidentified
MTGFAWLGIDIAKQKFDVALTWSTRRRAKVFRNDGEGWQALLRWLKDLGVGHVHACLEATGRYGDGLAIALHEAGHRVSVVNPAQIKHFGRVKLGRNKTDRADAALICDYCRLFEPAAWTPPSAALRQLRDLVRTREALSASRVEWANRRASGQETAVADAAMAKVIAQLEAEIAALDQAIDDALGQDDDLQAKHDRLVSIPGIGTHTAAVILCELPGPDVLRTAREAAAYAGLNPSHRQSGSSLDAPARISRIGNATLRAALYLPALAALRWNPLVAALRQRLKDQGRLKPKQIIVAAMRKLLHLCFGVLKTGKPFDPEHTTSTEEAASTV

SEQ ID NO: 308518 - protein, 457 aa, unidentified
MQSFYLGSDVSKGYADFVILDSTKQQVMTNFQLDDTFEGYCHLHDILNQFLSAHPGANLFAAVESTGGYENNWYNALVKFQSTLNIQTARLNPLGVMHNSKADLKRNNTDRVSAQNIAEYLITHSEKVIYQQQDQMATLRKQWGFIKMLTKQSTQLLNQLESLLYTANTELLAYCKSGAPDWVLKVLLKYPTAAKLAGARVPALARIPYVTSERAQELVISAKRSVASASDRITEKLVTATTKQILNLKKTINEQAELMVKECSMPEVDILKTFTGISDSSAIGLIIEFQAIERFKTVKKLASFFGIHPVYKISGDGSGRFRMSKTGRKEPRKILFMVTLTAIRSNPLIRNIYLEHTEKGMEKMAAIGLCMHKILRIIYGMLKHGKPFDPQIDLDNRQRSVNKKPAGQMDKSRRFQDYDSNAPISRRQNKKRLERKQSHSVNDTKFGINAPVPESTS

SEQ ID NO: 308519 - protein, 428 aa, unidentified
MKNRNTQKLEAITPGTLIVGVDIAKETQWAQFVNYRGLELRKFLKFKNHKNGFDSILASIEAICKNRRLDNIIVGMEPTGHYWKPLANYLLKNKVNVVMVNPYHTKRAKELDDNSQTKSDKKDALTIARLVRDGRYYEVYMPQDIFAELRVLSNSRISLMKRSNALKNTITAVMDEYFPEIVTVFKHPLKGKAARQILKSCPFPSLILELGIDGVLVEIKKAVKKTVGRKKASQLVKTAKSSIGVGYGLVSVKLKLGLMIEELELLTKQLKQLEKAMEKALTDTGHDELILSIPGIGVVTAASFLGEIGDPMRFDHPRQICKMAGYNLIENSSGKNKSRTVISKRGRKNLRSILYQMAITMVAVNHEMKELYRYLKTRPQNSLKKKQALVVISKKIITVIYNLIKKQTEYRAELVLGEFRKNQIKQAA

SEQ ID NO: 308520 - protein, 341 aa, unidentified
MKVSTLGIDLAKNVFQLHGVDHEGHTILRKKLTRAKFVQFVIQLEPCLIGMEACSSSHYFARLFTRYGHEVKLIPPQYVKPYVKTNKTDAADTEAICEAVTRPNMRFVQIKTEEQQAVLALHTERGILIRERIACANCLRATLAEFGITIAAGQSHLTRELPAILEDSENGLSPFVRTSIYRQSKHIRELEEQVKQVEEALASWYRTQEACQRMAKIPGVDMLTATYVVAAVGNARQFSTAKQFASWLGLTPKEHSSGGKQQLGGISKRGDGYFRYLLVHGARALTAWVNRNGAVEENSWLQGLLERKHYNVAVVAMAAKTARIMWSMLSHNTEYQPRQLA

SEQ ID NO: 308521 - protein, 377 aa, unidentified
MSKVRFVGLDVHAETIAVAIAEAGGEVRSHGTIPNRSESVRKLIRKIGEGAKLKCCYEAGPTGYVLYWQLAELGVDCEVIAPSLVPTKAGDRVKTDRRDAEKLARCYRAGELTPVWVPDAAHEALRDLVRAREAAKQDQLRHRHRLGKFLLRHGKRPVDARPAWCAKYLNWIKVHVRFEQPALEATLADYLQEVEHATERIIRLEQCIEEAVAQAPPEIRAVIEALQALRGVALTTAATVVSELGSLTRFKNPRQLMSYSGLVPREYSSGNRTQRGSITKTGNAHLRRVLVESAWAYRHRPAVNGRLLKRQRSLTLSDETKQIAWRAQQRLYKRYTAMMARGKHKHQVITALARELLGFLWAIAVHMETQHQTSEAA

SEQ ID NO: 308522 - protein, 370 aa, unidentified
MEKFSKYVGLDVHKETIAVSVAEANGGEVRYVGKIANTPAAVEKLVRQLRKNDATLSFCYEAGPCGYGLHRQLTDLGWDCQIVAPSLIPKKAGDRVKTDRRDSLMLARLHRADELTAVWVPDGAQEALRDLTRAREDMKHLQRQARQRLLAFLLRHGKRYDGKSHWTQAHYRWLEQVRLDHPVQQIVFQEYVDMVKGMDKRVVGLDVQIESAAAESVFWPVIEGLMALRGINLLTATTIMAEIGDLQRFTSAPQLMAYLGVVPSEHSSGGTKSRGGITKTGNGHVRRVLVEAAWTYRHPARKTAVLQRRAERASDQVQDIAWRAQKRLCGRYRSLEGRGKLKVQVCTAIARELAGFIWAIGQAVEPVITA

SEQ ID NO: 308523 - protein, 341 aa, unidentified
MEHYVGLDVSLKQTSICVVNQVGSVVREGVVDSEPEAIAAFVRSKAPGAVRIGLETGLTATWLWTALKQLGLPVICIDARHAKAVLKMQINKSDRNDAAGIARIMQTGWFKEVRVKDLDSHSVRALLTSRALLVKIKRDLENQIRGLLKNVGLVIGRAKFNVFTVRAEELIADRPELIAVVGPLLKARQAIERQTDDLDRKVLARYDAQVRRFMTVPGIGPITALCFKATIDDPARFKRSRSVGAYVGLTTRRHASGEIDWTGRISKCGDAMLRSYLFEAAGVLLTRVPKWSAVKAWGMRLAKRNGLRKATVAVARKLAVILHRMWIDATEFNWSKKEVAA

SEQ ID NO: 308524 - protein, 398 aa, unidentified
MELQDETGRVLVVRQLPEGIAGITKLHALVAEHARDQAGEDVDTGQVVVGIETDRGPWVEALIAAGYQVYAINPLQASRFKERYGTSRAKSDKGDAHALADMVRIDRAQLRPVAGDTEPAQAIKVVARAHQTMVGERTRTMLRLRAALREYFPAALIAYDELGLAGADTLELLQLAPAPDMAAALEMPVIAAALKRARRRSVAAKAEGIAAALRTEQLGRSRTVTAAYAAIVTSLAAVITIFNAQIKHLERQVESHFREHPAAEIYLSQPGIGVITGARVLAEFGDDPERYASAKARKNYAATSPITRASGKSRVVIARFVHNDRLVDALRAQAFSAINGSPGARAYYDKQRAREADHGAALRQVANRLVGILHGCLKTGTIYNEHTAWSHHLNIAAA

SEQ ID NO: 308525 - protein, 316 aa, unidentified
MSSELSPVLGIDISKEWIDARLLPGEQSWKVSTVSDQLQLWIDHLPAGITLAVMEASGGLEMPIAAALSNAGIPVAIVNPKQIRAFATALGKRAKTDALDAQVIARFGELLRPTARPLPTETRALLDELVTRRRQLIETGVAEQNRLSTMRSIQTRQSIETHLLWLKTQVKEIEKQLEELIKKSPAWMADKKLLTSVPGVGPITSCIMLAALPELGRLSHREITSLVGLAPVARESGKWRGKRFIRGGRADVRSAIYMCILSAIRFNPVIKVFYIRLRAAGKEKKVAMVACMHKLLIILNAIIRDRKPWNFIPIPS

SEQ ID NO: 308526 - protein, 347 aa, unidentified
MNHVGVDLHKEHSWFHILDANGNKLNSKNISNNHESLKQYFQQIPKPFELAVEATYNWYFFVDIAQNYARRVYLANSYELKAFAKRHKKTDKIDARLIAYLLHKGFLPVVTIADKQTRQIRELLRCRLSMVTDRSRNIFRLKALLDKLGLDSTGDFTTYKRLNKIQNYNVPDVYSTIISNYTAEITHLSEKLYTLRKEIIALAEKDTEILYLMSIPGISYFSGALIKSEIIDISRFKSFNRLCAYAGLAPRVSCSANKTFHGPLNNNRRKNLQWILLENVYHYIRGIPQKRLRYEEVKQRKGHNTAKVVLARDMLKIIYHVLKEKRPFYYDKEKQIQSVATSALCGV

SEQ ID NO: 308527 - protein, 416 aa, unidentified
MNAVGIDVSSRKSTVAVLRPLGEVVCLPFDVTHDIAGLASLVEKLKALDGETRVVMEHTGRYYEAVEKALHEAGLFVCAVNPLLIKEYGANSLRRVKTDKADAVKIARYELDNWADLRDFPPMDAIRYDLKTLNRQFQLASKQRTASANNLIALLEQSFPGIRKCFDSPVRSDGTQKWVDFAHSFWHVDCVRKQPFAAFCERYRKWCKRHAYLFKQSNAEEVYALAKRAVVLTPKSKVVKVLVQEAANQLISISRSVEVYRAEMDRLAAMLPEYPVVMAMYGVGKSYGPQLMAEIGDVRRFERKQALVAFAGIDPMPNQSGDKNVRSNKSSKRGSPYLRKTLFNVIRTYLQCAPQDEPVFQFLNRKRAEGKPFYVYMLAAANKFLRRYYAKLRDYFASLDTLQPVAPIPTILKAAL

SEQ ID NO: 308528 - protein, 328 aa, unidentified
MKNYQEVIGIDVSKNKLDAFGHNRGSHREFSNDVAGYKALLKWAKIKGQRVFFCFENTGHYSLKLALYLASKKQVYVQENPVVIKRSSGVIREKNDVVDAIMIARYGWLHREELSPSELKDNELLEVGRLLALRDQLVRNRTGLKSTLSELKKLLSSSSTDTCCKTLVSSITHLTSQINKIEKQLKTLIKTSEALSQNYKLITSLKGIGLVVGAQLLYHTNNFKRFDSWRQFSSYCGTAPFGHSSGSSIHKKRKYHPMGDRQMKSLLSMAACTAIQYDSELRHYYKKKREEGKLKMIALNNVRNKLLSRVFAVVKRGTPYVELHKFAA

SEQ ID NO: 308529 - protein, 430 aa, unidentified
MKSNTQNAKIEAITEKTLVLGIDVGSETHYARAFDYRGIEYSKKPFKFSNTEAGFVTFKEWILDIKERHEKDKVVPGMEPTGHYWFNLGKFLQDNEMKPVLVNPHHVKKSKELDDNNPTKNDRKDPKVIAGLVREGRYMIPYLPDGVYADLRTASNIRFQLQAELTRIQNRISRWFNIYFPEYKTVYGKPDAKSGILILKAAPLPEDILTLGIDGVNQIWRDAKLRAVGKARAKTLIEAAEHSVGSKEGAVSARMEIRMLLEDYESRNIRLQEVMGLIEGLVNQIPMAEKLLEIKGVGIKTVSGFLAEVGDIRRFNDPKELQKLAGLALVENSSGKHKGKTTISRRGRKRLRYLLFEVAMSLVAKNPEFRELHNYYTTRRLNPLKKMQSLMAIAAKLLRVFYAILTKGVGYDPKKMVNDIRRPAAYAQAA

SEQ ID NO: 308530 - protein, 332 aa, unidentified
MENFYFIGVDISKKKLDFCVMFEGKVVHEEETANHQNAIMSLIRHLEKDYGIDGSRMLICAEHTGQYTFPLACACKAAECKLWLENPAEIKYSSGIQRGKNDKVDAKRIAVYASRFQDKVQYYERPSEDIERLKQLESERSLYVTDLAKYKGQLKDQREYMPTALYERKVKRLTALMENLEQAIQAITNEMDEVITSCPVLFRQMELLMSIDGVGRVVATNMIITTEAFTRFDDPRKFNCYAGVAPFSYSSGTSQQSKARVSHRADKVMKRLLHMAAIAVTHRNGGELKRYYDRKVAEGKNKMSVINALRAKIVARMFAVIKRNELYKPILS

SEQ ID NO: 308531 - protein, 343 aa, unidentified
MEHVAIDLGGKESQICIRNSDGKIIKEKRCQTVELGEYLQERPTSRVVMETCSESFAVAVAAQLAGHEVCVVPATLVRSLGVGARRLKTDRRDAQALSEASCRIDLPSVHLRSIRSRDRNTLCGMRDALVQARTQLINTVRGWLRTQLLKVKSGEVESFPKRVRAAVLSRPEGMPTYVERQLEVIEELTPQVNAATKEITEQARQDEVCQRLMTVPGVGPATAVRFTATLDTPARFADAHQVESYMGLVPSERSSSGRTRRGSITKAGNGAMRWLLVQASWSLWRTQPHDPMVEWARRIGERRGRTTAIVALARKLCGVMYAMWRDGTNYSPKRAAQPVEQST

SEQ ID NO: 308532 - protein, 348 aa, unidentified
MKNKSFVGIDISKKVIDVSIFREDTNIKMFPHEVFNNTRKGFGDMCSWLKKSRVVLSQALFGMEFTGCYSLDLEKFLTSKNYSFCMLSTRIVKHHPMGTIDKSDKNDSAKIADFLYRYDGTECAKPYKLPSKAMQQLKQLVNERKFLVEQRTNFMNRMQMFETKENSAMYESYIKKLNHDIEKIDQEECELMSKEEDVLDTFQNLLTIPGIGFVNATNIIAITRNFTAFDTARQYARYVGVAPCSHTSGTSVKWRARPSAHCNGQVKADLSMAALRAVEYDVEMQMFYNRKLGGRKDSDTKRKALNAVKFKLIRRMFAIGKQKRKWEVLNTSDDRKNLHIEKSKASEL

SEQ ID NO: 308533 - protein, 418 aa, unidentified
MNEPNAIELVACIGLDWADRRHVICLQATGCPEAESLQLEQKPDALHEWIAQQRVRFQGGKVGIAIEQTRGAVIHALMMYDFLELYPINPKALARFREAFRVSGAKDDPSDAELLMDMLRLHRNRLRAWLPDTVETRRLQILAEYRRKFVNNRIRHTNRITSLLKMYFPQALDWAGELGTMQSCDFLQKWPTLTAIQQTRPAQLRKFYLDHHSRNLALIEERLAQIRTARSLTDDPAIVETLSLAVQAEAAQLRPVIEWIPRYDHIIAQQFALHPEHELFESFPGAGPVYAPRLLIALGTDRSRWASSADLQSHSGIAPVTEQSGNSCWVHRRLACSNFIRQTFHEFAAQSIQWSSWARAYYDQMRDRGLRHPAAVRALAFKWIRIIYRCWKDRQPYQEEIHLKALRDKRSPLAGKLD

SEQ ID NO: 308534 - protein, 434 aa, unidentified
MGQADPPSSVVDASSFKYVVGVDIGSQTCSMCAFRPDKSQVIKPTDFANATSGFVVVLTKLEALGVPPAQILIGLEATSRYGENLYHFLESRGYQLCLLHPRQTHAFAQRRGLRAKTDKLDATTIARVLLSGDARVGYVPTDLIATYRELVRLHSQLADEAARYKNEIQALLAVLFPEFSQVFADPCRSTAVALLKLYPSAHAVATAGVETIAAKLHELAPRNYGRKTAEQIVALAEHSVSSGVAIAARSTSLRILCDQLEHTQTNLARLEEEIDKLLDADKGAKGLQSVPEFGHKTVAVLRAELGDVARFHRSDQVVAYAGLDLEVKQSGKWKGQTKLSKRGSGRLRRILYMAAVRCIRLKDSAFGAYYHRLVARGMKAREAMIAVMRKMLTVAYHLLRTEQMYDPAKVCAGAQPTVELQHTPSPANLLAVGA

SEQ ID NO: 308535 - protein, 359 aa, unidentified
MTTEKMKNKVSPDEIVAWVGLDWADSEHRISMYEVGTGQIEERVLKQSGEALQQWLAELQKRYAGGKVAVILEQSRGGVVYGLMGYDFIVLYPVNPQSLASYRKALYPSGAKDDPVDAALLREMVQKNPERFRQWAADDPETRSLRLLVEGRRKLVNEMTRLTNRLTSQLKGYYPQALEWAGELNSRQACDFLEEWPTLEAVKTARPARLRKFYLKYGRPRPETLDRRIESIREATWLTRDPAAVIAGSMMVQAIVKQIRPLIAAIEDYDDEIKRLFQRHPDRLIFESLPGAGPVLAPRLLAAFGADRDRWSLAAEVEMLAGIAPVREKSGKQCWIHWRMACSKFLRQTFHEFAASSIR

SEQ ID NO: 308536 - protein, 379 aa, unidentified
MKKNTRFVGLDVHADTIAVAVAEPDGDVRSMGTIPNRTESVRKLLKKLEPTKHLKMCYEAGPTGYALYWELSRLGVDCTVVAPTLVPVKAGDRVKTDRRDAVKLARSFRSGDLTAVWVPDQAHEALRDLVRAREAAKKDELRAKHRLSKFLLRHARRAPAGTKAWTIAYWKWLASVRFEHAAQEATLLDYRSEVEHAANRIERLEGEIDKAVEGMPQEHRAVIEALQCLRGVAKIVATTIVTEVGNFSRFNQAKQLMGYGGVVPSEYSSGKHTSRGGITKTGNNHLRRVLLEAAWTYQHRPALSPRLKKQQQTQEEEIKEISWKAQNRLHNRYWRLLSKGKLPAKAITAVARELLGFIWAIAVRVEAQQAERRNHEKAA

SEQ ID NO: 308537 - protein, 400 aa, unidentified
MLSIGIDVSKGKSTVCGMKPGGEIVYTPFEVQHTREGMSELVSLLRSSGEEVRAVLESTGSYHCPVVTALLENGIFVSVVNSLRMKRFCSQSIRKVKTDRIDAMQIALYGLAYWQELQPTRLPEDTYRELQLLARQYYQMTSLLIKAKVDFNAICDQVLPGMQELMSDHAGRHKLSDFVLRYCHTTHILEMGETRFRKDYCKWAEKKGYRNCERMAALIFATAQNGIPVLPNAPSTQIVITEAIRVLHTVEASRDAILTQMQALAKTLPEYSLVREMPCIGDTLAPRLIAEIGDVRRFHSKRALIAYAGIDAPPYQSGKFCANNRHISKRGNRYLRKTGYEVMQSYVMHKPANDPIFTFIEKKRGEGKSGKLAMVAGLNKFLRVYYGKVTELYRSLPAIE

SEQ ID NO: 308538 - protein, 373 aa, unidentified
MDETGKAKIRRKLSRNELIPFFEKQDGCTVVVEACGAAHHWARMLTGLGHQVKLIAPEAVRPFVKKGKKNDAADAAALCAAASRPDVKFVPAKRLEQQGILALHSARCLLVKQQTMLVNAMRSLATEFGLTVPKGIGKLADLLALVDADEAFPKQARQVFIGLLDQCRALAESIETFEAEIVAHARHDETARRLATIPGIGPITASLIAATVADIGVFKSARHFAAWLGLVPRQHSTGGRTRLGRITKAGNREIRTLLVLGATAMVYRAPHWNSAAGVWTRAALERRPVRLVTVALANKMARIAWALMTRKEVYHAKGRIVTLLQGSGGWFRRSDGLGGSSPSLSPGLCHAVQSQSGPWSPHREATAQGDQLG

SEQ ID NO: 308539 - protein, 339 aa, unidentified
MFYSGIDQHKRDSFITTYDDGGAIVNQERVPNTPLRIQRYFAQFPGAHKAVVESTGSWYWLADLLQHLNVELSLAHATRLKAISAAKVKTDKVDSDILALLLRANLIPEAHMICPEQRAPRDLMRTRLRLVDKGASCKNSIERLLEKFNVRSVCELDDLYHLQAACHEAQIALVQEQVHTLEATLHPYLIPNPHVQRLLWIPGIGKINAFTIYTEIDGIDRFPTAKQFFSYCRLVPGAANSAGRTKHRSGSKAGNRYLKIAFSHAAIRAVQYYPEIRTFFKAKARRKPIRIARTLVALEIARIVYHVLKTGNSFNQRFKNKPLSRTKQSQWPRLASPSA

SEQ ID NO: 308540 - protein, 346 aa, unidentified
MEHYAGMDVSLKLTSVCVVDAQGRIVKEAKVASDPNALVAWFKALGFPLEQIGLEAGPLSQWLHAGLTQAGFAAVLLETRHVKAALSAMTVKTDRKDARGIAQLIRMGWYRPVHVKSMCSQEVRALLVARKQLLAKLGDVERSIRGILRGFGLKVGKVSCKQFEPRIRELTAGQATLERIADAMLAARATLRIEFNKLHRAVLAIVREDVVCRRLTSVPGVGPLVALTFKTGVDDPMRIKKSKQAGALFGLTPRKYQSGEMDVTGGISRVGDEMVRTALYEAANALLTRVQRFSALKRWGMNIAKRRGAKRARVALARKLAVILHRIWIDGIDFRWSRTQPIAAAA

SEQ ID NO: 308541 - protein, 335 aa, unidentified
MTIIRIGLDTSKHVFQIHGVDENEHPVLRRQLRRSEVEKFFGKLPPTRIGIEACGASHHWARRLRGLGHEVLLMPPQYIKPYVKRGKNDAIDAEAICEAMSRPTMRFVPVKTAEQQAALRMLGVRDLLVKQRTMLINAIRGHAEFGVTVAKGPKQIIELLQRLANDASVPELAREMVSMLATQLDGLEVKLKALEARLMAWHRQDQTSQCLATIPGIGPIGGLSFALKVPDPKGFRSARHFAAWIGITPRENSTAGKQRLGKISREGDESLRRLLVLGATAVIQQAKRGRASAWLLGLLARKPKKLAAIALANKMARIIWAMMVSGETYRRPQEA

SEQ ID NO: 308542 - protein, 308 aa, unidentified
MPQPVIGCDLSRAFLDLCDLPSGRMQRIPNTRDAIAEWAETLTPEKFVVFEATSGCDDILIAALTERAHPFSRVNPRQAREFARATGVLAKTDRVDARVLAQMGAALDLPVTRPVSPARATLADFLRRRRQLVDMRKAEKLRRHSAGHDDIAEQIDAMIALLSTQISMLDQRIKAIIAADRALAEQGALMSAVPGIGPTVMAVLLGELPELGTLCRRKIASLAGLAPHARESGSWKGARRIWGGRRKVREALYIAALSASRRVPALIAMRDRMRAKGKPPKTILIAIARQLLVILNAMIQKSQPLQIT

SEQ ID NO: 308543 - protein, 354 aa, unidentified
MNQQQSNKLSFKGQVFFIGIDVHKKSWTVTIRLNGMQLKTFTMEPSAQKLKKFLTKNYPEGHYLSVYEAGFSGYWLHHQLKELGIHNIVVSPADVPLSNKEKSYKDDAIDSRKLARELENNSLQPVYVPNPKQSSTRQISRLYALEVNEIKRIKLRIKSFLNYLGIEIPIEIGNRWSNRLISWLEKLDLAQEEDRYYLDQLIKNMKEKRKEILAILRYIRENYSDNEIVKRLRTVPGIGLITAFTFYAEIMDMRRFTNENKLAAYVGLIPSVKSSGDKKRIRGINYRQNKLLKLRIIESAWVAVKNDPALTSSYMKYLKRMSKQKAIIKISRKLLNRIRSIWLNQKDYQIGREL

SEQ ID NO: 308544 - protein, 315 aa, unidentified
MEQELFVGIDVSKGSLEVALGAAGELLSVSYEERGIAELVKRLKAVGPALVVLEATGGRETALVAELGAAALPVVVINPRQVCDFARAAGQLAKTDALDARVIALFAERMRPELRRLPDAQELELKALVARRRELVEMITAEGNRLESAPKVLHQEIKAHIRWLKGRLKQRDHDLNRTLRSSPLWREKENLLRSAPGVGPVLCATLLADLPELGTLSRHEIAKLVGVAPFNRDSGSMRGRRTVWGGRAKVRATLYLPTLAAIRAQPALRSFYDRLIANGKPAKVAITATMRKFITILNAMLKHHSAWSPQCLSAP

SEQ ID NO: 308545 - protein, 423 aa, unidentified
MEVIHERVAGLDVHKDSVVACVRIMSGGKAKRECRTFGTTTAELEALRDWITSWECTLVAMEATGVYWLPIWKILLGGAFEMNIANARHIKAVPGRKTDMNDAMWIADLAAYGLIRASFVPDEEFHELRTLTRTRKQLVRDQTSHVQRIQKTLTEANIRLDSVISDIMGVNGRRMIEAMIEGVRDPGKLAALGDRRLKATRKELHDALHGRLTEHHCFLLKLHLDQHDALEKTIRVIDAEVERRIARLDKQAKPAETPLSRLIELLVSIPGVSYLSAITIISEIGSNMSRFPTAGHLIAWAGLCPGQNESAGKRKRSRLRKGAPWLKTMLVQCAWAAKRQKNSYYRAQFYRLQARRGPQKAICAVAASILTAIYHILKDGVPHQDLGIDYFDKRKPEAKVKRLVAQIAKLGFEATMHPIAKAA

SEQ ID NO: 308546 - protein, 411 aa, unidentified
MKMAGIDVHKKVLMVVVIETTSPEEKPERRRFTTLPGDLSRLSSWLRAQDVQEAVMESTAQYWRTVWLELEPHMLLHLAHAFSNRAPRGRKHDFKDAERLVRRLFADELILSFVPNGEQRIWRNLTRMKMQLTRDRIRLQSQMECLLEEMRIKLSSVVTDLLGASGLRILRALAAGETEAKRLAALGDNRLKCTEEQLLDALTGSSQPMHREMLALQLERLQLIDAQIAKLNNLIAQGMKPHREVVMRLAEVPGLGVDSAQQIIAEIGTQAGTFSSAAELTSWVGTCPGKDESAEQNHSSRSAKGNKYLRRVLNQAAHAAVKKRGSYFQAVFRRLLPRLGYQSAIWAIAHRLCRVVWKILHEGARFIEQGNQPDAQAKKKRARILVQALRRLGYDIAITETHLAMQNAVQV

SEQ ID NO: 308547 - protein, 329 aa, unidentified
MHYLGIDVAKAKLDCCLLLELQSCKRKTKSFSNNNSGFTELVHWLDKQRISPSDTHAVMEGTGVYHERAAISLHEAGMQVSIINPAQARDFAKGLAIRSKTDGLDSLVLARYGALVQPAIWIPPTPQARALQALLSRVDAVQQDLLREQNRQEKADATDTPELIRQSLADSIMFLQTQLKKLQQDIDDHINRHPELRDDAALLVTIPGIGIKTSQHLLSVIHLHHFHTAERLAAYLGVVPIQRQSGSSVLGRPKLSKTGPSHIRAVLYMAAVVASRHNPHVKALYERLIASGKSKMSALGAAMRKLVHLCFGVIKNRQPYNKNYGQVSC

SEQ ID NO: 308548 - protein, 328 aa, unidentified
MCTLGIDVSKNKIDLCLLTAGPGGKKKHKVLTNEPDVARKVVDWLNAQKCVPESVTVVLEATGIYHENLAYGLHEAGVSVCMANPCRVREFAHGMDILNKNDAVDAFVLACYGELKSPAVWVPPSPEVRKLRALLRQRDALREDVQRTVNRLEKANSTSTPQEVIRSLERTKSWLNEELARIEKLITDHTDNDPGLKADLDLLKSIKGVKDQVGREMLALLKDGMFKSASQVAAYLGLTPVEKTSGSSVRGRPHMSKTGPSGVRAKLYVAALTASRWNKQAKAIYERLVAKGKAKKAALGAVMRKLVHLCFGVLKTRLPWDENYVATA

SEQ ID NO: 308549 - protein, 455 aa, unidentified
MRFERVVVFVGRPCDLPGLCCEHVSVVVVCPLVLPVFTRCEEVVVSGSAGRAIGLDVHRDFCEVAICESGRVRSAGRIETAPETLELFARSLGPKDRVALEVTGGAWEIARILEPHVRRVVVVSPDDTGIRQARAKTDRLDARTLARLLWTGELDAVWMPDERCRVMRRRLARREQLVQSRSRSKNEIHAVLMRRLKGKPPFSDLFGVKGRRWLGELALPVEEAETVASALRHIEFLDREIAAVERLIAREALGWPDARRLLTVPGVNLICAASFLAAIGDIRRFRTSRQLVAYLGLDPRVRQSGEQPAKSGRISKRGSASARWALVEAAWSVVRQPGPLHAFYQRVRERRGHGKAVVASARKLAVLFWCLLARGEDYAHQQPSLTAKKLRLLEITAGAPTRKGKRTGLWATRQQMRQAERELAQQAEASYQRTVADWQAARPAKAGASVTPERA

SEQ ID NO: 308550 - protein, 370 aa, unidentified
MEKYKYVGLDVHKETIAVSVADPDGGEVRYMGEIPNTPDAVVKLVRRLRKEGVKLSICYEAGPCGYGLHRQLKGLGQDCQVVAPSLIPKKAGDRIKTDRRDSLNLARLHRAGELTAVWVPDGAQEALRDLTRAREDMKHLQRQAKQRLLGFLLRHGKRFEGKDNWTQAHFRWLEEVKFEQPVQQIVFQEYVDSVQAMTRRVAALDEQIERAAGESVFGPVIEGLMALRGVGLVTATTIVAEIGDLRRFATAPQLMAYLGVVPSEHSSGESKSRGGITKTGNGHVRRVLVEAAWKYRYPARKTAILQRRAERASEQVQEIAWKAQKRLCARYRLLEARGKLKVQVCIAVARELAGFIWAIGQTLPQPAARA

SEQ ID NO: 308551 - protein, 386 aa, unidentified
MNKIIYIGMDVHSSNFTLCSFEPGYGIDDDKVFGQVQFKEDFIKNTEKYISNLKKRRKDVEVICGYEAGCLGYAPQRELTKRGIKCVILAPSTMAVQKGGKRIKNDYRDSVDIARCLSSGAYKPVYVPDTEDEDVRDYIRMRDDHSNELKHIKQQLNAFLLRHGFKYEGKSKWTMKHLAWVRKLDCTVLQREIINEYLATYDTLTNMIKALDVRIEDFAKTERYSGTVRKLTCIKGISTHTALSFMTEVGDFNRFKTAEKFAGYIGLTPGEQSSGESEHKTTITKAGNRHLRRLAVECSWGYSRGIPGRKSAELKKRQQDMPAEVVSYADRASARCRRKYYRMTVTGKNANKTVAAVARELCCFIWGMATSHYENLEDRPKEQPEL

SEQ ID NO: 308552 - protein, 375 aa, unidentified
MVVVVGIDVHKGTHTAVAVDAAGRQLAQRMVRATSAGHQQLVRWAGQVRVQVVERSGAAAAVQFAVEDCRHLTVGLERDLLTAGEVVVRVPPKLMARARSSARTRGKSDPIDAPAIARAAWREPGLPRAEHSPVSRQVKLLVDHREDLVAMRTAAQNRLRWHLHSLNQVTAGGQDQVWDPPARSLDVLMQLDRLATGVEFIDPDALTIDLRITRRVALELIADIRAWTVRANGLEREIATLMADQAPRLLQLRGCGALTAAKLVGESAGAGRFRSEAAFAMHAGVAPVPASSGKTSRHRLARGGNRQLNAALHRIAITQVRLTDSLGHAYYQRRLTRGDTTTEALRALKRRLARLVHGLLTAPDTTAAAPLPQAA

SEQ ID NO: 308553 - protein, 390 aa, unidentified
MILVGIDVAKDKHDCCIINSDEEFPEEVFSILNNREGYETLYKRICSLTVDFTKVKVGLESTGHYSSNLLAFLLDKHLTAYVINPLRVNLFHKGQSLRRTKTDKIDSRNIAHLLMADSSLKPYSLSSYHMEELKSLTRYRSSKVRERTKLKTSIARLVTILFPELEQLVSSIHIHSIYAMLEKFPGSAYIAATHLTRLTALLLKASRGRFGRETAIRIRDTARRSIGAVSPAKSMELQHTIAHLRVYNQEIGEIESEIEKIMDDVNSPITSMPGIGMQMGAVILAEIGSFRRFDSPDKILAYAGMSPSMYQSGKLTGSYSRMEKRGSRYLRYALFNVTRYVCHYDPGFTAYLSKKRKEGKHYYVAISHAVKRLVRVLYAMEISGNRYQTA

SEQ ID NO: 308554 - protein, 392 aa, unidentified
MYIVGIDIGKNHHEASIVSPEGKQIGPSLRFATTHKGADSLMSFIFKNIGNSPCVFCMEATGHYWYPIYSFLKAKGYTIYVINPIQSDSLRKMYIRQTKNDSIDSFLIAEVIRFGQFGTTSMADENILAMRQLCRYRDSVISSRTEIKLRIGTIMEQIFPEYEKQFSSLWVSTSMGILEKYLTPENIENAPIDELFEIIKDKSHNRLTRTKAISIKEAAADTFGIKIAQDAFSFQLKQLIDRMNFLDKQIEALDCQILEYYEKFDCYLHTIPGIGMIAAATILAEIGDINRFKSSSALVAFAGIDPTVRQSGEFSSTHNHMSKRGSPYLRHAIFLAATTCSFHNSPLNAYYKKKRDQGKHHLTATGAVARKLTTVIYAVLRGSKPYEPKSFC

SEQ ID NO: 308555 - protein, 425 aa, unidentified
MKTIAGVDVHKRMLSIVVRIIRDEKVEYEKRKFGTTRQEIEHVVAWLQHLGVTTVAMESTAQYWRPVWNGLEPHFELHLCNPLQCKAPRGKKRDYRDAQRLADRWAAGDLDDSFVPGKEQREWRAMTRARVHMKRKIGVNRCQVEGILEQGSIKLTSVVSDVFGATGWAMLELIAKGETDVEVLVKEARGSLRHKKSKLKDALAGQLSPTLRLLLKQHMQQVELLRKQVDELNQALSVAMQFHLPALMRLSKMPGVDLYAAQELLAEIGVKAAAFPTADEFAGWVGLCPGSKESAGVNYSSRSSKGNRYLRRLLSQIAWAAIRTKESFFEGLFRRLKPRIEGRGAAWAVAHRIGKVIWLVLHEEKEYIEKGPGSVSIQTLNRKLRRIVKEFARHGVDPRTVLRELPEAEFQPVKAPAAAAAVPAI

SEQ ID NO: 308556 - protein, 398 aa, unidentified
MNLNIGIDIAKNVHEACLVNENGEQIGKFIQLKNSKKSIEKFTKHIEKVSKELNAEPRIGMEATGIYWYSLFSELSKKYKIHVYNPSQISGFASVNIRESKTDKIDAKTIANMLRFGESPKTNYSDTQRLELREYGRFYFKLTSIKINLKKRLRRNLHLIFPGYDEIFKNLYTATSKEIITNITTPEKVLEMGEKKLRELMKEKSKNHIDPEKAKILMEKAEDTIPSEIIKESSLFEFQMMLEMIENYEKQIASIENKMMSIWNKVREKHYIQTIGGVTELRAAMIWAEMGNVDDFKHPDQIVAFAGYDPKVRKSGNKEVIGGPNKRGSKILRWVLGWTVQEAKCSNPVLGQYFDKKINEGKHYNNARCAAVKKLIRIIWSVEKNKKPFQIPGNLLSS

SEQ ID NO: 308557 - protein, 327 aa, unidentified
MSKHSIVCAGIDTSKDKLDVAVTSVCTQLQVKNTAAGHAKLSTWLRKHEVERVGIEATGGYEQAVVTHLRRDGFVVIVLQPAQVHAYRRFRLQWAKNDKIDAALIAAVTAAMKTVRPPPDPRLQPFAADLTVIEQITEDIARLKTRRAAGSCDARSRAFWKQEIARLKGIERKLLKELEAAIRAHDDLARLLDLIRSVDGVGLRTALIILIRMPEIGRLTRNVAAALVGVAPYDSDSGNHVGQRHIAGGRHRLRRALYAAALPAAFRWNAQLVAFYRRLTAAGKTHKEALVACARKLIIYVNTVVARGTPWRVHEVSNQPSLHPNAT

SEQ ID NO: 308558 - protein, 357 aa, unidentified
MNTNTNTQSNKTQTATKAKRIKLGIDVHAESYRVVRQVDEATPQPAQKFRPKDFLAWAKKQLEQAEGVHSCYEAGPLGYGLHRALEKLGIHNVVIRPQNWDELNRGVKTDKTDALALVQRLDRYVQGNRKALATIRVPTPQEELARSQSRQREQLLSHRMRLEAQGRSLLLFNGLRFHGRWWKDSVWEEVSQQTPIGVLELLTVLRDLLLVVQEQLDLATVRLEQTATAQPCGVGALTSQILEREILRWDRFKNRRQVASLTGMCPGVWASGNTQQSGSITKHGNRRLRTALVELAWRCVRFQRDYKPVKRWWPVLASPKASAAAKKKAIVAVGRHLAIDLWRINTGRTTAEKLCLH

SEQ ID NO: 308559 - protein, 356 aa, unidentified
MKNDNTRLPGSGLTVGIDVGDKYSQICVLDVAAEVIDEGRVRTTWSAMGGRLGAMARCRVVIEVGGHSPWLSRLLEDLGHECIVANPRRVRLIADSAKKNDRIDAETLARLGRADPALLSPVFHRSEQAQADLAVIHSRRALVETRTGLVNRVRSLAKAYGARLPPCDARYFPERVAEHVPPQLGEAIRPLLEVVATVSAQIKTLDGRLESMIAERYQQARLLEQVTGVGPVISIGYILTIGDPHRFKSSRQVGAYLGLVPRQHSSGEKTPELGISKTGNVYLRQLLVNGAHYILGSRGPDCDLRRWGLRKAEGGKNAKKRAVIAVARKLAVLLHRLWITGEVYTPLLHEEEVKAA

SEQ ID NO: 308560 - protein, 394 aa, unidentified
MRFVGIDVAAERHVVAVVDETDRVLIKATPFSEDAEGYAKLLGLLGAPTDALVAMEATGHYWKNLVAALVAAGFAVALLNPLRTRRFAGEDLQRTQTDAIDAVGIARFAAQKRPPASRLPDRATEELRELVRFRDRLRQDFGDRVRQLHRLVDLGFPEFTRHVRDRGSELATALLSAYPTAAGFHDVPVRHVAALRYDGRHKVGDELAGALISAAGTSVGRHHGEAYRLQVRYTCEDLDVLRRRLRDLERDIDRLLEQHEIGRLLTTIEGIGPQTSARLVATFGDFSSFRSAGALASYVGAVPALKQSGKRTFQRASLTPIGAAHLRAKLWMPVLTAVRTNPWLRAYYERLIARGKLPKVALVAAMRKLLHAVYSVATHRRPFVADLATAEVRP

SEQ ID NO: 308561 - protein, 355 aa, unidentified
MCAKKTGSIEELAVVGIVIGKDTFHLVGCDRSGQVVLRKQIKRLALDATFEKLPRCVVGMEACLSAHFVSRGLRDLGFDPRIIPAIYVKPFNKGQKNDYNDAEAIAEAALRPNLRTVTEKSQDQLDLQALHRVRSRLVSRRTATINQIRAFLIEQGIAVRSGLRALRNSFETILEQRRDEISARMRNILIGLYGDWLWLDDRIAAVSTEIEEISRTEENCANIMSIPGIGPMISTAMVAAVGRGDAFDRGRDFAAPVGLVPRQFSTGGRTILGRITKRGSRYLRMLFVQAAKVIMMRPHRWQAFSFGAWLERAVSRMPRNKAAIALANKLARTAWSILRHGTRFDTPRDLAMEAI

SEQ ID NO: 308562 - protein, 363 aa, unidentified
MVSPILAQWTTLSEDFVLLGAIMDTVSLIGIDLGKHCFHLHAQDGSGRMVLRKKLTRSQMFALLGNFPSCTVVMEACAGAHWIARRLQALGHEAKLISPHFVKPFRQGNKNDFADAQAICEAASRPSMRFVSPRNEAQQVVSALHRVREALVRERTGTINQIHAFLLEFGISLPRGMAVIRRLPAVLETQALPPRLVAVLERLQAHFKYLDEQIGQLEHELLTQLHEDERSERLLEIPGIGPITASVLMSELGDARQYGSARQFAASIGLVPRQYSTGGKPTLLGISKRGDKGLRRLLVQCARVIMLRIERRTDSLGVWVRSLLARRHSNVVACALANKLARIAWAILAKGTHYRSAPAALAA

SEQ ID NO: 308563 - protein, 338 aa, unidentified
MPLYGGIDLHANNSVVVLLDEQDQMIYQQRLSNHLPTILDRLAPYHAEIKGVVVESTYNWYWLVDGLMEADYRVHLANPAAMQQYNGLKYTDDYADAHWLAHLLRLGVLPEGSIYPKAERAVRDVLRKRSYLVRQQTATVLSLQNIIVRNTGVRFSAKRIHALTLEELERLLSEPDQILAVTSSLAVLHCLGQQIKTLEKAVSKRLKHTPAYEQLQTVDGIGTILAQTIVLETGDIGRFPSVGHYASYCRCVGSTKISNGKRKGQGNVKNGHPYLGWAYMEAAQFAIRFSPTVQRFYQRKQAKSHLMIARKAVAHKLARACYYMMRDLVPFDVHKAFG

SEQ ID NO: 308564 - protein, 366 aa, unidentified
MTNLSNWIGIDDHADKWTIAQYRGTSGEPEREWELKPGESGYRKLIGWLKEMRGSVRIVYEAGPCGYELYRRLRRSGLDCQVAAPSLTPRKPGERIKTNGRDARKLARMLRAGELTLITVPNSRQESIRDVVRAREAANKDVLRARHQLSKLLLRQGYRYRDGKPWTQRFWAWVDQIELGEQYSREVLSQHVRVIGRRVELVAEYDRIIESVARESEYTPMVKALGVLRGVDWLTAMTILVEMGDLRRFATAPQLMAALGLVPSEFSTGDKTQRGSITKTGNAHARRVIVEAAWHYQRSFTRPGPRIRRRRLGQPTARLDIAERCDRRLHRRFTRLTSRGKRSTIAAVAVARELAGFIWAIGQIAY

SEQ ID NO: 308565 - protein, 399 aa, unidentified
MKNLVSLELRVSVDIGCRSHNVAIGLSSGEILDEFSITHEPEGFRQFFSRIEKQERRFGCPVAVAMEGYNGYARPLDTLVRARDYRLFNINNLKLARFKEIFPGAAKTDEIDARKGLELFQICDHLPMAKDVLQEVRKTPQENEILKRLSRRRRRLVDERVRVLNNLQSDLHAVCPGLLEITGEADNLWFLNFLTSTDDLRKLVRMREATIRKIPGIGKTYASVILQWQKQAQFSHDVEWVGEMIQEDAVRVLELRDKIESLEAKMEDVALGSDIAQTLATIPGFGAICTSELAGEIGTIDRFNNEASLALYLGMANLDNSSGKQKGSKPPRQVNTRAKAAMMIAVDRHRKKVLQSQRYYDKKRAEGKKHNQAVRALGRHLCRVIFKMLKEVRGYISPV

SEQ ID NO: 308566 - protein, 398 aa, unidentified
MELGSTCFFDNTQEGFRTFIDWINKIKESCEMESVITGMDPTGHYWLNLAHILKEEQIKFVTVNPLHVKYSKELDDNSPTKNDVKDAKVIAQLVKDGRYAEPTIPQGVFAELRVGKKLRDLLNVDLQIVQGQVHNWIDRYFPEFFTVFKSWEGKAALHLLKLDALPYEIGEYTDEELLDYLRQAVKRSIGIKKIRALKEAANRSIGIRQGAMMAKMELRTLIHKYELIQAKFEELDQTLDTLLQDIPGVDQMLEITGIGRDTVAGFFAEVGDLSEYNHPRQITKLAGLSLKENTSGKHKGRTRITKRGRKKLRALLFRASMILVAKNMAFKALHLYYTTRPDNPLKKMQSLIALCNKLIRILFSIVPRGEDVEGHPSYACIYPGTSSSLITIKLTINN

SEQ ID NO: 308567 - protein, 441 aa, unidentified
MHTIIIMNEQNNTTATSPPPPDYAAFVGLDWGDETHALSLSAAGSTVVERTTLEQTPEALAQWANTLRTLFPNRKIAVALEQARGALLAGLGQYEHIVPFPVNPKSLARFREALHPSRSKDDLVDADLLLELLVKHRDHLRAWQPDTVQTRQLALLNEQRRHFVDHRTGLTNQLLSHLKAIFPQALKLLGADLASRLATDFLKKWPTLQAVQKVKPAVLRQFYYGHNSRSEELITQRLELVKNAVVLTSDPALLAAHSLAIQTLAAQLEALRPFLDQYDEQIAEVFAAHPDAAIFESLPGAGPVLAPRLLTSLGTDRSRFPTPVALSCYSGIAPVTEKSGKTQNWVHVRWSCPKFLRQSWHEFANSSIKFSAWAGLCYQEFRKKMDHHEAIRKLAYKWQRIVWRMWQQRKPYEEARYLATLQKRGHKLFATPAAQPGKSGE

SEQ ID NO: 308568 - protein, 372 aa, unidentified
MRRVIGIDIHRTFGEVVFWEDGRLRRAGRIDMTRTALEGFGKSLLTSDEVVIEATANSMGVSRVLEPFVARVIIANPLQVKAIAQAHVKTDKIDAGTLASLQAAGYLPQIWTPDASTERKRRSAARRYQVVRHRTRLKNEVHSILHAHLIPKCPHADLFNARGRAWLSAQPLPEDERAAIDRHVRELDRLAEDLALFDREIAQDAIDDPAVNRLMTITGVNLTVAAGIVAAIGDIGRFKSPQKLVSYFGLNPRVRQSGLGAAHHGRISKIGRSHARAMLVEAAWAAAKAPGPLHAFFVRIRARRGHQIAAVAVARKLTVLCWHLLTKGEDYQWARPALVATHAERSYERFVSQWKPRRPKAGARAPQLGRSK

SEQ ID NO: 308569 - protein, 328 aa, unidentified
MSKSSFYVGVDVGASELVAALVGRKPRCFKHSRTGIKAMVKWAKKMALETPLHFCLEATGVYGYSVACCLHQEHHISVSVINPAQIASYGKAQLRRTKTDNVDSQVILSFAQSQNPPLWKPESSTIRQLYHLVVESARIRKALGQWGNRKHAQKYLKDLPKVIKQTQETLDRTMLRQLEKIEQAIVELCKQDEELKQDVELLCSIPGISDHTAVRVLAYGKNALKDYNRNALTAHAGLAPAQKQSGTSIHGKARIAKQGDRRLRTTLYMPALVAAHHNPILKTFYQRLLKKGKPKMLALVAVMKKLLIMMQAILKNKIPFNTKYQLDT

SEQ ID NO: 308570 - protein, 318 aa, unidentified
MTSFLGIDISKETFYASLLSDRCEAKKVFPNTQKGFEQLAAWLRNRHAKDISICMEATGAYWEGLAMYFHGLGHRVSVVNPARIKAFAQSELLRTKTDAVDAALIARFCKSQAPEPWIPSPPEIRILQALMRHYEHLKTTRAQQSVYEQSSEAAVVKMSIREVIATLDAQIAQVEKEIRQHFDDHPELKRKRDLLISIPGIGETTAGSLLAEIPHLDRFESAKAVAAYAGLSPRQRRSGTSIHERPRLCKTGNSRLRKALYMPAIVALRFNPVLRVFADRLTALGKNKRLVIGAVMRKLLVLAYGILRSGTRFDPNYA

SEQ ID NO: 308571 - protein, 343 aa, unidentified
MSEDYDGRQFVGIDLHRRRSVLARMTESGETLEWVRISNDRDQFAGVMSRAGEHPEVVLEASYGWYWAADLLTGLGAEVHLAHPLGVKGFAYRRVKNDVRDAIDLADLLRMHRLPEAWIAPPATRELRELVRHRAKLVHLRTSLRCQVHAVLAGQGIMISVSDLFGLAGTKLLTELVLPSVYQHRVESLRRLIDAFDVEIDVVSKITSARLRQDLGYAAVQTIPGVGPVFAAVFVAEIGDVTRFRGPAQLTSWAGLTPKHYESDTTVHRGRITKQGSRLVRWAAVEAVQRLSPHTRLGAYRDRVAARRGRNIAAVAAARELVELVYYALRDHTVRRLAPRIAA

SEQ ID NO: 308572 - protein, 351 aa, unidentified
MNILAMDIAKSKTVVCYYDSESGRHEYGKVKTSPQQIHDLVAEYSPDRVVFEICSSAGWLHDIVTALGTEVQVANTNTQAWRWKNVKNKNDKKDALKLAQLSAMNQLPTVHMPKPNVRQKRALIQYRQTLVARVVQIKNNIRSILDKQGYSMAAGKSGWTNKSVEQLNQMALPIERCGVHDLWRGQLYVELTMLSSTQDALAHVTSKLDKLAESDSQVNLLQTVDGVGPRLAEAIVAFLDEPERFKSSKHIGSYAGLTPRQYQSGSTNRQGRISGQGNKLLRALLVEVSWIGLRYNRWIRETYQRLLRGSASRKKIAITAVARKLLVRCWAMLRDGQPWRDMGVKTERQVA

SEQ ID NO: 308573 - protein, 354 aa, unidentified
MEKIAIGIDFSKETFDMTVLDMKKTNGKVDADALAKAPHEQFKNQRGGFRKSLSWARKVTGRKLDKDNAIFCGEATGKYSVRMSEYLREQGLFVWIDSGLRIKNSMGIVRGKSDKADSYRIAEYAFRHWDKAELYKPLEKSVSALRELYLYRDHLVGIRKATEQRNSLMKEFSDVVGESSFIRRSGDRIVKDLKEEIKRCEEEMRKLIESNKELKTTFECITSIKGVSLINGVAFIVYTNNFEWFGNNPRKIATYWGVAVFGKESGTSVKGKTKTSKCASRKLKKLISEAATCAIRWDPRIKAYYQKMRNKGKHHGVAMNNVKNKLIHIITALAVNKTKYCDTYEEDRKLRKAG

SEQ ID NO: 308574 - protein, 426 aa, unidentified
MKVSQIKQEVNSKKVLDVAFDVGKDKLNPMFELGPLRYADDCGNRSNPINAKLKEIMRIAREHGYETLRILCEPSGGYEKALLRIAHQLHFHTAYVGGEASSKFRMVVHGDPGKSDERDSQPLLAIAGQGKLLTHRVLPTEYELLRELNREYDWVSDHRVMVRCEIHALLVRLFPDLPVSSDFLYEPGGRALARDYGWNPRRIVDAGPEQLEKCLKTASRFVRHQTIAKIWEAALQSAEYHDEARGVSDYVTERLRRRYEEIERLDQQRQELCSRLEEVYLRLRENDPRLPGAEAGVVKLYMLARIVGETGPLSDFSDIWKLYRFAGLNLCRRQSGKYKGLTKISRKGRIPLRRILGRAVLPLVSKGGLYDAWYHGPDGSTKKGAKGMAALMRKFLKLLFGWYKSGREFDLKRVFTSASEYGVQAA

SEQ ID NO: 308575 - protein, 310 aa, unidentified
MKVVGIDVSKQRLDLHLLPEGKAAQYPNDTAGIARCCQFLAEVRPERIVLEATGGYELALTLALQTATLPVIVANPRRVREYARSQGRLAKTDQIDARMIAEFAQSPRVQVRELPDAAGRQRMEWLARKRQLVEMHVAERNRLEHATDSLVVPGIRRMLTLIEKEIAQLDKKIAAAIAADPQLRRKAEILDSAPGIAAATAAVLVAELPELGRVNRREIAALVGVAPLNRDSGQFRGQRTTGGGRVRIRNALYMPMLTVIRCNPLIRRFYQRLLANGKAKMTALIAALRKFLTILNTLIKKDQLWDSQLT

SEQ ID NO: 308576 - protein, 366 aa, unidentified
MDTIYIGVDFHARQQTICYLKTETGELVISELKHQDKEQLRAFYQRFQGPLIIGLEASGYSPWFEAMLEQLGHQVWLGDASEIRRRARWRQKSDRRDAELIWDLMVHNEFPRLHQPSAQSREVLRMLRYRQKLIKVRTMTKNSLQAIALQAGLAKGRRLFTNNGQAEFKIVAMSPALQWQRDHWLDLLKPLNQQLLETMVWFKAQSRADAVITRLRTHPGIGLLTALCLWHTLQPVSRFRNQRKVVAFAGFDPMIRSSAERAIYLGISKAGPRMLRYLLVEAVHTAIRYDDDLKRFYKRVAERRGRPKAKVAAARKLLIRAYIMLRDEIDYAEFRRRAVAVGLPDEVKGQSKVPEVLIRQSASPGA

SEQ ID NO: 308577 - protein, 457 aa, unidentified
MYRELHSLRQVLQQELKDTLPPLPGVEPEQLLETYLNQLTGYVGVDVADRTVTLLAINANQDELAHLLDVPNAPAGFARIGEWLERLRVDHHLRLLVVACEATGVFYWGLWDALAQRPNVARVLYNPRTTEHMGEVLSKRVRDDLIDALLLAEQVRLGSTPEVVLTEDADLLSARLCSRAARDEAQVINRKKNQLRSLLRGYNPVLSRVFPGEKLHHPAVYALLQQDVFPEEFVAAGVEALTRILTQHSRSAFGAEQAQQLVDQCRGLISRPLRREVVHQRVTDLIAEIRLAHQHQQALLKAGYALIQDRSEAKLLKASTGAGVSNTLALVSEVSDVQRFPDGEHVASFLGLTTSKHISGATIYQSKHITKQGSPNARYAAVNMALHLSLRVPKYQTMYHNIKTRKPPRKGHRLALVAIARDFVTNVLYDMWREQRPFFIKVEDYRQYRKDHPRPQA

SEQ ID NO: 308578 - protein, 449 aa, unidentified
MSRPQVIDDEEHARVHERVAAVDVAKDSGMVCTRTPHPSRPGSRRAAVWTVKARRNEVRALGRQLRRDGIEMVTLESTSDYWRIWFFVLEACGLAVQLVSASQSRNLPGRPKTDRLDAMWLARLTEMGLLRASFVPPKPIRDLRDYTRARTKLVHERSRCWQRLEKLLEGALIKLSSVASKLTTLSAQDMVSAMIAGERDPQVLAGLARRAMKAKHDDLVQALDGMFDDHHGELAQLLLDQIASLDDKVTRLNARIAELTAAMPGAWGVDADGTTGPGAGTSPDAPVLNAVARLAEIPGISPDLARSIIAETGLDMARFPTASHLVSWAGLCPVARQSGTRSRAAAKRKGDTWLRGSLGQAAVAASRTTTFLGERYHRIARRRGRAKAQVAVARSILVIIWHLLATPEARYTDLGYGYHQARTDTSRRLRNHIRQIQALGYNVTITQAA

SEQ ID NO: 308579 - protein, 308 aa, unidentified
MTTIYAGLDIAKLNLQLDLAGRGHDLPNTAAGHRRLLKLLAAHPGVQVVCEATGGYERDVVAALHQAGVPVSVLNPARVRDFANALGQRAKTDPIDAAILTAFGQALHPKPTAPRSPLEQQLTELVRRRVQIVEALVAQRLQAQALTLPFLQRQAKRLIRQLEQAVQQIEAQLQALRTQVPVLDQRAEKLQTIKGVGALTALGVLAELPELGTLNRGQAAALAGLAPHPRESGKWRGRRMTGGGRAPVRRALYMAALVAARTNEHLKPFYQRLRLAGKPAKVALTAVMRKLVVYMNHLLKEPARVLAN

SEQ ID NO: 308580 - protein, 297 aa, unidentified
MSNANTYIGVDLHKKTCFITIMNGLGKIKKQTEIATDTDKVSKFFKKYNGVNVAVESTMNWIPFYENLESLGCSVVLSNPLQTKAIASARIKNDKVDSKILADLLRTNLLPTAYIQPREIRDLKELVRQRMSYVEWRTRVKNKIHSVLFKNNLKHDFTNLYGQAGMEWLKQLALRDVYQQELDRYLITLNLLDGQIEEISNRIMETAKADYDCKLLMTIPGISYFTALVIKSEIGDISRFANARKLCSYAGLIPSTYASADKVRHGRITKRGSKWLRKSLIDAITSGAKHPSRLCFT

SEQ ID NO: 308581 - protein, 290 aa, unidentified
MTDLAELVDHVIGVDPDRDRVTAAVVSVTTQGELAAATFPATRRGYGQALRWAKTLTVDERRAWAIESTGSYGAGLAATLAEKGEFVIEFDHPSTRASKDGAKSDSLDAVRAARETLGRKTWATPRSRGLREGLRTLIVARDSAKLARVAAINVLKALIVTAPVDLREDLRGLTFGQLVDRCIRLRPDTATEPEHAATKLSLRSTATRIKQLTTECRELELAMLPIVREICPALLNEPGIGTLVAAQILISWSHAGRCRNEAAFARLGGVAPLEATSGQNQTRHRPLTRR

SEQ ID NO: 308582 - protein, 414 aa, unidentified
MEVLHERCAGMDISKRDVKVCIRVPGAPGGRYRNEVTTFGSMTDQILALRTFLLEQRVTLVVMESTGDYWKPFYYLLEDAPFEVMLVNPRHVKGLPGRKRDVSDAQWLADLAAHGLVRGSLVPPPPIRVLRDLTRTHADLTRDRAREYNRLQSVLEDAGIKLTSVATRINGVSCRLMLEALVAGERDPKVLAGLAKASLKGKREQLTMAMTGRFTGHHAFMLKLHLQVIDQLTAAIEELSSQIEVVIEPFRGQLRLLITIPGVSEQIAVVIIAETGADMSKFPTAGHLASWAGICPGHHQSAQVNQKARTRPGNSYLKGALGQAAMSSMQVHDTFLQDRHHRLKPRIGGLKTIVALEHSILRSIWHMLVSNQPYRELGAGYHQRRHPQNVLRRITRQAQELGYAAHFEPLPKTA

SEQ ID NO: 308583 - protein, 338 aa, unidentified
MKKFSGIDLHSDNSLVVVSDEQDRIVYQRRLANDLAGIVQALEPHREELIGVVVEATYNWYWLVDGLMDAGYRVHLANTAAIKKYEGLKYSGDAADAAYLAQLLRLGLLPEGYIYPREARAGRDLARKRTRLVQSRTAQILAIENILARQTGGRMKSKEIKRLTAEGVRALGFSADVTLALQANVAVMHTLESQITVLEERLQERVRLHEDYALLTTVPGIGQTLATTIMLETGSIGRFAKVGNFSSYCRCVDSLRESNGKKKGEGNAKNGNQYLAWAFVEAAHYALRYCPQAKRFYERKKQQRNAIVATKALAHKLARACYQMLREHKPFEVQRCFA

SEQ ID NO: 308584 - protein, 273 aa, unidentified
MTDDTIGIDISKATLDIHRLSDGKMMSFSNCPAGFKALSRFCAKTAVARVVYEATGAYHRGLERALGAHLPLVKVNPLQARRFAQAQGVRAKTDAVDAKMLAQMGNAFALEPDEPASKIQLDLKELRAFRSGLIKDRTSIMNRLKTQTLSITRRQSKARLAQVDKQIAEISAEIGRLISSCDTLAHSMKILRSIPDIGAVCAATILIEMPEIGMLDRKQVASLTGLAPMARQSGQWRGKSFIQGGRKIVRDALYMPALVAMSILHDSCDYGWN

SEQ ID NO: 308585 - protein, 415 aa, unidentified
MKVVFPTCCGVDVHKSFLVATIIKTPKDNLQPSYQKKRFSTFNADLNRFSDWLHENNCLDVCMESTGKYWVPVFNILEKWGIRVVIANPKWVKAVKGNKDDTKDSKWIGDLFRIGLVKSSFIPAKDIRILRELTRYRYKLVSMKSSEKNRFQNAFTVCNVALDSVVSDMFGKSATAITDYLTSDENFDPQHCVSLLQRSLKKKADDVLASIEGYEISPEQKYRIGIVRDHLHYIEKLIERVDSCINAMVEKYDGAISLLCTIPGIDRNSAITVISEIGVDMAQFGSSKRLCCWAGLTPGNNESAGKKKSVRISRAGVYLKPALVQVAHAAVKDKTNPYYALKYERIAKRRGKKRAIIAIARMILTAIYSMLSTGEIWNPVDLFKIDLPEHLKEQQLQKAVKRAVRFLEAQGLKVS

SEQ ID NO: 308586 - protein, 426 aa, unidentified
MNVVNSAEEPRFAAFVAIDWGDSKHVWSLQPADADRRERGEIEHNPEAVGAWVTMLGARFGSQPIAVAVEQSRGPLVFMLGKYEQLHIYPIHPRAASQFRAALFPSGAKDDPGDAELLLDLLVHHRQRLRRLNPDTAQTRLVQHLVEGRRKLVNEKTRQSNRLTAQLKLYFPQVLDWFDKIDSPLVADLLKRWPTLEALQKARPATLRSFFTQHNCRSLELIQQRLDLIRQALPAVRDQALIEAATAMTKVLVDLIATLREGIACFDRQIAQAVAVHPDFAIFDSFPGAGPALAPRLLAAFGAQRDRYQSAADLQTFSGIAPVTERSGKSEWVHVRWACPRFLRQTFHEWAAHSIGFCAWAAAYYRLQRERGKDHHAAVRALAFKWIRIAFCCWKDGVPYDDARYVQSLRRRGSPLIALLDKPVVP

SEQ ID NO: 308587 - protein, 506 aa, unidentified
MKVQASRPTFTIDYYPIGQYGSNICRQDIGRKRPYRSLLRQRYWAWSFTSKLITMAKVAKRKQTSKGLRLEVVNPNAAGIDISPKEMQVCVPSDRDGECNRTFGVYTEDLHYIAEWLKACCIDTVAMESTGIYWLPVFRILKESGFEVILVNASDVKNFSGRKTDASDAEWLMMLHSYGLLKPCFQPENIARTMRNIVRHRDNLIRSASREVLHLQKAMEQMNLKLDNVFSDILGKSGQSVIKAILNGERAPKVLADLADPRCRTSKEEIEKSLQATWDEEHLFEMRQSDSLYQFYQQLIAECDAKINEIAMQYFATVDAPKTELLRSEKYNAKKNRIGFDVEKVAFELWGINVMRIPGMSRGSLLRLVGELGADFTTKFVDVKHFVSWANLVPNNKISGGALLSSEVPKKKNPVDMIFRQTANTLKAAKNPLGDYFRHMRAKGGYLQAMVATGKKLASIFYCMVQRKVEYNEKVYCNHRKQELQNKVAYLHKRLQRMESELANCG

SEQ ID NO: 308588 - protein, 410 aa, unidentified
MEVVHAHCAGLDVHKDTVVACVRHMTDGKITTTVRTFNTATAELLALSDWLSAEVVTHIAMEATGVYWKPVWNILSDGEFELVLGNAAHIKNVPGRKTDVKDAVWLADLMAHGLVSSSFVPDRMTQEKRDLLRTRKQLVRERTSHTQRIQKTLECANIKLDSVVSNVVGVSGRRMLEALIAGQTDPKELASMAHGRLQATPAELEAALRGRVTAHHRFMLRLHLDQIDSFDEAIARIDREVNDNDQNFRASVELLKSVPGVGSLAAEVIVSEIGIEMNRFATAGNLVSWAGLCPKNDESAGKRRSNRLKAGAPWLKTTLVQCAWGAARSKGTYLHAQYVRIRTRRGNKKAICAVAASILIAAYHMLKDGTFYEDPGPDYFDKRNKDQQANKLLNRLQNLGFNVILQRVSA

SEQ ID NO: 308589 - protein, 341 aa, unidentified
MKITRIGLDLAKDVFQVHGVDRDGRTVARRRLRRSEVLKYFAGIEPCVVGMEACGGAHHWGRELGKLGHQVRLVSAQFVKPYVKSNKSDANDAEAICETISRPGMRFVELKTVQQQELQALHRVRSGLVGERTGLANRIRGLLTEFGVVLPRQLAQVRRGLPWVLEDGENGLSGALRGLLEGLRADLERLDERIGELDRLIGQAVREDPACERLAAIEGIGPLTASALVAAVGTGKAFANGRGMAAFLGLVPRQHGSGGKARLGAISKRGDPYLRTLLIHGARSVLLHAARKTDARSRWLQGLMARRHRNVAAVALANKNARIAWALLAHEQSYRPAAGGE

SEQ ID NO: 308590 - protein, 298 aa, unidentified
MSVTRIGLDIAKNVFPVHGVDEQGKVVIRKQLSRSKVLAYFAQLPACRIGIEACGSAHYWGRELQKLGHNVRLMAVQLIKPYRTKQKNDRNDAEAICEAVSRPQMRFVPIKTVEQQAVLTVHRARELLVSERTAVANQIRGLLLEYGIAIAAGLQRLRRELPTVLRATEAVLPPLARTVVSELHGRLQELDERITSHDRQITAVAKQSEAAKRLMAVEGVGPITATAVVATVGNARAFPHGRQFAAWLGLVPKQFSTGGKPLLGRITKRGNVYLRTLLIQGARAVLQCTAKRTDIKSI

SEQ ID NO: 308591 - protein, 408 aa, unidentified
MVVEAARVTSSTVVVAVDVGKTEFAFSVSDGARVSLLKLRTGCPMTGPSLAQVVADIARVLPGGAGVKVGIEAAGHYHRPLLRAPWPVDWEVLELNPGHVTEQRRVLGKRTIKTDVIDLQAMTELMLAGRGQPVRDRSLVLGGLAAWSAHRTGRVSLRTATKNQLLGQLDRTFPGLTLALPDVLATKVGRLVAAEFADPAGLAALGSSRFIRFGATRGLQIRRPVADRLVQAARDALPTADAAVARAVLAADLALLSDLDAQVDQATDQLARLLPSSPFAPLLTVPGWGQVRAGTYGGALGDPARFDNHRQIYRTAGLNPIQYESAGKRRDSVISREGSVELRRSLIDLGVGLWHCDPAAKVYGTQLRARGKKGLVIACAMANRANRIAFAMVRDQCPYDPTRWLQGA

SEQ ID NO: 308592 - protein, 294 aa, unidentified
MQVTTIGLDLAKHVFQVHGIDQEGQVLIRRQLRRGELIGFFRRLPPCLIGMEACSTAHFWARELAALGHEVRLMPAAYVKPYVKRGKSDTLDAEGICEAVTRPTMRYVAVKGPEQQAVLMLHRTGDLLVRQQTMLVNALRGHLAEFGIIAPQGLPSVPKLVGLAEKARGTGLPELAWRCIRSILAQLEDVRARIGQVEREIMTWHRTNELSQRLETIPGIGVITASALAATITDPSSFRSGRQLAAWIGLVPRQSGTGGKVRLGHISKQGIVTCAGFWCSGPPHSCGTPAAKPR

SEQ ID NO: 308593 - protein, 378 aa, unidentified
MKDAQMVHSQTNTTTELMYIAFELSNAKWKLMFSDGFRRRQKTIAAGDLSQFEQEVTKAKDRFKLEQDVTIYSCYEAGRDGFWIHRYLGKQGISNFVVDSSSIEVNRRSRRAKTDRIDVGKLMDMLIRYTNGEQKLWSVVHVPSVEQEDQRRIQREIDRLKKERTAHSNRIRSLLVLHGIKFRVSADFIQHLDKVRQFDGSRLGPCLKNEIRREYDRYRLIGEQLKQIDQEKEQLLQQGRPAAKDVQKLELLKGIGPVGSWTLVYEFLAWRDFKNVKQVGAAAGLAPTPYDSGDSKREQGISKAGNARVRKLMTQLSWQWLRHQPQSQLARWYMQRFGSGASRMRRVGIIALARKLLIAFWKYLQTGLVPEGARLKAI

SEQ ID NO: 308594 - protein, 350 aa, unidentified
MLRKFDTAVVTIGIDPGKNTLHLVGLDARGEIVLREKVARAKIVSRLANVPPCLIGIEAGMGTHYVTRELLALGHDVKQVPPVYAKPFRQTHKNDFRDAHAIAEAVQRSTTRCVAPKTDEQLDLQALHRVRYRLVGQRTAIINQIRCFLLEHGITVRQRLHWLRHALPDILAQGTDVLLPRMVRILDDLAQDWRHLDDRIETVSGEIEALSKNTEPCRHLMTIPGIAPIISSGVVAAIGNGTAFTRGRDFAAWLGLVPKQISTGDRTILGRITKRGNRYLRMLFMQAARVVLLRPRNWMRNGYGPWLAAAAQRLHHNVLATALANKLARIAWSVLAQHRAYEARPSPAAV

SEQ ID NO: 308595 - protein, 344 aa, unidentified
MGEVSTIGLDIAKSVFQVHGVDSSGAVMIRKRVSRLKLLEYFAALPPCLVGIEACPSAHHWGRELQALGHTVRLMPPSYVKAYLKRSKNDANDAAAICEAVTRPSMRFVPIKTKQQQTALMLHRARQLLVRQRTMLSNALRGHLAELGIVSAKGRNGIGELLRIIADGADNRIAPATRAILDVMARQYSAIGAEIRSIDKSILAWHRSCEASRRLEEIPGIGPIVATALVAEVGDWQEFRSGRNLAAWIGLVPKQHTSGGKDRLGSITKQGNRYLRWLLVAGAMAVIRYAQKHGTERRPWLARLMERRPTMIAAVALANKIARMAWAVMVRGERYKEPTLLMAA

SEQ ID NO: 308596 - protein, 339 aa, unidentified
MQVSTIGLDIAKNVFQVHGVDGQGRTVLRRQVRRNQLLQLFGSLHPCLIGIEACATAHHWARELGALGHEVRLMPPAYVKAYVKRNKNDAADAEAICEAVTRPNMRFVPIKSAEAQSVLMLHRARHLLVRQRTAQVSALRAHLAEYGIVAAKGRSRLRDLLPVLGTEGILPELARQTLLLVAQLIEALTIQIRNIDTELLRWHRANPASQRLETIPGVGFITATALAATVRDARVFRSGRQFAAWLGLVPRQNSTGGKERLGGISKMGDRYLRYLLVVGATAVVRYTRRKATAISIWANRLLERKAARLVTVAVANKMARIAWAVMARDESYRATSVAA

SEQ ID NO: 308597 - protein, 343 aa, unidentified
MQIRSVGIDLGKTTFHLVALGDNGKVLLKKKFTQKQLIAFTANMQTCLIGMEACSGSHFLGRTLREQGHDVKLIPAQFVKPFVKSNKNDFIDAEAIAEAVERENMRFVAIKTDDQLDLQALHRVRDRLMARRTALINQIRAFLLERGIVFAKSPIRLREALPEVLENVNENLTPRMRNLVAMLWSEWKDLELQIVQMNDEVERIASSDAACRRLRQIPGIGPLVATAIVASIGNGAAFRKGREFAAWLGLLPNQHSTGGKVRLYGISKRGNCYLRKILIHGARAVVLRSKRERIAMGPWMTSLETRAPRNVLIVATAHKLARIAWAVLSSGQDYRAVLEALTV

SEQ ID NO: 308598 - protein, 402 aa, unidentified
MEKFAGIDWASAEHALCVVDGAGVRLQERLVDHSEVGIAALCRELVGLGVARVAIERPDGVLVDRLLETGIVVIAVHPNQAKAARERYSVARGKSDAFDAFVLAELARTDSHRLRAIRPDRDETKALRALTRTREDLVGVRVELANQLRAQLDAFWPGALVFSDVDSPISLVFLARYPSPTEAKGLGPKRLAGFLARHSYCGRRSPTELLERMRSAPAGRAGELETEARRAAVVGLVAALRPIVAEIAELTSQIRGALASHPDAAIFRPLFRDQKTAICPATLIAELGDSRGRYPTDAALAADAGMSPVALESGKRRAATFRRACDKRLRVAVATLADSTRHWHPWAREVYRRARDRGQDHPHAIRTLGRAWLRVLWRCWQDGVPYDPALHGNFRRLQPVEG

SEQ ID NO: 308599 - protein, 400 aa, unidentified
MLSIGIDVSKGKSTVCGMKPRGEIVYTPFEVQHTREGMSELVSLLRSSGEEVRAVLESTGSYHCPVVTALLENGIFVSVVNSLRMKRFCSQSIRKVKTDRIDAMQIALYGLAYWQELQPARLPEDTYRELQLLARQYYQMTSLLIKAKVDFNAICDQVLPGMQELMSDHAGRHKLSDFVLRYCHTTHILEMGETRFRKDYCKWAEKKGYRNCERMAALIFATAQNGIPVLPNAPSTQIVITEAIRVLHTVEASRDAILTQMQALAKTLPEYSLVREMPCIGDTLAPRLIAEIGDVRRFHSKRALIAYAGIDAPPYQSGKFCANNRHISKRGNRYLRKTGYEVMQSYVMHKPANDPIFTFIEKKRGEGKSGKLAMVAGLNKFLRVYYGKVTELYRSLPAIE

SEQ ID NO: 308600 - protein, 454 aa, unidentified
MSTRVLSFEDWSISTTPCLRRVRTVTSRGERVQVLGVGIDWAEEFHLVALGRPAEGVFEVARVEHTPTAVAALITRVLGLEPDPAEVRVVIETRHGLLVEALVDAGVTVLPVNPDLVARRRGPARKKDDAEDARIACLLALDRFTDLRALVPHGELAGELRAIARDDVRAARDERRLLNRLRADLIATFPAALVIAGDDLGAPVMLKLLERWPTAAELAAADRDQVEAFARAARHGWPDRFAGRVADALAAEHFQARDYLVRAKAATIRLAATQLLLIRDQRRAWQHRMGELLLGAPRYGRNKQPGDDRGPAVPGGEVYLSFPGLGDRLAARIAGEIGDAIGQFTTPNALQCYAGKAPVTRRSGKSELVVATRLACNRFLADAVQHWAFTSLKNSGWAREFYDTQRHRGKTHNAALRALGNRWLEVLWHCLTRGVPYDENVHVANRDRAPSKTA

SEQ ID NO: 308601 - protein, 358 aa, unidentified
MQRYIGLDAHAASCTLAIISETGKRLRDFPVETNGAALVEAIRAVPGPRHLIFEEGTHSAWLYETLERHVDEIVVTGVSNSRGPKCDARDAYALAEKLRTHAVDKLVFKAPKEFAVLRELARVHSMFVRDVVRVQARLKSIYRSRAISTAGAAVYGPRQRQEWESRLPPAARHATSKLYAHYDLLLELKKQAESELIAESKRHPIARILQTAPGLGPIRVARLLPVVVTPHRFRTKRQFWSYCGLGIVMRSSSDWVRGSNGEWQWAQVAKTRGLSKQHNHTLKETFKGAATSVVQQGEKVPIYADYQRLVESGTKPNLAKLTLARKIAAIVLRMWKDEEVYRPDRVSNKTTQAARSTT

SEQ ID NO: 308602 - protein, 319 aa, unidentified
MDDIIIGFDVSKKFFDFAFLKNDKKWFNQQLDYDKDGLNQLIKIIPSNSICVMEATGPYYIKLANFLYSKGFKVSVVNPLVIRRYSQMLLKRTKTDKADAQLIAMYGRDQIPDFWKPNSENIQRIRQINSVLESLIKERTSWINRIEAAKQDDNFDESSLKIMKQMVCLINRRIQKLEAELDKIIDTDFMQENDILRSIPGIGRKTSIMLLAITGGFTKFENYKQFSSYVGLCPRIFQSGTSVRGKARICKIGISRVRQLLYLCALTARKFNKACKELYNRLIEKGKPKKLALIAVANKLIRQAFGCVRNMTFYNAELC

SEQ ID NO: 308603 - protein, 350 aa, unidentified
MQGNGRWIGLDLSKETYEMCYFDQKGKVGRSGGETTKAGRSKLYAKLKAEDIVAMEVNSLAFVMEKEMRQIGCTVVILDASQLSIIYSSTKKTDKEDALKLARLIKIYEKEDLPIVDVPTEKEYYRRKLTKECKTLKDDRTQEINRLHALFLQCGITTMKRSNLQTDANRQKVLPQLFGYEVGQAKRVCERLTLLEAQIKELEQTITKECKADKDIERLKTIPGVGDKTALAFAAYVGDGKRFNNGDEVANYLGLVPRVDCSGSINRYGHITKKGNRIVRALLYQAAWSIVRSKHGGALKAKYFYMTEHGKGKKISITAIARKMAKLMYLIMKNKGEEYKELPAPASRAG

SEQ ID NO: 308604 - protein, 350 aa, unidentified
MKIIGCDYHPGFQQIAFVDSETGELQERRLEHPEEAEKFYRDLGAQGACVRVGMEASGHARWFERLLSELKFELWIGDAAEIRTKRVRKQKTDRQDAELILQLLVENRFPQIWVPSWENRDLRQLLWHRHRMVQARTRIMNQLQAVALNEGLLCKKRLWRETGRKQLESFPLAPWASRRRQDLLELLDRLTPTIAELTQAIEREVENSPEARRLQTHPGVGPLTALAFVLVIGKADRFQCGKQIASYLGLIPLEDSSGKRRRLGHITKQGNSLLRFLLVEAAQVTVRSDPEWRSKYFHLAMRRGRKIAKVAMARRLAVRMYWMMRKGWDYEQLKKFGSHAGQPGNRDGVQ

SEQ ID NO: 308605 - protein, 337 aa, unidentified
MDYFAGLDISMDETRICVLDREGAVVYEGKSASTAEAIADELAKAPSCRRTVFETGRMAPILFHSLSQLGLPVVCVESRQAYQALKSLATHKTDRNDARGLAHLARTGFFKPVHVKSLSAHAVRSLIIARKKLVGQRVTLENQIRGLAVVFGVRLPRALTTAFIDQALKASEGVAGLSAAMRGLIAARTAVMTAVAAIDADIRRMTGASEACRRLMTIPGVGQLTALAFVAAIDDPSRIRRSRDVGAYLGLVPKRYQSGEVDYVGGISKRRDRRVRTLLYEAANVMLTRTKGQLKLKDWAFAIARRSSMRKARVALARRLAIIMHAMLRDGTEFVAA

SEQ ID NO: 308606 - protein, 320 aa, unidentified
MMAQNDLVVVGIDVAKDKVDACIRRLTLRQTFPNTAQGHRKLVAWLRKYQVGKAVMEASGGYEREWRNVLHNAGIEVRIVDPRRVRSFALSAGRLAKNDPIDAEMIAWFAETFSQVPGQIPDAAREELAALAKARKALVDVKIRLQAQDEHAAPEPARKAYARVLKSLAAEIDKLEAAISAKVKATPEFAERAEIIESVPGLAQATSAILIAGMPELGQVSDEVAAALIGVAPYDDDSGKRRGERYIKGGRRWVRNAIYMPCLGAATQCNPVLKAFYQRLLTKGKEPKVALVACMRKLIIILNTMLARRQKWNPGRYAMA

SEQ ID NO: 308607 - protein, 409 aa, unidentified
METIHPICCGLDVHQARVSACLRRVNADGTVSLQDREFGTTVRELAALSEWLVEEGCPIAAMESTGVYWKPVWHILSSVMDVWLLNARDVKQRQGKKMDRADAKWIAELVAHDLVQPSFVPPPRIGALRDLVRMRTTLVQMRTQVKNRVLAVLEDTNVKLASVVSDPFGVSGRKMLDALVKGERDCKVLSEMAMGVLRRKIPQLEEALEGSFTEHHAFLIRLGLESLDQCNRQISELDSQVECLMAPMQEEVSQVSSIPGVGNTATRVILSEIGTDMSRFGSAQRLASWASLCPGNHESAGKRQSGKTRKGNRHLRRVLVECAWATRNTDSFLGRTFCRLQARIGGKKAAVAVGHKILVIIFHLLNEGQFYDDGRYDHLKEREHARQTKRALATLQRLGYQVALTASTC

SEQ ID NO: 308608 - protein, 412 aa, unidentified
MTEVVAYIGLDWADARHSVHLQTAEGKIEHFELEQKPAVLHEWVAQLQQRFGGGKIAVALEQRKGAVIHALLMYDCFVLYPINPKALARYREAFTTSGAKDDPMDSELLLDLVVRHRDKLRAWVPDTVDSRKLQALCEQRRKLVNQRVALTNRITSLLKQYFPQALEWVGDLASIQACDFLTQWPTLAAVQAARPSTVRRFYQDHNCRKRAVIDARLAAIADARALTTDAAVIEPLSLSVQTYATQLRTLITAIQTFDARIADVFAQHTDRDIFGSFPGAGDVCAPRLAAAFGTDRTRWDAAAEFQAHSGIAPVTERSGKSVWVHHRLACPKFVKQTFHEFADQSIRFSRWARAYYDQQRARGNDHHAALRALAYKWIRILFRCWKERRPYDEQVYIEALRRRGSPLAKHFA

SEQ ID NO: 308609 - protein, 392 aa, unidentified
MEVMDDSGRRLAKARLPEGVAGVSRLHAMLGNLVEVDTEQVEVLVGIETDRGPWVGALVAAGYIVMAVNPLQAARFRDRLGVSGAKSDAADAHVLADMVRTHAHELRPVAGDSDRAEAVKVIARIHKTMIWERTRHTQRLRHALRDYFPAALDAFDDLDAADTLELLGKAPTPERAARLTITQISAAMKRAHRKHVAAKASTVQAALRAEHLSQPEVVTQAYAASVTSLLAVLTVLNAEIKTLAEQVDAHFGQHPAAEIMLTQPGLGTILGARVLAEFGDDPTRYATAKARKNYAGTSPITRASGKKKVTLARFVHNDRLIDALLTQAQSALLASPGARTYYDKQRARGSSHNAALRQLANRLVGILHGCLKTGTPYDETTAWHEPISKTAA

SEQ ID NO: 308610 - protein, 357 aa, unidentified
MGQSNRISFKGQNIYVGIDVHLRSWSVTILSETSVLKRMSQGADPDALHRFLASHYPEAEYHSVYEAGFCGFWIHDRLTELGIHNIVVNPADVPTMGSEKLRKTDAVDSKKLAVSLRARQLKGIYTPDSEALEIRSLIRLKNSITKDTTRQKNRIKSQLRYLGIEIPAEYLEPHSNWSKRFLNWLKEVDMRTPSGRHSLDILIMQFEALRKQKAEMTRKLRELSHTERFEETLKLLMSVPGIGQATGLALISEIVDIARFANAEQLAAYVGMIPMCHSSGDHEGVGDITLRKHAILRSNIIEAAWVAIRKDEAMQLCYLNNCKRMVPSKAIVKVARKLVNRIYFVLKRRQPYVNAVA

SEQ ID NO: 308611 - protein, 328 aa, unidentified
MPHEPSLPVAGIDVAKEKLDVFVDTVKQRFCIPNREEEIDALATRLRQLQVRLVVIESTGRYHRRVAAALLQAGVESTVVNPQRVREFARSTGTLEKSDAIDATILARFGRLLDPRPNRIEPQNQMLLRDLVSRRRALVQHRVAEKNRAHDTLPTFAARQSKQLLRLLDQQIEDLDREIARLIEADDDWQNKSRIIDSIPGIGPDGANQLIADLPELGKLNRQQIAKLTGLAPILRDSGLYRGQRKIAGGRRDVRCLLYMLAHNARRLLPTLRRLLRSPHRHQTPQSRHDRLHAQAADHPQSNDQNTNLLEPTTHHHKGLTMNTAAPW

SEQ ID NO: 308612 - protein, 316 aa, unidentified
MNDTEVEVFVGIDVSKSTLDVCIDSSAEVIHVEYDDKGIRSVCERLTAAQPALIVMEATGGLEMRLACELAAQGLRVAVINPRQARDFAKATGRLAKTDRVDAAMLAAFAKAIRPQARPLKDEQTRSLDEMVSRRRQLIANRVQETLRLDTAGTKPMQKSLKAHIAWLDKRIAEIDADLSRRLRASDVWRAKDDLLRGIPGVGAVTTVTLLAKCPELGTLNRREIAALAGVAPLANDSGKHHGKRFVWGGRADVRAVLYMATISAMRCNPGMKVFATRLRQAGKPPKVVIVACMRKLLTIMNAMVKNSEPWAPKSA

SEQ ID NO: 308613 - protein, 417 aa, unidentified
MKSKSQKVRNINEKTLVVTLDIGKKIHYGYFRAPNGKDVKPFHVHNFRKSFEKFWAKIVRFQRQQGLEDIVIGFESTGPYAEPLVHYLKNKPIKLVQINPMHSKRLKDLTGNSPSKTDKKDPRVIADVICLGHALTVVIPEGAAAQLRRLTQARERAVKSHTAMVNQLQHLIFVIFPEFCSILKPTSKSAMYLIKKHTTPESIYVMGIKSLAEVLKKISHGKFGQERAKELFQAAQDSIGIYEGKESILLEIDHLVSKAEDEKRFIDSLEKKMANYLSQIPYSGSLLSIKGLGVITVAGMIGEVGDFRKFRTISEITKLAGLDLYEVSSGQHEGQRRISKRGRSLMRKLLYFAALHAIQSNGIMHEPYQQMLERGMPKVKALIAISRKLLRIMFALARDNTEYVKDYDQIHHYKLAA

SEQ ID NO: 308614 - protein, 350 aa, unidentified
MPRKFDTAVVTIGIDPGKNTLHLVGLDARGEIVLREKVARTKIVSRLANVPPCLIGIEAGMGTHYVTREVLALDHDVRQVPPVYAKPFRQTHKNDFRDAHAVAEAVQRPTTRCVPPKTDEQLDLQALHRVRYRLVGQRTAIINQIRCFLLEHGITVRQRLHWLRHALPDILAQRIDVLSPRMVRILEDLAQDWRRLDDRIEAVTDEIDALSKNTEPCRHLMTIPGIGPIISSAVVAAIGNGTAFACGRDFAAWLGLVPKQISTGDRTILGRITKRGNRYLRMLFLQAARVVLLRPKNWMKHGFGPWLAAAAQRLHHNVLATALANKLARIAWSVLVQQREYEARLSVAAI

SEQ ID NO: 308615 - protein, 343 aa, unidentified
MGEVSTIGLDIAKSVFQVHGVDDAGAVVMRKRVGRSKVLEFFGSLSPCLVGIEACPSAHYWSRELQALGHTVKLMPPSYVKAYLKRSKNDANDAAAICEAVTRPSMRFVPIKTQEQQTGLMLHRTRQLLVRQRTMLSNAIRGHMAELGIISAKGRNGTAELLQIIGDVADDRIPPVARFCLDLLARQYLTLNAEVYAVDKRIHAWHRACEESRRLEEIPGVGPIVATALVAEIGDWRAFRSGRSLAAWIGLVPKQHSTGGKERLGRITKQGNRYLRWLLVAGAMAVIRYARQHGTKRAWLTRIMDRRPAKVAAVALANKIARMAWAIMVHGERYREPKLLLAA

SEQ ID NO: 308616 - protein, 341 aa, unidentified
MQITTVGLDLAKNVFQVHGIDAKGKVVVRRRLRRAQVRDFFTGLKPCLIGLEACGTAHFWARELRALGHEVRIMPPSYVKAYVRRGKNDAVDAEAICEAVGRPTMRFVPIKTEEQQSALMLHKARELLIRQRTMLVNALRAHMAELGMIAPQGREKIDDLIAVIEDGEDESVPALAKAALKPLVAQLRSAEEAIAAADTEIMAWHKGNEASRRLETIPGIGVHTASAIAASVPDPSFFRSGREFAAWLGLVPRQNSSGGKERLGRISKQGNRYIRKLLVLGATSMLRQARANTAPGADWVNGLLERRPPRLVTVAMANKTARIAWALLAKGETYRARGAAA

SEQ ID NO: 308617 - protein, 383 aa, unidentified
MDSIPVSVGLDYHDSKVQVCVLNQGGELLWNREVANDAMRIDAAVRRLGPVSGAAIEACCGSAHLADELATRFGWPIALAHPGYVARLKRSPDKHDVGDARLLADLIRVGYLPRVWLAPEETRQLRRLVRHRRELVNHRRDVKLRLQALLRENRFRAPEGVNPWTKRWGAWLSTLAWPEDDRWLLDRHLAEVQRLTMLIRQCDERLQSRTAEDALVQRLLTLEGVGLVTAVTLRAELGRVDRFRTGKEMARFCGVTPRNASSGQHQADAGLVRAGNPDLRHVLIELAHRLIRCSDTSWSRLGYQLLRRGKPKNVVIAAVANRWVRWLYHYLKNEPQQADLSSGSTEGTAPSASAVASTLSIGEGSRRRRRRKGLADSVSKEVT

SEQ ID NO: 308618 - protein, 341 aa, unidentified
MMIIGCDFHPRFQQIAFVDQETGEYGERRLNHPGEAEQFYRSLAGRQVRIGAEATGNFRWFRHLMQELGHEFLLGDASAIRAACPRKQKTDKRDARHILTLLVEDRFPVVWQPPAENEDLRQLLLHRCRLVRMRTRIKNQLDSIAKNEGLLSSRVWSPKRRSEIEALPLPGWYAHRRADLLGLLDELDKRIRPLDEAVHEAAEDNQEARLLMTHPGVGPIVSLAYVLTIGDWRRFPRGKQVGSYLGLIPEEESSGSTRRLGHVSKQGSVLVRWVLVEAAVHAQRHDASWHRQYVRLSMTKHHGVAKVAIAHKLAVRLYWMLRSGEDYSKVMERGSHAGQSV

SEQ ID NO: 308619 - protein, 356 aa, unidentified
MEKIGNVEDVPSVEEVILGVDTHLDLHVAVALDQLGRRLGQITVPTSTRGYARILRWAEGFGTVGCVGIEGTSSYGVGLVRYLQCAQILVVEVERPKRRHLRRNGKSDSIDAEAAARAVLAGEASGEPKSADGQVGMIRTLRSARQSAVKARSQAANQLQALLVTAPEQLRHSLRKLPTKALLSTCARFRPVKEPDDVRTATKIALRSVARRHEALSEEIAELDERLDRLVARTSPGLISLPAIGTHHAAALLCVAGDNPRRLASEASFASLCGVSPIEASSGKVVRHRLNRGGNRDANRALHMICVVRMGSDRRTQQYVARRTAEGKSKREIMRCLKRYTAREVYRVLVQPTATS

SEQ ID NO: 308620 - protein, 374 aa, unidentified
MENAQKSKRKTKKTISKKTNTRKKAAKETAKKQEVIKVQKKITFDQVVSKGCGLDVHKETVVASIAGDGIKPETKIFKTFTQELEKLRDWLKENGITHIAMESTGVYWKPIYNVLEFDFEILLVNARHIKNVPGKKTDKKDSEWICKLLLSGLLSGSFIPEKPIRELRDLTRYRKKVVQQIAAEKNRLQKVLEDGNVKLSLVVSDMSGVSATKIIDAIIEGEKDPKELYSLCHTNLKATEKELAAAVNCKITEHHKFMLQLIKKSIKEKEKLIEELNTRIDNLVKKQELTLDIELLQSIPGVAKYSAETIIAEIGNNMEQFPSAKHLASWAGMAPGNNESAGKKKLQRQLRETNIYGLALWNAVGEPVEQRIHI

SEQ ID NO: 308621 - protein, 382 aa, unidentified
MRNDLSRSRTLFEQDGTLIAVVELSLSSWVVAGIVPGMDRHPLKKLGADHDALLQLMERWRHEAIKAGRTISRIVLAFEAGRDGFWLARWLKARGIEAFVIHSTSVAVPRDHRRAKTDRLDTELLKRAFLGWLRGEPEHCHMAAIPTPGEEDARRPNRERENLIGQQTRIVNRMKACLVRWGIRNFKPTLRQAAERLETLRTPEGAALPPNTLAEMRRDMARLREQIREIEASRERRLDQASENEPHAMIRLLARVVGVGIETADMLVHEILSRQLRDRRAVARYAGLTGSPDESGQRRKEKGLARAGNARVRRGMIQLAWRFLLFQKDSELAKWFHARTVDGRGGTRNTMIVALARKLLIMLWRMAMTGEVPPGVILRSAA

SEQ ID NO: 308622 - protein, 391 aa, unidentified
MLICGIDIGKNHHEASVMDQDGRPLSKSLRFANTTPGAESLLEYIGKCNASKDIVVIGMEATGHYWLSLYCFLFDAGFQVNVINPIQSDAIRNLFLRKTKNDARDSFLIAETIRIGRFSKTELADEDILSMRQLCRHRMDLVDYIADQKRKIIGVMDRVFPEYQNFFSDMFGKTSTELLAKAVTPEELLAIPTDELCKLLKTNSRGRFGEAKAEELQRAAKTSFGITIGTAAFTMQLRQLLEMIQLLESQLVELEAEIEQYLAKLDTFITTCPGIGNVLGAIILGEIGDISRFSEPKKLVAFVGIDPSVKQSGEFTGTQNKMSKRGSPHLRRAIWLAASVAAFHDPVLSAFYQKKRSEGKHHYTAVGAVARKLTFIIFAVLRDSKPYVPNC

SEQ ID NO: 308623 - protein, 427 aa, unidentified
MEVMHERVAGLDVHKATIVACVRIQSGRQVKRECRTFSTTTDDLQALLRWLTQERCSHVPMEATGVYWIPVWKILSDGDFDLVVANAAHVKNVPGRKTDLNDAMWLADLMACGLINASFVPEEPLQELRSLMRSRKQLGREQTRHVQRIHKALIEANIRLDQVICDIMGASGRRIIEAMIAGVRDPSRLAALASRQVKATAQELRDALHGRLTDHHRFLLKLHLRQYDALEAAIRDIDVEVDAQITRLDQQLNAGRGAKAVPFRDLIKLLCTIPGVSVLAAIMILAEIGRDMSRFPTAGHLISWAGLCPGQHESAGKRKSTRLRKGNPWLKVTVVQCAWAAKRKKDSYYRAQFFRIQSRRGPQKAICAVSASILTAVYHILKDGTEHRDLGADYFKHRSAEAQTKRLVAQLGKLGYEVQLQPAAQAA

SEQ ID NO: 308624 - protein, 344 aa, unidentified
MKVTTVGIDLAKNVFQLHGVNEFGKTAIKKQIRRDQMAEFFVNLPACLIGMEACGSAHHWARKLQGFGHTVKLMAPQFVKPYVKTNKNDAADAEAICEAVARPNMRFVPIKNIEQQAVLALHRVRQGFVKARTAQANQIRGLLGEFGLIVPQGIGYIASRVPELIEDASNELPGSFRLLVQRLLDHLKELDRQVDELESQIVKWHRQSDASSKLAQVPGIGPITASALVASLGDAKNFDGGRQVAAWLGLVPKQHSSGGKQNLLSISKRGDTYLRTLLIHGARSVIYRAQQKPESCSWINGVVNRRNKNVAAVALANKNARIVWALLAHDREFRSDYAAAKAAP

SEQ ID NO: 308625 - protein, 339 aa, unidentified
MSEDYAGKQIVGIDLHRRRSVLVRMTEDGQKLETTRISNDPEYLRAVMARAGDSPEVVLEACYGWYWAVDTLIELGASVHLAHPLGVKGFAYRRVKNDERDAADLADLLRMGRLPEAWIAPPACRELRELVRHRAKLVGLRTNLKSQVNAVLAGAGVQGLPSDLFGAGGRELLERVALPAAMRAKVNSALRLIDAIDFEIDTFAHLVATRLRADPGFLAVQTIPGVGPILGAVFVAEIGDIGRFRRPEQLTSWAGLTPKHHESDTKVRRGRITKQGSRLVRWAAIEAVQRIGPHTRLGAYREAVAERRGRNQAKVAAARELLECVFYGLRDHHIRRLAA

SEQ ID NO: 308626 - protein, 418 aa, unidentified
MKTLASFEFTAYIGIDWSDTKHDICIQPAGGEAREFARIVHQPEAIAQWAQSMQQRFGGPIAVALELSKGPLISALQRYDFFVLFPVNPSMLAKYREAFKPSRAKDDPSDAELAVDLIVRHPERFRPLQPQSIEIRTLVHLVEKRRRLVDDRQRFVNRLISALKAYFPQAVEWFSHKETFVFCAFITRWPTLKHVKRARRSTLGRFFREHNVRRPRIVEARIQAIKAAVPLTEDPAVIEPYTLEALALAEQLHTTLELIKRFDDAIAALAPSLPDYAVFASLPGAGPVFTARLVAAFGEDRERFQSAAEVQRYSGVAPVTERSGNTAWVHWRWACPHFVRQTFVEWAEKTIYYSFWAGAYYQQQRRKGASHNTAVRALAFKWIRIVYRCWQSRAPYNESLHLKALQRRGSNLVPQESA

SEQ ID NO: 308627 - protein, 407 aa, unidentified
MNDSRKRYIGLDVHKHYLIALGVDADLNVVLPARRVELFRLEAWMKKNLTKQDEVVLEMTTNTWQLYDELIQYVGSVTVVHPPHVALITRSQVMNDKIAASILARLLAKGLLVGIWIPPQEIREARGLVAQRQKLVRLATQAKNRLHAVIQRHHLVPPAGNPFGAKNKEWWQLLSLGKLEKLNLQSDLETLRFAEKQVKDMTEIMEDMAAEQEEIGRLLHLAGFGVVTAVTVWAAIGDIRRFAEPQKLVGYAGLGTRVHDSGMTSRSGKITKAGRRDLRTVLIEAANAAANSHPHWKAELARLEPRLGRNKAIVAIARKLLIAVWFVLQGKTDKYAEPEAVAQKMLKFAYAVGKANRPKGQTAAQFARIRMDALGVGSELTSIPWGSKKPIPLPPSKLKERSDVPNM

SEQ ID NO: 308628 - protein, 345 aa, unidentified
MQTMYYIGLDVHKRTISYCVKDGSGVIHAEGTIPATRLNLDLWMKTLPQPWTAAMEATVFTGWIYDHLQPHAAALKVAHPLMLRAIAAAKKKNDRIDAKKICDCLRCDFLPECYMASTAIRERRRTLRYRNLLVRQMVQMKNKISMLLMEAGVSYNKQRLHKAGYFRELLATNPDIPEGLRSLLRLCRETVVRLQKTESALVRSLEQDSLLMDRAERLMTIPAVGPITALTWALEVGDVKRFSSIKKAISYCGLCGAEKSSGNTIQRTPLSKQRNKHLQTTLIEAAKMAPRNSPALAMLYDREKQKGNANRATLAVARKLVAYLMAVDRGQRNFQMMETNNCIAA

SEQ ID NO: 308629 - protein, 350 aa, unidentified
MLIIGCDYHPSFQQIAFVDTDTGELQERRLEHREEAEKFYRDLGAQGMKVRVGMEASGHARWFERLLAELNFELWIGDAAEIRTKRVRKQKTDRQDAQLILKLMLKDDFPQIWVPSWENRDLRQLLWHRHRMVQVRTRIMNQLQAVALNEGLRCKKRLWREQGREQLESFRLAPWASRRRQDLLELLDRLNPMIAELSQAIEQEAEKFPEARCLMTHPGVGPLTALAFVLIIGKAERFGSGKQIASYLGLVPLEDSSGNRRRLGHITKQGSSMLRFLLVEAAQVTARSIPEWRNKYFHLMMRRGRKIAKVAMARRLAIRLYWMWRKGWNYEQVKKFGSHVGQLGTGRGVQ

SEQ ID NO: 308630 - protein, 295 aa, unidentified
MNKIIRIGLDTSKSVFQLHGVDEAEKPVLRKKLSRKQVLDFLSKLPPLKVGLEACGASHHWAREIRALGHEAVLLPPQYVKPYVKRGKTDAADAEAICEAMSRPTMRFVTIKTPDEQAAQMLIGLRNQFVRRRTQLSNAIRGYVAEFGHVAAKGLAHLPRLLDDIRADEALPDLAMEMIETLARDFERIDTEIAALDRKLQQAHRSSEVSQRLAKMPGVGPVVGVMLSAKIGVAKDFRSGRDFAAWIGLTPKNHSTAGKNRLGVITRAGDERLRSVLVVGATAVINQWRRTGRTG

SEQ ID NO: 308631 - protein, 401 aa, unidentified
MKRLSGGIDVGSESHHITILDDEDNVLYNQKVAHKLNEFAESIKLFKQIEKKEKGVISFALEGKNGYSAPLDRILLDQGFTLYNVDNFKLKRFREAFAGEWRDDQRDALMLSKMLKLKEHINSEREKVFIKIEKPSLLTESLKLLSRHQQTLIDERVRFTNRLGKKLLEVCPEILKLAKLKNKKLIAILVKYPDFSKYKRITPKSLVKIKGIGKKGAFFLLKRLNNIEYMPGLTDIYKMIISSFAKRISELQKEIKDIDKKLDKIGEKNKEVNHLKTIPGVATKLASRLIGEIGDINRFPSEKQLAVYCGVACVNNDSGKVTKAKAVYKANKICKHTLITMAGGSIRLSIQCRNYYLKKRAEGKSHNHALRCLARQMIKVIHRMLTEDRDYIVRKELKRVA

SEQ ID NO: 308632 - protein, 337 aa, unidentified
MKLKRIGVDWAKQVFQLHGVDSHEQAVCRKQLKRSQMLDFFRRLEPCTVAMEACGSAHYWARELRTLGHEVRLIAPQFVKPYVKSGKNDANDAEAICEAASRPSMRYVEVKSAGQQASQALHRIRSRLIRARTALVNEIRGLLGEFGLVEARHGVAATRRLTQTALDAQNGLPGQMRELLAELSGELDEHDARLSRLDDMIQRQAREDERVGRLLQVEGIGPVTATALVSAVGAARQFSSARQFAAWLGLVPRQHSCGGKERLGAINTRGDSYLRTLLIHGARAVLRHCQDKADRRSQWLRQRVCRRNPNIATVALANKNGRIVWAILSRGEGYRPG

SEQ ID NO: 308633 - protein, 313 aa, unidentified
MITEEVHVVGVDVSKATLELGCMSLTLPASIPNTPAGFKTLLKSISKCITPVHIVCEATGPYHGPLIRFLHLAEIRVSVVNPRLTRDFARARGKLAKTDAIDALLLADYGRTMKPDPTTPPEEHVVLLDELVTRRAQLVEDRARERNRLEQSSGPDVTASLRLHIRHLDEQIKKLLKRIAEVVEKHPSLKTKVSLLAQVHGIGTLTASVLLATLPELGTLSKNEVTALAGLAPFNRDSGAFRGKRSIHGGRIGVRCAIYMSALCASRGNPILKAFYQRLRAAGKPHKVALVAVMRKLLIYLNSLLKQHTLSPA

SEQ ID NO: 308634 - protein, 486 aa, unidentified
MAKRKKSTFERLSRGEMNRKQRRDLARRLTGLDPGLTIIHSNAGGIDVGNESHFVAVPPDRDANSVQEFGCWTADLKRMAAWLKACRIDTVAMQATGVYSIPLYDILTGYGIQVILVNAQHTKNVPGRKSDVQECQWLMKLHTYGLLRDSFRLEERMESVRTIWRLRDRHVKDASRAVQHMQKALTKMNIQLANVITDITGVSGHAIITAILKGERDPWKLADLKHEMVKASREEVARSLEGNWRDDLLFELRQAVESYHFAHLQMRECDRQLEEFLASLPTRILERPPQPSDATAATAPQTKKARKPKKTRRNEPTVDLATELKRIGGVDLTSIDGIDVITAQTIVSEIGTDMSGFKTEDHFASWLGLTPNKDISGGKIIGPGKRKVQNRVAMALRMAATTLLRSQTYLGARYRHLRKRLPSHASAVKAMARYLAVLVYRILTHGQAWVDRGAARFEQRRTELEMASLNSRALAKGFKLVPITAS

SEQ ID NO: 308635 - protein, 460 aa, unidentified
MKGKSRRRSTQRARREQRILERIHLHAAGIDIGSESHWVAIPEDRDERPVREFKSFTHELIALADWLEACGIETVAMESTGVYWIPLYEILEERGIEVLLVNARHVKGVPGRKSDILDCQWLQQLHTFGLLRGSFRPDAPIAALRSLVRHRDQLVEAAASYVQRMQKAMVLMNLQLHNVISDVTGVTGIAILRDIVAGETDPSVLARHRHPRCKASEAEIAASLTGHYRDEHLFVLRQALELYDLYQEKIRSCDEQIEARIRALEATCESPGTPLSSSRRAARANEPSFEIRSPLFTLCGGVDLTELPGIGPYGALKLISEIGLDMSRWASEKHFVAWLTVAPRNQISGGRLLSSRTQPSANRAAKTFRMAAMSLGRSDHALGAFYRRMAARVGKAKAITATARKLAILVYRMLRYKMTYREPSAADYDRQQRARIVRGLRKRAASLGFELVDTRTGLVT

SEQ ID NO: 308636 - protein, 430 aa, unidentified
MTELNPTPAPATLVAIDIAKHRHEVLIEAPGQSRRRRLTILNTKADHDRLVETLTAYGAPVIIGFEATGDYHRGLAYRLLSAGFELRLVSSVALARTREALHNGWDKNDPKDAQVILHMLRIGATQRYVDPLAAGINDLQELSKTHEAISKAKTETWHRILTHYLPLYFPEIERFAGNSRSDWFLALLERFPTPSSIMALDREGFMQEAWSLMGRKVSKSRLLNDIYETARASTALPVAQGSAAITMFRMVLAEARSLIRQRDQIEELAHAMLADHNDYQLLRKIPGIGPIHALTILAEAGDLRRFGHHRQFLKFCGLDLATRKSGTFRGRTKLSKYGNARLRRALWMAAQVAARQRDNSFRDKLGRYTARDRHDADLRRKAVTALTAKMARVVHAVIKGGAEYRPFFERPVPGGRTSLCTGREGAQATL

SEQ ID NO: 308637 - protein, 328 aa, unidentified
MQKSYIIGVDVSKDKLDIHCHSHYQSFVVSNDEKGFQKLLKWMQTQVSEELSAIAVMEYTGIYTYRLEHFLHQSGIDYVKRSALDIKRSAGLKRGKTDKADAQMISRYGWQRKEEFCAMKPLTKTQQHLQQLMAYRDKIVADKASYQARLTELKTQMGEDLNGCIIRSSEHLIQSLQQELKEITSSIEKLLITDKQLYCNYQLAKSVTGIGFATAVHFLIVTENFTRFTEPRKFACYCGVAPFENSSGTSIRGKTKTSHLANKKLKSLLTMAAISAIQHERDLKEKYHQKVKEGKAKMCALNIIRFKLIERIFAVIKRQAVYEIRLAA

SEQ ID NO: 308638 - protein, 340 aa, unidentified
MNLTTLGIDLAKTSFSLVGMDQHGKVVLRKTLKRAQLLPFIAQCPASLIGMEACSGAHYWGREFAKLGHKVGIIASKFIAPFRKGGKNDNNDAEAICEAVGRSTIWFVPVKTAEQQAQLCVHRVRQGLISERTALINQLRGLLSEFGIVMPKGRYPAQREIPQILEDADNGLPMLARQMITNLWERIKIASEQILFYDRELRKQAHHHPVAKRLLTIPGVGEQVASGIVASVPDPSLFKNSRQFAAWLGLVPRQYTTGGNVRLGRITKQGDRYLRMCLVHGARAVLANMKDKQDKISCWARELIARRGYLRAVVAMAARNARLIWTLMVKQEDYKVIAAS

SEQ ID NO: 308639 - protein, 434 aa, unidentified
MDTETTATVSRIELFRQLKSTIKGSKDILIVGIDVSKQYSVACIIDASGEIHLKKFRFDNTIAGATEITNKAHMLKQTLPKKEIVWALEPTGNYHKPLADFLLRQGAMLVGVSTVAAKENRKSLDGRWKKNDPKDAHNVADLVSQGKMFFYNQSPQVKTIKHLLKLRQRIAAELSAIKARLRNNHFALFFPELDSLYADITHPEVLLLLEYFPTAEDIRTLSFDQFQNVFAAKTRSPQGRQRLAEIWRRAQNSIACAKIPSVDIEIPQTLESISLFKKQLAAIEKHITHLCAQDDAYRALQQIPGFGPIISATVLATIGSIQNFTKASQLTKLVGLDLEYIQSGKFHSAAKVSKKGDSLLRYKICSAAIYALKNKRIRSLADQYFLRKDPTPQNKAKFRIKLADKLLRTAFTLLKYNRSFDMDTFLNPVKIACV

SEQ ID NO: 308640 - protein, 321 aa, unidentified
MSTKNCSEVFVGLDVSKAYVDVCALNVEGKLLWSERVRRTPAALKQLAERLDPQACVVLEATGGLEALPAAVLEAAGIPTSVENPAKIRHFALSHGLLEKSDRLDARVLAEFARERRPRPRRPPDPRVEALSKLVARRSQLVRLPAAERTRRRSETEPFCRQSLEQTILALSRQIDDCEQEIRQRIGACPELSARAKLLLSAPGVGEQTAYALLAWLPELGCFNRGEIAKLVGVAPLVKQSGRWRGRVMTLGGRARVRCSLYLAALGAVRRHGCYREFYLRLLDRGKAKKLALIAVARKLLLTLNQMLLTSSLWENSCDTA

SEQ ID NO: 308641 - protein, 358 aa, unidentified
MNILAIDLGKFNSMVCIFDAATNEYRFQAVKTEREYLRTVLQSEAIDLVVMEACSCSGWVSDLCGELKLETLVCSTHEEAWRWRNVKRKTDKDDALKLARLAAVGQLKPTHVPSLETREYRGLIKYRKQLVATENRLKNSIRALFNRQGIVITRGERTWWSGRAQLEAYRQPIEQCELHELWKGQLDQQLTQLDQTQGLLSEIEKKLNAIAKQDHRVQRVQQIPGVGRVTAEAIVTALDDASRFRSARQVSAYAGLVPRQYQSGETDRRGRITKRGSRLLRTLLVECAWCSLKYNPWARATYERIHGGKQVRRKKAAVALARRILVVAWAMLRDESDYDPQKLSPLPSAGEVAAVRGG

SEQ ID NO: 308642 - protein, 363 aa, unidentified
MHSINNTELSSLEGTRGQFNGSKADIKLGIDVHQDFYVVVVQEGGTNPKPPQRFQKEAFLYWAAKLKQSGAQVHAVYEACGFGFGLQRNLTALGIHCYVVCPQKLDEQNRRVKTDGLDAKALCLKLDRFVQGNRDAMALVRVPTEQEEQLRAIHRQREQLVKARKQLEAQGRSLMVNHGIEPVQQWWKRRTFAALPVPHWMKELLGNSQPILLGLQEKIAALTIQLQSAADPKQPRGLGLMTSVIIDREIGDWNRFNNRRQVGSYTGLCPGEYSSGNTRLQSCVTKHGNPRLRAALVELAWRLVRFQPNYKPVRKWRETLRKGALATGAARKKAIVAVARQLAVDLWRIKTGRLRAEQLGLTI

SEQ ID NO: 308643 - protein, 382 aa, unidentified
MKRESQEEFAAFVGLDWADAKHDVCLQATGTERREFLILEHRPEAIDAWVHTLRTRFNGQPVAVCLELNKGPIVSALRQYDFLVLFPVNPLTVAKYREAFTPSRAKDDPTDAELQVELLLKHRDKRTPLAPQSAMMRTLAQLVEHRRRLVGDKVRLTHRLTSALKNYFPHVLQWFPDTDTVLFCDFLSRWPTLKAAQLARRTTLEAFFRAHHVRAAEVIASRIQAIKSALALTTDDGVITPNALLVQALIAQLRVTLQAIADCDTAIAQRAQEHPDFPLFDALPGAGAVFAPRLLVAFGEQRERFTSAEDLQKYAGIAPVTERSGKKSWGHWRLQCPTFLRQTFVEWAAASTRHSFWAQVYYQQQREKGKAHQAAVRALEPV

SEQ ID NO: 308644 - protein, 423 aa, unidentified
MFKIIKFNCCGLDVHKTWIYACIGITDANFRTEYFEARFSSFPKDLRRLAAWLQEHKCEEVCMESAGKYWIPVFNVLEETCKVTLAHPKYTKPQKGNKTDRKDARWICDLFMCGMIQPSFIPPPAIRHLRDLIRYRIKLTNMLTGEKNRAQNCLTVSNLKLDDVFADVFGKSARSITEYILSHPGEKFDVAPFVDKRCKTPIDQIQAAVDGAISPEQTIKLRECLNHIDELNAHRDRIETEILQLVESFSAQLALIRTVPGMDKDPMTAILILSEIGSDMSVFPTAKNLVSWAGCCPRNDKSAKHVKSTRIAQSGCYLKPLLVQVANALLHSNKHPEFTERYRRIKSHRGHKKAMIAICKMLLTAIWNILSTGEVYNPSGYLIQTPRPTNETKVLTQKQALELLRLRGFVIKDDPVEPEPLPA

SEQ ID NO: 308645 - protein, 324 aa, unidentified
MKRKVYVGMDVHKETIQIAYLTSNTKEMVKEQQIKHNEVHIKKFINKLKTEWNEIHCCYEAGVTGYPLYRYLKSLGVNCILVAPGKIPRQSSDKIKTDKRDAIKLARLLRSGDLESIHVPSEEDEAVRDYLRSRDSLRLDLGRNRQRLMKFLLRKGNVYSTTKYWTVSHYKWLNNLHFENEILHETFNDYYSRVRVQEENLKAMDQKIQEIAKSEAFRERVGILRCFRGVDYLTAMFLLSEVNDFRRFKTAGSFMSFLGLVPGEYSSGSKRKQTGITKTGSPRLRRILTEAAWQHRFPGTGSKIVAARRTGQPALVVALAEKLP

SEQ ID NO: 308646 - protein, 437 aa, unidentified
MSFSSENTRTKFYTIPLSCLSQECEIINPILKNCGGCDVHKSMVMSCILTGDFNEQPRKEIRDFGTMTKEILTMANWFLDNEVYDVAMESTGVYWKPIFNILESKGIKVVLVNARHIKNLPGRKTDIKDAQWIAELFRTGLISPSFIPPKEIRELRDLNRTRRKLVEEKTRIKNRIEKVLQDSNIKLSSVVSNVFGVSGRALISSLSDQTQLTPDDISSMVKGQLKNKVNQIGDAMEGKFSETNKFLLKQHLRHLDFLEISIAEIDLKIEENMMAFQTESELIQSIPGISKIAASSIIAEIGADMSRFPNEHHLSSWAAMCPGNNESAGKKKSGKTRKGNNYLKGILTECAWAASRTKDTELSAFYHRLVRKKGKKRALVALGHKMLIEIFRVLKSGNGYVEKGPEVIAKDTIKREEYFIRKLENMGYSIQKLEIPA

SEQ ID NO: 308647 - protein, 357 aa, unidentified
MGKSIKNLSSVTIVGLDIAKNVFQVHGVDAGGTSVVAKAVRRGQLLSFFASLPQCLVGIEACSSAHHWARSLIALGHQVKLIPPAYVKPYVRRNKNDAVDAAAICEAVGRPNMRFVPVRSVENQAQLMRHRARELLVGHRTRMLNALRGHLGEIGVVASQGVQNAYALKRLLADGCDDNGEVIVPDCVRRALAPLVHQIEAVDAEIAAIDEEIKTLVKVDETARRLMTIPGVGPITAQAIVATVRETSAFASGREFAASLGLTPRQNSTGGKERFGRITKMGDRYLRKLLVVGACATLRHRTGHNDALRVWADRLLARKPVKYKFKLTAVALANKVARIVFALMTRGGEYNELPISA

SEQ ID NO: 308648 - protein, 349 aa, unidentified
MVTLGTDAHKRSHTIVAADEQGRQLGQVTVTATPEGHLRALRWASRWPERCWAVEDCRHLSRRLERDLLAAGERVVRVPPKLMAGARRGARTRGKSDPIDALAVARATLREPDLPVACLEGVERQVRLLVDHREDLVAERTRIQQRLRWHLHELEPGWGIPAGALDRGVWLDRVQRRLAAHRGVVAELAGELVGRCRQLTERINQLEADLDRRVTPLAGHLRQVVGVGALGAAKLIGETGGVGRFRGSAQFAMPAGVAPIPVWSGNRTRHRLNRGGNRQLNAAIHRVAVTQLRAYGPAQALLARRIAAGNSKPEALRVLKRHLADVLYAAMCSDEQAGSTATAGQPAAA

SEQ ID NO: 308649 - protein, 332 aa, unidentified
MNMHPQGGVASRDQRPNAGIDVSKQHLEACWGTEGQRLVNDATGWDVLIAKFKEAEVDLVVIEATGGYERGLVWALQSAGITVARVNPRQARDFAKSMGALAKTDQVDARALRDFADVLARHKDRPRYITPLIDTQRQELAALMVRRRQLVDMRVAESNRLDQAGTRAARSIRSVLKTLDKQIAAIDHDVEDHMDRHFKQQRILLDSVKGVGPVTILTLTATLPELGSLGRRQIAKLVGVAPLADDSGPRKGKRRIWGGRSEVRAVVYMATLTAIRCNPTIKAFHSRLIAAGKPKKVAIVACMRKLLTILNAMLRDQAVWDAAKHVQTPKTA

SEQ ID NO: 308650 - protein, 325 aa, unidentified
MIHQVIGMDVSKETVDLSVYNGADHYCKTIKNTAKALLQFVKHYDSDQTHLVMESTGIYHLRLAMAAIEHGYAVSIVNPLIIKRYGEMKMRRAKTDRADAKLIAEFGYEQRPPLFKPASKERSQLMQILKGLEDLYQSKTQMRNRLEAYDYGLGIAPALRESISSVIKTIEEQIDKLTDELDDHVDKFYPKENAKMTSINGVGKKTSSTILAFYGGFENFENSKRVISYAGINPHPRQSGKSVNRGLSISKRGHSLIRKTLYMCSLSLVRCNPEYKEYYERLLAHGKAKKQALIAVSCKLLRQLFAVIKYNREWEPYYSLKYKPA

SEQ ID NO: 308651 - protein, 355 aa, unidentified
MTRIAQLEPTRTVGVDTHRDVHVAVALDQLGRRLGEIELATTRAGYQRLLAWAERFGAVEAFGIEGTGCYGAGLARHLGARKVLVIEVMRPNRQTRRRKGKSDPTDAEAAARAVLSAEAAGSAKAGDDLVEMIRVLRVARQTAIKARTQAINALRSLLVTAPPELRDELRALSTSRLVGKAARLRPGPLDSPLTASKLALRHLARRYQALEAEITSLDTHLAQLTAAASPRLLEAFGVGADTAGALLVAAGDNPERLRSEAAFSMLCGSSPINASSGKTNRHRLNRGGNRQANAALHRIVLVRMRYHQPTRTYIDRRTSEGKSKREIMRCLKRYVAREVYTALTQPGEQKLARAA

SEQ ID NO: 308652 - protein, 350 aa, unidentified
MLIGVDYHPSFQQIAVLVEETGECSERRLNHSDGEADKFYRDLQLRGVQIRVGMEATGYSRWFERLLAELGIEVWIGDPAEIKAKRVKKQKTDRQDAQLLLKLMMEDRFPRIWVPSPENRDVRQLLWHRHRLVQMRTRIMNQLQALAMNEGRRWKSKLWSEQGRAELEKLALAPWASRRRHELLELLDHMNPTIVELTAAAEQEARKRPEALRLMTHPGVGPLTALAYVLIIGTPSRFHRGKQIGNYVGMIPSEDSSGGKQRLGHISKQGNSLLRFLLVEAAQAAVRNNPDWRRRYMHLAMRRHKSIAKVAMGRRLGVRLYWMWRNGCAYSPSMEFGSYAGQLGTGHGVK

SEQ ID NO: 308653 - protein, 348 aa, unidentified
MSISMIGLDIAKSVFQLHGIDASGMVRLKRKLRRSELIAFFEQQPRCIVVMEACGAAHHWARVLSGLGHEVKLIASEAVKPFVKRGKKNDAADAAAICAAALKPDATFVAPKSLEQQGALTLHSARALLVKQQTMLVNAIRGLATEFGLVVPKGMSKLEELAALVEADTAIPQQARGAFSGLLEHWHATADRIKALEVEIVAHARQDDMARRLATVPGIGPITASLIAATVGDSVKSFKSARHFGAWLGLVPRQHSTGGKTRLGRITKTGNREIRKLLVLGATSMVRRAEQWNSAAGAWVRGLLVRRPVRSVTVALANKMARVAWALMARNEVYRAKGGIAAVAAATT

SEQ ID NO: 308654 - protein, 353 aa, unidentified
MTDIATHNDRIATIGMDLGKRSFHLIGMDVHGKVIMRQQLSRGRFERHMTNLQPCLVGVEACAGAHHIGRRLSAFGHKVRLIPAQYVKPFRKGQKNDYRDAEAIAEAVQRPTMRFVPIKSAEQLDLQALHRIRSRLVGHRTAVINQLRGFLLECGVVVPQGPAMLRKVLPSVLAQRTDVLSPRMVRLIEELADDWRRLDDRVDAVTGEVQALARQDEGCRRLMSVPGIGALTASAVVATIGNGAAFTKGRDFGAWLGLVPKQLSTGDRTILGRLSKRGNKYMRTLFIIGARAVLAKPGSWAKFGLEGWLAAAAKRLHHNVLAAALANKLARIAWSVLYHGRSFARDFELQSVS

SEQ ID NO: 308655 - protein, 296 aa, unidentified
MLIIGCDFHPRYQQIAMMDTETGELVERRLEHENGEARAFYASLPKPVLVGMEAPGYAQWFGRMLAEFGHELWIGHASEIRAGVVRKQKTDARDAQHLLRLLLEKRFPRIWIPSPAERDARQLLRHRYKLVCFRVSVKNQLHGLAMSQGVCRKKKLFTAQGREELEKLSLGPWGSRRRQELLGMLDQLNPVIDELDRAVRQEAESRADAARLMIHPGVGPVTALAFVLTLGPVARFRRSKQVVSYLGLNPKERSSGDKQHTYAISKQGRRNAVELARGRAVNFSESRREPHKFGQR

SEQ ID NO: 308656 - protein, 400 aa, unidentified
MMTPDDIDVWVGLDVGKSAHHAHALDHDGNTLYDKPLKQDEKAIRTMLGKLSKHGRVLLVVDQPNTIGSLPLTVARNMGIAVAYLPGTAMRRTAQLLPGDAKTDRRDAHVIAWAALKLPETLRDAGPDDETLAALKLLAGHDEDLAHESTRHVNRLRSLLLQTHPAFERALKGERITRDATLALLERYGGPMGVKQAGIEDVKDWAKSNGLRAGRIIDDMFKAIGEQTVTVPGTLMAETIIPSIAHDIKTIRDRRREVGRQVEKLLEDHPLLTVLTSMPGIGVRTASNILLGIGGDIANFKSSAHLAAYAGISPVTGQSGTSIKGERPSRRGNKRLKNALWQTAFVASTKHPPSVAYYKRKREQGKHHNAAIICLARRRCDVIYSMLKNGTLYQEPALVA

SEQ ID NO: 308657 - protein, 350 aa, unidentified
MKIVGCDFHPKWQQVAVFDAETGEINEEKLLHGDGEAERFYRALPAPALVGMEACGNSQWFVELLGRLGHQVWIGDAAQIRASYVRKQKTDRRDAGHILRLLVEDRFPRLWMPSAEQRDLRQLLIHRHKLVEIRTRVKNSLLHLAMNRGLEKPGRRSRVRGRAFYEQLPLEGWACRRREDLLQLLAGLEGQIGVLDEAVMAAASEHEQARLLMTQPGVGPVTALAFAVTIGEAGRFAHSGQVASYLGLIPREHSSGGKQRLGAITKQGNRFVRQLLVEAVQTTCRLDEGFRREYRARCHRKPKGVAKVAAARKLAVRLYWMLKQNVSYPEIARIESSSGVPLAARQRPMG

SEQ ID NO: 308658 - protein, 348 aa, unidentified
MDHIGIDVHKRESQIYILAEGGEVIEQRIRTEPERFAAVLGSRPRARILIEASTESEWVARCLEALGHEVIVADPNFAPMYATRSRKVKTDRRDARALAEACLLGAYRPAHRLSDPQRHIRGRLLVRDALVRTRTRYIAVIRALLRQQGYRVPSGSAEHFIDRVQALPLPGRLRSVVAPLLALMRPLNQQLAYCDERIEHLAVQDPRVPRLRSVPSVGPVTAAAFLAAIDDVERFRHAHQLEAYLGLVPREYSSGETQRRGPITKAGHSRTRWLLIQVAVSILRRHPPQAEELRAWALRIAARRGKHVAVVALARRVAGILYALLRDGTVYTPRRPAALPHPVAALHV

SEQ ID NO: 308659 - protein, 354 aa, unidentified
MSQTLKAMIAVVGIDIGKNSFHVVGLDQRGAIVLRQKWSRGQVEARFANMPPCLIGMEACVGAHHLSRRLKALGHDARLMPARYVRPYSKGQKNDFRDAEAIAEAVQRPTMKFVATKTADQLDLQALHRVRERLVSQRTGIINQIRAFLLERGVAVRQGLRFLRAELPRILATPPDVLSPRMVRVIEGLAGDWRRLDERVESLSSEIEAVARQDTGCERLMSVPGIGPIISSAMVAAIGTGDVFSKGRDFAAWLGLVPRQISTGDRTILGKISKRGNRYLRVLFVQAAWVVLIKPKTWERHGLKPWIEAARKRLHRNVLAIALANKLARIAWSVLARGCDFEVRKVDEAAAQPA

SEQ ID NO: 308660 - protein, 363 aa, unidentified
MTSITTTTGPVTGGVDTHGETHHAAVLDQVGRELGDREFPTTPSGYRALLAWLAGHGQLDRVGVEGTGAYGAALARHLRAGGVTVVEVDRPDRKARRASGKSDPLDAYAAARAALSRRATGAGKSRDGRVEAIRALRIARCSAVKARAAATNQLKSLLVSGPAELREQLRHLSTTVLITTCANLRPTSDLADPVQATKAALRRLARRHQNLSKEITEADVDLKNLVTAAAPRLLALRGVGIEVAGQLLTTAGDNPDRLRSEAAFAHLCGVAPVPASSGRTHRHRLNRGGGRAANNALYIVVLSRLCYDARTREYVDRRTKEGLSKPEIIRCLKRYVAREIFTLLTARTASEQSHQVLPMSTVA

SEQ ID NO: 308661 - protein, 348 aa, unidentified
MLADQLDYMVGVDPHRDSHALAVVHVVSGAVVFEANIAACSEGYADALRLVEEHGAGRRAFAIEGTGSYGAGLTRFLAGRGERVLEVGRLRRERRSGGKTDALDAVRAARSVLAQERPATPRAGGERQALQALVAAREGAVNAKRAGLCQLRDLLITTPEPLRSELRPLTRARLLQRLAATRPDGRRDPELRGSMLALRSIARRILQLTAEERELAREIETITRKLAPQLLDQPGVGPHAAAQLILSWSHRGRIGSEAAFARLAGAAPIPASSGQTIRYRLDRSGDRKLNRALHMILVTRKRSHPATIAYIERRLQEGKTRREANRCLKRYLARNLYRLLEHGAPPTT

SEQ ID NO: 308662 - protein, 364 aa, unidentified
MEAAGRFVGIDLGKRTYEMCLVDRKGKITRTNGKTDFKGLGKLCEKLSAEDLVAIEACNLAMRIERQIRQTVGCKVLVLNPGKLAIIYMSTRKTDKEDSLKLAKLLKNHDEDELPIVTPPTDEEWERRKLLSEYKSLKGMRTKEINRLHAIFEHAGFTQFKRKDMCCEKNRANILPLLKGYEKEEAERLVERLTLLERQIGLLVQKINAEVESDEKAQLAMTVPGIGPITALAYVAYMGDLSRFDNPHQVSNFIGFVPKVDNSCTIRHSGRTTKNGNALLRSMLVQAAWGAVRSKDGGALRDKYKYMSQTKGIGKGKSIVTTARKLGELLYMLLKTNTEYKPQKFILPEVQISKLADEALAVNL

SEQ ID NO: 308663 - protein, 340 aa, unidentified
MRRLYAAFDLHASNSYLAIMDEGGKRILSRKLPNDPERILTALSPHRDKIAGIAVESTYNWYWLVDMLMAEGYGVHLANPSAIRKYKGLKHSDDRHDACWLAEMLRLGILPEGYIYPKQQRGVRDLLRKRGHLVRLRTSLIISLQHIITRTCAVRVSVNDVKRLREDRISPLLDGNEDVLLAGSISKETIDHLSGQIRRIEKAVEGKVKFSSAYVRLPSIPGVGKILALTITLETGPISRFPTVGDYVSYCRKVGSAWVSNGKKKDKGNKKSGNRYLAWAYSEAAELARRYDEKALAFYQRKAQATNFMVAHQALSHKLARAAYYIMRDDVPFMAEKLFG

SEQ ID NO: 308664 - protein, 426 aa, unidentified
MVENEYRIYVGIDWATEAHQACVLDSRGRILAERSFAHTGDAIAAFAQWLHEVAGDEPGQVAIAIEIPRGAVVETLVERGFHVYAINPKQLDRFRDRHSVAGAKDDRRDAFVLGDSVRTDRACFRRVRLDDPLVIQLRELSRVHDDLGREANQLTNRLREQLHRYYSQALALCPSADEPWLWALLELAPSPSVARHLRPQRVERLLRQHRIRRLSAHEVVAALRACALQVAPGVVEAASEHIALLLPRLRLLHTQRQGCGVRLEALLDKLGAAEDDDGQQGEHRDVEILRSLPGVGRVVAATVLAEASAALAERDYQALRAYAGIAPVTKQSGKRRMVLMRYACNGRLRNALYHWARVAAMRDPSSKTYYAGLRQRGHSYARALRSVADRLLRVLIAMLKHGSLFDSARTRPSVGAAAPEEVVCTS

SEQ ID NO: 308665 - protein, 480 aa, unidentified
MANRKISTFERLQRGKLSRKQCKELGRRLQSPNPGLEIIHRNAAGIDVGSGSHFVAVPPDRDTQPIREFGSWTAALHEMAAWLKSCAIDTVVVQATGVYWVVLSDVLEGAGLKVWVVNAQGTKNLPGRKSDVQECEWLRKLHTYGLLRNSYRPPEEIRGLRDLWRLRERLVADAGRAVQQMQKALTGMNLQLTNALSDISGVSGMAIIRAIVGGERDPWKLAQLRQPGVRASEAEIAENLRGTWREELLFELRQVVEHYQLLEKRMAAMPSREVATKGSPVAEKEEVPEGKRRGRKPKTKVKPPPKNAPAFDIGRELTRLLGVDLRTIDGVNIHIAQTVYTEVGPDLSAFPTEGNFTSWLGLTPMRSVSGGKVIKHEKKRVKNRLADALRMGASTLERSQSYLGARFRYLKARLDGRRAVKAMARYLACLIYRLMTKGQAWIDRGEAYFEQKKAERELRTLQNRAQKMGLQLVPLATVNA

SEQ ID NO: 308666 - protein, 386 aa, unidentified
MQKLNDLSRCLTPLEPDGTLIAVIEMSQSSWLVAGIVPGIERQPLKKPKVDESTLLNLLHRWREEAEKAGHRIKRISVAFEAGRDGFWLARWLRARDIEAHVIHASSVAVSREHRRAKTDRLDTELLKRAFLGWLRGERDHCKMVAIPTTKDEDAKRPNRERESLVGEQTRIVNRMKATLIRLGIRGFNPKLKKAAGRLEDLRTPEDEPIPPNTMAELRRDMDRRRLVSDQIRQIEEARLDRLKQAPDDGPHAMLRLLARVIGVGIETADMLVQEVLARNMRDRRAIARYAGLTGSPDESGTKRREKGLARSGNARVRRGMIQLAWRFLIFQKNSTLAQWFRARTENARGTRKLMIVALARKLLIALWRLVREGVVPDGVVLRPTQ

SEQ ID NO: 308667 - protein, 355 aa, unidentified
MSQEKYIGMDVHQATISVAVMDGDGKLIMECLLETKAATILEFIQGLRGTLSLTFEEGTSASWLHDLLKPHVSRLVVCDPRKAALLKQGNKSDRIDARKLAELLRTNQLTPVYHGEHGIRTLKELGRSYLTVSKDVTRTMNRIKSLYRSWAIPCPGTTVYAPSHRLEWLAKIVQPGVRVRAQHLYEQLDNLQPIRQQARRELLLESHKHPAVKLLRQIPSIGPIRAALLVALLQTPHRFRSKRQLWAYSGFAVETHDSGEYRYVRGKVQRNRERITVRGLNDNHNPDLKNLFKGAAISASTRPGPLHDFYVARVAKGMRPTMARLTLARKVAAITLTMWKKGVSFDPQQLSRQSV

SEQ ID NO: 308668 - protein, 466 aa, unidentified
MKKNDKKKVKSRKKRSKKRDLNSLPTLNINAAGVDIGSEEHWVAVPEDRDESPVRRFGCFTSDLHAMADWLKKCGIDTVAMESTGVYWVPLFQILETQGFDVKLVNARHVKNVPGRKTDVEDCQWLQQLHTYGLLSGSFRPDDSICVLRSYWRHRDNLIRYAAAHVQHMQKALTEMNIQLHKVISDITGVTGMRIIRAILDGERNLVKLAQMKDPRIKKSKETIAKALEGDYRPEHLFALKQAVELYFFYHHQIDACNHEIEDYLKQLESEIDSDPDVKTMKRNKQISKNEPSFDLASHLYHITGMDFTKIDGLNVLTVQTILSEVGLNPEAFGTQKRFASWLGLCPENRITGGNIKSVRTRKVINRAAKAFRLAANSLKNSSSALGGYYRRMRARLGPPKAITATAHKIARIFFHLWKNGGTYQDLGADYYEQKYKDRVIKNMKKRAKQLGFQISLQPIVNAEVS

SEQ ID NO: 308669 - protein, 375 aa, unidentified
MAKSGILAKSQDLQESFGATTGQITIGIDLGDRFSHCCVLGPDGTVLTEGRVVSTPEGMTRHFQQLPPTRIAFEVGSHSRWVSELLTSWGHEVILANPRNLRLISDSIRKSDRVDAQTLARLARIDPQLLSPIVHSNPETYSHMTLLKSRDLLVRTRTRLTNAIRGVMKAVGLRLPSAGGTTFPSKTALLVPDELKPSLLPLLETISHLNKQIYQFDKAIDRVAREKYPQTSRLRQISGVGPVTSLQYVLTIGDPNRFAHSRDVGAYLGLTPRRRQSGDIDQQLRIGKAGNRRLRSLLVQCAQYLLGRFGPDTDLKRWGARMTERGGKNAKKRAIVAVARKLAVLLHRLWVTGDTYRPLYNAMGWSPGSALPQAS

SEQ ID NO: 308670 - protein, 424 aa, unidentified
MRFIGLDVHRDFCEVAIAEAGVVRLAGRVQTEPAALELFAQSLGGDDEVALEATGNALEIARIIEPHVGRVVLANPKAVKGITRAGAKTDKIDARTLAQLLAGGFLPAVWLPDEQTRILRRRISARAQLVRQRTRAKNQVHATLIRNLKGRPPVSDLFGARGRRWLAAQDLPADEQETVAACLRQIEFLDSEIALIDRALAEQVLASAEMRRLLTLPGVNFVTAAALMAAIGEIRRFPTARQLVSYLGLDPRVHQSGTEPARHGRISKQGRGETRHMLVEAAWHATRAPGPLRAFHQRVAVRRGGNIATVAVARKLAVIAWHMLSRGEDYAFARPSLTREKLRRLELMTGAKHQKGKRIGVFATKEQHRLDKELAAQAELAYRRLVQDWQPAINKGAGAAPGRASRRPSSGQAARQETAPPPAL

SEQ ID NO: 308671 - protein, 312 aa, unidentified
MTNITIGADISKDHIDLHMLPEGQTLKVGNDRKGFAAIVRWIGSKAVQRIVYEPTGPYHKAFERFMVVQGLPLSKVNPRLARRFCEATGRLAKTDRIDAGLLARYGALLQTRILQDNTQVLNDLKELHMARLALIKDRTAAKNRAKTLSNPLLKKHNADRLRQIERQITAIDDAITALIAKDASLKARFDILLSIPGVSQITGFTLLIEMPELGQLDEKAVAALAGLAPMNRQSGRWTGRASIAGGRAIVRQSLYMPALVASRFNEDLKAKYDQLKAAGKPPKVAITAIMRKLIVLANALLRKNQKWTPKHP

SEQ ID NO: 308672 - protein, 333 aa, unidentified
MGVDTHLDFHVALDGLGRRLGELTMPTSAKGYESLLSWAQRFGPVRSAGLKGTGSYGTGLAQHLRAKGVEALEVQRPKRRHLRRKGKSDPIDAEAAAVLAGEAVGVPKSGDGRVESIRTLRAVRRSAVKARTQAATQLWSLVVTAPVGLRQRLRGLSTKVLASRFRVGVRPNSPEEATRFALRSAARRYRSLSEELAELDAQLARLVAEVAPDLLALPGVGTDHAATLLIVAGDNPQRLRSEASLASLCGVSPVEASSGKVVRHRLNRGGSRDANRALHLICVVRMRIDERTRRYVARRTAEGKSRREIMRCLKRYVAREVHHLLASTPPPLR

SEQ ID NO: 308673 - protein, 419 aa, unidentified
MRNSNTKKLKRISEKTLLVTVDMGKVRHTGYYRFPDGTEGKTFEFFNSRKGFEEFWWRICQAKRSLNLTDVVIGFESTGPYAEPLLHFLRKRNVRLVQVNPLHTKRLKELQGNSPNKTDKKDPKIIADIIELGHALTVIIPEGTVAELRRLTQARERSIQRMGILLNQLRDLVFLIFPEFMPVMKDITLKSTQYLLKNYPRPQDIGKEGAESLTQILKKVSRGRLGRERAEALYHAAMDSVGIIEGHDSIVLEIKEIISTIEGIERFVSEIESLMSKHLKEVPYSRFILSIKGIGEITAAGLIGEMGDFKKYRTVSEVIKHAGLDLFEISSGKHKGKRRISKRGRPLLRKLLFFASINVVRKGGILHKQYQHHLKKGMPKIKALVAISRKLLSIIFALVRDHSVYIARYTKTQQLKEAA

SEQ ID NO: 308674 - protein, 345 aa, unidentified
MEQISRIGMDTSKHFFQLHGVNAAEKVVLRKKLRRKEMVAFFKALAPTVIGTEACGAAHYLARLLGSFGHEVKLIAPQLVKPYVKRGKNDGADAEALCEAMSRPTMRFVPVKTAEQQAALMMVGLRDRLIHNCTQLSNAIRGYAAEFGFSAAKGKAHLVPLLERIQADESVPVLARELFAAQAEEYARLQAQIDAVDAKLRAWHKADESSRRLVKIPGVGPIGAVLLMLKTPAPELFRSSRQFAAWIGLTPKDHSTAGKVRLGGITRAGDEALRSVLVVGATSIVQHVRRGGRGSPWIVDLLKRKPPKLAAVALANKMARIAWKLMITGESYVAKSVPAALANAT

SEQ ID NO: 308675 - protein, 315 aa, unidentified
MENSLPQTVGIDISKATLDVFAHPTGCERQFPNSAKGHKELISWLAQWQIERIAYEATGAYHRQLEQALTDLPCVKLNPARARRFAQAAGTLAKTDKIDAAILARMATTLQPPIRPATTPQQARLAELISARDGLIRDKIAIQNQAKNLTVPLLKRQYKHRLAQIDRHIGQVDAEIAAGIAADPALARRHQIISSIAGVGIRTADQLVATMPELGALDPKQAASLAGLAPVARQSGQWKGRSFIQGGRANVRRALYMPALVAARYNPDLKAKYQSLIDAGKPPKVAVVTLMRKLIVMANALIKADRLWVADRACA

SEQ ID NO: 308676 - protein, 392 aa, unidentified
MIYVGIDIAKDKHDCFIINSDGEILFHTFTISNNHEGFNTLFQRIESVSDDFTKVKVGLEAIGHYSYNLLGFLLDKGLPTYVINPLHTNLYRKSLSLRKTKTDKVDSRTIATMIMSDMNLKSYSDISYYNEELKSLTRYRFDKVKERAKLKTSVSRLVNILFPELEKLVPSLHLSSVYALLSEFPGAAQIAASHLTKLSNLLSQASKGRYGKETAILFRETARSSIGSVMPAKSLELKHTIKLIQELTAEIDEIEAAIKQIMDEEIHSPILTIPGISYRMGAMILAEIGDFNRFDSADQILAYAGMSPSTYQSGQLNNCYSHMEKRGSRYLRYALYNATKYVCQWDESFSAYLAKKRSEGKHYNVALSHATKKLVRLIFAMEKSGRTYQPAA

SEQ ID NO: 308677 - protein, 370 aa, unidentified
MKQLTATKSSSALLECTVIASDLAKRVFQVAGENRLGQVIYEDRIRSREAFAAFLRNLPAGVTVLMETGPGAQAWARQLLGQGHTARILPAQHVATHRSGHKNDRNDALAILRAGHDSQIKAVPIKSVQALSMQALHRARSGYVGRRTALSNQMRGLLLEHGIAMGKGDACLVQGVSRAIADVNQPVPEVLRELLAELLGEWEQLGVRIEALTGKLKASASQDPKARQLMTVRGIGPVIATAVIAKQVEPGRFHNARDFAAYFGVAPNQDSSGEKKRLGKMSKRGDGYLRSMMVEGAQAVLRALDGQSQQPDDRRLQRWMSRHGRKGAAIRLANRNFRIVWAMLQNDQNYKRQMPRRAELEDMQEVAMNG

SEQ ID NO: 308678 - protein, 404 aa, unidentified
MIDIEIIFGIDVSKHSSNVAILADDSVIKEFKITNDRIGYETLDDALNSFKSPKVIFESSGIYSRSIRAFLQRKNWIYTEINPLAAKKDMDGFRHNKNDQLDAVALATAMAHYHYQSTFREAGVYEELHDLERTYQEFNEDLVRAKNRLHKNLQLTFPEVEQFISTTDGTLYWHVVQQFPHPTFVLETKLSELAQLILKATLKNMSEKRALGLAEHLKELANKSAPAVSSDACAVSSVVYLAGEVERLNDKKDEIIREMSQISVSLNEIPILQSIPGFGIKTAVCLLAELGDISRFHSSNAINAYIGIDLIQYQSGDYEMGQHIRKRGNSYARKILFKAVLNMVCAAKYHPSNVSILYQRKKQSSSETHTKKIAIAAMGRLIRTIYHLIKNNELYDSRKCLPQH

SEQ ID NO: 308679 - protein, 426 aa, unidentified
MFSESRDDEQIIERVAALDIGKAELVCCVRLPARDGGRRRVQEVSTHSTMVTSLSELANRLVELGVERVVMEATSDYWRAPFYLFEAHGLSPWLVNAKDVRHLPGRPKTDVLDAVWLCKVAERQMLRPSFVPDRNIRGLRDLTRYRADLVEVRNAEKNRVEKLLEKACIKISVVASDIFGVSGRAMMSAMIAGERDPKVLAELARARMRSKIGLLEQAFAGLSVGTFNDHHRFLLSRMLDRVDQADADIAAVDEQIETQLAPFGDAVARLDEIPGIGRSAAAIIIAEIGVDMTRFPTSGHLASWAKFAPGINASAGKETGNGSTGHGNRYLARVLGETAITASRSDTFLGARYRRIARRRGKKKAIVATGRSQLVIIWHLLSKPEGSYHDLGADHYDRHINTDAKRRNHVRSLEALGYKVKLEPAA

SEQ ID NO: 308680 - protein, 345 aa, unidentified
MLIIGCDFHPGFQQVAIFDKQTGEIRAKRLPHPEPARAFYGSLSEPALVGMEACGYTQWFEDMLAEMGHELWLGDAAHIRASVVRRQKTDERDAEHILSLLLEERFPRLWVPTAEQRDLRQLLLHRHHLVRSRTQVKNQLQAMALNQGVQKKRKLWTEAGRAELQKLALPAYTAARRDECLQRLDYLDEQIRQLSRQVAGEAERDERARLLMTHPGVGPQTALAFVLTIGEVGRFENAKKVASYVGLIPAEYSSGGKQRLGRISKQGSPLLRFLLVEAAQTAARFDPTLKRMYVRLCMRRSRGQAKVAVARRLATRLYWMLRAGKNYAQLTASGAGEPVSSRGAA

SEQ ID NO: 308681 - protein, 338 aa, unidentified
MTQILSFVGVDIASASFMACAGAAPWKVTVKPMQFDNVEDGFVSFLDWLKEHNLTTEHTVVCMEATGVYSEGLAYFLYASGYTVAVEPPLSIQRKFPVNASKTDELDCQYIAEYACRYADKLSFWKPRAEILEQVKVLLTTRQHFSVQLTGHKNALHAASRKQVSSDVAKRLHQEMIEQIGKHIKAIDQEIRRLIDSDPTFKQTLLLLLSVPGVGLQLATHLLIAMQDTSDPKTLAAFIGICPIKHESGTSVYSPPTSRHYGPSVLRKLLYLAACSVRTHQKSFQQYFFRKVAEGKHKKLVLNNIQNKILKIACAVVRSQKPYIPNYVSVSPMVLKNA

SEQ ID NO: 308682 - protein, 373 aa, unidentified
MKKRSSPQKSQKVAVKAKVAQEHVTIGMDLGDKTSRYCMLGNEGEILREGQVATAKTGIVETFGSLGRVRIAIEVGTHSPWVSRLLLKLGHEVIVANPRQVKLITESSRKDDRLDAQTLARLARIDPQLLRPIQHRSEKAQGALMIIRVRAALVAARTSLVNTARGLVKSMGERLPQCDADQMGVARAVSLPPQLRQVLEPLLKEVESLTEKIKNGDREIEQIARKDYPETALLQQIGGVGPLIALTFILTIGDKNRFQKSRDVGCYVGLRPRRSDSGQSQPQLRITKEGDPYLRTMLVQGAQYIISRRGPDTDLKRWGLNLAKHGGKRGKKRAVVAVARKLGILLHRLWVTGEVYEPLRNHNARQEQKKAAA

SEQ ID NO: 308683 - protein, 348 aa, unidentified
MQIATIGLDIAKNVFQVHGVDASERVVVRRQLRRGQVLGFFKALPPCLVGMEACATAHYWARELTELGHQVRLMPAKDVKAYVKRNKNDAADAEAICEAVRRPTMRFVSVKTAEQQSRLMLHRARDLLMRQRTQLINALRAHLAELGIVAAQGREGVRELLRIIASERDARLPIDAHASLVVLAAGVQAVQTMIGSIEKRIVAQHRSDEASKRLRSVPGIGIVGATAIAATIPDPKIFRSGRDFAAWIGLVPRQDSTGGKQKLGPISKQGDQYLRRILVAGAHAMLKRARHQPEKYPWITRLLGRKPFGVVAVALANKMARVAWALLARGGTYRAPALAVAAQGSSQN

SEQ ID NO: 308684 - protein, 403 aa, unidentified
MSNRFAGLDWASRTHAACVIDEHGGVQLQLEVNHDAAGLAELCRRLRSASVTTVAIERPSGLIVDALLEAGFTVVPIHPNVVKATRPRYRSHGGKSDASDAYLLADLLRTDGHRFKPLAPQSDDIRALRALVRGRDDLVATRVQLANQLRTLLQSFWPGAAEIFADVDSPIALAFILRYPTPDSAARLGPKRMAAFCAQHAYSGRRSAQQLLERLHLAPAVTLGEMEIEAKGELASSLARTLDRLVDQIRLLTSRIEHHLSSIDDGRILMSFPRAGRVCAAQILAELGSVRERFDSDEHLAAEAGVAPVTYASGKSKAVTFRWACNHRLRAALTCMADNSRHANAWAASVYAKARARGCDHPHAVRILSRAWLRVIWRAWIDRKPYDPTRHGAAQLLLKTAGG

SEQ ID NO: 308685 - protein, 387 aa, unidentified
MSKKIVAPAYVAAMARAEADPASARFWVGLDVGFKSTAVCVVDVDGVVVHQVSMKSHATEIGRYLRRNFKSHVTLIGMETGGLSPHLAGKLREQGFQVAVLDALQVHRVLSVKRNKTDTNDARGIAEITRSGRDYLTEVYVKSNLCFEVRASLIMRDRLVKQRRETEAMIRGLVRVYGGRIEPGSDSPATFRERAIDQLCLIADTEAVDLRPRIIPLLDLCERFYIEAGRIERELDLLAASNPVCKRFMEIPGIGTITALSFYSAIEDPTRFRHVDDVAAYLGLTPRVYQSGESLTHGGISKMGNQLTRTHLVGAATVMLANTKSFSTLKDWGMKLSKRVGFNKAKVALARKLAIVMFSLWRDGTHFMAKAADVGPHRDLKQARATA

SEQ ID NO: 308686 - protein, 338 aa, unidentified
MPLYAGIDLHANNSYVAVINETDELVLGERQPNNLKSIRRTLSPYRQSLAGIAVESTFNWYWLIDGLEESGYAVHLVNTLAAQQYKGLKYTDDKTDARWLAHMLRLGILPTGWIYPKKKRAVRDLLRRRSQLVRQKTANRLGLRNVLERSGAKRLSGNALKRVSESDLTEWIEDPNVRLSMQASLAVIDTLSEQIERIERAVAEHAVLDNSYRLLTSIKGIGSTLASTIQYETGDIRRFASVGNYVSYCRLVRAERNSNQRVKGSGLRKNGNPYLSWAFHEAAHFAVRFQPEAQRWYEKKRSRTCPLVAIRALAHKLARAIYFMMRDQVPYEPKRLFR

SEQ ID NO: 308687 - protein, 352 aa, unidentified
MDTIYAKVAGLDVHQKFITVGVRCRLETGKLFAEVRTFGTMTRDLLALADYLEALGVTHVAMESTGVLWKPVWNILESRRFTLLLVNPRHVKQVPGRKSDVSDAEWIAQLLQCGLLQSSFVPKRKLRELRDLTRYRAQLVSEATRVANRVHKVLEDANIKLGAVASDVLGKSGRAMLWALNRGERDPEKLADLALGRLRAKIPELKLALEGHFSEHHRFLVEHLLRHLDDLEREIEQISQRIGERLPSILDDERLRRLDAIGGVNRMTIENVVAETGADMSQFPDEHHLSSWAGISPGNEESAGKRLRNRTTRKNRWLRRALIEAAWAAGRTKNSYLERVWKHAQLRQRRVA

SEQ ID NO: 308688 - protein, 354 aa, unidentified
MSSTQYIGMDVHTESISIAVRNSVGKLVMECVIETKASTILQFIDGLRGDLRVTFEEGTWATWLYDLMKPHVTEVVVCNTRKNTSNNGSKSDRIDARKLSEQLYMNNIKSVYHGEHGLRMLKELARSYLTITKDLTRVMNRLKALYRSWGIPCAGKEVYAPRHRAEWLAKISEAGVRRRAEHYYQQLDALRSLHQEARRDLLLEAKKHKPWKLLRLIPGIGPIRAAIVIAVMQTPHRFRTKRHLWTYSGLALETHDSAQYRVAEGQLERAKKPATVRGLNKDYNHDLKDIFKGAAMRASAAAGPMHDFYEALLAKGRKPTMARLTLARKIAAITLIVWKKEVRFDTNYLKPQAA

SEQ ID NO: 308689 - protein, 339 aa, unidentified
MQLYAGLDLHSRNTYIGIMDKEFKRVFGKRVSNKLPLILEALDPFRDRLKGIVVESTFNWYWLIDGLMDAGYQCVHLANPSAMKQYEGIKHTDDQHDAFFLAQMLILGILPQGYIYPKEERPVRDLARKRLFLVRHKTSHILSLQSLIARCCAKRVSANEIRKFTIEDLQQLLKEEHIVLSAQANLDTIGFLKQQIQRLEKAIQKKVKLNKAFQQLLTVPGIGLILAMTIMLEVGDIGRFAQVGNFASYSRCVSSQRLSDGKSKGHGNRKNGNRYLSWAFTEAAHLSRRYNENFRSYYNRKVAQANTSLATKALSNKLARICYYLMRDQVPFRKELLSH

SEQ ID NO: 308690 - protein, 435 aa, unidentified
MEEVTDEPLYRDRVCGIDIGKAGMAATIRVPSEKDPSRRASETREFGTIRREVLALADWLRCWQVPAVVMEATGDYWKPVFYRLEAEGFECVLADARQVKNLPGRPKRDPSDSRWLAACFERGAVTSCFVATPEFRLIREHTRYRRDLTAERTREKQRAEKLLESAAIKLSSVVTDLHGVTGRDIMDHLIAGERDPKALAQLARARARRKIGQLEEALEGAEFFTAHHAALLKTMLGRIDGIDAEIARISQAIEELLAPYEEQLQQAGSMPGWGRRAAQDAIAETGADMARFPTGAHLASWAGRTPLDNQSGNRKGKAKSKKGNRYLAAITGETAIAAGKTQTREGARYRRLARRRGKAKAQVAVGNTQMKVYHKLLSSPGMRYEDLGPDYYERQAAVRRQIAHHVGKLGALGFEVTLARIPEPEPDGTGDPQAA

SEQ ID NO: 308691 - protein, 492 aa, unidentified
MPERRLVGIDLGIASEHTARVLRGDTSEVCRRRCRPTQDSLGDLERAALAGAPTGTRLEVVIEPTGPAWRPVAVYFVRRGHLVYRVSSAKAADLRRFLSRHAKSNNIDALTLAKLPIVDLQGLIPLELGDREEAALDRRVRACDRLTRLASEHKTRLKDLVRQLLPQTPLQDALGQADLAVLERTGAEPHQLVRLGKARLTRLIATASRHQQGERRAQQWLDAAHLALELFADHPAVAFSDLAEEVKTEVRLLKATAAELQPHARARDQAYAHVDPDALARSLPGIGEVGAPSLVAALGRPGRFPSGRHARSFSGLTPRSSETGQTDRKGQPISKAGPNRLRTTLVLAADHARRQDPQLARAYYVQMTERGGCHTKALCVVAAKLVERARTVLQRRVPYELRDTDGRPISAEEARAIIAERWTVPEEVRRRRRSRKDKKGGKAPQQVVARHANASARSAATRRPSPPPIVAPELTPIKEVLATVAQRTGIRA

SEQ ID NO: 308692 - protein, 530 aa, unidentified
MLNQVRPSRRRRRKAKSNSRGRLSVQKPNGIIGPRVQKVGGERFAIVCVDPAKHCSEWMMADYFGNLLIEPQTLQHQGAFFKSAVKLIHEAQQAHDIQDTLVVVERTGNYYLAPKRAFASAGFETRVLHPFATKQYRVPADPGNKTDETDLYAQHRAAAAGFGLCEHELESPYRELRLRVRHRRNLVEKAAALACQIREHLHLAMPGYAKLFDRIFERQGPLTLAGCADSPAKLLELGQTGLVEHLRENKIRHQVRTVEKVLAWAAQAASDDIQDGPLHHAIWKELYELYQHFRLQISVLERELAGYLVNIPYVRLLAIPGINVVSAAELAGEMGPIEHYANANAITGRSGLYPSRYQSDGTDNDSGSIIRQANRRLRCVLMRIAENLACHCRYYRGQADVDESRGVDKRASRVKIVKRFSRLVIACVAGDEPMRHPCFQQADSILEKLRKFHQEHHTSLDVVLAELEKAVDQLPYNTRSREAEIVAGVLQQQTSRSGVHAIGDLLPAVLARLGINTESEKKTGIGPEPV

SEQ ID NO: 308693 - protein, 346 aa, unidentified
MYQDNLFAIDLSKSSHQGVLFSKSHQIKFNREFSTRKLIEWVSRQQPLTVAMEACSMSNHWARVFDRIGHRVLLVPTRTAARYRQGQKTNGTDAEGIGVAARQPTTKFVAPKPINLQELQALMRIREHLKDHRLATSNLIRSLLAEFGLLIPKGWKALRERVPELLEDAENELPMELRFQLRDQLDDYLELEKRFAEVDRACTQRVNQDEACHQLLQLEGIGPVNAAGLLLALGEQGDSFRNGRNASACIGATPKQHSTGDQVRIGHISKDCANKRLRANLIQGAWAVIQQLRKRDPRNGKEVWLKGVINRRGEGIAAVALVNKTIRVAWAMLHYGENFKLHPNMA

SEQ ID NO: 308694 - protein, 358 aa, unidentified
MQTKTIEQKVSQKRAPVQAGVTVKFGLDVHAAQITVCRQIDGQVPQPAQKLGWSECMEWFDAHVQAGAVVHSCYEAGPCGYGLHRKLTQLGVTNHVVVPQRWDEQNKRVKTDARDARELCDRLDRYVRGNTTAFSIVRVPTPEQEQRRALGRQRDTLVRERQRCVVRGHGLMLAQGVRAPEDWWKPKVWEQFCQDLPEWLRPQLLVWQEAALRLEAEVELWTHQVVTQAADQPIPKGVGALTHALLAGEVLDWQRFKNRRQVASYTGLCPSEHSSGERAHQGGITKHGNPRVRHHLVEAVWRLLQWQPDYPPLKKLRAATGKRTCKRLAVATARHLAIDLWRLNTNQCTAQKLGLKLA

SEQ ID NO: 308695 - protein, 345 aa, unidentified
MSNNIHFSCICGIDIAKKVMQVFKVTSDGVVTNTSVSRKDFLEHFRNIPPALIGMEACATSQQWGRELQGLGHTVKLLSPKAVKPYVKGLKNDRNDAEGIYRALIMGVREVSIKSTAVRDLSLLQTMRAKRQRDKVATINHIRGILAEYGLVMGKSVRAFLSNAGTLIARLKESETTSQLVISELEKLLKEVKEIVSRIEELESSIKKIASENKNYDLFRSAPGVGPITAAMMVVLLCNPTVFKNGRDFAAYLGLAPMSFGSGGRNQVTGIPSKYRCHNEARSLLVQCAHSITRLKYKSDWVASILSRKPKKVAIIAIANKLARQLWVMAKKGDKFEKRLVLAAV

SEQ ID NO: 308696 - protein, 336 aa, unidentified
MKGKFQHFLGIDVSKLKFDVCAITNPDHCVLNQEVFDQTRTGLKLLDRWIRKITGSRNPSEILICVENTGRYNDALVNFLYQKGYSVCLENAMLIKRSIRDKRAKNDQLDARNIALYTLEHARELELWQKPREVVETLKALLAARAFLVNTLKSMMVRHNELDFCSWGVKMPKSYMAGIKGLKKDINQVDQDIWKLICGDKDLLTMFTLLISIPAIGKVTAAHFICYTNEFKKVMNGKHLASYCGVVPFSVTSGTSVKKKPRIRPEANKILKTLLHLCAVTAIKMKGEFNFYYQRKKAEGKNGMMILNAIRNKLVLRMAAVVRTGQPYDQNYIYKK

SEQ ID NO: 308697 - protein, 323 aa, unidentified
MTHYVGIDVSKATLEVAEECSGKSKQYSNNPDGRSELARTLRAHDGQLHVVVEPTSTYHQHVVDVLMDEGISFSLINPSRSKAFSRLVGRRAKTDKVDARLLMELGKSQHLMSSHVPDRDQERLKSLRRYLGQLEEDRTALNNRLEAFGDSPWTSPAVIESLRRRLNDLEREIDHLRDDLDKMVSDTPNWRRSVELLETIPGIGRSSAVLIVSELPAVQHCASAKVWVAYCGVNPEPRESGNTHYSKLSRMGMARVRSSLYMPAVSALRWNAPIKALGERLQAKGKTGKLRVMAAMNKLLRQCFGVLRTGTPFDPVLNQRTSP

SEQ ID NO: 308698 - protein, 335 aa, unidentified
MTTYVGVDVHSSQSTIAVITSGQPKPSIITVRGGPEEVKKQLLRIEAPFDLCFEASCGYGKWFETLSSVARSVTVAHPGHLRLIYASKRKNDRVDASKLAKLLSVGAVPAVYVPNVQVREWRGLIRHRGRTVAKCTAVKNSIRALLREQAIKAPRGLWTKKGILWLTQLDLPETTRWRMDEHLEDLELLKQRVSRFTRQLDQIAARHPGVALLRTIPGVGTRTAEAFVAWVDDARRFARTSQIGDYFGLVPRQDASARRNHLGHITKDGPGCVRQLLVEAAWQGIRRSGVIRAKYEQFRRGDKERTKKAIVATAHWLARVMLSMLRSGEVWRQAE

SEQ ID NO: 308699 - protein, 376 aa, unidentified
MEHDSEAFIGIDTSKLKNAVAIAEGGRDGEVRYLGEIDTTDGATRKLVAKLAAKYRKVTFCYEAGPTGYGLYRLIKSLGHECSVVAPSLVPKKPGDHVKTNRRDAVGLARNLRAGELNEVWVPDTRHEAMRDLSRAREAAVDDLKSKRQQILSLLLRLGLHYSGKKTWGKSHRNWLASLKLGQREQRIVLEELFGAERQAQERVDRLVDAIIEAVPEWSLAKIVTALMAVRGIDLVAAVTIMAELGDLSRFASPRELMGFLGLVPSESSTGDSVKRGGITKAGNRRARRILVEASWSYRYPPRIGRDKLAKVAAAPEPVRAIAWKAQTRLSSRFRELSKKGKRPTIVATAVARELCGFIWAIHRAVTGPGGQQLVF

SEQ ID NO: 308700 - protein, 328 aa, unidentified
MQKKEFFIGIDVSKLTLDVAIYGMKAHIRISNSSEGFKQLLSWLKSFDIALCDCWVIMEYTGGYEYRLVQFCTSKDIAFTRVPGLQIKKSLGMQRGKNDKIDAKRIADYGFEKQAKIKAQPADNELTEKIKRFLTQRSGFINDRKANEHRMKEIQAMMDIKDSDELIKNYKQAVDFAQKMIDKAEEAIIDIVASDENMSRNYKLITTIPGIGKVNAWMTIAYTGNFTKFENGRQYAANGGVVPYDHTSGTSIKSKSRVSHMANKEIKAQLTMAAKASIAHDPEIKQYYERRAEKNKHHMSIINEVKFKLILRMFAVVNNQKDYVKKAA

SEQ ID NO: 308701 - protein, 377 aa, unidentified
MKNVRFIGLDVHAKTIAVAVAEVGGEVRSLGTIPNRPESVRRLIGKLGKASQLRVCYEAGPTGYVLYWQLTELGVACEVVAPTLVPVKAGDRVKTDRRDAEKLARCYRAGDLTGVWVPDAAHEALRDLVRARLAAKRDQLRARNRLSKFLLRQGRRAPEGTTPWTVKYLLWVKQQRFEHAAQEATRRDYLHEVEHVAERIVRLERSIDGAVESMPESQRAVIAGLQSLRGVAKISAVTLVSELGQISRFGSPRQLMGYAGMVSSEYSSGEKVRRGSISKAGNAHLRRIVTEAAWSYRHIPAVGPTLAARQREQSEAVKAMSWRAQHRLHGRYRALLAKGKTKQKVITAVGRELLGFIWAIGVELEATKATKEVRRAA

SEQ ID NO: 308702 - protein, 360 aa, unidentified
MFTERTSVGLDVHARSVAAAAIDGVTGELFQTRLTPSHDHIQSWLAALPGPVAVAYEAGPTGFGLARALDAAGIRCVVAAPSKLQRPSGDRVKTDARDAVHLARLLRLDEVAAVTVPTPATEAARDLVRAREDCRGDLMRARHRLSKLLLRQGIIYSDGQAWTGAHEAWLRRQHLEAAATRLAFESDFDAVLAVKARRDRLDAAITAMAADSEFTPVVRRLGCLRGVSTLTAFALAVEIGDWRRFTGNTIGSFVGLVPSEHSSGASRVQGSVTKTGNGHARRLLVEAAWHHRARYVAGKTMRDRWDLASPAARARGDEGNRRLHHRWVVFSERRKRHTVANVAVARELAGWCWSLAVMDD

SEQ ID NO: 308703 - protein, 351 aa, unidentified
MNYYTTETEFNCGIDLHSREMYACIMDRQGNKVVHTNITGNDFAYFLKKAAPYRHSMTVVSECTFNWYWLADACFEAKIPFVLAHALYLKHIHGGKNKNDRIDSEKLAHLLRSNLIPQAYAYPAERRPVRALLRQRMSYVWQRGSLMAHIATSQMAEGLKPASRRAGDRDEWMDRILIQYENPLHRLSASCEMDMIRAYDAQILKLEDEILKHAKGHEGNYYTLLNTVPGIGRILAMTIIYEMDTVKRFPSVGDFLSYSRLVKGSIASAGKFKGLAGGKMGNAYLRWAFGEAAVLGKGHHPLLSPYADRLIAKHGKFKGNAILASKLARCVYFMLQNGTAFDAEKLVSTTL

SEQ ID NO: 308704 - protein, 346 aa, unidentified
MLHAGLDLSRRRLDVCILSDDGELVARTAAPPDADGLAHLVAKVAVREQPIAAVIESMTGARFVRDVLADHGWQVQIADAHKVKGLAPLACKTDKIDAQVLARLSQLDLVPAIWLPDPETRSARELARFRLHLIKHRSSLKNRIHASLINFGKPCPVSDLFGVRGRQLLAELDVPERWRQTIEASLRVIDHLDAEVADLDKQLRSSGADHRYVPLLQTVPGIGWVLSYTIAAEIGDIARFATPAKLCGYTGLCPRVIQSGNSDRRGPLSKHGPPYLRWALLEATLNALRYPPYRERYERKKKQLGRQRGAKVAQVDLARRLTTAVWHMLTRNQPFAPAGAGFRLAA

SEQ ID NO: 308705 - protein, 342 aa, unidentified
MTHFAGLDVSTKTTAVCVITADGEVVLETSVATEPDAIAEVLRPYRRTLRKAGHETGSLAPWLHKGLQRLGVPIVCLEALHTRALLASQRNKTDQADALGIAQILRAGWFKSVHVKSDQAHRMRILLAHRRSLKRKALDLENALRHTLKAFGVKLHATGRKSMAAAIREATADDPLLARLSDGMLHARDVLLDEFERLSRMVTELAAGDEVCRRLMSVPGVGPVTALSFKAAVDDPSRFRRSRTLGAHFGLTPRRFQSGEVDISGHISKRGDGDVRTLLYEAAMSMLIRTRAHSALKSWGLKLAKSRGLKRACVALARRLASVLHHIWVDGSTFHFSQEAAA

SEQ ID NO: 308706 - protein, 350 aa, unidentified
MLIIGCDLHTRYQQIAMLDKETGEVVEHRLEHESGETRAFYASLPCGAVVGIEATTPAHWFERMLTEFHHALWVGDAAQIRAMSVRRQKHDPRDAWHLMDLMASGRFPRIWTPSPRERDLRQLLAHRDKLVRIRTAVKNQLHALALSQGLCRGHRLWSARGQAELQSLTLLPWAGRRRQDLRELLTPLDTTIAELDKAVAREAEAREEVKLLMTHPGVGPVVGLAFVLTLGAIERFPRSKQVVSYLGLNPREHSSGGRQRLGRISKQGNVMMRWLLVEAAQTAARFDPELHRRYHRLKFRRGSSLAKVAIARQLAVRLYWMLRNQKGYAQLVRMQGSPGSGVVDPGPSTN

SEQ ID NO: 308707 - protein, 345 aa, unidentified
MKTVYVGIDLGSKVCVGTARDSMGNILNSRSFGTSEKNLIDYVAGQKGKTRVLMEECELAGWVYRTLLPNAESVEVCDPKRNAWISRSERKDDRVDSRKLSEQLRIGSYSVIYHPEEDEMAAFKISVQHYDKTVKRSTKLKLQIKATLRGQGVMTTTGHVYGRTGREKAIEKVKHPAIREILVQDLELLDQLMKEKQQARSRVIRISKKFPVTERFKKIPGIGPILAAQFVAFVQNPHRFSKRRLWAFPRLGIAKRSSDGVNLGPERLSRSGNGSMKDLSRKAYEAAMRTRDPNGIKIFYGRSLSRTGDPNHARLNTQRKILAIMLAMWRDGTEYSDDLVLGKRA

SEQ ID NO: 308708 - protein, 427 aa, unidentified
MTYRIAAIDVHKKMLAVVVADVAGEGEYQFERRKFGATPDQLHLLAQWLCQQEVEEVVMESTAQYWKPVWGALEQYWQPARQKREGARKMSGKLHLCQAKSNRGRRGRKNDFADGERLIKRLVAQELVLSFVPDAEQRLWRTVTRRKYQLTRDKVRFQNQLESLLEQAHIKLSSLVSDLLGVSARRMLKAIAEGETDPAALAALADYRLRATPEQLRDALGACGQLHGVYRRLLKMALEELKLMEEQIEQLEQEASKLLQQHQNAVQRVAAVPGFGVDSAIQAIAEVGPEAAAFETYKNLSSWVGACPGEEESAGESKSTHSPKGNRTMRRLLNQAAHAAIKVKGSIFEMTFRRLLPRLKYQQAIWAIAHRLCRLLWKILHEGVRYEERGPAVSAKSKRTRTARMIKELKALGYRVEGGPLPAGTPA

SEQ ID NO: 308709 - protein, 401 aa, unidentified
MEIVHERCAGLDVHKKSVVACVITPGHKEVRTFGTMTRDLMGMADWLTSMGVTHVAMESTGVYWRAIFNLLEGNDFDLLVANPRYMRAVPGRKTDVKDAEWIADLLRHGLLRASFVPDKRQRKLRELVRYRKVIGQERARMVVRIEKALEGANIKLTSVASHVLSMSSRAMLDELIAGNQDTEAMAELARSNMRSKRAQLKEALVGNFGPHQKFMLESHLRLIDQLDAEIESLNRQIEARMRPFQVQLDLLDQIPGIGQRGAEQIIAEIGVDMSRFPSAAHLASWARLCPGMNESGGKRRNAAIGAGNLWVRSTLVEVALASVRSGRRQPNFFSARYHRLAARRGGKRAAIAVAHSILLAIYRMLKDGTHFEDLGPSHLDAKRRQAIAIRSVKPSRNSASR

SEQ ID NO: 308710 - protein, 377 aa, unidentified
MFNLPVFVGIDYHQKVVQVCVMDQQRKILANQSVGNDPEAVFRVVAPFGSNVHAAIEASTGSAEFAEILITHYKWSVELAHPGYVARMKQTPDKSDWTDAKLLADLTRAGYIPRVWLAPKHIRDLRDLVRYRHGLVEQRKQVKLRIRALLRNHRIVCPMSPWTNKGKHWLLKGKNIPSPTLLFLLQEHYDTIKHFDDKIAAVEEKMLSVVADDPVVKQLLRQAGIGFITAITLRAIIGQFDRFRNGKQLAHFCALCPRNDSSGGKTTTGGLIKAGDDLLRQVLIESAHRLIRFNPEWRTMADRLRANGKKTCVIVAAVANRWIRKLFYQMMESKSVGGSTVGFSRDMQKSVLEESSSGAGALPALTPESHFFDSAIP

SEQ ID NO: 308711 - protein, 341 aa, unidentified
MMIIGCDFHPRFQQIAYVDVETGEFCERRLSHPEEAERFYRSLAGTQVRIGLEATGNFSWFRRLINELCHEFLLGDPSAIRAASPRRQKTDKRDARHILRLLVEDRFPPVWPPPEENEELRQLMLHRYRLGRLRTRITNQLDSMAKNEGLLGSKNWSAERRRRIEALPLSGWYMRRRVDLLDLLDELEKRIEPLEKAVVEAAEKNQQACLLMTHPGVGPIVSLVYVLSIGDWKRFARSKELASYLGLIPAEESSADKRRLGHISKQGNTLLRWLLVQAAIGAQRSDPSWHRLYLRLSLNKHHGVAKVAIAHKLAVRLYWMLRSGQNYKQVMERGSHAGQPV

SEQ ID NO: 308712 - protein, 381 aa, unidentified
MTTAATHHEQSNTTEAMLFVAFELSEKTWKLGFTTGHGQKPRERTVTARHHEHVLDEIAQAKRRLGLPATAPVVSCYEAGREGFWLHRFLQAHGITNHVVDSSAIEVNRRRRRAKSDGLDVRKLLSMLMRYAQGERHVWQVVKVPAVEAEDQRHLHRDLETLKQERASTMTRIEGLLSSQGLRVTSLTKLPEQLEALRLWDGSPIPPGLRRRVLRVYAHYTFLSEQIAAVEAERRALLQTSQEASIEKVRQLMHLRGIGINGAWLLVMEFFGWRAFKNRREVGGLAGFTPTPYQSGESAREQGITKAGNRHVRWMTTELAWSWLRFQPDSALSVWFRTRFGGGGKRLRRIGIVAVARKLLIALWRFLETGVLPEGAGLKEG

SEQ ID NO: 308713 - protein, 340 aa, unidentified
MMKLYAAIDLHSNNSMLVILNENDRVVYEKRLPNELPIILAELAPHHASIQAIAVESTYNWYWLADGLIEAGYTVKLVNTAAVKVYDGLKYSGDEHDARHLAHLLRLGILPTGYIYPKKERAVRDLLRKRAQLVRCRTAQLLSIQSLVSRNRGKGISNDDIREFDEESIGQVCGGDSIRALAIKSNLAVLRCLDEQIVGLERVVLAQAKLKPAFKKLLTVDGIGNILAMTIMYEAGSMERFAKVGQFASYGRCVGSSRWSNGKKKGTGNRKNGNKYLGWALIEAANYAVRFNERIRCFYQRKEAKTNVVVARMAVAHKLARACYHVLKDQVPFEEARAFA

SEQ ID NO: 308714 - protein, 377 aa, unidentified
MKNVRFVGLDVHAETIAVAVAEATGEVRSLGMIPNRAESIGRLVRKLGKPEQLRVCYEAGPTGYVLYWQLSELGVKCEVVAPTLVPMKSGDRVKTDRRDAEKLARSYRAGDLTPVWVPDGAQEALRDLVRARWAAKRDQLRARHRLSKFLLRHGRRAPEGISAWTERYLQWVKTQISFAHHAQELTLSDYLHEVEHAAARVTRLERSIDAAIETLPLKLRAVIDALQSLRGIAQISAVSIVAEVGELSRFEHPRQLMGYSGAVCREHSSGPRIHRGPISKAGNAHLRRIVVEAAWAYRHRPAIGRTLAARQQRSNAPVIELAWKAQQRLHRRYARLMARGKNKQQTITAVGRELLGFIWAIGIHVEQELSAPVRRTA

SEQ ID NO: 308715 - protein, 405 aa, unidentified
MYSSFVGIDIGKWNHQAAFLEVSGKETARSLAFQNTSEGFQSLLDSLAPFDKGQTVIGLEATGHYWLALFSFLVDNGWTVKVINPMQSDALRKMNIRKAKTDRKDCVVIADVLRFGRYTETVLPDEDLLQLRELSRCRVAHVELLGDLKRRVLGILDRVFPEFASCFSTVFGAAPTELLQECTDPEELADYDIDKLIKLLEKESRGRHSREKAEELKAKASRSVGTRFGRDALKFELKMLLEQLDFIKGQVKEFDKFLKKLMKNHELIYTIPGISVTLGSAILGEIGDVKRFGTPQQLQAFAGMDPSVTQSGNFQGTQAKMSKRGSPYLRRAVYLAANAARRFDPVFKDFYDRMIARGKHPKQALAAVGTKLLRVIHAVLTSQKPYNPQKLLTPLDLQSKRNSRG

SEQ ID NO: 308716 - protein, 368 aa, unidentified
MNKRTYVGLDVHARSVKGCAIDRETGEILRQNLAANDAGITEWVATLAGPVLVVYEAGPTGFGLARCLAASGIECVVAAPSKLQRPSGDRVKTDARDAEHLARLALLGQISPVRVPAPSQEAARDLVRAREDVRADLMRARHRVSKLLLRHGLVYSGGHAWTDAHHTWLHRQHFDDPALQAAYEAGLETAELTLDRRNRLDAKITAMAATEPYAPVVRALMCLRGISVLTAFGLAVEVGDWTRFTGSTIGAYLGLVPSEHSSGASRSQGGITETGNTHARRLLVEAAWHHRRPYTNASRDMRSRWDAADEASRVRGHQGNHRLHHKWEQFEARHKRRVIANVAVARELAGWCWSLAAPVQQEQPWTNK

SEQ ID NO: 308717 - protein, 319 aa, unidentified
MGAISFQQIVKVGCGIDVHQKLIVASIRRSDAEVETREFTAYTSSLTSLRDWCKQSGVTHVAMESTGVYWKPVFNILEEDFEILLVNARHVKNVPGHKTDKKDSRWLSKLLLSGLLKGSFIPPRDIRDLRDLVRYRKKVVAQAAADKNRIIKILEDGNIKLSSVLSNVDGSVGSKIIDKMIEGVTDVDELMKFYHGKIKVDRVEFRLALEGHLTAHHRLMLQIYKDSISDKERQIKRLDAEIEKATKAYQVEIDLLQTIPGVGKDSAITIISETGVDMDKFPDEHHLSSLSGMSPGNNESGGKKKRQKPFTVMRIFRAH

SEQ ID NO: 308718 - protein, 363 aa, unidentified
MKREKRRYVGIDLGKREYTMAIIGKTGKMSIHHGKTSIQGRQGLYRLLERVDKVALEAGNLAFIMAKEIEKGVGSEVRVLNSAKLPFIWDAPTKTDKEDAMKLAHLVEERRDEKLPLVPLPSGKEMEMREVIANYGREVRDRTKAINRLHSLLVKQGITTVMKKNLATAERRLEVVQMLTGQELEEAEYVLKHLELNEKRIKELKGKIEKEAKEDEDMRLLQNVDGIGPIVAYAYVAHVGDGSRFSKGAQVSNYLGFVPRLDYSGMIQRHGHITKRGNGYLRGLLVQAAWSMVRSRNGGALKERFLYLTKFQGKSKKKTIVSIGRRLTELLYSVLRNKTKYEIRPWKVPPHNPVRLAEQAMGA

SEQ ID NO: 308719 - protein, 427 aa, unidentified
MNMNAVGIDVSKGKSMVAILRPYGEIISKPFEVKHTVSGIRSLIEQIQSIDGESRIVMEHTGRYYEPLVRELSKADLFVSAINPKLIKDFGDNSLRKVKSDKADAVKIARYTLDSWTELRQYSLMDEIRNQLKTMNRQFDFYMKHKTAMKNNLISILDQTYPGANTYFDSPAREDGSQKWVDFSATYWHVDCVRKLSLNAFIDHYQKWCKRRKYNFSRSKAVEIYEASKELVSILPKDDLTKLIIKQAVEQLNTASQTVEQLRTMMNEAASKLPEYPVVMAMKGVGKSLGPQLMAEIGDVSRFTHKGAITAFAGVDPGVNESGSYEQKSVPASKRGSSTLRKTLFQVMDVLIKTKPQDDPVYLFMDKKRAQGKPYYVYMTAGANKFLRIYYGLSLIHISEPTRRTPISYAVFCLKKKKNRCDKHLEW

SEQ ID NO: 308720 - protein, 366 aa, unidentified
MEKSSTAYIGMDVHKDSIDIAIADGKEARLFGRIGGEAAAVDRAVRKLRSVHRAPVFVYEAGPCGFWIYRRLRAQGLACMVVSPSMTPRRAGDRVKTDRRDCLQLARLARAGELAPIYVPDARDEAVRDLVRAREDAVSMQRQARQRLQALLLRNEIRYVGKSSWTAAHRRWIAHLKLPDPAQQIAFEEYVQAVEEAGARVERLHAAIAAQLEHWRRRPLVEALQAFRGISAIHAVRIVAELGDLARFDSARRLMGYLGMVPSEDSSGARRRQGSITKAGNSSARRALVEAAWAYAHPARVSWVIARRQTGLAKAVTDLAWKAQLRLCARFRRLAARGLNRNKIVVAVARELAGFVWALGQRSKPA

SEQ ID NO: 308721 - protein, 384 aa, unidentified
MIKHNILFIGLDTHKTFTEVAYIEDQRGAKSTHLGKILSNKAAFKKLARQLQSKYPDATLHFVYEAGPCGYWIYRLLTSLHHCCYVIAPSLIPKKPGERIKTDKRDALKLAKLLKSEELTPIYVPEPEDEAVRDLSRSRETAMKDLKDAKYQLKALLLRNNINSKIKDNWSLQHLRWLAELVLPHPCQQIVLQEAVSTITERLKRLKRLDNELTHQVKAWRYYPVVKAVQAMRGVRLLVATGVIAELGDLTRFDHPRKLMSYLGLVPSEHSSGGKRHLGAITKCGNSRARRLLVEGAHSYKHNANISKEMQLRQEGLSKEIIDMAWQAQLRLCRRYNRLMHKGKHRNVVVTAIAREMIAYIWAISREVVLPVIDVKLRLARMPA

SEQ ID NO: 308722 - protein, 344 aa, unidentified
MSVVTIGLDLAKTVFQVHGVDAGGITILRRKLVRADMIAFFTKQTPCLVGMEACSSAHHWARLLTKAGHTVRLIPPQYVKPYVKRNKTDAADAEAICEAVAKPNMRFVPIKTEEQQAVLALHRARSLFVRQRTATINALRGLLGEYGIIAGKGVRQLALLSERLATAGETVVPNEAREALRSLFNHIDALSEQLKAVEVRIVAWHKANPDSQRLASAPGVGPITASAIVAAVGDGKQFKSSRHFAAWLGLTPRIKASGGKEKIGRISKGGDRYLRTLLIHGARAVVGTTFRKDVAPRPWLSAIVARRPTNVAATAVAHKTARSLWAMLTRSEVYRRHTVQPLAA

SEQ ID NO: 308723 - protein, 423 aa, unidentified
MNCSTLCIGADVHLDEIVLCAVDQAHGHEVTDRFRVTNNLPGAQAAATTIVRLATDLGYSRIEIAWEATGMLWIPFHRYLSRCPQLQSFELELVCLNPQLVAKFKEGLVLRRPKNDPLDAAAVAARLRFGELPLSYVPGDFWQGLRRLTRHRFHLSRSLSREKMRFQAYAFLKCSDWKRVKPFADVFGATSVTLLTEYTVAELTQMTHDQLVDLIRRHGRKHFADPAATARKVRQALRSSYPVDPQLDEMLTATLATAWEHIRFIQRLMKRLDQHIARAIEPVPNPLITVKGLGAVITAGLLAEIVDISRFAEHKHLAQYAGITWEKRSTGNFVSQNTRLTKVGSKYLRYYLILGANTLRRYNLEYKAYYWRKHDEVAKYQHKRALVLTARKLVRLVHALLTKNVAYVRPQSLAIVQEDGALQ

SEQ ID NO: 308724 - protein, 347 aa, unidentified
MRFYNRQHRHYCGIDLHVKTMYVCILDAAGQVLVHRNVKSTPEAFLEIVARYREDLVVAAECMFTWYWLADVCAAEGIAFVLGHALAMKAIHGGKAKNDTIDSHTIASLVRGGLLPQAYVYPAAMRSTRDLLRRRLHLVRTRGELLAHIQNTRAQYNLPAFERRLAYPANRDGVSAHFSDPSVRKSIDVDLALIDQYDTLVVDLELTIVREATRHDADAFHRLRSVPGIGKILALTILYEIHDVTRFDRVQEFASYARLVKCVKTSGGKKLGTGGAKMGNVHLKWAFSEAAVLFLRHTKEGKTLLAGIEKKHGKGKALSILAHKIGRAVFYMLSRGTVFSMEKFLAA

SEQ ID NO: 308725 - protein, 359 aa, unidentified
MEKRITKGKKGKVPEITKRDEVYVGLDVHKVNVHAAVRINGDEFTTAVLPAQPKAVLAFLKPYRAGLRQVVYEAGPTGYGLIRALRAEGISAEVVAPGKIPRPVVQGAKSDQLDCRKLAEFAEKDLLREVAVPTLPEEADRQLQRLRDSVLDRRRKAKQKIYGFLLQHSLAEPENLQGWGRKAILALQKIPMSKMLKMTLDFLIEDLLHLQDQMDRINKELKELEKDERYAAAVARLKTHPGVGDVTCMQILTELYQPERFENSKQVAAYVGLAPRVSQSGGTRTEGPLIRGGRGALRATLMEAAWSWVRRDKRAAKVYGRMVKNTGSAKKAIVAMARRLLINLWYMMTRKMVYAPFAA

SEQ ID NO: 308726 - protein, 466 aa, unidentified
MGNCAGVDWASEKHDVRVCDAAGDPLLASTFAHDEAGLRSLCRVLVQMKVELVAVERPDGVLVDRLLDAGLQVLALHPNQVAAARARFRASGGKSDHFDAFVICELARTDSHRFRVLEPDSDQTKALKALTRAREDFVTARTSLVNQLRAELERFWPGPADLFSSLDSLISLAFLKRYPSPLDAQRLSAARLAAFLRSQHYSGRKTPAELLVKLQAAAVGCAGETETQAGREIVLALVATLETLGKQVKQLDRRIALAVRAHPDGAIFLSLFKGADTVLTASVLLAEIGDCRARYLTHESLSGDAGQSPVAVESGKHKVARFRWACNKRLRDAFCTLADSSRHWHPWAQAVYARAIARGHDHQRAIRTLGRAWSRVVWRCWQDGVPYELARHRAAQQYITVTIPSPSGDCIDGPATQRMAGDALDPSLDVGSAQGSLRAAQPSLPRKRSGGGPSRAACQGRAQRAA

SEQ ID NO: 308727 - protein, 338 aa, unidentified
MEYGAIDLHRRNSLIRIVTEAGTVVLDRTITTSRDGFHRLFEGRAPMRVLVESGTESEWVAQTIEACGHEVVVADPNYALMYGSRCRAVKTDRRDVAALAEACRLRIYRPAHRVSAQQRGERRRLRVREHLIRVRTQAINLLRASLRQEGYRLPTGSSATVVARLAKLQVADHVAADLAPLRVLLDTLTPLIRTADREADRRAAADPVVGHLMTAPGVGPIVGLTYRAVLDDVGRFRDANAVTAFIGVVPREDSSGSRRLRGAITKRGPNSLRVVLIQAAWVVWRQRRGRAALHAWVERLAARRGRRIAVVALARRLARILYALWRDDCDYQAVPVAT

SEQ ID NO: 308728 - protein, 418 aa, unidentified
MNGERKARGKRRYVGLDIHKHYCVIAAVDKEGQVVLHAVRVEHQDLEAWAKKNLQDSDHVVIESTTNAWHVYDLIAPLVERMVVANSFKVKQIANARVKTDVRDTLILARLLAANLVPTVWVPPQQVRELRQLLAQRREMVETHTQVVNRMHSVAHRHHLKHERGKRFNEKNTGWQQDKRLSGMEQFQLKLEMENRAYLEKQIERIGKEVAKLSHQKPWAESMTYLMQLPGFGVITAMTVLAAIGEIERFETAQQLASYSGLVPGLEQSGTKKRGKGITKEGRKELRWALVEVAQRAVKSDPYWKKRFETMQKRMHRNQAIVAIARQILEVVWNVLTQRQPYRHFSEERIAYKYLTWGWQMDEEARDGLTRQQFTRYYLMRLGIGQDLTRIALDPKHPRRIASEAEVLALRPELHRIE

SEQ ID NO: 308729 - protein, 338 aa, unidentified
MAIVTVGIDLAKNVFALHGVDEAGAPRLKQPKVARGKLNAVVAALPPCVIGVEACSGAHHWARQFQAHGHTVRLMAPKLVTPYRMTGKRGKNDAADAAAICEAVQRANMRFVPVKSEEQQSRLMVHRARQGFVAARTACINRIRGLLSEFGIVLPLKAEVVRRKARNHLEELPGYANTVIGDLLSEVSHLDERIKQYDTHIRAMARDCTAAQQLMQLMGVGEITATALVAMVGNAREFHSGRQLSAWLGLVPGQYSSGGKARLGSITKAGDAYLRSLLVLGARAVLNAAKGKTDSLSRWALAVAERRGYWKAVVAIAAKNARMAWAVLTKGEAFKLPA

SEQ ID NO: 308730 - protein, 369 aa, unidentified
MTSILYVGLDVHTTNYTICSYSFPEDRFFAEIQVSPDYNEILKYLDRLRSMRGRDCQFLCGYEAGCLGYSLYHQLTYHGVDCVILAPSTMGKFDNLVHKNDHRDARNIAKCLAYNTYKAVHVPTEIDEAVKDYMRMRDDANAALKTVKQQIIAYCTRHGFLFDGRSKWSKRHLDWLHKLDFGNAIMNEVLQEYMIRFYQLQEKVELYDSRIEQFSQMEEYKEDAAKLQCFIGVKTHTAMALLSEVGDFNRFESAERFAAYLGLVPRDHSSAENGKHLGITKAGNAHLRRLLVESAHCYTRGKIGYKSKALAARQKGNSPQVITYADKANERLRRKFYRLSSHTKHNVAVTAVARELACFVWGMMTDHLS

SEQ ID NO: 308731 - protein, 414 aa, unidentified
MQVVNSRCAGLDVHKKVISACLITPDGEQGWQKQLRTFGTMTIDLLALADWLASQGCTIVAMESTGEYWRPVFNILESQFEVLLVNAHHIKAVPGRKTATKDAQWIAELLQHGLLKASFIPPIEQRDLRDLVRHRANFIRERVNLINRIQKVLEAGNIKLASVVSNVMGVSARAMLEAIVGGTSTPESMAELAQGRLKDKREQLVQALTGQVRPHQQFILCELLCQIDSIDETVTRFNQQIETYCQPFEAAVQLLDTVPGIARQTAEMIVAEIGTDMSRFKSAAHLAAWAGLAPGNHESAGKRLSGRTRLGNRALRTGLVQAAHAVTRTKSYLAAQYRRLAPRRGKKRAIVAVAHSILVIAYHLISRQEPYRDLGADYFDKQRPEATTKRLVKRLEKLGYQVSLQPQQLSPLPT

SEQ ID NO: 308732 - protein, 377 aa, unidentified
MTKVRFVGLDVHAETIAVAVAEPGGEVRSLGVIPNRAESLRKLVRKLGPPTELRACYEAGPTGYVTYWQLAELGVKCEVVAPSLVPRMAGDRVKTDRRDALKLARCYRAGDLTAVWVPDAAHEALRDLVRARGASKKDQLRARHRLSKFLLRQGRRPPEGVKAWTQKYMAWVKSDVHFEQPAQEATLLDYLGEVEHAAARVERLDQAIDKVVVLAPFAMKAVIEALQALRGIAKVSAVTIACEVGDFSRFEKATELMAYAGVVAREHSSGERTWHGGITKTGNANLRHVVIEAGWAYQHRPTVGGALKKRQAALPEDVKEIAWKAQHRLYGRYHALTGRGKSKAQAVTAVGRELIGFIWAIGTQAEKQAREQGRLAA

SEQ ID NO: 308733 - protein, 367 aa, unidentified
MFIVGIDIAKRSHEAIIIAEDGQVVRKAFSFRNNCTGYNLLLEQVRKLTLVKSQIVFAMESTAHYWLALYARLLKDGYAVMVLNPIQSHSLRELYIRKAKTDARDSLIIADLVRFGRCKASNVPQDKILALRELCRSRAYLVDMAADLKRKLIALLDRIFPEYESLFDSVFSKASIAVLRKYSTPQKVKNANLRKLTDLLMESSNGHFGEWKAHQLKEAACSSFGIDDSGGVYSTLLGMFLEQILSLTAQADSLEKQISVFFQEFNNPLTSISGVGTVLAATILSEIGDITRFSSADKLLAYAGLDPSVKQSGEFKSNQNRMSKRGSPYLRRAIWLASTVAVHRDPMFQTYYEKKISEGLHLSLIHI

SEQ ID NO: 308734 - protein, 362 aa, unidentified
MSTIADDDRRVIAGVDTHKDFHVVVVLDELGRKLDTASFSTTTRGYRDLTGWVTSFGEVLAVGVEGTASWGAGLSRHLRARGLNVIEVNQPDRHRRRRRGKSDRIDAEMAARAVLAGDATAVPKAGDGPVEALRQLRLARTGAMKARTAAANQLHSVCDTAPDQLRAQLRGLTTRRKVGVASHYRPGDPLTPTGGAKRALVSIARRWSSLDTEIKELDRAIRTILDTIAAPLLARHGVGYETAGALLCTAGDNPDRLATEASFASLCGTAPVPISTGNSNRRRLNRAGDRNANSALWTIVMVRLRSRHAPTVAYLERRVAEGHSKRDAIRCLKRFVAREVYLDIQHITATATKTTEELEIAA

SEQ ID NO: 308735 - protein, 411 aa, unidentified
MVKENFIYVGIDLHKETHTAVMIDCYNQKLGEITFPNRPADFPKLVTKVKKCNTDAKEVVYGLENAYGYGRPLAVWLIDKGYFVKDVNTAISHRQAKHRGAMYRKSDSDDAEAIALATLNMLDKLPDACPNDAYWSLGQLVHRRDNIMKQRTRLVNQLHEQLCIAYPSYKSFFNDISRPTALYFWEHYPSRKYLRGKSVEDLRKELVPVSHNRCSTKNCEKILDAAASDKVKNNAYQDARDMVTLSIVSDLQHYDSQLAEVDKMLEQMYKMLGCTLTTIPSVNVITAVKILAEIGDIKRFSNANKLAQFAGIAPLHLSSSGKGKDVATKQGNRRLQATIYFLAIQMVQVSSKGTPRNSVVRAYYEKRKAEGKTSQQALICISRRLISIIYGMLKHGTEYRMPVVENAGEKL

SEQ ID NO: 308736 - protein, 339 aa, unidentified
MVHVGVDLHKRSSQLAVLMPDGEVTQQRLENDPTRLEQFFAELPRGARIAIEASGTWWWFVDLVERLGHHAVLSNPKQTKAIAAARLKNDRVDAERLALLLRGDLLPTVWIPPAGLREARELVRHRVSLVWVRTEIKNRLLALLGRRNLQPTSSKRWLTVRGRRELEELPLGVIPSTVREDCLALLRVLDEQIRRLDHELVQRWGDDPRVQRLRTIPGVGPFTAILLILELGEIQRFPSAKHLASYVGLTPRVRASANRVRMGHISKEGNRLLRWALVVAATQAARRPGPLRAWFRAVQQRKGMKIARVALARRLAEIVYQIWKHDIDFVTLVRGGVRR

SEQ ID NO: 308737 - protein, 340 aa, unidentified
MVHVGVDLHKRMSQIAVLTEDGEIAQRRLANEPARLEAFFAQLPPRTPVAIEASGTWWWLVDLLERSGHRPVLSNPKQTKAIAAARLKNDRVDAERLALLLRGDLLPTVWIPPAALREARELIRHRVSLVWLRGEARNRLLAMLARRNLQPTRGKSWLTGRGQRELQALPLTPIATTIREDCRALLPLLDEQIRRLDDDLRQRWGDDPRVRRLLTLPGVGAFIAIVLVMELGDIDRFPSAQHVASYIGLTPRVRASADRIRSGHISKEGNRLLRWVLVLAATQAARQPGPLRAWFRVMKQRKGTKIARVALARRLVEIVYHVWKHDCDYFTVLRRGAVRG

SEQ ID NO: 308738 - protein, 372 aa, unidentified
MDTNSITWVGMDAHQNSIAVAALMPGRPEPVEWHEATTTEAIVRLGRKLLRDAPGPVQCCYEAGPTGYALQRQLRAAGVGCTVIAPSLTPVKTGVRIKTDRRDARKLAELFRAGLLTEVHPPSESDEALRDLCRCRDDVRVDVLRARHRLSKFLLRRHCIYRQTKHHWGSRHGAWLEALRFDDPVSQATFDSYFLAVQQLEERQRQLDARLAEFGAQEPYREPVAWLRCFKGIDTVTAVCLVAELHDFRRFRSPRQLMAYVGLVPSERSSGERERRGSITKSGNRHVRRLLVEAAWHHRHRPALSAPLRARREGQSARVLAIADRAQERLCARYRRMSEAGKIHPKTIVAMARELTGYLWAVLHPAAAATRD

SEQ ID NO: 308739 - protein, 368 aa, unidentified
MKKSSRTTKDRFWVGMDDHAATIVVAVLRNEEAVPAERFTVSNDEKGQKELIKRLQALKGEVRCVYEAGPCGYGLQRRLMKAGIQCDVAAPSLTPQRAGQRVKTDRRDALKLAEMLRGQMLTMVTIPDIEREALRDLVRAREDAGEDLLRARNRLSRLLLRHGQQYREGNRWTRAHWRWINAVRLEQRHTQEAFNNYITVVNSCNERVEALTKLLKTASEEYPQVIGRYSALRGVDWLTAVTVYSEFGDLRRFGSAPSFMSAVGLVPSEDSSGPRQRRGAITKTGNAHARRVLVEAAWHARRQPKVGQTLRKRRQNLPAEVVRIAEKADGRLHRKFTRMIYRNKRSTVAAVAVARELTGFLWAIAQIP

SEQ ID NO: 308740 - protein, 403 aa, unidentified
MRFIGIDVHRDFCEMCVLAGDSGEEQRRRVATRPAELEAFARELDRSDVVALETSSAATAVARVLEPYAGRVMVIDPRGLVRAGARAKTDRLDARTLARLLAAGVLTEIWTPDEATRALRRLVARRAAVVRARTRLKNEVHAVLARSLCPRPPVSDAFGKSGRRCLEALELPEEEQLTVRGCLRQIDALDADVAELEAALAKRLNGSRELRRLLSVPGVNLVVAATFLAYVGDIHRFPSPKHLVGYLGLDPRVSQSGNEPARGGRISKQGAAEVRHVLAEAAWRGARVPGPLRGFHERIRARRGPQIAIAATARKFAVLFWHLLTREQDYAFAMPSTVQRKRRALELLAGAPAHHGRPGPDGPCRPAAALRAREREIAVAAEHAYQRMLADWQRRPSRSTAGT

SEQ ID NO: 308741 - protein, 424 aa, unidentified
MNLTQNDRLKQVTSDTLIVGVDVGSQTHFCRAFDWRGFELSRRVFKFSNTGMGFLTFLRWTEEIMNKTEMKKVIVGCEPTGCYWLTFQKFLQDHDVQLVTVNPFTVNRSMELDDNSPEKSDLKDPKTIALLVKDGRFSTSYLPSGVYAEIREASVCRDQIMKQHVRLSNQIQGWLQKFFPEYFECYADWDSTSGLMLLREAPLPQDILKIGAGGINQIWRDAKVRAAGIKRAQTLVEAAQNSVGLEAGEAARLEIWVLVNDYILKAEQLKRLDEYLEEKVKEVPNVEKLLAIKGVGMSTVIGFIAEVGDIGRFTDPKQIQKLAGLEIVKKSSGKKKGQPRISKRGRRKLRRTMYESARALMIWNPVFQDVFLYYRNRTKNPLGGMQAKIAVACKAIRVFYVVLQTGCDFDEEKFRKDIIRPEAA

SEQ ID NO: 308742 - protein, 368 aa, unidentified
MQFIGVDLHTNKFTCCYRDEKSVPDGKRATATFELSPYGIAQFYSTLTEETYVLIEATITTFCFARLIQPMVKQVIVANTYELKQISLARKNTDKVDADILCRILKMQVLSGEQTISPVVIPPLEIQELRGLFTTYRLYRKQTTQTKNRIHSLIKEKLYGFTQEEIFTQGQRKTIRALEKGSVMSFQINQLFDGLEFMESQIESLQGKIMEYAEPFMKEIQILTSMKGISVFIAIAIIADIINVDRFRNSKAFTSYLRSAPKVANSNTSVNIGRTNKKGRKLSSTLITQSLNHVLDASEKLSEWYSRLSEYKKAGLVRSGLRRRVFAEIYQMLKKGEYHYGRDEKKHEAKMRQYKKFLEKRKNLVKTA

SEQ ID NO: 308743 - protein, 347 aa, unidentified
MKNYVGLDVSMKETSICIVDEARKVVKEGKVGSEPETIAAWLEQTGLGFERVGLEAGSLAPAMHDGLAAAGLPVVCLDARHLKAATSAMPVKTDRIDARNIAWALQAGWYRAVHVKSQATHKLRALLRSREMLVTSRVSLDNHLRGILKAFGLKVGKVAVGRFEQRVRELVEDDGILEQVVGAILRVRREVLERLDDLHRMVLATVKADPVCRLLMSVPGVGPVTALAFRTAVEDPTRFAKSSLVGTHFGLTPRKYASGETDRNGGISKCGDRMVRSLLCEAANVLLTRVQRWSWLKRWGVEVARRRGKLRAQVAVARRLAVIMHRMWVDGTTFRWTRDTADEAAGA

SEQ ID NO: 308744 - protein, 353 aa, unidentified
MIVIGIDPHKSSHTATAVDPATNTDLGSIRIDATRTGYKTLIDWAKTWPTRKWAVENAEGLGHHLAQWLLVLGELVLDVPTTSTARIRQLSRGGRRKNDRIDAAAAACVAVLQGDARPVDPEGPTDILALLDERRTNMSNSRTRLVNQLHALLRQLFARGAPTSLTAASATTLLRGFRARSGVDRTRVGLCRDLIADIRRLDDQLAANEKQMAHTLDEHGTRLREVDGIGAVTAARLIGRTGRASRFPTAAAYANYNGSAPVQIASADTDRHRLSRYGDRQLNSALYTVAMVQTRMPASAGRAYYDKKIDEGKPPAAARRALKRHLSDHVWRIMLADEKRRYRRNEADTASAA

SEQ ID NO: 308745 - protein, 373 aa, unidentified
MAKAEKSINEGELRQFNYLFSLGLFAVGVDLASTVIQVCYYDPKSKQIKNRQLKRDEFYEFIKAPEFGPMQLCIEACGSCNYWSREFVKYGHSAKVVLAKDVKSFIMSSDKNDKLDARGLFKCCLTETLGRTVKPKDESQQTILNLHTVRSLLIKQLVQTQNSYRAMIYELGGVSKPQSINRLKLSGEEMLAKLQDENSDAVDNFNCIKEALTQGLDNTAQRLKVIDGYLHNFAHTNEDCKRLMTIPGIAEISATAIYAVMGDPDNFENGAQFAALAGFVPAMVGTGGREYQLSTRRSANPLLKGMIYICAVSQLAKVAKHDKERKSQLAIKLDHSDAKKKVIVAVANRLCKVAWAVTKYKKDYDPTKCGLLF

SEQ ID NO: 308746 - protein, 344 aa, unidentified
MDHFAGLDVSVKETSICIVDDAGKIVREVKVASEPEALLAVLKNLAYHFKRIGLEAGPLSQWLFSALAEAGLPVICVETRHMQAVLKAQINKTDRNDARGIAQMMRAGLYRPVHVKTIRSQKLRMLLTHRKLLQSKAIAIENDLRGTLRNFGLKVGMVGKVKFEARIRELVEDLPDLAVLVEPMLVVRRVLREQIVILHRRLLAIVRDDEVCRRLMTTPGVGPVVALTYRATVDVPARFRKSKAVGAVFGLTCAKYQSGEVDRNGRISRCGDEMMRVMLYEAAQSMLRSKKWSWLKAWAMQIARRRGMKKAIVALARRLAVIMHRIWVDGTEFRWTREQATAAA

SEQ ID NO: 308747 - protein, 312 aa, unidentified
MEHTIGIDVAKAKLDVHVLNEKRDIQFENSAAGIKECVDMCLKVKPELIVMEATSGYEYLTAAKLSIEGLPIAVVNPRRVRDYARAIGMTAKTDKIDAKVIALFAANCQPIPQGRIDDNSRKLKALTARRQQLLDMRVAENNRTEHSIDKEICRSITMVIKTIDREIEKVDRQIQDHIDNMPQLKRKTEKLSSVPGIGDTTAAMLVSELPELGTFNRRQIAALVGVAPINRDSGTFRGKRMTGGGRKNVRNRLFMPTLVAIRHNPVLKIYYQRLVDKKGKNKMVAIIAAMRKLLCIMNAMLKNNQAWKPKML

SEQ ID NO: 308748 - protein, 376 aa, unidentified
MQNDITLFVGLDVHKDSITVAYALGSGEVELLGKIGTSARDIDRLCKKLQSKAGHVKVVYEAGPLGYDLQRRLAAKGFDCMVCAPSLIPRKAGDRVKTDRRDAVKLVRSLRADDLTAVHVPTVEDEAFRDLARVWAAARDALKRARQALKSFLLAHAVRYTGTANWGPSHRRWISSFSFGNAWQDLAFSELRRAIEDRFAQCERLESALREAVTQWRFYPAVLALQTMRGIQFTTAVGLLSEIVDVTRFAHPRQLMAWLGVTPSEYSSGGSRRQGSITKTGNSLARKLLIEAAWSYRHTAKVSPEIQQRHEGVPKVIVDRAWDAQLRLCGRYRRMVAKGKNKNVAVVAIARELAGFIWDIARLGIEQAINTPKPAV

SEQ ID NO: 308749 - protein, 350 aa, unidentified
MIIIGVDFHPEFQQIASVDTDTGEFQEKRLAHREEAENFYGALALRGQPVRVGMEASGHGRWFERLLAELHLELWIGDAAEIRTKRVRKQKTDRQDAQLILKLMLKEDFPQIWVPSWENRDLRQLLWHRHRMVQARTRIMNQLQAVALNEGLRCKQRLWRERGRQQLESFRLAPWASRRRHDLLELLDRLNPTITELTQAIEREVEKYPEARRLMTHPGVGPLTALAFVLIIGEVERFQCGKQIASYLGLVPLEDSSGKRRRLGHITKQGSSMLRFLLVEAAHVAVRSLPEWRSHYFHLMMRRGRKIAKVALARKLAVRLYWMWRKRWDYEQLRKFGSHAGQPESCNGVQ

SEQ ID NO: 308750 - protein, 499 aa, unidentified
MVLGHVGDIGETVRTVIPFERVSITTYPSRRGIPNDMMEEGMTVRKRMALELAHPNAAGVDIGSASHLIAVSPDRDDEPVREFKTFTADLEQSADWLVRCGVDTVAMESTGVYWIPFYELLEARGFKVYLVNARHVKNVSGRKSDVLDCQWLQQLMSYGLLSGAFRPADEVCALRAVSRQRDMLLASQARHIQHMQKALTQMNVQLANVISDVVGETGQKIVRGIIAGERDGQVLAKMKNARIRASEEEIAKSLQGNWREEHLFVLKQAMALYDAYGTQLTECDAKLQSMLAALVAGDDGEPTKGRQIGRSKNAPRFDVRRYLFKLCGVDLTRINGINPTTALKVISEVGPDMSRFKSAKHFACWLGLCPGTKISGGKVLSGASKRTTNRAAQALRLAAAALHKSQSALGAYFRRLAARLDRAKAITATAHKLARLIYTLLTKGTEYTDKGQDYYEERYRQRVMHHLTKRAEKLGMQLVPLSVNPPGIIQSIMEINCVS

SEQ ID NO: 308751 - protein, 349 aa, unidentified
MRFYHHSHRFYCGIDLHARLLAICVLDNDGAIVLQTQIPARQQLLLDTLAPYRPDVVVAVECLFAWYWVADLCRAHHIPFVLGHALYMKAIHGGKSKNDDIDAEKIARLLRGGNIPVAYVYPKGLRETRDLLRRRMHLVHKRAELVTHIQIVNAQNNLPEFGKKLIYAKNRAELKIAERFENPQVRKSVEVDLALIDALDEQIGDLELYLERTAKVEDPQTYHLLKTIGGVGKILGLVLLYEIHDIRRFAEVGEFLSYARLVRCVHESAGKKLGYGGKKIGNAHLKWAFSEAVCLLVRNYPVVKIWQARHQKKHGKKKTLGILAAKLGRAVYHMLRKKEAFDVRRFLGQ

SEQ ID NO: 308752 - protein, 343 aa, unidentified
MPHYVGLDVSQKTTAICVVDEQGKRLWRGVCATDPGPISARISQHAGVDAKVGIETGSMTPWLVHGLRAAGLDVACLDARRVKAALQMQLNKTDENDAEGLAQIMRTGWYRAVYVKSLDAHRARALLGARAQLVGMTTRLSNMIRGVLKTFGLLPGAGRGLRFDRKVEALLEGAPEIALVVRPLLATWRQLRQQIAVFDKAVLQQVRADPICRLLMTVPGIGALSSLMYVSTVENPSRFSRSRAVGAHLGLTPRRYQSGETDRSGHISRCGDGLARTLMYEAAIVILHRVKRSLHLKDWAEAIERRSGSGKARVALARKLSVILHSVWRSGEPFRWAAPAMAA

SEQ ID NO: 308753 - protein, 342 aa, unidentified
MKNLIIGVDLATKEIQVCVYANKKVYSNREMTPSQFSDYLANLSPSLIVFESCAGSNYWNQLATELGHQSRLISPRLVSVIRQNQKTDKNDALAIIQASQLPDIKFVSGKTNSQQQAQSMLKLREQAIKQKTALKNQLKGLMREFNLPVGRSHQSFILMIELTLEDAENGLKSEFRHMLNTSLDLYLVLCKAIESYDDLLNQWVCQSSECKKLMKIEGIGKLNAMHLYIGLDSGELGQFKKGKDAAACIGLTPLQHSSGGKVKLGSIGKRKNTSLRSLLITGAMSVVQQVVKREPRTSKEAWLKSLIDRRGKKCAAVALANKNVRTAFSILRNQTEYRAVTL

SEQ ID NO: 308754 - protein, 360 aa, unidentified
MKSDIRSDLSSDRSRSQTAPAGASPSIVDDQDRFLASESFPTTRQGYRRMLSWMRSFGELQCVGVEATGTDGAGLLRHLQQAGIEVLEVTGPDRHDRRKRGKLDDFDAEAAAHAAFAGKRTVTPKTRDGMIEALRVLKACRKTAVQARRIALQMIGNTIVSAPDALRDTLRKMTRMKLIRTLAAWRPDMTGYREMEMAYRIALKSLARRYLELHDEIADLDAMIKPIVDDLAPDLVAQTSVGYCSAAQLLITAGDNPGQLKSEASFAALCGVSPVPASSGKTDRHRLNRGGDRAANSALHIIAICRLRCDARTQHYVARRIADGMSKLEAIRCVKRYIAREVFALIRNRYREINEAQVAA

SEQ ID NO: 308755 - protein, 339 aa, unidentified
MSIVFVGIDLAKNVFALHGVDEHGKAALVRPAVRRDQLMEMVAKLPPCTIGMEACSGAHHWAREFEKFGHHCRLMAPKFVVPYRMSGKRGKNDAADAAAICEAMQRPNMRFVPVKSELAQSRLSVHAVRQGWVEARTACINRLRGLLSEFGVVLPLKAQTVRREAAAHLERLPGWMKTAGMDLLDELHRLDERVDQYDAHIKMMAKAEERSDRLMQIPGIGATTASALVASVGNGHDFANGRQLAAWLGLVPGQYSSGGKQRLGRITKAGDAYLRTLLIMGARAVLAAATKKTDRLSRWATTVADRRGYWKAVVAIAAKNARMAWAMLAKGEEFKPLTS

SEQ ID NO: 308756 - protein, 337 aa, unidentified
MAYYIGLDVSVESTAVCVIDAAGCVKKEFSARSHPEDLANALDLFSDEIAGIGLEAGPMSGFLVEGLKQRGLDSVLMETRRVHAALSAIPVKTDRRDARGIAELLRMGWFQPVHLKTPAARDLRLMLSARDSLGRRIRELDNSVRGLLRGFGLRVPTGARGRFCDLVRDLIAGNPVLEAAIFPLLSARDKMAAEFAKLDKLVRDQSRNDDVCRRLMTIPGVGAVVAMTFRAAIDDPTRFRSSKSVGACFGLTPRRYQSGETDRVTSITKAGDASVRAALFEAAHVMLVRTTRWTPLRAWAMRVAARRGAKRAKIALARKLAVIMHRMWIDGTEFKTA

SEQ ID NO: 308757 - protein, 346 aa, unidentified
MRFYSDQHAFYCGVDLHARTMSLCVLDERGDVRLEKTAKTGRDRFLRLVEPFGNKLVVAAECVFCWYWLADLCADRQINFVLGHALYMKAIHGGKAKNDRIDAEKIARLLRGGNLPMAYVYPREKRSTRDLLRRRTFLVRRRAEALGHITNTHSQYNLPPAGPLYRKALRADVVSRFDDESVRRMIAADVTLVDHYDDIIRELENHLERHAKIHDPYTYQLLRSVPGIGRVLALVILYEIDTIERFPSVGQFVSYCRLVKCAHESAGKKLGSGGSKIGNAHLKWAFSEVVPLMMRDCEQARRFVQRRERKVGKGKAMSILAARIARAVYHMLKRKKPFDINTFFAH

SEQ ID NO: 308758 - protein, 417 aa, unidentified
MPALKELTLKKKGVAMYYLGIDVSKASHQCVILDAEGEALGKSFTIQSSKDDFANLVKKLSDLNIPQTDITAGLEATGNLWENLYVYLKEQGFNIVLLNPFQTSKFHQAMLKKAKTDSIDALVIAGLLRSGCAASSYIPDEEIQSLRDLIRLKDGYLKDTKNYKRKAYSLLNLVFPEFLSLIKDPFNISCTEILSKYQTASDFKNIRPKDLLKIARGHQGNNYDEAWAGKVIQAAKDSIYSGKASKARSIVVKSLVLNIKNLKEQMIELDNEIQNILKTDDGSSNNDIDNLLTIPGVGPKTIAVFIAEVGDITRFASCKDFIGFVGLYPKIEQSGSSLNRAKLTTKGSRILKHALYMASVASLIHNPYLKSVYNNKLSQGKCAKQALIVVARKIACIMYSMLKNNAVYNPGRVAMAV

SEQ ID NO: 308759 - protein, 325 aa, unidentified
MEDKKLCCGIDVSHTTLDVCYQNNLGELFHLKVGNNINGFKKILEHTGIGYHFVMEATGVYYIRLAFYLHGLGCKLSVANSLSVKRYIQMHLERNKSDKKDAAWICRYAIEQRPPYWEMPDSAYFECKQLYNTIREYTEQIKRFNNQLHSLRLLPLPSKDTIKSLEKVNQQLEKEISILEKKLEASLQQWQPDQLKSVSSIKGIGKRATAMLIVFTQGFKYTNNHRQLISFAGLSPTEYSSGTSIQGKARIYKRGGKNLRDVLYMCSMNAIKTNTACKTLYERLRANGKTGKQALIAVCNKLLKQVFAVVKNNSLYQPNYCSPKP

SEQ ID NO: 308760 - protein, 346 aa, unidentified
MNATTYGMDIAKNVFQVHWVDGNTGEICRKKLPRGKVTEFFAVRPAGRIAMEACGGAHHWGRTLGPLGHQIELLPTHQVRPFISGNKDDAADARGIWLAAQHGDIRRVAVKSSEQQAMLSLHRMRTHWVSVRTATVNALRGLLYEFGVTLPRGRHSGLRQLAQQRAEINDAVPAVMVRLVDDQLLALADIERHVQAMEEEISLMLKSQESARRLRDTPGIGVLGATALAATLGDGTSWRNGREFACCLGLAPGHRGTGGKVRIGSISKRGNAYLRTLLINGARALASREHPAPWIVALLGRRPFNVVVVAIAHKLARIAWALVAHGRAYEASWKATDPPAASAGAV

SEQ ID NO: 308761 - protein, 369 aa, unidentified
MSNLLFVGLDVDDTAFHATIIAQDTGETWYFKCRPNSTKLIERLLKIHGNSEDFRICYESTYLGFSLCRKLREQDFNCDVIASSLIPEFAGKKVKTDRCDSQKLAQFYMKDLLTIVHVPNEEDESERDLVRSRTLIKDQIVATKNRIQSILRKTGLNFRQDTGKQMLWTIEYKKWLKRKIKEMKLTALKQNLILLTSSLDNLEDSLKAYNSEIDSLAISEKYSTKVKALTAYRGIQVLTAMKIITEIGDIKRFPHPKKLVSYLGLDIREFSSGGKEKKYGITKMGNTVVRTALVEANQKSSTKPAVNHAIKTRRKNVPIDHLRVADKCMNRLFIKSNNLLRREKNKNKVKVACAREMVGFIWESLHLAS

SEQ ID NO: 308762 - protein, 369 aa, unidentified
MENIIYIGMDVHKERLSLCALHGTTGEIVGEARCASNVSLVKKFVEKLKTKYREDINIKARYEAGCLGYSLHNLLEQNGIDCDILAPTTMYSSSKNKMVKNDKFDAKMIALNLANGTYKEVYVPEEEDVAVKEYIRMLGDFKTSLKKIKQQIKAFLLRHGYVYEGISSWTITYMKWVRNLDLQGLFKETLGEYLLQYEVLVDKIERFSLRLEELSHRERYEEPIAKLRCLKGIDTTAAMNVYVEIADFTHFPTAKAFMAYLGLTPIESSSGDKISRSSITKQGNSTVRSTLVECANALVKGTIGLKSKRVKVRQKGQQSEVISYADRAVERLQRKYHRMMYQGKPRNVAITAIARELGCFIWGLETGKI

SEQ ID NO: 308763 - protein, 366 aa, unidentified
MTSVPSAAELIHLGMDTSVNEIVVAVLRPGEEVPVVDRIPGDEESVRRLIGRFPDRRLLSACYEAGPGGYELHRLLASMGVACDVVAPSLIPKGSSDRVKTDKRDSVRLALTHRAGLLTPVRVPSPAEEAVRDLVRARGDLLDDRKRMQQRLNAMLLRHGRVWRGGKKWSYAHRAWVDRQVFDEPALAEAFALYRGGLEAREAELAAAGARLAAWAAREPLAGPVARLGGYRGIAQLTGLTLAAEVVDWRRFASARAFMGFAGLIPTEYSSGSRSRRGHITKAGPEGVRTALIEAAWAYRYRPAIGATLRRRQAGLPPETLARSWKAQQRLHAKYAKMTARGKPPGVAVVAVARELAGFVWAEMIS

SEQ ID NO: 308764 - protein, 446 aa, unidentified
MRIVYQRCCGMDVHKDSVTACLLVINEGGKDRNEKREFGTMTRDLRELASWLASEGVEAIAMEATGVYWKPVWNILDAEKKFKMLLVNAQHIKCVPGRKTDQKDSEWIAELLQHGLLRASFVPPVEIRQLRDLTRMRTRIRQTLASFANRIQKVLEDANIKLGSVASDVLGVSGRHMLKALLAGEQDPQKLANLAQGHLRKKLEPLQLALEGHFTEHHRLQLKFLLEFIEFGEKQLSNLDSEVQLLLTRVQPKASLPDPDDGALAESKGSPPQATSLQTAVELWDSIPGIDQLAATTLVAEIGANMDQFPSARHLAAWAGLCPGNNESAGKRRSAKIRKGSVWLRRALCQAAWAASRTKNTYLAAQYRRLIVRRGKKRTIVAVAHSMLIVAYCLLKRQCVYQDLGANFFDRLDERALTHRLVKKLIGLGYQVTLKPGRAEAAPETA

SEQ ID NO: 308765 - protein, 216 aa, unidentified
MTVVFRGIDLAKNVFALHGVDAAGKPCLVRPQVRRDQLTELIAKLPPCTIAMEACSGAHHWARTFSAFGHTVKLIAPRFVIPFRMGGKRGKNDQADAAAICEAMQRPAMRFVPVKSVDAQSMLALHATRQGFVQARTATINRLRGLLSEFGIGPTIASALRASIGGGHDFDNGGQLASWLGLVPGQYSSGGKNRPSDTGQANATPRPPFVSMSSRP

SEQ ID NO: 308766 - protein, 341 aa, unidentified
MDTVSLIGIDLGKHCFHLHGQDASGRMVFRKKLTRSQMFTLLGNFPRCIVVMEACAGAHWIARRLQALGHEAKLISPQFVKPFRQGNKNDFADAQAICEAAARSSMRFVSPHNEAQQIVSALHRVRERLVRDRTGTINQIHAFLLEFGISLPRGMAVIRRLPAVLEAESLPPRLVVVLERLQAHFKYLDEQIHQLERELLTQLHEDERSERLLEIPGIGPMTASVLMSELGDAQQYGSARQFAASVGLVPRQYSTGGKPTLLGISKRGDKELRRLLVQCARAIMQRIEHRTDALGVWIRSLLARRHSNVVACALANKLARIAWAILAKGTHYRSIEAVPSV

SEQ ID NO: 308767 - protein, 395 aa, unidentified
MHSIGIDVGASQHSVAICRAGNIEAERQVLRISSSRSGFAELDRWIARQGALERIVVESSGHYWQTLASHLRAAGHPVAVVNPLTAKYFAKRRLQRAKSDPADARTLAALGMVDRPRTAEPLAGAELREATRFAMRLVEEQSRICNRILRLVDLGFPELGEAFEDPTCKTAIALLKVAPTARAAARRTVATLARANQGAGQRALGATKAAAIHAAARESIAVPELEEQIAFEMPLLIEQHELLERQIERAEARVAALLDGELARRLQTIPGVGPATAAALIAEIGDITRFSSFDKLVAFAGVHAAEKSSGKKGADPETSWHMAKTGSPYLRAALYRIAVVGLQHNPIIRAHYARKRAQGKAKMNALGHCMKKALAIVWGVWRGGRDFDPAAHSTA

SEQ ID NO: 308768 - protein, 429 aa, unidentified
MNCTQNKKIEQVKETTMIVGIDVGSEKHYFRAFNWRGIELTRKPVAFSNSMEGFNSFYNTIVELMQKSELEEALVGIEPTGHYWFDLGQFMGEKDIKFVMVNPHHVHKTKELDDNSPSKNDRKDPRVIAGLVRDGRYFYSYMPTGAYAELRNASNRRFVLVEEQTRAKNRLQKWIAVYFPEYKGIYTHIDAKGGMLVLKKAPTPEEIVRLGVEGIIKIWKDAKLRGNGHKKAMLILAAAMRSIGLKAGLTEARMEIQNLIEDYELQTKRLERVNDLIKGLCQQVRYADKLLEIKGIGITTVAGFIAEVGDITRFDSTKELQKLAGLELVADSSGKHNGKTKISKRGRKRLRYLLFEAAISVVGKNEEFKEIHRYYTTREKNPLKKMQSLIVVACKLIRVFHAILTNGIRYDASKMLKDIRHPGEQLKAA

SEQ ID NO: 308769 - protein, 422 aa, unidentified
MIDQEKFTWFAAIDWGTESHQACVLDAGGGIAGERAFSHDGAGLALLCDWILSIAGSATGVAVAVEVPHGPVVDSLMDRSIAVHAINPKQLDRLRDRFSVSGAKDDRRDAYVAADGLRTDRHLFRRLHVADPRLIELREWSRVAEELQQERVRLSNRLHNQLWRYYPQMLKLTDDVAADWLLDIWTLAPTPPKSKHLRKTSVERLLKRNRIRRIDAETVLHTLRQAAIKVADGVTEAATIHIRSLIARLRVVNRELRDATHKLDELCAGLEETPAAAAEHGGEQHDVKILKSMPGIGRINLAILLAEASGPLSRRDYQALRTLSGVAPVTKQSGKSRVVVRRYAAHGRLCNAVYHWARIATQHDPKSRSRYVALRQRGHSHARAIRGVADRLLALACTLLQRQTMFDPNFGTTEVPELNTVP

SEQ ID NO: 308770 - protein, 427 aa, unidentified
MKSNTQNKKIEAITEKTLVIGIDVGSETHYARAFDYRGIEFSKKPFKFSNSEAGFEMFKAWILDIKEKHEKDKVVPGMEPTGHYWFNLGKFLQDNEMKPVLVNPHHVKKSKELDDNNPTKNDRKDPKVIAGLVKEGRYMIPYLPDGIYADLRTASNMRFQIQSELTRVQNRISRWFNIYFPEYKTVYGKPDAISGMMILKKAPLPEDILTLGVEGVNQIWRDAKIRAVGKKRAQTLVEAARHSVGTKEGATAARIEIRMLLEDYESRNNRLQEVMFLIEELVKQIPMAEKLMEIKGVGIKTVSGFLAEVGDITRFSSPKELQKLAGLALVENSSGKHKGQTTISRRGRKRLRYLLFEVAMSLVGKNPEFGTLHHYYTTRKVNPLKKMQSLMAVATKLIRVFYAMLTKGVEYDSAKMLGDIKRPAVYM

SEQ ID NO: 308771 - protein, 324 aa, unidentified
MAKRTTICAGIDTGKRKLDVAIDGSSLLLQVENTAEGHKVLLEWLRRHKVKRIGIEASGGYEIPVVAELRRKRFVVVVFQPAQVRAYAKFHLQSAKNDKIDAALIAACTAAVRKIHAAPDPRLQPFAEHLTLIEQIGEDIKLYKNRIETCRDPRIQKLWKEEISRLNKRERAELKALVAAIRQHPDLAQRLDLIYSVSGAGMPTAVAVLVRMPEIGTLSREQVAALAGLAPYDDDSGERSGARHIEGGRKRLRRALYTAALPASFFWNPHLIALYQRLRAAGKVHKSALIACARKLLIFVNTVVARGTPWQNEQPVRATNPRAA

SEQ ID NO: 308772 - protein, 444 aa, unidentified
MAVRKRELTVMYPNAAGIDVGSKSHYVAVPPDRCEHSVREFESFTEDLMQLGDWLASCGIDTVVMESTGVYWIPVYELLESRGFTVYLVNARHVKNVSGKKSDVLDCQWLQQLMSFGLLAGAFRPDGEVCALRAVVRQRATLIDGQAQQIQRMQKTLTQMNVQLTNVISDIAGKTGQDIVRAIVAGERDPYKLAQLRNYRVRASEAQIARSLCGNWREEHLFCLAQALQLFDVLQTLIGEADAKLEAMLASMQRHAAGELRPDKNKGRAKHAPRFDVRGALARWAGVDLTRIGGIDVSTALKILAEVGVDLSKFKSAKHFASWLGLCPGTHITGGKRISGVTKRIPNRVAQALKLAAQGLHRSQCALGAYYRRMAARLGAGKAITATAHKLARLVYAILTKGEEFIQRSQDHYEDQVRARTIRYLHKKATSLGFSIQPITAVCT

SEQ ID NO: 308773 - protein, 339 aa, unidentified
MQVSTLGIDLAKNVFVLHGVDHTGQTVLKKKLSRAKFAEFVIRLEPCLIGMEACSSSHHFARMFIRHGHQVRLMPPQYVKPYVKTNKTDATDAEAICEAVTRPNMRFVQVKTVDQQAVLALHTERDIIIRERVACTNSLRAMLAEFGFVMATGRKALNQGVPEILEDGENELSPFVRASASRQMAHIDALDDHLVLIEQQLQSWAETQAACKRMTKVPGVGLLTATYLVASVGDGKQFSCAKQFSAWMGLTPREHSSGGKQRLGRISKRGDGYFRYLLVHGARAVASVIERHREDMRWLDGLLKRKNYNVAVVAQASKTARILWSMLVHETEYRPPAGA

SEQ ID NO: 308774 - protein, 406 aa, unidentified
MLETMVRCCAGLDVHRRQVVSTVIREGSKEAREYSTFHRELQELAHWLQREQVELAVMESTGIYWKAIYAALEDAGIETRVVNARHVKQVPGRKTDVQDSEWLAELARCGLLRSSFIPPRDLRELRLLTRYRRKLTGMLSAEKNRLHKVLDDAGIRLGCVVSDIDGISARAMVEALIRGGSTPEQMAEKALGRLQKKREALQLALEGDISDRHRLVLKKILLHVKWLQRQIVTIDGQIVAAMKPYQEEWKLLQTIPGFDILSAAMLLAEIGVDMGRFAGRDRLCSWAGMCPGNQESAGKRKSGRTRKGNAYVRSLLCEAANSAKKTQSQFQGLYKGLVIRRGHKRAIVAVGHKILQVVYVLLSRKEPYRDPEIDYEALVVHRNAPRWLDALHKYGYLESIKGSVER

SEQ ID NO: 308775 - protein, 371 aa, unidentified
MLETMAFVGLDTDKAGIDIAVAEGEIGGEVRYLGRIAATAAGLSKAIKKVQERHPRLAIVYEAGPCGYGIYRRLNAMPGVVCQVAAPSLIPRRAGVRVKTNRRDAIALAKLHRAGELTAIWVPDAAHEAMRDLVRARGQAMADLTRHRQRIAGFLLRQEVGYVGKPWTKAHRLYLTGLTFAFPAQQRMWTELLTALDQAKARRERLDQLIGEQIPSWSLAWLVEALIVLRGFQRLSAAIVAAEIGDPRRFSSPTQLMGFLGLTASEDSTGEKRRQGGLTKTGNSRARKTLIEAAWTYARAAKPSEHQAAGQPALVAIADKARHRLSLRYRSLRIAGKRQTVAIAAVARELAGFVWAAAHAAGPKVADKTAA

SEQ ID NO: 308776 - protein, 401 aa, unidentified
MWFAGIDWADQHHDVVVIDEAGRKVAQLRVEHTPEGLNRLITFLRELAPLEQIACILETNRGLLITALLEAGCILYPVNPKTVDRKRSASGAKTDLIDAYLLAKHGRSELADLRRLEPDSPTIAELKALTRDQDSLIQSQTRLVNRLSACLKAYYPVALQLFTKLHQRSALVFLQTYPTPQAAMSASLVEIEATLKKGGHTTPTQVASKIFATLHQPHLQADSITTRTKARLTLALIEQLLPLVKQLAEYDKAITDLFLTHADHSTFASLPGAGKRLAPRLLAEWGDDRQRYDEAASIAALAGTSPVPYESGNYARVHQRFACIKPLRNAFYQFAWQSTQQEAWAREYYDRKRKEGKSHSMAIRALANVWVRIVFAMWRQRQSYQRNTFEAARHLHARRAA

SEQ ID NO: 308777 - protein, 465 aa, unidentified
MKNNRPNPKNKKTKIKIDSSLSVLHPDAAGIDVGHREHWCAVPADRCAHPVQKFGTFTEDLDGLSRWLKQCGIKTVALESTGVYWIPVFQILERSGFQVWLVNARHVKNVSGRKTDVLDCQWIQRLHSFGLLQGSFRPEDQMCVLRSYLRYRDELVCARSMQCQHMQKALQQMNVQLHQVLSDITGASGLRIIEAILAGERDANKLVALVDRRVKATPATLHKAMKGAYRAEHLFVLRSAFELHAIYEQKIQLCDEQAMAEMAKLPARVDPKEKPLPPRKPGRKANQDLMAGKDLREELYRWTGVDLSAIEGVGVLTAQVVLSEIGTDMSCWRTEKHFSSWLGLCPDNRISGGKVLSRHTRRVINPVADALRIAATTLERSKTALGAFYRRMKARLGPAAAVTATAHRLARIIYRLLKYGEAYVRQGAETYERKYHERLLHNLRKTAATLGFELTQKQQLAAGVS

SEQ ID NO: 308778 - protein, 342 aa, unidentified
MEYYAGIDVSLECSSLCVVDGTGKIVREGKVPSEPEELIRWLRSLGQELNRAGLEAGPLSQWLFATMREAGLTVELLETRHVRKAFEAMPVKSDRNDARGIAQLMRLGWFRPVHCKSISAQEVRAVLTARKLVQSKLQDVDNSLRGILRGFGLKVGKTTARTFAGRIQELVKGHPSLETIGEALLSVRSVLLREFNAFEKRIRAMARSDARTRLLMSTPAVGPIVALTYASAIDDPARFKSSKQTGAHFGLTPKRYQSGETDRSGRISKIGDASVREALYQAAHVMLTKPVKGCPQLKSWAMRIARRAGMRKAKVALARKFAVILHRMLANRTPFNPAAAAV

SEQ ID NO: 308779 - protein, 349 aa, unidentified
MDEYDGRQVVGIDLHRRRSVIVRMTPDGQQLGPPVRIDNDPLELAVQAASWGKQPQVVLEACYGWYWTADVLADAGAQVHLAHPLGIKGFACRRVKNDVLDATDLADLLRMGRLPQSWIAPPATRELRELVRHRAKLVGLRSGLKASVHAVLAKCGVHVPVTDLFGEAGQALLDDLALPSAYQQRIVSLRYLIDAFTFEIDLFARMVAEQLATDDGYLAVQTIEGVGPILAAVFVAEIGDISRFGRPQQLCAWAGLTPRHRESDTKVHRGRITKQGSTLVRWAAVEAVQRVRRGPVASARARIGTKRGANIGKVAAARKLLTLVFYGLRDGHIRCLARQPAKQPAEVPA

SEQ ID NO: 308780 - protein, 349 aa, unidentified
MTSFGGLDVSVKETAVCVVDDAGKVVCEQKVPTEPGDIVTLLFSIGEDYGRIGIEAGPLSQWLVNELTAAGLPMVCVETRHLKALLTAQRINKSDRNDARGIAQMMRVGLFKPVHVKTQLAQEQRMLLTSRKLLQRKLLDVECDLRGTLRNFGLKVGVVATGKFEARIRELVTGLPRLALIVEPLLVVRRVMRQQFIVLDKMLLDTVRHDPVCRRLMTAPGVGVVVALTYRATVDQPQRFVHSRAVGAHVGLTPRRYQSGEIDYDGSVSKSGDTMLRTMLYEAAQSLLVHPGKWSWLKAWGLRVAQRRGMRRAIVAVARRLAVVLHRMWVDDTEFRWSNSTPAVVPQAV

SEQ ID NO: 308781 - protein, 294 aa, unidentified
MKYTPVGVDIAKHVIQVHFINEHTGEVVDKQVRRQDFLAYFSNREPCLICMEACGGSQHWARELTKQGHKVRLLQARFVKAFVMGNKNDVMDARAIWMAVQQPGKEIAVKTEEQQSILVLHRSRRQLVKFRTAQINALHGTLLEFGETIHKGRAAMEREFPEALERMKERLPLYLITVLENQYNRLNELDSLIDDIEKQLTSVARQNETCRRLLDIPGVGPLIATAALAIMGKASVFKSGREFAAYVGLVPRQTGSGGKIRLLGISKRGDKYLRTLFIHGARAAALLTKEPGRG

SEQ ID NO: 308782 - protein, 332 aa, unidentified
MYLGIDVHKRYAQVAVMDEAGEIVEEVRVENVNLDDLAQRYAGAEAAIEATSNYYHIHDTLSEHLDVTVAHPKELNQIADTDKKTDRVNAKELARMVRLNSVPESYVPTDEVREARALVRGRQTLVENRTKYANKIHGLLSDHGIIEDVKPLTIEGREFLRELSIPSPWDSLLESYIELIETLTEEIQNLEETIEERAGSLKETQLLMTIPGVSYYTALSIYAELGEISRFDGDKSVVSYVGLNPVIRESGDSRIEGSISKRGSGRVRWLLVQAANTAVHTCNDEYLSRFYERLASRKNSQKAIVACARKMLVSIYHMLDRGEVYDPPDVSA

SEQ ID NO: 308783 - protein, 403 aa, unidentified
MNAVGIDVSKGKSMVTILRPFGEIVSSPFEIKRTSSDILSLIKLIHSIEGESRIVMEHTGHYYEVLAQQFSAAGLFVSAVNPKLVKNFNNDSLRKVKSDKADSIKIARYALDKWQNLKPYSIVDELRTQLKAMNRQFHFYMKQKTAMKNNLINLIDQTYPNANTYFNSPPRSDGSQKWVDFVYTYWHVDCVRKMSLNSFVKHYQNWCKQKKYIFNKSKAEEIYTKATELVPVFPKNEITKRIIRQAIAQLNSTSATVETIRILMNETASKLPEYPIVMQFKGIGPSFGPQLMAEIGDITRFTHKGALTAFAGVDPGVNESGSYAQKSVPTSKRGSSNLRKTLFQVMDVLIKTMPQDDPVYQFMDRKRAQGKPYYVYMTAGANKFLRIYYGRVKEYLCILSESS

SEQ ID NO: 308784 - protein, 337 aa, unidentified
MSEITLLAIDLAKSVFQLCGVDDRGHVRLQRRLSRAQLMPALVKLPRCTVVMEACGSAHYWARCIRSLGHTVRLLAPQHVKAFNRGQKNDRNDAQAIACAARQPDMPQVAVKSEEQQAILALHRLRERMVHERVARTNQLHGLAAEFGIVLPTRSPLKLRQLLQEKLDGAALPALLVPQLRVQLEHLEYLRQQLAQLTRQLEQLAQHSPACQRLMHTRGVGPIIATAFTCQVGDASTFRNGRQLAASLGLVPRQDSSAERTRLLGITKRGDPYLRRLLVHGARAAMRVAARHPHDPLSCWVLKVRERRGANRAAVALANKLARRLWASLRYAEPASV

SEQ ID NO: 308785 - protein, 338 aa, unidentified
MMYGAIDLHLRYSEIRVVEADGRVVRERRVVTSRATLTAAFAGLGVLRVLLETGTESEWVAQTLEAAGHAVVVADPNYAPMYGEVRRRVKTDRRDVAALAEANRRGWYRATHRRSRAQRTLQQILRSRRQLVAMRTGSISVVRALLRQEGYRLPSGSAAQVPARLARVPLPDELAATLAPLRQVIDTVTRELAAIDTRVRTTAAADPVVTRLQTVPGVGPVVALTFRATLDEVTRFQAAGQVSAFLGLVPREDSSAERRHRGHITKAGSGELRSLLIQAAWACWKSRGSGTLRAWAERLAGRRGRRIAVVALARRLSRILYAVWRDGTTFDGARVAAA

SEQ ID NO: 308786 - protein, 424 aa, unidentified
MTPPPEVACAAFVGIDWSDTKHDICLQAGHSEEREFAVVPHRPAAIDAWASALRQRFQGRPVAVCLELAKGPLVYALQKYDFLVLFPVHPATLAKYREAFVPSHAKADPSDAQFALELLLRYRAKLKAFTPQSVPMRTLLRLVEQRRRLVGDQSRISNRLTDALKQYFPDVLAWFADRDTLLFCDFLSRWPTLKQLKRARRATLLSFFHDHHVRSQARIDERLHAIKSAFPLTDDPAVILPNQLLVLALVEQLRATLQAIERFDAEIATVSETLSDYSLFRALPGAGATLAPRLLAAFGEQRERYQSATELQRYTGIAPVTESSGNQHWVHWRLQCPTFIRQTLVEWAGATIPRSFWAAAYYRQQRAKGCSHHAAVRALAFKWIRILYRCWQTRTPYDESTYLNALKRRGSPLLASMMETAKNI

SEQ ID NO: 308787 - protein, 331 aa, unidentified
MKPADATPWAYLGIDVAKEKVDCVLLVDAHSSYQVFTNTPAGFEQLGAWLRREQIHCVHACLEATGSYSDALARALLKQGHTVSVLNPAVLVSYRQSRNTRSKTDKLDALVLAHYARERQPRAWHPLPDEVLALRSLLAYRSDVQQTVLQVRNRQRSGGLEPWVADRLQSQLEQLGKEFKLVEQRIWKHLGASSNLSAPWSHLQTICGIGQLAAAHLIAQIGEIERFDHPAALVSLAGLAVKQRESGSSLRGRAQMDRHGRGSLRRLLYMCALVAMRWDPHMRAWAQRLKARGKPHKVVLVAVMRKLLHIIYGVWKHASDYDAQLAFPAAG

SEQ ID NO: 308788 - protein, 357 aa, unidentified
MQIIGCDFHPSVQQIAFVDTESGECGERRLAHCAEAEQFYRELKQKGERVRVGIEATGQSRWFERLLQELNFELWIGHPAQIRAKQVRKQKNDRKDAEHLLKLMMKDDLPRIWVPSPENRDIRQLIWHRHRLVQMRTRVMNQLQAIAMNEGIRRKRGLWTKKGRAQLEALSLSGWTNFRRQELLELLDRISPSIDQLTKAIEQAAQQRPEVERLQTHPGVGPITALAYVLVLGTPDRFRCGKQVGSYLGLIPCEDSSADHWRLGHISKQGNGLLRYLLGQSALSATHLDADWHRQYARLVIRKNHAVAKVAMARKLAVRLFWMWKREWDYEQLKEFGSHAGVARLSQWCAVDHRQLD

SEQ ID NO: 308789 - protein, 368 aa, unidentified
MSSVASPEGLIHLGMDTSKNTIVVATLLPGEESPVTDRIFNEEEAIRRLVGRFPDRSVLRAWYEAGPGGYDLYRLLTSMGVACQVVAPSLIPKGGSDKVKTDKRDSRRLARLGRAGELTPVRVPSPAEEAVRDLARARAVVLDDRKRARQRLTAVLMRHGRIWRGGSYWTAAHRAWIAAQRFGEPALALAVGHYRAALEVREAELAAIEAELAPWAAREPLAGPVARLGCYRGIAELSGLTLAAEVVDWRRFPAARAFMSYTGLVPAEYSSGERTRRGHITKAGSEPVRTALTEAAWAYRHAPAIGAGLRRRQAGAAPETLARSWTAQRRLHARYVHLVHAGGKAAPEAVVAVARELAGFVWAEMTAA

SEQ ID NO: 308790 - protein, 451 aa, unidentified
MPQPILAVGVDPAKRLHRAVAVLFPDEVVLDVELPNAFDAVANLDLRLCELANQHGADLVYGLEDHRRYGRLFCQVLTERGRDVRVVNPLWTNRQRAFYGQDKDDAIDGRSIAAVVLRRHHQLPLASDFGEVAQAIREAERSLQDLSKVGTQLVNRLHLQLSDTYTAAYEEYFGKLKSPLALRFFRRFPLPQDLVGHNVEMLASLLLDLAGGKVGPHKGGNRLIAMRSKAQAILETSGAMRASPRTLALELKAELIRQLCDELLANHDRIIRLERMLREQLLPATKQTITTITGISTILAATIIGETGSISRFRSPAAFAVYNGTAPARNSTGGRDRHKARRDCNHRLKRAFYLAARAAVLHDPIAKAYHQSCKSRGLSYVEALKRVARRMSDVVYALLKSGKAYDRSIIEHAIERRREQAAHAARSHAKQSLVHSRPRKSNSPLSQRQVM

SEQ ID NO: 308791 - protein, 421 aa, unidentified
MPTTLCVGGDIHQATLQLRTLDKTDGHEVGKMLTVQNNRPGADQAIAHLVQVLTQHGYTHLELGLEATGLFWLPFYTYLQQSPALAPFHPTWVCFNPKLVAKFKEGVTLSEIKDDEHDALAVAERLRFGHLPTTYVPSDEWLALRMLTRYRYRLSRQIAQEKLRALTRVFLKASEWHRGQPFSDVWGATSATLLTEFTTTEIAAMTLPQLTELIQEYGRKHFDDPQATARHVQRTLQNSFPVTPDLDAALTTVLQIAWAHIRDLEKLMHRLDREIAHRMERIPNPLLSVQGLGPVITAGIVAEISDVHRFPDHPQLAKFVGLVWRKHASGQFVAEETRLAKMGNVYLRYYLIEGANLMRQHNLEYRAYYQRKFAEVPKHQHKRALVLTARKLVRLVFALLTKNQPYVRPQAKQSQEVSPTA

SEQ ID NO: 308792 - protein, 406 aa, unidentified
MDNKTIKYYLGIDVGKLHHQVILCDSEGKPVAKSLKFPSSFQGYQILTKYMEQYVTREQFPDIHAGLEATGSYWLSLYEQLKKLNLQVTVLNPLQVKSYRNEGIRGSKTDTIDSLLIVKVLRFGDYKPSDLPNGDLLALRQLTRLRLDLVKMTTSLKLRVISVFDTVFPEYQHLFTNIFGESSRAILDEAIDPEVLADISTEKLTLILKKVSHGWFGEDKAREIKLAAQSSIGIRLGIDAFSLSAQILLAQITHLEDQVEKLDIEITGRLKEQNTTLTTVPGIGNVLAATIISEIGNFDRFAALKDGAEKLVALAGIDPKMKDSGILKGKAVMSKRGSPYLRRAIRQAAFAASVRGKDPMLSGIYQKKIAEGKHFEVALSHVENKMMHVVYSLLKSGKEYRPYGKS

SEQ ID NO: 308793 - protein, 423 aa, unidentified
MDILYERVAGLDVHRDTVVACVRIMVDGKAQRECRTFAATTDPLVELRRWLEESRCTHVAVEATGVYWMPVFRILGEGAFELIVANAAHIKNVPGRKTDMNDAMWIADLLACGLIKGSFIPEEKVQELRALTRTRKQLVREQARHVQRIDKTLAEANIKLGSVISDIMGASGRRIIQAMIDGVRQPNKLAELAGKQLKASPKELYDALHGRLTDHHRFLLALHLKQRDGLDETIRKLDVEIAQRIEGMEAEAGGGKIPFRHLIGLLTTIPGISAVAAPAILSEIGADMSRFETAGHLVAWAGLCPGQNESAGKRKSSRLRKGAPWLKTMLVQCAWAAKRSKNSYYRAQFFRLQARRGPQKAICAVAASILTAIYHILKNGTEHHDLGVAYFDRRPTEVKASRLVARLKKLGFTVQLQHIAEAA

SEQ ID NO: 308794 - protein, 404 aa, unidentified
MIFVGIDWSETHHDACILDVDGHVLAKGRVPEGVDGVAKLHEMVGAHAEDPSGVVVGIELDRGLLVGALVGAGYAVHAINPLSVDRYRDRHRTSGAKSDPGDARVLADLVRTDRHLHRGVAGDSELADAVKVLARAHQSLIWSRQRQLNQLRNALRDFYPAALEAFGTDLGSPDALAVLEVAPTPAEGRSLGATRIAAALKRGGRRRRITERAEEIKVALRSSQLEAPAVLARAYGDVVRSIVGIVKEMTSQIETLANQLEASFEGHPDAEILRSLPGLGSVLGARVLAEFGDDPIRYGDPKARKNYAGTSPITKASGRSKVALARFARNHRLADALQMWAFCSLGSSPGARRYYDAHRAKGHTHQRALRSLANRWVGILHGCLRRREIYSEATAWRATIEVAA

SEQ ID NO: 308795 - protein, 318 aa, unidentified
MSKIAEHSHFVGVDVSKDWLDACLLPGRCTFRVPNTTRGVWSLVGRLAECEDALVVMEATGGFEARALELIAAAGLDVAMVNPRQVRAFARALGILAKTDRIDALAIARYAEAVEPTPRAVAHKDLSEIRALMTRRQQLSDMLTQERGRRCRVTSTLVRRRILVSLRGLKKEIEFIDGAIDKLVAETAKWREKEEQLRSVPGVGKIVSRTLIAFVPELGALTRRQIASLIGVAPFSRDSGTLRGRRRIWGGRANVRAVLYMAALVASKRNRVIAAFYGQLLARGKQRKLALVAAMRKLLTILNAMSRAQTTWEEPNRA

SEQ ID NO: 308796 - protein, 410 aa, unidentified
METIVKRAAALDVHKARLTASVRLPGRGRKRRQELAEFETTVRGLLRLRDWLQGHAVTEVAMEATGVYWKPVWAILEDEFDCLLCNARHVKQVPGRKTDVSDAAWLCQLLEAGLLRRSFVPPKPIRALRNLTRYRKAQIGERQREANRLHKILEDSGIKLDCVASDILGVSGRAMLDALVQGTTDPAVLSELARGKLRKKIPALKEALVGRFDGQHALIVSAILAHLDFLDGQIELLSAEIEAQLTPLHAAVELLSTIPGVKQRTAEVIIAEIGVDMSRFPSERHLASWAGQCPGNDQSAGKRRSGKTRHGSKWLDSALTEAANAAVRSNNAYLAAQYQRLRPRRGHGRAIGAVKHSILTSCWHMLQTGELYRDPGGDYFSRRDPERATRRLIAQLERLGHTVTLEAATA

SEQ ID NO: 308797 - protein, 431 aa, unidentified
MPESTVSRQPQEPQFAAFVGIDWADQKHVWCLQAAGSTQRESGELEHKVETVEAWVAQLCQRFGERPIAIAVEQLKGALVYMLTKYECLHLFPVPSTMAASMRKALYASGAKDDPRDANLLLDFLLQHRDRLHRLAPDNEATRRVQNLVEERRKLVDEKTAQLNRLTSNLKIYFPQILDWFKDLDTELVCALLEHWPTLEELQQPSPVELRKFFHQHHCRNGELIEHRIQEIGHARPAIHDRAVIEAKRVVVKVTVQLIRSLREAIAELDGKIAEAAAAHPDFFIFDSLPGAGAVMAPRLLAVFGSQRDRYGSAEEVQIYSGIAPVLERSGKMKWVHFRWACPKFVRQSFHEWAGHSMVKSAWARAYYQQRRNQGQDHHAAVRALAFKWIRILFRCWKDRVAYDEEKYLAALAKRGSPLSALLVVPTRATM

SEQ ID NO: 308798 - protein, 378 aa, unidentified
MEEATRGTEYTTERSLYLAFELSNSKWKLGFGTGLGQNPRRRAVDAGDLASLRQEIEVAKRRLGLAADAPVKSCYEAGRDGFWLHRYLLEQEVENLVVDSSSIEVDRRAKRAKTDRIDVGKLLNMLIRHHSGEETVWRVVHVPSVEAEDMRHLHRQLLTLKVDRTRHICRIKSLLVTQGLNVPIHIDFLDTLAAARTWDGSSLPPGLRARIEREYASLRYVEQQIKEIETERDGLIEASENPSVVQVRQLMKLKGIGPNSAWLFVMEFFAWRQFRNRREVGGLAGLTPTPYQSGEESREQGISKAGNRPVRAMAIEIAWCWLRYQPDSGLSQWFREKCSQGSKRMRKVAIVALARKLLIALWRYLETGEIPAGATFSS

SEQ ID NO: 308799 - protein, 337 aa, unidentified
MRFCGIDLHSNNSVVVITDEMDKVLASRRCPNDLSKIVAVLEPHRAELAGVVIESTYNWYWLADGLMAAGYEVKLANTVAMKRYDGLKHSGDEDDAAHLAHLLRLGILPTGYIHPPCERGLRDLARKRIQLVRSRTAHVLAVENILARELGATLSSNVIKRLTAEQVSTFELSADVALAVKSNVAVIEVLNREVERLEARLLESVRLRPEYALLRSIPGIGEVLAIVIMLETGDIGRFAEVGNFASYARCVDSARYSNGKKKGEGNTRNGNAYLVWAFIEAANFARRFSDEARRFFDKKKAKTNSVVATKALAHKLARASYHILKEKQPFDVKRCFA

SEQ ID NO: 308800 - protein, 321 aa, unidentified
MTSQTESPRFGIDVSKRWLDIAEYGRSPVLHIDNTAQAIRGWLRTLPPGVCHIACESTGTYHRVLVELLIGAGHQVYLIDGYTLSRYRDTLGQRAKTDRHDAGLIARYLAHEGARLRPFSLPPRAVTELRALLRRRATLVRCLGRMRQSMEELPGFARQVRAVTERIQALIKRLEQRIAALIGTSGWGDPYRRILKVEGIGTLTAAGLCATFHRAPFGRADAFIAFLGLDVTVRQSGTQRARGVLSKKGDAEMRRLLYNAAMAASRSSTWQPFYQRMLQRGFSRTQALVALARKLARIAFSLMKNASDYVPQQHENACAQT

SEQ ID NO: 308801 - protein, 315 aa, unidentified
MPDRFIGIDVSKAALDVHVRPDGTALRVPDTRSGVRRLVTRLARLTPALVVADATGGLERPLVDALHAAGLPTVVAGPDRVRHFARALGVRGKTDRADAAVLAHYAERVRPEVRPAPRPDDRALAALAARRRQLTAMLAAEKNRLQAAAAAALRADVRAHVRWLEGRIARLDAQIGAAIAADPARAAAAARLQTVPGVGPVVAHTLATELPELGRLGRRQVAALAGLAPFPRDSGTLRGRRAIWGGRAVVRTALYLAAMSGVRCNPTLRTFYRRLVAAGKPKKAALTATAHKLLTILNTMARAGTTWSPPPARTT

SEQ ID NO: 308802 - protein, 410 aa, unidentified
MHSENIAAYVGLDVHKETLAVAIAAPERLGEVRYYGTINNEALAVRRLFQKLQGLYGNILSCYEAGPCGFGLYHQLTAMNIKCQVIAPSRIPKSPTDRIKNDHRDAISLARLLWAGELTPVWIPDLTHEAMRDLIRARAAAKRDSRVARQRILSMLLRTDKHYAGKHWTGKHRTWLANQSFSQPSQQIAFQHYCQSLEQIEDRILQLDQEISRLLPEWSLCNLVCQLQALKGVGQLIAITLVAELGDFSRFSNPKQLMAFLGLVPGEYSSGNSIRPRGITKVGNSELRRLLYEAVWSYRTPAKVGAWLIYYRPDSVTPLVQYISERLAQPGFFRQRSAFLHQPVMQGYQQRLTSGLPGCQPLSCREAPYCFFYCVQLADTFQGFLCCCCMSAYIDVVDFSARVGPAGRFG

SEQ ID NO: 308803 - protein, 360 aa, unidentified
MPIAVADGRPMPLWDTKPVGEPGSPSAVPLNPNSRQGRLRRQSPLRQGWDQMETIVGIDVSKDRLDVAVLPQGEAFAVDNDDAGIGELTGRLKAIGADAIALEATGSFETQAVAGLSSAGLTVLVVNPAQVRAYANAIGRKAKTDPIDAAVIAAFVLATKPEIRPLRDAETQALSELVARRRQIVQMIVAEENRLRMVLARQAQKSIKRLLAALRRELESLDADLDDHIRKSPIWRVRESLLVSVPGVGSTTARTLLAELPELGSLDRRQIASLAGLAPWTRQSGKWKGKSFIGGGRGKVRAVLFMAALVASRHNPGLKAFRDRLVAAGKPKIVAIVATMRKLLTILNAIIRDAKPWQNA

SEQ ID NO: 308804 - protein, 343 aa, unidentified
MPHYVGLDVSQKTTAICVVDEQGKRLWRGVCATDPGPISARISQHAGVDAKVGIETGSMTPWLVHGLRAAGLDVACLDARRVKAALQMQLNKTDENDAEGLAQIMRTGWYRAVHVKSLDAHRARALLGARAQLVGMTTRLSNMIRGVLKTFGLLPGAGRGLRFDRKVEALLEGVPEIALVVRPLLATWRQLRQQIAVFDKAVLQQVRADPICRLLMTVPGIGALSSLMYVSTVENPSRFSRSRAVGAHLGLTPRRYQSGETDRSGHISRCGDGLARTLMYEAAIVILHRVKRSLHLKDWAEAIERRSGSGKARVALARKLSVILHSVWRSGEPFRWAAPAMAA

SEQ ID NO: 308805 - protein, 374 aa, unidentified
MRKVALDLGKRKTSYCEVAAGQVVRRLTVSRIETLLTELGPEQAPAVVAIEACREAWHVHDLLTAWGNEVIVVDTTRVRKLGVGQHGRKTDRIDAEVLALALERGGIPMAHVLSPARRELRRWLGVRRGLVESRAQMVTTARGICRELGESLPGCTAKHFVANVRKAALKPETRMVLEPLLKTLETVGAECEVAERRLAELAASEPVIRLLSTAPGVATIVAAAFVSVIDDAGRFHHAHQVESYLGLVPGENSSGGKRRIGAITKEGNRYVRALLVQSAWSILRSAPADDPLRQWGQALVTRRGNRIAVVAVARRLAGVLWSMWRRDTFYDPRILAASGARELKRAAQSLDERAEALRRASKKPQVVKLREATM

SEQ ID NO: 308806 - protein, 316 aa, unidentified
MVTGLQCVGIDVSKDRLDVRLHPSGKPLTAPNTPAGFASLTARLRRLDIAAIGLEASGGYEKQAANAFVAAGFVVHVLNPSQVRNFASSMKIKAKTDALDAAVIAHYVATARDILTAYQPDPARERISALAAQRRRLRDEEKQIKSLLDTTSEPILTRMHKRRLAVIGRDIAELEDAIKAQIAADEALSQQASKLMSLPGVGPVLTATLIAELRELGHHSAKQLASLVGIAPHARQSGKTTKSGKCGGGRKAVRDVLYMATLSAIRARMSHLYPFYKRLREAGKPAKVALVAAMRKFLTILNAIIRDGSEFRHPAA

SEQ ID NO: 308807 - protein, 428 aa, unidentified
MNAPLNNDDSLNDYAAFIAIDWADRKHVFSLQVAGQGKKETGTLEQKPEVIGPWVAKLRERFGGRRVAVAVEQSRGALIHALLSYDFLVIYPLHPATVARFREAFKSSGAKNDPLDTDQILQILTKHLDQLKALKADTEETRLLARLVEDRRKAVNLRTSHVQALTAALKEYFPQAIELLNENLTSRLACDFLIKWPSFEAFQQAKPSTIKRFYYGHNIRSPEVIEKVLGLATTANALTTDSAIVESGSRLSQMYAQMIQTLNPLIEDYDRRIEKLFHDHPEADLFCKLPGAGPALAPRLLSFFGTDRSRYEAAGNVQSFSGIAPMTKSSAKTRVVYFRQACPKFDRQTFHEFARLSISRCQWARNYVDYYTAKGKKFHTIIRALAFKWIRILFRCWKNRTPYDETQYMDNLKKRGSIFATLHREQKP

SEQ ID NO: 308808 - protein, 311 aa, unidentified
MASEKVYVGVDIAKATLAVRFLDQQFECPNTDPGHGALIDRLRASAKPVHLVCEATGGYERAMVRAANQANLPVSVVNPRQVRDYARARNRLAKTDRIDAAILADYGATIQPAATPAPTGQQLALAELMSARQDLLVRQKAEGNRLEHLTLPALIRDTKTELRRLEKRLKNLEAMIEAQVEADSVMVEKAARMETVVGVGRITVLTLLAWMPELGQIHPAQAAALAGVAPYARDSGQYRGQRHIRGGRPAVRRVLYMAAVAASQHNQILQTHYQQLVARGKPAKVALTAIMRKLIVLLNRLLQDPNFVLVG

SEQ ID NO: 308809 - protein, 353 aa, unidentified
MHTHQKSSDPIATIGLDIGKNTFHLVGLDKRGAIAMRIKVLRNQLVRRLVNLPSCLIGLEAGSGSHHIARQIEPLGHDVRLIPAQYVKPFLKGHKNDFRDAEAIAEAVQRPTMHFVAIKTPEQSDLLSLHRVRSRLVRQRTAIINQIRGFLIERGITVRQGPVPLRKVLPEVLSSPPEALSPRLVRLIAELDEDWRRLDERLEALSAEIEGLSEHDTACQRLMTVPGIGPIISSAVVAAIGTGSGFKQGRDFAAWLGLVPKQESTGDRTKLGRISKRGNKYLRTLFVQAAHVVIERRPAAAMRALWPWIEKASKRLAHRNLLAIALANKLARIAWAVLARGRDYEPRITTNAA

SEQ ID NO: 308810 - protein, 349 aa, unidentified
MKVTRIGIDLAKQVFQVHGVDEQGKKVFSRQLRRHQLLAFFGNLPQCLVGMEACGSSHHWARKLTELGHEVRLMAPQLVKPYVKGNKNDANDAEAICEAVSRPNMRFVPVKSVEQQDILALHRVRSELVRQRTAKVNQMRGLLAEYGVVVMQGIGQLRRAVPVILDSADNGLSADLRMILMGLREDLVYLDDRVSELDRSIQKLAAHNAAARRLQTLRGVGPITATALVAALGDAHQFKRGRDASAWAGLVPGQHSSGGKDRLLGISKRGDTYLRTLLIHGARSVVKAAQDKQDGLSRWVQSLCARRNKNIAAVALANKTMRMAWALLTRGTEYEADHVRALEPEMAPA

SEQ ID NO: 308811 - protein, 420 aa, unidentified
MKVFHPKDFSVLIGIDWADRKHDICEYSHATKSNTFSIISSKPDAIHDWANDLKKRFPNQQIAVSCELKKGPLIYALSKYDHLVLFPINPSTVAKYRKAFALSGAKDDPTDAQIQSELLVRHMDKLTPLEPESAELRILSQLVENRRKLVQDRVRLSNRLLATLKNYYPQIIDWFKEKDTHLFLAFIHKWPNLASVQTARESTLTAFFHAHRVRRNDLIKQRIEAIKTAQPLTEDEGVIMPNQLLVLMLTKQLEVLMDAINEHDNEIKTRYAACTDNDLFSSLPGAGPVFAPRLLVAFGENRERYKSANEIQRYAGIAPVLERSGKKSWTHWRYSCPTFLRQSFVEWAGETVRYSFWAKAYYEQEKQKGKPHQTIIRCLAFKWIRIIFRCWKNRTKYDESTYLKALKKRGSPLLEYAVSG

SEQ ID NO: 308812 - protein, 336 aa, unidentified
MSELATVGIDLAKSVFQIHGVDENGRVLVRRQLRRSQLLAFFQKRPRCLIGLEACAGAHDWGRRLQEMGHDVRLMPPSYVKPYVKRGKTDAADAAAICEAVTRPSMRFVAIKSEACSSVMVLHRTRDFLVRQRTQIDNAIRAHMTEFGIIAAKGAQNVDRLKEQLDQLPEAARMPLILLFDQLTETNKRIERLTDEIKDTYEQSETSQRLATIPGVGVLSATIIAATTPYVDNFDCARDYAAWLGLTPKPHSTGGKQRMGGISKMGNRYIRRLLYLGAMAQIMLRRRLKREPGSDWLSGMLIRKKTKVVAIALAHRMARMIFAVLRDGSRYEPQAA

SEQ ID NO: 308813 - protein, 439 aa, unidentified
MTTPSLTVLDPTAAAIDVGSEHLHVSVAVGPPKVFGTTTGQLNEMRDWLKAQGVRSVAMEATGIYWLCPYDVLEQARLEVVVVNGKYVKNLPGRKTDMKDCQWQATLHAHGLLNPGFVPPAHIRRLQDYLRVRTDHITMAGSHEQHMQKALDRMNLKIHDVLSDLTGASGLKMVEAIVQGEREPAVLLALCDPQVQKNKAGRLRAALEGTWKEEHLFALRQAYELWQFYQKKIGECDQAIEKVLQEMTGPEDPAKPAPPTTKRGGVNAPQIAGLHSMLWRLCGNKDLTALPGVADYVLLQLLAEIGTDLGKNWQTEKHFTAWLGLAPGSRQSGKRRGSQKRGRNRAGRLFCVIARSVGRSVDKALGGFYRRLKGRRGGLVANLALARKLAELFWRLMVHGVTYVEQGLKKYEERVAQTEQRLLQKLARKYNLVLQPKAA

SEQ ID NO: 308814 - protein, 407 aa, unidentified
MAAVMIGVDPHKGSHTAVAIDGTEEPLGELRVRASAWQAERLVAWAASWPERTWAVEGAGGLGHLLAQQLVAAGERVLDVQPKLGARVRLLATGASNKNDPNDARSVAIAALRSPARREVKADDHAAVLKVWSTRHRDLGRARNQVACRLHAVLCELVPGGISKEITAAQGTRVLESVHPSQAVQIARCELAAEFLADLRHLDAQLRDTRKKLTVAVRASGTTVTDVFGVGPVIAGTVIGDTGNVARFGSRDRFAAYNGTAPVEVSSGNRKIYRLSLRGNRRINHAIHMAAVTQIRHHHSDGRAYYDRKIAEGKTHKEALRCLKRRISDAIYARLQDDARRAAGAPEAAGPGGQPGNDSDSSATGSHPENRLFGQATPEPGATLRTATPRRRTIPPKPTSEKTRQNP

SEQ ID NO: 308815 - protein, 383 aa, unidentified
MPMRQVCGLDVHKDSVFACILNENGVIFQEKFGVLTPDLEQLASALQEHDVSEVCMESTSVYWMPVWRVLEPYVADLKLVNPYFIKQLPGKKSDVKDAEWIATCLLKDLIRGSYVPADIIQQLRQYDRRISDLNAECVRKLGKLDAALQRCNIRISNYVSTTDGKSYKDVVRLISEGIRDPAALLKVIHGRITNRVGKDVIQASLKGVISDTDIDVIRQLREEVDLAQRHKDECQSKMDAICQQYFPEQLKNLQSIPGVKGRSATAIIAEVGSDVSSFQDAAHLVSWCGLKPRNEESAGKIKARSITHGNRYLRKTLIECAWAASKTQGCYLNKFSYYQTVVRRKNKMKVQVAIARKILTAVWYVLHDNVAYRDYNPDIAPAA

SEQ ID NO: 308816 - protein, 356 aa, unidentified
MSHEVKYIGMDVHKEAIVIAVLNGSGKLVMETIVETKASSILQFIHGLRGELHVTWEEGTWAAWLHDLLQPQVQEVVVCNPRRNALLKEGSKSDKVDARKLADLLRTGMLRPVYHGENGLRTLRELGRSYQTIGKDLTRVMNRLKALYRGWGIACAGTQVYAPRCREEWLGKIPHAGVRRRAELLYQQLDGLQALRREVRREFLEESRKHKAAKLLRQIPCIGPIRAGLLIALMQTPYRFRSKRQLWTYSGLGIETHDSAQYRYVGGQLQRSKKPQQIRGLNRNHNHAMKEIFKGAATRASCSTGPFRDFYAALLTKGMKPEMARLTLARKIAAITLTLWKKEERFDAEQLKTQAA

SEQ ID NO: 308817 - protein, 399 aa, unidentified
MLAVGIDISKSKSVAAILNQDGSMHTSPFEFHHTQPELDAFIKYILNSNQSATILMENTGHYHYPVLKAFREAGLPVCMVNAYQIKKFGDMDLRKAKTDKKDAVRIARYALEKSYSLVPYTSMEQKYEDLKFLARQYNQRMLTLKTNKVFLLNLLDETMPGITNILPLTTRTPETSLSVLFINRFKSYDRIKKMGKSRFLDAFEKIARKSRNRQTKTYGLVIYEAALRNITTRGENEYTLAAQDQCLELVCESQKAADSIIPKMQTLAETLPEYAVLRSMAGVGDRLGPLILAEIGDIRRFHSGKALNAYAGNDAPPYQSGTFESHNRHISKRGNAALRKYCFEVMQALKLTRPQDDPVYLFLLKKEQEGNPYNVAKMAGVDKFLRIYYARAMETLKQQ

SEQ ID NO: 308818 - protein, 399 aa, unidentified
MAQPILWAGVDAGKAAHYCVAINADGQRVLSRRVVNDEAALTDLIRAVKELADGGSVRWAIDLNSGGAALLITLLLDDGQDLLYIPGRTVHHASGAYRGDGKTDAKDAAIIADQARMRKDLHKFRHRDKTAVDLRILCARRNDLASDRNRVINRLRAQLLEYFPALERAFDFAHRKGALILLTGYQAPDGLRRTGAARLERWLRDRGAYNASDIATRAIEAATAQRTTVIGQDVAASVVARLAQNVLDLNAELVEVDAMIEAKFGQHRLAGIIASMPGFGHLLGAELLAATNGDLTSFTTADRLAGVAGLAPVPRDSGRISGNLKRPRRYDRRLLRVFYLAANNSIKTCPESRNYHDRKRSEGKLHSQAVLCLARRRLNVLWAMQRDNTSYQPGSPRVA

SEQ ID NO: 308819 - protein, 394 aa, unidentified
MIYAGVDIAKTDHVIGAVDERGAEMCRPMPFKNTEAGLERAVAWLEGLAGSPSDVVVGMEATGHYWMACYSFLVARGYSVAVINPMQVKAVRKLKKLDKVKNDRIDARLIAETLRIGQYDETRLATDEVASLRSLSRYLQSLRGMAAELKTQCVCLMDAHFPEYAGIFSDMFGAGSRAVLSRSPLPFELARRRADSLARDIAEASRRGGKSAGYAAKIKAAARSSIGVRLGQEAASFQVKSLIRQIEFADSECAKVEARVRALLDEVEPLVLTIPGVSYATGAQIVSEIGDVSRFRNASALVSYAGLNSSVSQSGQFDSGGGPITKHGSPYLRRALWLAANRARQYDPGLRAFYDKKRAEGKPHRVAVTAVARKLCHIVFAVMRDQVPYDPGRE

SEQ ID NO: 308820 - protein, 338 aa, unidentified
MESYAGIDLHSSNNYMAVIDGKDKRIYGKRLPNKMDTVISALEPFKESLKGIVVESTYNWYWLVDGLQDHGYKVHLANPSAIKQYEGLKHVDDKWDSFWLAHMLRLNILPEGYIYPRDERAVRDLLRRRLLYVKQRTAHILSLQSMITRILGSKMSGRMIKRLKEEDVERMFDSPYQVLAAKSNISTIGFLRERIKVIEREVKNLVELQEPFKCLLTIPGIGDILGLTIMLEVGDIARFEKVGNYSSYCRCVKSERRSNDKKKGEGNRKNGNKYLSWAYVEAAHFAKRFCPKADRFYQRKKARTNGIVASKALSNKLARASYYIMRDRIPYDPVKLFG

SEQ ID NO: 308821 - protein, 402 aa, unidentified
MNAVGIDVSKGKSMVSVLRPFGEVVAKPFEVRHTAGELRALADYLKSLDGETKVILEYTGRYYEPVAQLLHDAGLFVSAVNPKLIKDYGNNSLRKVKTDKADSRKIARYGLDNWVELRQHTPMDTIRYQLKTMNRQYGLYSKTKVSMKNNLISLLDQTFPCVNTLFSSPAREDGSQKWVDFAASFWHLDCVRGLNLAAFTQRYQKWCKRHGYNFSSGKAAEIHEGAKNQIALLPKDAMTKMLIHQAIEQLNATSKTVELLRTEMNRLAQQLPEYPVIMAMGGVGKSLGPQLMAEIGDVTRFAHKGSLAAYAGVDPGANQSGTREAKSTPSSKSGSPELRRTLFLVMSALLQTSLADDPVFQFLDKKRAEGNLYYVYMITEVNKFLRIYYGGVKEYLLSLEPA

SEQ ID NO: 308822 - protein, 322 aa, unidentified
METVAFEQVVSRGCGLDVHKETVVATIDGEGLERTTREFRTFTRSLTELKDWLVENKITHIAMESTGVYWKPVYNILEPTGITIWIVNARHVKNVPGHKTDKKDSRWLCKLLLAGLLKPSFIPPREQRELRDLTRYRKKLIRDVASNKNRIIRILEDCNVKLSSVLSNTSGITATKLIDKLCEGKQVTIEDIDEVYHGKIGATKEELWEACNGNITDHHIYLLGAIRSHNRHIESLIEELNQKIRQMLSPYENVLELLEEIPGLSHKTVEDLIAEIGLDMEVFPSEKHLASRVGISPGNNESAGKKKVVEPPTGINRPKQPW

SEQ ID NO: 308823 - protein, 401 aa, unidentified
MLSVGIDTHERMHYAEIQDEKENKLWHGKIRNIKEDFEFLIDKISKIEKSNNDKVEFIFMNPTGNYHVPLKYFLENNNFTVYMVDARKTLNLRKMINLNTIKSDSEDAHILAATPWHDPKYREYTGHNRSSLSSISRERSIVVKSITAIKNYIHSDLAAVFPEFTDLYSINSAAGMAILYEYATPYSILNAGIDNIIKSIKKASKGHYRIEDINRLMETAENSIGIPDKDDAYKFKIRMNISRLRDEMNNLKNIEKEIISRSSNNGDVNNLTNLRGLGIINSAIIVSEIGNIEQFESALKLQSYAGKCPDIEGSGGKTHSKGITHVRNKFLSNAVYESAISLVMNKNKEFYDIFNREIGKKKSNVQAYIAVSKRLLFHIYSIMKNHKPYKEKMVGNYKRYA

SEQ ID NO: 308824 - protein, 422 aa, unidentified
MKTPGNKPFTAFIGIDWADAKHDICIQAAGDERREFSRLSHTVDDIDEWAQSLYRRFGGPIAIALELSKGPLVYALQKYDFFVIFPVNPSTLAKYREAFTPSGAKDDPTDAEYVLDLIMRHADCFEPLQPQSVEMRTLVSLVEQRRRLVDDRVRTTNRLRDTLKQYYPQALEWFDRIDTLLFCDFIERWPTLLQVKRARRTTLQTFFHQHNMRSARVLDARLTSIKAASPLTLDAAVITPNRLQALVLIDQLRVTLRAIKRFDDEIAELAPQHPDYALFSPLPGAGPSLAPRLLVAFGEQRDRFKNAAELQKYAGIAPVTERSGNKHWVHWRWQCPTFLRQTFVEWAAQTINKSYWAGLYYRQQRDRGCNHQAAVRALAFKWIRILYRCWQTQTPYNEALYLKALKRRGSPLLNQMETAIST

SEQ ID NO: 308825 - protein, 350 aa, unidentified
MNIKHPIIIGIDTHKATHVAVAIDTQGVRLAALSIPATSKGYLELERWSCAIGQVQAFGIEGTGSYGAGLSRSLLAQGHHVVEVTRPNRQLRYTQGKTDSLDAEGAARSVLSGQANARPKPQTGSSDMIRHLKLARDTAVKSRSQAMVTLKTLIINAPADLREVLDQIRGKIAFIRHIAAFRPGEILNTLASAKAAMRALARRWLLLHEEILGHDKELERLVTKRAPDLMKSHGIATLTVAEMLILVGDDPTRIRSEGAFAKLCGVCPIPASSGKTHRFRLNRGGNRQANAALYRVAIVRMRSHEPTLAYIKKRTNDGKSKSEIIRCLKRYIVREIYSQLCVPKTMQIAA

SEQ ID NO: 308826 - protein, 337 aa, unidentified
MEYFAGLDVSMEETHVCVIDRDGKVILEARTPTVPKAIAAALAKGPAVERILFETGRMTPTLFHGLTALGLPVVCVESRQAYQALRSLAAHKTDRNDARGLAHLARTGFFKPVHVKSLPSHAVRALIIARKKLVGQRVTLENQIRGLAVAFGVRLPRGLSPGFAEKGMAAGRGIPGLDGAMRGLLAARDAILKAIVAIDADMKTLERSSAACRRLMTIPGVGRLTALAFAAAIDDPGRFRRSRDVGAYLGLVPRRYQSGEIDYTGSISKCGNGRLRTLLYEAANVMLTRYRGSLALKTWALDIARRSTMRKARVALARRLAVIMFAILKHGTEFEPA

SEQ ID NO: 308827 - protein, 393 aa, unidentified
MSTSVGIDIAKELHWACAIDASGRDLLDRKLLNTPEDLLRLVDELKALAAPVRVGIDVLGGIASLTQAVLLEAGFELVHVSGLSVNRAREGTVGGESKSDPRDARVIADQVRTRRDLRAVEAQSELDIELRLLVSRRRDLTEDQTRRLSRMHDLLASIFPELERSIDLTTKTALTLLSAFVTPVELRQASMARLRKAFGTQANRGYVAALIATARACAERQPMSLPGELLTARLIKELARETLHTLAQLATLDAEIEQRLARHPDAALIRTLPGMGAVLTAEFIAQAGPIARFKSCDALAAAAGLAPVLRQSGKVRFLRRPSGGNKGLKRVFYQSAFSSLNHPQSKAFYTRKRQEGKRHHQAVIALARRRVNVLWAMLHNRQPFSPHPSSKTG

SEQ ID NO: 308828 - protein, 359 aa, unidentified
MQAQRNELNFKGQNIYVGMDVHLKSWKVTIMTEKSEYKQFTQPPDSQVLYNYLTRNFPGATYHSVYESGFSGFWAHRQLEDLGVNSRVTNAADVPTKQKDRINKNDKRDSRKLAHSLRSRDLDAIHVPLEATQEDRALVRGRATFVGDMVKYKNRIKAHLYYFGIPYPERFEKKSTHWSRNFIQWLKEVHFTQTSGNQAFGNLIREVEDHRKLLLSVTRQIKQLSETEKYAANVHLLKTVPGIGLVTAMHFLTETEDISRFEDTDHFASYVGIVPGMHNSGEVRKDGKITFRGQPILKKCIVESALVATRNDPALSLAYKTYVLRMDNNKAIIRIARKLLNRIYFVLKNKKEYVKCVVK

SEQ ID NO: 308829 - protein, 450 aa, unidentified
MSRPQVIDDTEHERVHERVAAIDVAKDTGMVCTRTPHPSRPGARRATVQSVKARTGAVRALGRRLRKDGIEVVTLESTSDYWRIWFFVLEACGLAVQLVHAAQAKNLPGRPKTDKLDAMWLARLTELGLLRASFVPPKAIRDLRDYTRARTRLVQERTRCWQRLEKLLEAALVKVSSVASKLTTVSAQDMIKAMIAGERDPGMLAGLARGRMKARHDDLVQALDGTFDDHHGELAGMLLDHIAFLDARIARLTTRAAQLTGAMPAAWGVDPDGTTGPGAGTGPGAAVLNAVARLAEIPGLSPDLARTIIAETGLDMTRFPTAAHLVSWAGLCPSARQSGPRTRPGKKGQGDTWLRGALGQAAVGASHTATFLGERYSRIVRRRGKAKAQVAVARSILIIIWHLLADPEARFTDLGYGYYQARTDKDKKIKNHIRQIEALLGHPITITKAA

SEQ ID NO: 308830 - protein, 356 aa, unidentified
MSRDIKYIGMDVHQEAIVIAVLNGSGKLVMETIVETKASSILQFIHGLRGELHVTWEEGTWAAWLYDLLQPQVQQVLVCNPRRNAFLKEGSKSDKVDARKLAELLRTGMLRPVYHGENGLRTLRELARSYQTISTDLTRVMNRLKALYRGWGIPCAGTQVYAARYRGEWLNKIAQAGVRRRAELLYQQLDGLQALRRNVRSEFLAESRKHKASKLLRQIPCIGPIRAARLIALIQTPHRFRSKRQLWTYSGLGIETHDSAQFRFVRGQLQLSKKPQQLRGLNQNHNHEMKEIFKSTATRASCGRGPFHDFYAALLAKGMKPEMARLTLARKIAAITLTLWKRGEGFDAEQLKPQAA

SEQ ID NO: 308831 - protein, 321 aa, unidentified
MNEFSATPCYIGIDVSQDRLDVFVQPDNKRYKVANDESGCLKLIKLLRHHHPTCIVMEGTGGLEKLAAMHLAKANLPVAVVNPRQTRNFAQAVGRLAKTDEIDAEILARFAEATKVEPRFIPDDERLELKELANRRRQLVVMMNMEQNRLTRTWTAPARASIQTIIESLKHQLKQLDDEINKKIESSPMWRMQDDLLQSVKGIGTATASFLIAALPELGRLNRREIVCLVGLAPFNVDSGKLRGRRSIRGGRSDVRKSLYMATIVACRWNPTIKVFYENLLVAGKRKKVAIVACMRKLLIILNAIMKQEYARQGQIITQAA

SEQ ID NO: 308832 - protein, 351 aa, unidentified
MIIIGVDYHPSFQQIAFTDKDTGECGERQLNHSGGEAEKFYRDLKLREANVRVGIEATGHARWFERLLAELGFELWIGDPAQIKAKRVRKQKTDREDARLLLKLMLEDRFPRIWVPSPENRDLRQLLWHRHRLVQMRTRIMNQLQALAMNEGKRWKSKLWSGRGRADFEKLPLAPWASRRRKELLELLDRMNPTIAELTVAVEQEANKRPEVQRLMTHPGVGPLTALAYVLIIGTPLRFQCGKQVGSYMGMIPSEDSSAGKQRLGHISKQGNSLLRFLLVEAAQVTVRLDPAWRRRYLHLAFRREPRIAKVAMARKLGVRLFWMWRKEWTYQQVLEFGSHAGQLVTVRGGK

SEQ ID NO: 308833 - protein, 401 aa, unidentified
MIEPIVKRVGGIDVHKGIVVVTVLKEDDEGGIGKETKEYRTYWKELREMAGWLKKEEVELVVMESTGVYWKCVYEAIEEEGIRVYVVNAQHVKKVPGRKTDVKDSEWLAELGRCGLLKASFIPPKDIRELRLLTRYRRKLVGYLGGEKNRLQKVLEDGGIKLGCVISDIDGVSARKIIEGIIEKKSPDEIKGLCSLRIRNRWGEIEEALEGYISDRHRFILKRIMGHIKWLEEEIKQIDVQVVEAMKPYLKEWELLQTIPGIDELSAAMLIAEIGVDMGRFGGKEKLSSWTGISPGNNESAGKKKSGRVCKGNKYVKQLLCEIANSAIKTESQFRGYYKGLVIRRGHKKSIIAVGHKILEVIYVILKNKKPYRDPSINYEEIVVKRNAPRWIASLHRFGYI

SEQ ID NO: 308834 - protein, 341 aa, unidentified
MYYIGLDLHKKTISYCIKDISGKVFGEGTIEATRQSLDDWMKQLPGRWMAAMEATIFTGWVYDHLRPHAEAVKVAHPLMLRAIAAAKKKNDRVDAATIADCLRCNFLPECYMAPMEIRDRRRTLRYRNLLVRQAVQLKNKTAGLLMETGVTYNKKKLHQGGYFTEFLATNEEVSESLRPLLRLNRGMLVGLKKIEHGLLRSLEQDPQLVERVSRLMTIPGIGPVTALSWVLEVGEVKRFSSVKQVISYCGLCADEKSSAGVAKRGPLSKQRNKHLQTVLVEAAKLAPRWSPELALVHANALQKGNRNRATLAVARKLAAYLLAVDSDERVFVVRGQEVTAA

SEQ ID NO: 308835 - protein, 332 aa, unidentified
MKKIIHFIGIDVSKETLDIALIRNNDKSNIYSSKVTNNKTGFKKMKQWLKAENVSLQEAVFCIEHTGMYSKPVGQFILSVQGNLWMEMSLKIIRSMGVQRGKNDKIDAMRIALYAQRCQDEMKLYEPPRPIVEKLRTLLQLRKRLISSRNSLQVPCNELTTIDEQAGKEATSLIRSSVSALEKNIDVINEEIDELIASDEQLAHEFEIGTSVPGIARITLAYIICFTNEFKNYSGGKQLACYCGVVPFEYTSGKSVRGKPHVHNMANKFLKKLLHMGAIAAVTYYDEFKCYYKRKVEEGKPKMLVLNNVRNKMVLRLAAVIKNNKPYQKIAA

SEQ ID NO: 308836 - protein, 359 aa, unidentified
MGEGTFVGLDVHARSVVAGVIDAASGEVRSAGLPVGSAEVVRWLQGLPGPVQVAYEAGPTGYGLARAAAAAGIRCLVAAPALIPRAPGDRVKNDRRDALRLARLLRAGELVGVDVPATDAEAARDLVRAREDARADLMRARHRLSKMLLRYERVYPGTAWTREHDRWLGSQHLEHPAAEATLGDYYQAALQARLRRDRLDAAITELAQQPEWAPVVNRLMCLRGVGTLTAVGLAVEIGDWHRLSGANIGAYLGLTPTESQSGARHTRGSITKAGNRHARRLLVEAAWHHRRPHRASLELERRRAVCRPEVRARAELAGRRLHQRWTHLNQQRGLRSTIVAVAIARELAGWCWSLAVMDD

SEQ ID NO: 308837 - protein, 342 aa, unidentified
MKEVTTIGVDLAKNVFQLHGATADGSVVFRKKLSRLQFARFMAGHGPCTVAMEACAGAHHWAREFARQGHCVRLIAPHYVKPFIKRQKNDAADAEAIVEAALRPTMRFVEPKSADQQARAIAFRTREQLVKQRTEVVNALRSHLYEFGYVAPEGIGCISRLADVVEDPDAGIPDLARAICRMLLEQIAHLTDRINALKARIADMSNAAATPRRLQTMPGIGPITALAVETFAPPMEQFRRGRDFAAWLGLVPRQHSTGGKHQLGKTSKMGQRDIRRLLITGAMAVIRWALRRGSPSGSWLARMLERKPPMVVAVALANKMARGIWAMLTRDEDYRGPKLIGA

SEQ ID NO: 308838 - protein, 408 aa, unidentified
MEILYPRCAGLDVHKDMVMARVRCVSEPRVEQTRSFATTTGALVELQEWLSSHGVTHVAMEATGVYWKPVWHLLEEHLTLVLANAQHIRNVPGRKTDVNDAAWIADLLAHGLIRSSFVPPAPIQALRDFTRTRKQLVREISQHTLRIQKTLEDANLKLGSVLSSVVGSSGRAILSALIAGESDPERLADLAQGAARKKRAALIEALHGRISVHHRRLLQLHLDLIAALERALEEVDADVGKLLAPIRQCARLLTTIPGVSDLTAQVVLAEIGVDMARFPTPAHLLSWATMCPRNDESAGKRRSTRTRKGSPWLKTALVTAAWAAVRVKQSYLQAQFLRLRARRGAKKAILAVAASMLTAIWHMLKNGVEYRDLGADHFARRDRSKAILRLVRRLNDLGCDVQVTPQAA

SEQ ID NO: 308839 - protein, 339 aa, unidentified
MQVSTLGIDLAKNVFVLHGVNHTGQTVLKKKLSRAKFAEFVIRLEPCLIGMEACSSSHHFARMFIRHGHQVRLMPPQYVKPYVKTNKTDATDAEAICEAVTRPNMRFVQVKTVDQQAVLALHTERDIIIRERVACTNSLRAMLSEFGFVMATGRKALKQGVPEILEDGENELSPFVRASTLRQMAHIDALDDHLELIEQQLKSWAETQAACKRMTKVPGVGLLTATYLVASVGDGKQFSCAKQFSAWLGLTPREHSSGGKQHLGRISKRGDGYFRYLLVHGARAVASVIERHREDMRWFDGLLKRKNYNVAVVAQASKTARILWSMLVHETDYRSPAIA

SEQ ID NO: 308840 - protein, 316 aa, unidentified
MNACARIVVGIDVAKDTLEVATSAAERWACANDPKGQRTLRERLRQGDVDLIVVEATGGYETALVSTLAQANLPVVVVNPRQVRQFARALGKLAKTDRIDAAVLVQFGQQAAPEVRPLADAQTQLLDALLTRRQQILEMIQAERNRLEHALGPIRTDIRETIAFLVKRLKQTDRDLDGQLRQSPVWREKEKLLKAIPGVGRQMLLTVLATLPELGRIPRKQLAALVGVAPYNCDSGTLRGRRHCWGGRAQTRQVLYMATLSATRCNPQIRPFYQRLLATGKPKKVALVACMHKLLLIMNAMVRDNTVWNPQMLRAN

SEQ ID NO: 308841 - protein, 363 aa, unidentified
MSDGICFAGLDVHARATAAAAVKLGSGEVFRARLSGGPGAAIDWLRSLPGPVRAVYEAGPTGFGLARSARAAGIEVMVCAPGAIPRQPGDRVKTDARDALKLARLHAAGQLRPVVVPAVELEALRDLVRAREDLRGDLMAARHRISKLLLRRGVVWAGPGNAWSARHLGWLSRVSLDDPLADTVLGEYLACHELLLARRGRLDVLIAEQAAREPWAQTVARLRCLRGVDTLTAVGLVAEIGDIAAFAHPKQLASYVGLVPSEQSTGERRRQGTITKAGSGHARRLLIEAAWHYRRAPRVSLTLRRRQTGQPAAAIDAAWRAQLRLHRRWAHLDAARGKKRTTVAVAVARELACFVWEIARQPD

SEQ ID NO: 308842 - protein, 345 aa, unidentified
MYIASIGIDLGKTTFHLVALGERNKILLRKKFSRSQLLAYTANLPASLIGLEACAGAHFVGTALREQGHEVRLIPAQFVKPYRKSNKNDFLDAEAIAEAVTKQNMRFAQLKTQEQLDWQAMHRVRDRLVQRRTALINEIRGFLLERGITFAAQPIHLRKNLPTVIEDAEQNLSPRLRWLLDRLWQEWKQIESEVQAITDEIERISNEDARCRQLRQIPGFGPLISTATVAAIGNGAAFRRGRDFAAWVGVVPRQYSTRGKQKLYGISKRGNVYLRRMLIHGARAVLFRVKYDTAGFGQWVQRLAQRAPHNKVVVAIANKLARIAWAVLSSGKDYRHQPLLQLAAA

SEQ ID NO: 308843 - protein, 335 aa, unidentified
MSRFWVGVDVSKRKLDVALMDERGKYKSRVFDNAAAGHSALMTWLVERGASVTGTHVCLESTGPYSDGPATALADAGWRVSVVNPARVKGFAQSELVRNKTDRSDATLLARFCAALEPEVWEPAPLEYRQLRALVDRLEALTEMHQQELNRLEGHEQAADEPAIASIHQHLQWLQARMAELQRQIDDHIDGHPKLRDDAELMRTIPGVGDKTIAKVMAYVGDVRRFKSAKALAAFIGVTPRLKESGSSVKGRTMMSRTGHKAARQALYMPGVVAMKYNPTIKAMRERLLAGGMAKKAIVGASMRKLVHQIFAIVRSGKPFDPSMAAARLDFQDGI

SEQ ID NO: 308844 - protein, 438 aa, unidentified
MKRIYSSRVFVASELLERVAALKRGPVVVGIDVSKGELMLMARGADGTCCGPRRAVNPGQVGEVVGLIHQIGALGPVKVAMESSGTYGDALRQALSQARVELHRVESRRSHDYAEVYDGVPSQHDGKDAAVIAELCAIGKSSVWTYEPPDETQSRMRSLVEWIDGQDRVRRLWVGRVEALLARHWPEATRVLELKSGTLMRALVKYGGPAGLAADADALKHLRRWGGSLLADEKSAALLESAKATLGVKQNQADRERLSRCAWEALAASLEVQRSKKQLKGLAKGNAVIEAQAAAIGMVSACVLWCRLGDPNDYLAAEAYRKAMGLNLTERSSGSYKSRLHISKRGDRLVRRWLHLAALRLVKQHPEVRRWYLQKRSRDGNRHLCALTAVVRRLAIALHKVATGKDPFDPKRLFAGVTAANAAATAKMTSTAPAAGGI

SEQ ID NO: 308845 - protein, 400 aa, unidentified
MYKYFLGIDISKDSFDFSFTDETEKVLYKDHYQMDMTDFTKLSNYLSPFSNDEILVVMEATGIYHLNLLSYLLEQDLSVSVVNPLFIHAFTKSMTIRKTKTDAKDAHIISLFAKRNGVNLKLSKSDDLESIKPIVREKEKLIKSMSALKTDMKSIVNQVFPEMLKNTNIFSKSSLNLLLQAPSKRIIRNLKEKKIAKLLSSDTTRGAKPKVGASEILSLAKNSIGINNQSLEKILISKIKQLEFLQLQLDEFNEIIEQFVDEHHNDDIELLTSISGTGKSSASSFLIELGDINNFATHKQLTAFIGTDPSIYQSGTSVNVKGSISKRGNSHLRRAIWHMARAATVWNETLKAYYDKKRSEGKTFKQSVIAVANKLIRIIFSMLKNNTKFDLNYQPQGVTE

SEQ ID NO: 308846 - protein, 448 aa, unidentified
MTQIRGLVRGGVDAHAEAHHAAALDEQGRLLGVAAFPATAQGYRQLLAWLEGFGQVGLVGVESSGSYAAGLVRFLAARGVALVEVNQPHAHTRYRRGKSDAVDAEAAARKALAGEARAIPKERGGIVESIRQLRVARAGAVKAHTAALNQLGQLIVTAPAELREQLAAAKTSAGKVRLCLRLRADRACLQEPAQAARLALRSVAGRARALERELEVLDQKLGELVASAAPRTVSLLGVSTQNGGQLLVTAGENIGRLASEASFASLCGASPIAASSGRTTRHRLNPGGDRQANRALHMVAVCRLCHCPRTRAYAARRTAEGLSKKEILRCLKRYIAREVYHSLRADLAALSPRAAATPKRRARRAVTITCGGGPIGITRTRAGSPARTAKDDAGVADPDPYPARKRQQRAQSPEGRRPAPSAQRLTGPAAAATAPNPETKSHQFVDAP

SEQ ID NO: 308847 - protein, 402 aa, unidentified
MNSVGIDVSKGKSMIAVMRPFGEVVVSPFEVRHTANELNELAGLLKSLDGETRVVMESTGNYHAPVAWLLHDAGLYVSVVNAMLVHDYGNNSLRRGKTDKKDAVKLANYGLDHWLTLPKYVPEEDTRLMLKTCYRQYQQYSKVRTMLKNNLISLLDTAFPDANRLFTSPPRADGSEKWVDFVAAFWHCECVCGLSKKAFTTQYQKWCRKHGYNFSEDKALDIYASACGHFGVMPKTDTAKLLVEQAVSQLRATSAALAALKQEMQSLAVSLPEYPVEMEMFGVGPTLGPQLIAEIGDVRRFHSKKALVAFAGIDAPPYQSGQVDVRSRNISKRGSASLRRTLFLVMGVLLQCAPMDEPVYQFMNKKRSEGKPYRVYMMASANKFLRIYYASVKAYLDSLEHG

SEQ ID NO: 308848 - protein, 356 aa, unidentified
MSEGTWVGLDVHARKVVAGVLDAGSGELRSLRAPTVPVETVAWLRQFRAPVRVAYEAGPTGYGLARACAEAGIACTVAAPSKIPRASGDKVKTDRRDAERLARLLRLGELVSVRVPEPHEEAARDLVRAREDARGELMRARHRLSKLLLRHGLVYDSSAWTGAHDAWLRRQRFDSRPLALAFEESYAAVAQAKTRRDALDEAIAELAGEPPFAEIVGRLCCLRGVGTLTAFALTVELGDWTRFRPQSLGAFLGLTPSEDSTGERRWLGAITKTGNTHARRLLVEAAWQQRRPLRESATLAKRRQGQPAAVRSRADQSARRLHQRWHALERRGKRRTIVAVAVARELAGHCWALATM

SEQ ID NO: 308849 - protein, 413 aa, unidentified
MDEEVFVERCAGLDVHKRTVTATVRYPGPRGGRASQTRTFGTTVSQLIALAEWLATFGVTLVGMESTGVYWKPVYYVLEEHVECWLLNARHLRNVPGRKTDVADSAWIARLVEQGLVRPSFVPPRHIRDLRDLTRYRRTLTQERSREIQRLDKVLQDAQIKLTSVVSTLQTKTARAILAALVAGTEDPTVLAELAQGSLRHRKAELAAVMQGRFRRDHHGLLVGQILTHVDFLDGQIAELDDRIEELFVPFGDLPELVATIPGVSVRGAQVLLAECGTDMGRFPSAGHLASWAGICPGNDESAGRTRSGKTRKGSTWLRTELTIAAVAAARSKGTYLAAHHAQIKARRGYAKAVGATRHDILVAFWHIVTDHVAFRELGADWQTSRNSPEHRTRRLVRQLEQLGHTVTLEPAA

SEQ ID NO: 308850 - protein, 453 aa, unidentified
MPSKKGSPEFSVVHPNAAGIDIGATFHVVAVSPDRDPNPVRRFQSFTTDLHELSKWLHDMGVKSVAMESTGVYWIPAFEILESDGFEVILVNAREVKQVPGRKTDYNDAQWLQKLHQFGLLRASFRPTEHIATLRAYLRHRERLIEYSAAHIQHMQKALMQMNVQLHHVVSDITGATGMKIIRDIVNGERDAARLATHRDIRCKESEKTITAALTGNYRAEHIFTLKQAVELYDFYKDRISECDIQIERAMAKLNQNKRSPDVPLSKPRNRTKTRHEPDFALRAALYTLTGVDLTQITGFGPYTVLRLIAECGDDMSKWPTEKHFTSWLSLSPGNKVSGGKVLSSKTGRTTNRATTLLRIAAVNVGKTETALGAFYRRLAGRVGKAKAVTATARKLAILFYSLMKHGVSYIEPGAEYYETQYRNRVVMSLKKRAKRLGYELIAKSEPHYAEVS

SEQ ID NO: 308851 - protein, 425 aa, unidentified
MNQDNQSFAAFIGLDKSDKKINVTLQRCSTARSERSIIQGSAEALHAWVAALCARFPHQRVAICVEQPAAGLIHALMGYDFVVLFPINPVTLARYREAFTPSRAKDDPTDADLLCELVAQHREQLKVWQPDDICTRKLRHLTQARRSSVNMRTRLSNQLKALLKGYFSQALELCGDDLTTPLACAFLQKWSSLQQLKKARPETIRRFYYAQNARRGDVIEKRLTLIAQAVALTNDPALIESSIITVQALTLGLRAVHTAIARFDREIARTFTQHPDASLFAALPGSGTVYSARLLAAFGSRRERFESAEALLNFSGIAPVLKRSGQTTIVHRRYARPLFLHQSFIEYANESIRHSLWARAFYQMHKSAQKSHWVIVRALAYKWIRILFRCWKEHTPYDELRYLKSLQKRGSPLLQYLAQPNTQTV

SEQ ID NO: 308852 - protein, 420 aa, unidentified
MEDEQTEEIIARVAALDIGKAEVMCCVRVPHEGRPGRRLQEVRPYSTMTRSLLVMADRLAELGVSRVVMEATSDYWKPVYYLLEGHGFETWLVNARDVKHLPGRPKTDKLDSVWLCKVAERQMLRPSFVPPPQIRRLRDVTRYRTDLVEARTAEKQRVEKLLEDAQIKLSVVASDIFGVSGREMMAALISGQRDPKVLAAMARGRMRAKRPQLEEAFTGYFTDHHRLLLTKMLARIDALSADIAELETVIGDMIAPFADAVRRLDEIPGIGPAAAAVVIAEIGVDMSRFPTAGHLSSWAKLAPGIKESAGKKKGKGATGHGNRYLAKVLGEAAVTAGRTDTFLGERYRRIARRRGKKTAIVAVGRSMLVIIWQLLSDPEAHFIDLGSDYYAKHIDTERKKRAHIRHLEALGYRVTLDPAA

SEQ ID NO: 308853 - protein, 404 aa, unidentified
MEGPVITVDVSKGNCHYQPFIENGHPMRKPKVLDDTIDGFSRISRLIEDLEKKTGAKELPVVFEATGVYHRPLQKYLQDNGIPYYIISPLLSATYRKTTLNGNKTDSLDCTHIAKAYYSEKLCPYYEQSPEYLRLMRLNRYYEGELVYLRKRKVALRSYLDIIYPRIDKKFSGNQNIYDPLPMEVFKQYPHPSLLLKHREDVIVKRICKPSGHKPGYAEKIVHKIYEAAKECYSGCGPYDIEVIELPEMIKKMQEQEQLCQSILSDITALAKAVPYYACLTSIPGIGDNLASRIIAELGDIDRFHNRSALVAYAGLNPKILQSGDIDGTHLKISKKGNKHLRCLLYLAASCNYRAKKYDPVYEFNKKKRQQFGSHKSKAATVATAHKLLAVIYAMCKNGTLYSF

SEQ ID NO: 308854 - protein, 411 aa, unidentified
MSVVQFTQVLSRGCGMDIHKKVVVAAVQGEGICKETRSFDTFTRSLTQLREWLVSLGITHVAMESTGVYWKPIYNVFEGFIPHIWIVNARHIKNVPGHKTDKNDSEWICQLLMAGLLKPSFIPPKAQRELRDLTRYRRKLIQFVSANKNRIIRILEDGNIKLSSVLRDTSGATAVKLIDMLCDGKQITLSEIESVRHGRCQHTKEEMLEACTGCLDEHKVYMLGKIRECNASLKEGILDFDKRIKDVLSSYHDAIERMCEIPGIQNRVCEDLVAEIGLDMSNFPTSAHLCSWAGMCPGNNESAGKKKSGRTNHGDKQVKETLVEAAWAASRAKGTFFMERFNRLAPRKGSKKALIVGHSLLKCIHYVLSTGGRYKEWGDNYVPNKKEQKRKEYLKKELQKLGYSVKLSKED

SEQ ID NO: 308855 - protein, 403 aa, unidentified
MTITCGIDWAEAHHDIALVDDEGTVVARARVEANLAGYTELVELISAHGGSPEQTPVAIETDKNLFVVALAGAGFTVYPINPRAVARYRERHGQAGSKSDAKDAAVLAHILRTDAHVHRPLPATTEHASAIKALSRQHQEAIWAMHQTISRLRSVLLEFYPQALQAFPKLKHHAATTVLAAAPTPAAGMRLTRRRVEALLHKCGRRNDPGLADQILANLRTPTLRQPPSVEAALGLTVTGLVDIIAAMRAAVDALEVELDAQFQTHPLAPILRSAPGLGPVLSARILAELGDDPDRFASVNGVRAFAGTAPVTKASGRSRYVKARKVRNRRLGDACHWWAFAALTRSPGARAYYDHRRAVGDHHNAALRNLANKLIGRMWWCLSHSEPWDEATAWPDNISAAA

SEQ ID NO: 308856 - protein, 424 aa, unidentified
METVYHRCCGMDVHKKSVTVCVRSQEPGSEAVQQQMERYGTYLGELERLRDWLVEQRVESVVMESTGIYWVPVWNVLEAGPWELKLVNAQHVKQVPGRKTDLKDSQWLAELEQVGLLRGSFVAGAEMRQLRGLTRLRANLEQEHSRMVQRVQKVLERGNVKLASVVSDVMGKSGRRMLAALAEGCQDAEAMAAMGLGRLRSRKAELRLALQGRFQAEHAYELKLLLGMLQELEARVSKIEGELRRRLETGAEGSWEDAACQAVQLLDTIPGIDWVLAVTIVAEIGVDMRQYGSARHLSSWAGMCPGNHESAGKRLSGKMRKGNRWLRRALCEAAWAGSRTKNSSLRAQYQHLARKGKKRAIMAVGHTILTIAYHLIERQSPYREAGAHHFLARDREAQQRYHLKALHQLGFQVTLSATTPTPAT

SEQ ID NO: 308857 - protein, 345 aa, unidentified
MNKISVIGLDLAKDVFQVHGVDSAGEVVVRKQLKRSQVRRFFTNVEPCLVGMEACGGAHYWTRELAGLGHTIRMMAPVFVKPYLKTNKNDRNDAEAICEAVQRPSMRFVQPKTPEQQAVLHLHRARRLLVRQRVALSNHLRGILSEYGIVLPQGAKVLSGRLPALLEDAENDLPMLTRDLLAECKEEYDQLMERIERLEGRIKAWHVTHDVSQRLASIPGIGVLTASALAATVGEGQDFSNGRQLAAYLGLVPRQASSGGKVRLLGISKRGDGYLRGLLIQGARNVIYHIRRRLRAGQPGGNAWVEQLLQRSHPNAVAVALANKMARIAWVLLVRNQTWCPARTL

SEQ ID NO: 308858 - protein, 410 aa, unidentified
MTHPKMQYTYVGIDSHKDTHTAVFIDCFFEKLGEVQFHNRPSSFDDFLQQAQAYLMDGTIFMFGMEDCSSYGRSLMVYLTQNGHHVKHVNALLVARERKNQNATIKTDGIDAECAARVLLSKFGELPDAAPDDKYWTLRSLVARRGLLVRHRAATKHYLHSLLTQHYPDYRSFFDKIDCRTSLAFFARYPSPCALQGTTAEELTAFLEIPSNKHVGKTKAKQILHSVQGSNTVMQHQDILNSVVQSVIRQLEFNIQEIERLEVNIKEFLTEFNCTLTSMTGIDTVTAAQILSCIGDIKKFPTSAKLARYAGIAPVTYASGKKDLQYANQQGNRELNSLFFWLAVRMSNPLSGKQRVMNSFFYHYYQRKMSEGKTKRQAIKCVERRLVNIIWTMLTKNEEYVNPPAYNLLE

SEQ ID NO: 308859 - protein, 311 aa, unidentified
MTILTSQTVVGIDIAKAEIVIYRSDLQTTDTIQNDRTALKRWLKTLPAQSAIAVEATNIYHLDTVELAHAMGHQVYVVDAYRVSNYRRGIGQRAKNDPCDARLLARYLTNEQDGLRIWSPPPKAYTSLKSLLHRRATLIQNHASLMLSWANEPLLKKVQAAQQKAFKQADQAIQKLLRKVSKEAGIEENIDRCKAIEGVGELTATGLATTFMRGDFANSDAFIAFLGMDLTVDDSGKKNGTRYLTKKGDPEVRRLAYNAAMAACRSAKWKPFYESYLARGFSKTQALVALARKLCRVAFALMKNQSEYQPA

SEQ ID NO: 308860 - protein, 341 aa, unidentified
MAEVCTIGLDLAKHVFQAHGADASGAVLFRKKLRRAQVLSFFATQPPGTVAMEACGSAHHWAREIGKLGHAVRLIPPAYVKPFVKRQKNDAADAQAICEAAQRPTMRFVAPKSEQAQAVALVFRARDLLVRQRTQIINALRGHLAEFGIVVAQGPAHVSSLVRAVEDPAEPVPEIARAILSVLIEMLHTLDGRISLLDREIAQRAKEDVTARRLMTIPGVGPITATALTALAPPAETFKRGRDFAAWIGFTPLQHSTGGKQKLGATSKMGERTLRRLLIIGASAVLRWAARHGAPAGSWLSRMLARKPPMLVRVALANKMARMVWALMAKGGVYRAPAVSV

SEQ ID NO: 308861 - protein, 357 aa, unidentified
MKKLFIGIDFSKEKLDATIILACGMNEIGSREYGCFPNNTTGYRKLCNWVKTNAWNTIAEEWLFCGEDTGSCSIGLSKWLYGKGYDIWIENAYAIKHSSGIQRVKNDKADSAIIAEYAWRQQDKVVPFEPLNESLAQLREIFLYRHKLVGQRVAMELRKEDKSQSNKSKAISFINRKSKHLIAEINKTIAECDKAIDSIIEADEELKENYAIITSIKGVARQNATCVLVYTNNFKKFGYDPRKIACYYGACPFGKQSGTSVNTPAHTSHFANKLIKSLLGQAAHIAKIYNPEIRDYYQRLISKGKKPQVALNNVKNKLIRIIVALVRKKVPYDQNTYKYYEEREVIERKKNEKLIYC

SEQ ID NO: 308862 - protein, 354 aa, unidentified
MLIIGCDYHPSFQQIAFVDTETGEVKERRLGHRQEAEEFYRDLAAQGRKVRVGMEASGHARWFERLLAELQFELWMGDASEIRRKRGRKQKTDRQDAEHILGLLLKNDFPPIWVPSWENRDLRQLLWHRHRMVQARTRIMNQLQAVALNEGLLCRKKLWRERGRQQLESFQLAPWASRRRLDLLELLDRLNPTIPELSQAIEREVEKCPAAQRLMTHPGVGPLTALGFVLIIGDASRFQCGKQVASYLGLVPLEDSSGNRRRLGHITKQGSSMLRFLLVEAAQVTVRSLPEWRRKYAHLMMRRGRKTAKVAMARRLAVRLYWMMRQGWDYQQWSKFGSHAGQPGNRDGVPSNIE

SEQ ID NO: 308863 - protein, 305 aa, unidentified
MAKAQLDIALRPTGERWAVTNDDPGIAALVAQLQAVQPTLMVLEATGGYQRAVVAALAAAGLPVVVVNPRQARDFAKATGQLAKTDVLEARALAHVADAVRPAPRPRPDAQTEELRALLARRRPLIARRTAEQNRLSGASQRLRVDIQAHMTWLDTRLAALDDDLDTTLRASPVWREHEALLRSVPGIGPVCTRTLLLDLPELGTLSRQRIAALVGVAPLNRDSGTLRGTRTVWGGRAHVRATLYMSTLVAVRYNPVLKGFYERLRAAGKAAKVALTACMRKLLTMLNAMVKHQTPWQPHEGPSA

SEQ ID NO: 308864 - protein, 397 aa, unidentified
MYIVGIDIAKRKHEAAVIDGEGTVIIKPFSFTNNCSGYNRLLAMLTKAKLPLDEVSFAMEATGHYWLALFTRLQKEGFRVQVINPVQTNSIRSFYIRQAKTDPRDALLIAEVIRFGHFSESTLHPENIYELRELCRGRHAIVSMQADVKRKVVALLDQVFPEYETAFTNLFGDTSMAILQTCPTPKELSEMPFEELCHLIEVSSHKRFRMAKARELQELARNSFGFAMAGDVFSTMIRLYAKHLDFLKQQVREMDRKIAEIMETLDTPITTITGIGPTLGAYILSEIGDISRFSSAAKLAAYAGIDPTMRQSGEYNGVRNRMSKRGSPYLRHAIWLAASSAVLHDPALKLYFQKKRDEGKPYMASVGHACRKMVSIIYAVMRDNKAYTPCIPNEISA

SEQ ID NO: 308865 - protein, 313 aa, unidentified
MTDLYVGVDVSKDYLDVATSDGTSLRVSNDEAGQQQLVARFSAPAPTLVLMEATGGLERAIAAQLSAAGIALRIINARHVRHFAKATGLLAKTDRLDAEALVRFAQTLKPEPRPIAPEQTVALQALIVRRRQLVEMLGMERNRLRTAHRGVRKSLQASIRWLEKRLAEVDGDIDGALRECGAWREKVELLESVPGIARVISMSLLAGLPELGELNRHQISALAGVAPFNRDSGNWRGRRSIYGGRPLVRSALYMAALVGARHNPVLKAFYQRLRQAGKPAKVALTACMRKLLVILNTMLKTGQPWRIQVVTEA

SEQ ID NO: 308866 - protein, 336 aa, unidentified
MFQLGIDVSKKTLDLCLLREGVKGSVKTRKLQNDINAVNAVIAWLSKQHCKPEDVHIIMEATGVYHESLAYGLHKAGGRISLANPHRAREFARGMGMLTKNDRVDAYMLACYGALKAPEPWLPPPEEVRHLSALLRRRDALVADSTREKNRLEKYLATDTPSVIAESVEAMIGQLNAEIKRLDRLIRSHLNQHPELKKDFDLLTSIKSVGYQLGLNMLVILRSHDFATAEQAAAFLGVVPVEKYSGTSVRGCPKLSKIGPPEIRAKLYLASLCGLRFNPLMKAMYERLCLRGKGKMCAIGALMRKLVHWCYGVLKTQKPFDVGYLPSYARSACKAA

SEQ ID NO: 308867 - protein, 356 aa, unidentified
MRKGNTKSAKGKRLAVTEADRVVVGLDVHKREIHAAVRMNGREVGTHVLPARPAAVEKFLAPYRPGLAHVVYEAGPTGYGLARHLRSAGVPVDVIAPSKTPQAPGDRSKSDRLDCLELARLDEANLLKAVGVPTEEEEAERQVIRLRDQAVDGRRRVRQRIKSFLLMHGLPEPLGLEYWSQGAVAVLGTMEIKKRRLRFCLDLLLEALANADEMIAKIKHEMKEMSQEPRHAATVKALTEHVGVGQTTALAFEMEMYQPERFSNERQVSAMLGLAPRVRQSGGRRQEGPLIKAGRGRLRSLLVEAAWVWIQHDAEARKVYQRLVHNTGSTQKAIVGMARRLGLDLWRLLVKARAAA

SEQ ID NO: 308868 - protein, 340 aa, unidentified
MTLVVAAGIDAGQRFFDVGLAPSGQTFRIRNAPEEIAGLTVRLRQAGVSRVVLEAAGSYAQPLVSALAQAGFAVGLVNPRRIKAFRDAEGRRAKTDRLDAGLIARFALVMPDTVRPLPSAEQSALKALSTRRRQLTEMIAMEKTRLKQALEPLVSDSHTAAIAALTAACRAVEAEIARRLDQDAGRAHERRLLLSIPGIGERVAGVLLTEMPELGRRDRKAIASLAGLAPQVSQSGNAPPRAALAGGRPCVRGAVYERPRRGPPRPGDETPLPTPARRRQTRQARPRGGRTPPPRDRQRGPESQKTLHAAIHPLTPRQSPDRRSTALRFVPLRPGKGRRF

SEQ ID NO: 308869 - protein, 457 aa, unidentified
MRNIGIDLAIAATHKAIVTEADGEFITPVIQFHTRWDEIERLVAQAREGVAPDHPLQAVMEPTGMAWFPVSVALHRLDVAPYLVNGQRVHDLRRFYKRHSGSDRISARVLAKMPLVDKESLYPLEISSAIQFACQRGCKELDRLQEQITAIKNRLRDTDRFAWPGLERVFEDIFSPAARLFRQTWYDPARVMAAGAEVVQRTFWGLSDQGCDLDWAHELVEVAAEVARLYGPTALDYALLQEEVSREQQQLACLEERAAVVWQDTVRPLYRRLHPSRHLESLYGVGEASAAVYVSFIGRAARFPDNRHFRGWHGMVPDSRQSGDAESKGLHISQAGPDPVKKFGYLGADVARRYDPQIAAIYYDQMMNKGKHHNQAVCACTTHLLDRVYVVLKEGRPYELRDVDGTPVTPKQARAIIAERYVVPEEVRKRNNRRARKERAERRMERKRQQKGSRPRK

SEQ ID NO: 308870 - protein, 320 aa, unidentified
MSPNTTNTMTETNSVVHAGLDIAKAQLQLHLENQQHVLPNTVTGHQRLIRLLRVVAGVHVVCEATGGYERKVVSALHSANLPVSVVNPAQVRHFALAQGQRAKNDPIDAALLTAYGHALRPNATPVPQAVLAELRELVQWRDHLKEQLVRARQPAEHATLAFVHRQQSKEATHLEKQMAAVEKELAAALARHPRWREQVQRLAELDGVGTLTAVSVLSQMPELGHLNRGQAAALAGLAPWTRQSGPWEGQRHIGGGRAVVRRALYMSAVALARQTGSTLGKFYARLRAAGKPAKVALTAVMRKLLLQMNQVLKYHVPDPA

SEQ ID NO: 308871 - protein, 337 aa, unidentified
MTLYCGIDLHSNNSVVAVLDEQDRTVYEKRLPNDLETITEVLCIYQSELAACVVESTYNWYWLVDGLMAAGFEVRLAHTSALPEYSGLKYSNDFSDARHLAHLLRLGLLPTGYIYPKEERALRDLLRRRLLLVRQRSLHHVSLQSLIARHSGQRLNTLQIKQLTKGHLADYLQGHALLGGEITRQARCWLETAIKKIERELQRHVKPREDYQLLQSIPGVGPILGTTIALETGTIERFASAGNYASYARCVKSEKISNGKYKGQGNKKNGNKYLAWAFMEAGHYGAIWSPRIKRYYQRKQAKAHIMVAKKAVANKLARACYHMLKRGEVFDVTRAFS

SEQ ID NO: 308872 - protein, 426 aa, unidentified
MKKADLLSTLFVGIDVSSRENVVCAIDFEAQKLLRFSVQNNHPGAVEMATKLHEFLAGNRDINRLMIALESTSFYGIHIANYLSSCELLMPFNTHVYCLNPKMIANYKKSYIDLGKNDAIDAFVIADFARVGRITTAPWRGSQFLALQRLTRHRLHIAGSLTREKTYMLSNIFLKFSEFSMLDEDKQPFSNNYGATASSVLTDFLSTEDIANMPIEALIDHICTKGKNRFVKPSHTASLLQQAVRNSYRLDKCLYEPLTISIASSFNLISAYVSEMKAINKAIEKTFKGLDPNAYQSLLSIPGIGPVYAAGIIAEIGSIDAFNSHNALAKYAGLVWRENQSGNFRADDTILSKAGNSYLWYYLIEAASHVKNHVPEYAVFYHKKYDEVKTHQHKRALALTARKFVRLIFGLLANHQLYSQSRVSQI

SEQ ID NO: 308873 - protein, 345 aa, unidentified
MELHTIGIDLGKTVFHLVSLNLRGEVVVRKKFSRKQLLHYTANLRVELIGMEACGGAHFLGRALREQGHEVRLMPAQYVKPYVKTNKSDFIDAEAIAEAVARPTMRFVPIKTDDQLDMQSLHRVRERWVMRRTAIVNQIRGLLLERGITLRKGRRYVDAALPGILEDATAKLSGALRVLLAQLKLELDQMAGRIDEADAVLNKTARENAACQRLLAIPGIGPVTSTALIAAIGNGAAFHKGREFAAWMGIVPREHSTGGKQKLLGISKRGNTYLRTLFIHGARAVLQQRAKQTSGLKAWLAQLSARTHPNVAVVALANKLARIAWAVLANNEVYRPLVLIGPATA

SEQ ID NO: 308874 - protein, 346 aa, unidentified
METIVRIGLDTSKSVFQLHGVDETEQPILRRKLRRGQVLEFFSRLPPALVALEACGASHYWARELQSLGHEVAMIPPQYVKPYVQRGKSDAADAEAICEAASRPKLRKNFVPIKSPEQQGAQMLARVRNQFIGRRTQLANSIRGYAAEFGFTAPKGLSRLPQLLIDIKADATVPDLAKELVDALAAELARVDDQIATLDKKLMQLHRSNEMSRRLAAIPGVGPIGATLLSIKVVDARGFKSARNFAAWLGLTPKNHSTAGKNRLGVITRAGDGMLRTVLVAGATAVIADMRRRETRSWPWLKDIIARKPPKLVAIALANKLARIAWKLMVSGERYRPASSVMPMPT

SEQ ID NO: 308875 - protein, 401 aa, unidentified
MVSDFKKGRYNLMKIFVGIDIAKLNHFAAAISSDGEILLEPFKFTNDADGFQLLVSKLESFDKNSIIIGLESTAHYGDNLVRYLVAEFYQVCVLNPIKTCQMRKNNVRKTKTDKVDTFVIVKTLMMQDDLRFITFFDLDMMDLKALGRFRQKTIKQRTRLKIQLTTYVDQVFPEIQYFFKSGLHQHAVYALLKEAPSPKEIASMHMTHLANLLKVNSHGHFTKELAKELRVLAQKSVGANDSAISIQITQTIQQIELLDSQLEKIEAEMTDIMKFNDSVIMTIPGIGYINGGMILGEIGDIHRFSNPNKLLAFAGLDPSVYQSGNFQAKTTRMSKRGSRVLRYALVNAAWNVVRNNATFKAYYDAKRAEGRSHYNALGHCAGKLVRVIWKMLTDEVEFNLE

SEQ ID NO: 308876 - protein, 311 aa, unidentified
MEHYVGLDVSLKLTAICIVDRTGKIEREGVVSSDPEAIAIFIKSHAPHVVRVGLETGATATWLWTELNKLGLPVICIDARHAKAALKMQINKSDRNDAVGIARIMQCGWYKEVHVKDLDSHAVKALLVSRALLVKIKRDLENQIRGLLKNLGLVIGRAKMNVFAVRAAELTEHRPELAAAVVPLLSARAAIEQQIADLDRKVMRLARKNAQARRFMTAPGVGPITALCFLATIDDPTRFKRSRSVGAYLGLTTRRYASGEIDWTGRISKCGDKMLRSYLYEAANVMLTRVARWSALKAWGTALAIVYTGTG

SEQ ID NO: 308877 - protein, 459 aa, unidentified
MNKVNQHKTDRFEKMPVVNLAAAGIDVGSRSHFVAIGQNKDDLKEFGVYTEDLHALCKHLVESGRTTVALESTGSYWQPLFVLLQQYNLNPILVNGKFTKNVKGRKTDVQDCQWIQKLHTMGMLEGSFIPDLFTEKVRQYYRHRQTLVESAASYINKMQKALRLINIRLDSVLRDVMGRSGQDIIEAILNGERNAKVLASLAQPSVKTTKEEIASALTGDWRDEYIFELRQCYDIYKYYHKKIDECDEVIKQILTAEIERKQKEENLAKAEGVKIKKKKARKNEANINIQRLAVNLTGGVDISSIEGVGLGTVLCIIAETGLELKAFPTAKHFSSWLKVAPDLKKTGGKVISSHTLKGKGRLAKALMHAANAIGNMKTGGYLVYFFKRIQRRSERSNAIIATANKLSKIIWNMLVKNQPYNPVMPAEYLDKIRKNEVKNIQRKIRQLDIREEEIQFAIA

SEQ ID NO: 308878 - protein, 413 aa, unidentified
MMTTITAEVTGQHDTGEVVAGIDTHADTHHVAVIDRTGRRLADAGFPATFAGYQAILVYLAAFGAVRIVGIEGTHSYGAGITVHLQRAGLRVVEVLRPNRQVRRMRGKSDPIDAYEAAATALAGGEHPEPKVLDGAIEALRYLFAARRSAVKARSAAQVQVKSLLVTAPDRIRRRYREMGDAELLLALSRLRPSTEADQLSRTVLTALKSVARRHQNLTTEIDELEAEMPVLLDQAAPALHRTKGVGVITAAQLLITAGENSDRLHSEAAFAALCGASPIPASSGKTNRYRLNRGGDRQANSALHHIALSRISFDPRTRAYVARKRQAGKNTKEILRCLKRAIAREVYKLITNPGTVADYRTLRPLRHQLGLTQAQIATALAINIAKVSLIERGLAHDNECVRTYHQWLCQRI

SEQ ID NO: 308879 - protein, 412 aa, unidentified
MLFVGDDWAEDHHDVEIVADDGRRLVTKRLPEGLDGITRLHGLIAGCMPEEWAELEPGEAAALVKVGIETDRGPWVAALVAAGYEVFAINPKSSAHYRELHTTSGAKSDRGDAHVLAEIVRLDRAHHRPVAADSAQGESLKLVARAHQSMVWERTRHVLRLRSALREFFPAALAAYGDLDEPDTLQLLLIAPDPDSAARLSTAKISAVLARAHRRNVAARAQQIQGVLRAPALRQPGPVQAAFAAIAASEVRMITAINTEIAALGQVVADHFGRHRDADIYLSQPGLGVILASRVLGEFGDDPDRYADAKARRNYAGTSPITKASGTKKVVLARYARNTRIADATHQWAFGSMRGSPGARAYYDELRARKVGHRAALRQLSNRWVGILHGCLKTQTLYDEKTAWAHRNTTAA

SEQ ID NO: 308880 - protein, 344 aa, unidentified
MGEVITIGLDIAKSVFQVHGVDDVGAVVIRKRVSRAKMLQFFGGLRRCLIGIEACPAAHHWARELQAIGHTVKLMPPSYVKAYLKRSKNDANDAAAICEAVTRPSMRFVAIKTKEQQSALMLHRARQLLVRQRTMLSNAIRGHLSELGIVSAKGRNGTGELLQIITNDADSRIPLAARSILKVLAAQYCAIGAEITSIGKSILAWHRSCEPSRRLEEIPGIGPIVATALVAEIGDWKAFRSGRDLAAWIGLVPKQHTTGGKDKLGSITKQGNRYLRWLLVAGAMAVIRYAQKHGTKKHPWLGRLMERRPTKVAAVALANKISRMAWAIMARGERYREPELSLVV

SEQ ID NO: 308881 - protein, 353 aa, unidentified
MNSSIKYVGMDVHKEMTVIVALDAAGIQLSRLIVRTNSTAILSAIRAIDGEVHLTFEEGIHSTWLYDLLKPYIAHLLVCNPNKIKKPLSQNKSDDIDAFNLANLLRLGDLKGVYHGEHSLRTLQELAHCYQYLVADCTRIKNRLTAIFRARAIAYRADALYRSQDRKQWLAKLEPAVQHRARLLFAQLDALLPMREKAEAEMVKEARKHPAFKLITSIPYLGEIRTALIIATMLTPFRFPSKRPLWCYSGFAVVMSSSADYEQVDGRIVKTSKRAYSRGLNHNFNRTLKYVFKSAANAANTGVFKQYYDGLRAKGMKDSLARLTLARKIAAVTLTLWKKGEKFNPEKFLMATK

SEQ ID NO: 308882 - protein, 358 aa, unidentified
MYKFMKKFFIGVDVSKDTVDVSFFDDDRMKSPEYLAQYSNSSKGFREMVKDLRMCCHGVSSGQWLFCCETTGRYDHPLCHWLVDHGMVVWRESALQIKWSSGIQRGKNDRVDSLRIAEYAWRHQDKMQKFVKPSESLSNLKAAFTHRRRLVEKRTATRCQLKSMSSEKGLSASLARMIVRDLSREIERLSASIATMDESIQKIIRSDSELDRNYRHIISVKGVGPITAVALIVCSGNFKAITSAKKMACYCGVASFRSQSGTSINRKASVSNLSNRQIKSLLSMAARSASRSNPVFAEYFNRTLSRGKPVALVYNNLRNKIITVVYKLIERDCDFDVDYMCMHSTGLRANEPAIREAV

SEQ ID NO: 308883 - protein, 343 aa, unidentified
MNKFAVAGVEVSADVLVVALDNGQLRSSEFPNTAAGHQQLLRWLGKQAAQVRLCMESTGLYGLDAALVLQQQPGVEIMVANPRSVRHFGCAMMQRSKTDPIDARLLAEYAQRMPFQSWQPPSRAGRQLCALARAIHQLTEINSMQKNQLHAAGSTATTPKIVLRELERSLAHHQRSIQRLTRQALQLIASDPQLRQRFHLLLSFPGIAETSALQLLGELVLLAADCNVRQWVAYAGLDPRQYTSGKSVEKKVRISKVGNRHLRRALFMPVLVAVRCNSRFRAYYHHLLSQGKLKMVALVAAMRKLLHGIYGVFQSLQPFDADKLFSLPTSTPAHTAFAEKRAC

SEQ ID NO: 308884 - protein, 377 aa, unidentified
MAQFPVSTSSEQTIYAALELSKNSWLLAIQFPDRDNPSLYPIRGGNAEGLMAKLDAARNRLAKVSGQTPKVTLCYEAGYDGFWLTRFLKQRGIECLVMEPASLQVNRRARRVKTDRIDVENILHTLIAWCRGERHVCSMVVIPSVEEEDLRRTHRERNRLVRERTAHINRIKGLLFAQGIRGINVMKDYKTLAPAELITGNGRSLPKRLGREITREIERLALVQEQLVEIEHERDQAPTPCAATERKRHDLLRLNGIGPTISAILAREVYYRRFANRRQVASYIGLAPSPYDSGDGRRSQGISKAGNSLVRYSLIQAAWLWLRHQPNSALTQWFRHRTEGQSKRVRCIMIVALARKLAIALWRYVELGLIPEGAVVK

SEQ ID NO: 308885 - protein, 340 aa, unidentified
MKIIGCDFHPSFQQIAMVDTETGEQTERRIAREEAGEFYRGLSGSVRVGMEASGNTLWLERLLAELGHELWLGDAGRIRAMEVRKQKTDRRDAELLLRLMIQDRFPRLWIPSQEQRDLRQLLVHRHKLVGMRRQVKNQLQHLALNQGVQQKHKLWTRAGRKLLEELPLEGWTGRRREESLQLLDDLEGRIVPLDQAVKQAAEKDRVAELLQTHPGVGPITALAYAVTLGEIERFQHSRQVVSYLGLNPSEHSSGGRQRLGGISKQGNTMVRSLLVEAGQSAARLDTELKRAYQRLKHRKHSAVAKVMVARKLAVRLYWMWKREQPYAATRMQGSPSHPVA

SEQ ID NO: 308886 - protein, 323 aa, unidentified
MTPTFLGIDISKKDFHVFLLKEERGSKPKKFTNNTEGFESLNKWLKKLGVEELHACMEATSIYGDALAEFLYEAGYQVSVVNPARIKGFAKSELLRTKTDSVDAALIARFCAAIKPSFWKPTPFEVKELPALLRRLESLTQMYQQEENRLETATETLAKLTRAHLEYIQEQQAEIKKMISDHFDQYPYLKQQRELLTSIRGIGEQTAAVLLAEVGRIEDYKNARQLAAYAGLTPCERSSGTSVHGKTRLSCTGNVRLRKALYMPAVVAMRCNPLPKAMSERLLGRGKVKMQVIGARMRKLVHLAFGILKSQKPFDPNYLTATP

SEQ ID NO: 308887 - protein, 433 aa, unidentified
MPTEFAALVAIDWADQKHVWALQRVGSSERETGTLDHTPEAVEVWASELRLRFGGQPVAVALEQCRGPLVFTLTKYDHLVVFPVHPTTLANYRKSFRPSGAKDDPSDARLLLDILTLHRDQLRRLNPDTPETRTLQFLVEERRKLVQEKTRYSNRITARLKMYFPQVLHWFDVGSTMAADFLERWPSLEQLQRARPAAIERFFVDHNSRDRERMAQRWEQIRKAVPMTLDAAVLTACRTAIVAWAALLKQVLTAIALYDEKIDELVRVHPDYALMNSFPGAGSALAPRLIAAMGSQRERYRTAQEIQCYSGIAPVVASSGQQRWVHWRWACPKFLRQTFHEWALHSIPYCPWAREYYEQQRAKGKRHNTAVRALAFKWIRILFRCWKERTPYTEAIYQRVLDARRPQTQLAAPAVELQWKNVAGFLKIAIKEA

SEQ ID NO: 308888 - protein, 334 aa, unidentified
MDKPAVAGVEVSADVLVVAFDHGQLRSSEFPNTTAGHQQMLRWLRQHAAQLRLCMESTGLYGLDAALALHQQTGIEIMVANPRSVRHFGCAMMQRSKTDPIDARLLAEYARRMPFQPWQPPSRKGRQLCALSRAIHQLTEMNAMQKNRLHAAGATDTTPRIVIRELERSLAHQQRSIQRLTREALKLIASDPQLQKRFDLLLSFPGIAETSALQLLGELVLLSPDFKVRQWVAYAGLDPRQYSSGKSVEKKVRISKVGNRHLRRALFMPALVAVRRNPQFRTYYRHLLAHGKFKMVALVAAMRKLLHGIYGAFQSLQPFDADKLFTLPVTAEIS

SEQ ID NO: 308889 - protein, 343 aa, unidentified
MNDTIYNHYIAIDWSIENMAIARMTKKSNKIILIDVPSDIAGMKAYLKKLRGSKILVVEETTTSQWLYTELKDYVDRMVICDPYRNKLLNDGPKTDKIDAAKLVHLLKAGLIKEVYHSTDKFLYLRRFVSGYEDLVKAGVRLKNQRYSFLRACGKRGFEWAGTKLDSEDDQFVLDCMDRQIEAHKQEKEGYEKEFERLAKDYPEISHQKSLPGIGPIHAVKIVARVVTPYRFADKGHFLSYTGLIKLEKISGGRSYGRKNSRYCRQLKSVYKTSTWAAISGNNPINDYYEYLIREKGYPEHNARHKACRKLAVLSLGVFKSGKKYQPYRRDHLKGNKEVTSGL

SEQ ID NO: 308890 - protein, 470 aa, unidentified
MVVKRESDKRTEKKKEKKKEKKKEKKIVKLESLKQLNLNAAGLDIGAAEIYAAVPEERGEESVRKFETFTADLNALADWLEVCGVDTVAMESTSVYWIPVYEILEARGFDLYLVNARHVKNVTGRKTDVLDCQWLQQLHTYGLLRGSFRPSREICELRTLLRHRDMLIRYRVGHIQHMQKSLNLMNLHLTNVISDITGVTGMKIIRAIVAGERDPKTLSQYRDPNCKNSEEVIAKSLEGNYQADHLFTLQQALELYDIYTVKIRVCDEELEKLYSQFAPQVDIEEHPLPPSRKQKRKQKNEPSYDLRSYLYQMTGIDLTAIDGLDVLTVQSILSEVGTDMSKWKSVKHFTSWLGLAPENEISGGKVLRTSTKKVKSRANLAFRQAAMGVSRGRSSLAAFYRRIRSKHGPSVAIVATAHKIARIFYVMLKERRGYISPDTTEYEEKQKERAIKNLKRKAAKLGLEVVPAAA

SEQ ID NO: 308891 - protein, 339 aa, unidentified
MKVINQNVGIDISKETLAVCIVIMYEDFSVKVKGSKAFMNSKIGFKQMLTWVLSKRIPEIRLSFTMEPTGVYYENLAYFLYAKKEIIHVVLPIRAKRYAESLPGNSKTDKLDAKSLGRMGVERKLGVWQIDTPIYRNIKQLTRERNALIKERTNVKNRLHALDHSVSPYKKSLTRLKSLIKYLDKQIKVIEKDIYTLVTSDEWLRKKVEYIISIPGVGFLTAIIVIAETNGFALIKNIKQLVSYAGLDVKIRESGAWKGKSKISKKGNVHIRKALYFPAYTNMKHSNNYMGLYSRIFAKKQKSLIAATATQKKLLGLIYTLWKNETVYVENYQQQKKVA

SEQ ID NO: 308892 - protein, 313 aa, unidentified
MSGVFVGIDVSKAVLDVAIDGGATWQANNDDTGIAALVAELHGHACGLVVLEATGVYHHSVTSALVAAALPVAVVNPRQVRDFARSTGQLAKTDRLDAQVLARFAAVVQPPVRALPDEATQELAALLDRRRQLIDMLVAEKNRATVARRRVQPSVRRHIEYLTQELSETDRDLDTLVRTSPVWRAQEDLLRSVPGIGPQTARTLLADLPELGRLNRREIAALAGLAPLASDSGKHRGVRVCWGGRAVVRSTLYMATVAAVRCNAPIRAFYARLRAAGKPAKVALTACMRRLLTIVNTIVRNQEPWRILPSPTT

SEQ ID NO: 308893 - protein, 340 aa, unidentified
MQISTIGLDIAKNVFQVHGIDAAENVVVRKQLRRGQVIAFFEALPPCLIGMEACATSHYWARELAKLGHEVRLMPAKDVKAYIKRNKNDAADAEAICEAVRRPTMRFVQVKSAEQQAQLMQHRARDLLMHQRTQLINAMRSHLAELGIIAPQGREGVKVLLAIISNEDNKHLPNDARASLIVLAAQLQALQTTIGAIEKRIVVQHRANKESKRLQTVPGIGVIGASAIAATVTNPKIFRSGRDFAAWIGLVPRQMSTGGKPKLGPISKQGDRYLRRILVVGAVSVLRRAKLHPEKFPWITQMLSRRPFKVVAVALANKMARLAWALMMSGKTCRAARFAA

SEQ ID NO: 308894 - protein, 461 aa, unidentified
MARRNPGIPTPVSPAPRGPALRITHPHAAGIDIGGSSHFVAVPPDRDDEPVREFRAFTSDLISLADWLRACRVDTVAMESTGVYWIPLFELLSSRGFEVLLVNARHVKNVSGRKSDVLDCQWLQQLHSYGLLRGAFRPGDGVVALRAFARQRHALLRAQARAVQHQQKALVQMNLQLTSVIADVAGATGQAIVRAIVAGERDPWALAALRNCRIKASEADIALALQGHWRREHLFALRQALEAFDFCGQQLAELDAQIEAQLQRLQVTAGEPAKGRKRSVARNAPKFDLRARLFSMCGVDLTAIPGVDVTTALAVVSETGSDLTAFPTGKHFASWLGLAPGTKISGGKKLSGRTLPSSNRAAQALRLAAAALRTSQSALGAYYRRLCARMDKPKAVTAAAHKLARLIYAMLTRGQPYTDQGQAYYEERYRERVVANLTRRAQQLGLQLVPLAGAAPQAATA

SEQ ID NO: 308895 - protein, 338 aa, unidentified
MKKFIGIDLHSNNSVVVVSDEADRVMFRKRMANDLKLIEAALAPHRDETVGVVVESTYNWYWLVDGLMDAGYRVHLANASAIKKYEGLKYSGDVADAAYLAHLLRLGLLAEGYIYPREERGARDLARKRLQLVRYRTAQILSIEGILMRQMGARMKSESVKGLTPEQVEEFGFAPDVALAVEANRAVSQTLGQQIEALEKRLRERVSLRGEFKLLKTAPGIGETLATTIMLETGTIARFAQVGNFSSYCRCVDSLRESNGKKKGEGNAKNGNKYLAWAFVEAANFAVRYCPQAKSFYERKKRRTNRIVATKALAHKLARACYHMLRDHKPFDVNRCFA

SEQ ID NO: 308896 - protein, 310 aa, unidentified
MRVFIGLDVSLAKTAVCVVDHDGAVQWQGKVPSEPGPLIKRLAEWHGMIELAGIEACPLSEWLHRGLREAGIPIVCVETRHAQRFLSSRPVKTDKNDARGIAEMMRLGHYRPVHVKSPAAQSMRTTLAARMQLVASQLQIEGTIRGLLKVYGLKIGAIHRNRFAARVLELLEMAALTELSAAIEPLLRVREGMRTERKAFDRTLASAARRSDVGRRLMTIPGVGPVTTLAYIATVDDPDRFGTSKALGAHLGLTPRVYQSGEIDRSGQISKCGDRMLRHLLYEAASALMTVLASGPACALGALRSPSAGA

SEQ ID NO: 308897 - protein, 493 aa, unidentified
MKTAPSSLPAKRRVRNTRKLKQQAKTATIATPVGSLDELRPVHRRAAGIDVGSAENYAAIPAEGLAAGESPVRVFGVFSQEQDALVEWLRAHQITTVAMEATGIYWLTLYDKLEAAGIEVYLVDPHGVKAVPGRKSDWLDCQWLQKLHTYGLLQRAFRPDPPIRRLRTLTRQRAELVICGGVHLQHMGKVLIAMNLHLHLVVSDLHGETALRIIEAILAGERDPKTLVKLRDPRCHKSTLSEMEAGLKGTYDDENLFVLEQSYQGWKFYQEQLTHCDERIEKVLAVLPTAKAVTREAPPKPVATPSAPKRGRKKQINRGPNAAAVDFSQALKRICGVDLIQVCGLNLLTVLMLLGEIGTDMSRWRNARAFASWLGLCPGAKISGGKVLSRRTRKVNNRASTLLRLAAWGAGKTDTWLGHFYRRIRARRGAPKAVTATARKLACVIYHMMKYGDEFVFLDTTQYEARARDHRLHRLRKEAQKLGFELTELQQVA

SEQ ID NO: 308898 - protein, 366 aa, unidentified
MKKISTVAKRGNEIFKEPKLTIGLDLGDRTSHYCILDEAGNVILEHRLPTTPQGIQQVFSRIPRSRIALETGTHSPWVSRQLTQLGHEVIVAHARNVRLIGESSRKDDQLDARTLARLARIDPELLGPVRHRSAKAQIHLTVIRARAELVRTRTALVNTARGLTKSYGERLRKCGTGQVSRDLGAGLSAELRDVLEPLLGEIESLNERIAEYDRRIERIAKEVYPEVALLQQVKGVGTLIALTYVLTLDDPHRFRRSRDAGCFLGLRPGRRNSGMSEPQMHISKEGDGYLRTLLVQGAHYILGPFGEDSDLRRWGLKLAERGGKNAKKRAIVAVARKLAVLLHKLWVSGEVYEPLRNNHRLMNAVA

SEQ ID NO: 308899 - protein, 343 aa, unidentified
MEAKRYIGIDLHRNCFTACLRLENGREYLKQWKLEDMAKFTSKLRPTDEVAVEVTGNTRLFHDAVAPHVERVVAVNPSQFKVITHSVKKTDPHDARNLALYLAKDLLPEVRMKDKTQAQIASLTQTRDTMVKLRTALKNKVNNLCSAHGVNLHKESLASEKGLRAVVEMHFDQLVNLELKIIVDQIRSLNKRIAELEETIGREGQKLEGHKNLTSIKGIGGLSSGILLSIIGDIGDFADEGKLAAYFGIVPRVSNSNETERSGRITKRGTKLGRTTLIQCALIAQRYSPYLKTYYERMKSRRGTGKAIVALARKFLGIIYRTLKNKWVFADFPNFVLAEEVAA

SEQ ID NO: 308900 - protein, 415 aa, unidentified
MISAVIECCAGIDVGKKFVVVCVLKGPANGDAQTQIRKYGTTNASLEQLREWLVSCGCTHVVMESTGEYWRPIFNGLEEARNLHIVLANSQQVKGLRGHKTDPEDAHWLAHLLRHGMIRPSYIPPQTIRELRDLTRRRRQLVRAGAQERNRVQKVLEGANIKLGNVLSDVFGVSGQLMLEALLEGKATPEEIAQLAQKSAKKKIPQIRASIEGHRMNTMQRKLIGFSLDHMAFLEEQIRTLDQEIAAHIQVSELQRPHQNLQTVPGVKQEAASSLLAEFGPDMKVFGSGAKCSAWAGVAPGNNQSAGHKKRAPALHGNPWVRSTLVECAWSASRKKGSEFQHQYERLKPRLGHKRAIVAVAHSLALVIFAVLSTGEPYTKPGANPMPETKAAKLIRHHTRRLKTLRNRLTRQTKV

SEQ ID NO: 308901 - protein, 341 aa, unidentified
MKLIRVGVDLAKNVFQVHGVDRSEKAIWRRKLVRGDWIKALLAQIEPGCEIGMEACSGAHHWARLLQAQGYTVKLIAPQFVKPYVKSNKNDANDAEAICEAMSRPHMRFVAVKTVEQQDIQAVHRVRSSLVEQRKAKGNQIRGLTSEYGLIAPKELLYLRAAIPRWLEDQENGLTERFRRLLRGLWEDLLTIDQRVEELDREIEQIARQDPVAVRLQQLRGIGPVTATALLATVGDATQFANGRQMAASLGLTPKQNSSGGKERLLGISKRGDVYLRSLLVHGARAVIRTAQTKSDRLSTWVMRISTTRHPNIAAVALANKTARIAWAMISRGTDYCPLPA

SEQ ID NO: 308902 - protein, 320 aa, unidentified
MSASSVVVGIDVAKAHVDVAVLGAKFDAQRFDNQAEAHSALTAALKPLDVALVVMEATGGYETELACALQAAGLPVAVVNPRQARDFAKSMGRLAKTDTVDARMLAEFAAVLLRRDDLARFLRPLADPQQQWLAALVTRRRQLLAMLLSERQRLQITPKGLHPSIEAIVAAIKAQLDDIEAQMVGHVREHFGELDRLLQSASGIGPVASATLIAELPELGQLNRREIAALVGVAPMANDSGASKGRRHIQGGRFDVRRVLYMAALTATRRNPVIKAFYERLIAAGKLPKVALVACMRKLLTALNAMVRTNTPWKNSLHGA

SEQ ID NO: 308903 - protein, 315 aa, unidentified
MASAAEIFVGIDVAKTWLDVAVHERETFFRVRNEEHDIAKLVMWLKATEPALVVLEATGGFEKMVALELANAGIPVVVTNPRRVRAFARSTGQLAKTDKLDARLLAHFGFAVRPEPRALPGENEERLTGLLTRRRQIVDMLTVEKNRLQTVRVEMRADIEEHILWLQAKLVKLDEAISQFVESEPAWKEKDTILQSVPGVGPVTASTLLAMLPELGKLNRQQIAALVGVAPVNKDSGRKQGKRRVYGGRAAVRSVLYMAALSARKFNPVIREFYERLIKQGKEKKVALTACMRKLLVILNAMLRKNQPWQMQTVK

SEQ ID NO: 308904 - protein, 468 aa, unidentified
MEFYYLGIDISKGYGDFVILDSEKRCVEKNFQLDDTRRGHELLYERIVDFFEDHPEARMFAGMESTGGYENNWFHFLKSLTKRLSIEVVDLNPYAVSVNSKGSMKRNTTDKISARNVAEYMIEHSEKIRYGDYNNLYPLRKTWKFIKLLTKQKNQLINNLESLVYIANPEILNYCREGFPGWVYKLLLRYPTAQKLSMARSGALAKTPHISSDRAKKLIETARTSVASENDEDTANLVVSLVKQILSLAKQIEKQKRNLVRSHSCPEVELLKTIKGIADYSAIGLLLEIVSIDRFDDVKKLASYFGLHPIYKESGDGSGGYRMSKQGRSEPRRILFMVAFNAIQTNPVIKPLYGRLLARNMPKMSAIGVCMHKILRIVYGVLKTGRAFDPEIDRRNREKEYHLERKPRRMKSRRYQDYDKSAPVSRRQARKRKEQEQSQSDIITEFGIETPVPDRIEINGEKYLLTKV

SEQ ID NO: 308905 - protein, 380 aa, unidentified
MDKIIRIGVDTSKGVFVLHGVNAAEQPVLRKKLRRRQVLDFFAKLEPTRIGLEACAAAHYWARELQALGHTVVLLPPQYVKPYVKRNKNDTADAEAICEAMSRPTMRFVPVKTAEQQAALMLAGMRDQLVRRRTQVANAIRGYAGEFGATAAKGLANIEPLLARIAADAAVPELAKELFAVYGRDYGQLEMQIAQIESRLMAWHKGNELSRRLAEIPAIGPIGASLLAMKVTNPYAFRSGRDFAAWLGLTPKDHSTAGKTRLGVITRAGDEALRSTLIVGATAVIQQVRRGRGHASPWLIELLRRKPPKLAAVALANKTARVAWKLMISGERYHGARKFGHGCAPSVSREGRCAALREGSAPRPSRRSRTMPPQMELANA

SEQ ID NO: 308906 - protein, 375 aa, unidentified
MSRPILYVGLDVHADSISIATAEASRDGEVRTYGKIPATLRALDSVLTKLGHPGKELRVCYEAGPTGFVIARHLAKKAIHCLVAAPSLIPKPKGEKIKTDRRDSIKLTRLHRAGELTAVHVPDATDESVRDICRARTDAVDDKRRAMCQLKAFLLRHGHGIADKTPWSEARMRTLRSIALQLPAMNIVLEEYIQAIESAHQRIARLEHQMENVLATWEQAPVVRALMGLRGIRLVSAMILVSELGDIHRFAHPRLLMAYLGLVPSEASSGGKRRVGGLTKTGNAHARWLINESAQHYRLPPKVSPDLSKRQEGIAREHRAEVQKISWKCQQRLYDKGRHMAGRLKIRQKVQIALARELCGFVWAIMKTVQPVTAR

SEQ ID NO: 308907 - protein, 384 aa, unidentified
MMMQTMTRSTECSAAPVHLLMAFELGQQWWKVGFTTGLGSRPRRRRIAAGDVTTLRTEIARAKGLFGLPSDAAVISCYEAGRDGFWLHRSLTAQGITNHVIDSASIEVNRRARRSKTDALDLVGLLTLLARYVAGDRRCWRVVRVPSPAAEDARQLHRTIEVLQSDRTRVINRLKAVLATLGVRLSITTDVLAQLDAARLWDGAAIPPGARQRLERDWRQLQAIEAELADARAARTQLPVDVETTTGRYVQALQTLRAIGPAGGWVLATEIFGWREIRNTRQLGALVGLVPARYQSGTIHRDLGITRAGNTHVRRLMVQLAWGWLRYQPHSTLSQWYQQRFGHGGPRMRRVGIVALARKLLIALWRYVQTGVVPEGAVLKPAGA

SEQ ID NO: 308908 - protein, 385 aa, unidentified
MRDKTFVPREYDVFAGLDVDKKSIAATFSGHQGFIRSLSMPYKVEDLLNHVRNHFADQKVAFVYEAGPTGYGLYDGLAAQGYTCLIAAPSMIPRAPGQRVKTNRLDSKALSESLRGGQLKSIHVPSPLYRELRHLTQLRDTMMSEAVGMKQRIKSLLLFEGIAFPPAPAGSQWSFIVKAKLRKLPCSNTVRFKLDQLLDSLEFAEKQIFKSTKEIRRFCQTDPELSQCIEYMMTVSGVGWIVASQLLARIGDWRELENIRQLGGFLGLVPMEHSTGDKTDRGPITHTGDGRLRSKLIQAAWSAIRKDGELREFFRSVCQRHPRKVASRVAIVAVARKLSVRISVVLMKQRPYEVRKKVHSAPLTQEETSPQGTTRRQAEPGEKNS

SEQ ID NO: 308909 - protein, 401 aa, unidentified
MVSDFRKGRYNLMKIYVGIDIAKLNHFAAVISSDGEIITQPFKFTNDADGFQLLVSKLESFDKNSIIIGLESTAHYGDNLVRYLVAEFYQVCVLNPITTCQMRKNNIRKTKTDKVDTYVIAKTLMMQDDLRFVSFYDLDMMDLKALGRFRQKTIKQRTRLKIQLTTYVDQVFPEIQYFFKSSLHQNAVYALLKEAPSPKQIASMHMTHLANLLKVNSHGHFTKEQDKELRVLAQKSVGANDSPISIQITQTIQQIELLDSQLEKIEAQMTDIIKFNDSVIMTIPDIGYINGGMILGEIGDIHRFSNPNKLLAFAGLDPSVYQSGNFQAKTTRMSKRGSRVLRYALVNAAWNVVRNNSTFKAYYDAKRAEGRSHYNVLGHCAGKLVRVIWKMLTDEVEFNLE

SEQ ID NO: 308910 - protein, 460 aa, unidentified
MNRKRSKSRVDRTMPMMHPNAAAIDVGATLHMAAVRADRATEPVRSFGTFTTDLHRLVDWFTECGVETVVMESTSVYWIPIFELLDARGFTVFLVNARDAKHVPGRKTDVSDAQWLQRLHSYGLLRASFRPKGQIAELRAYVRQRERLLEYAASHIQHMQKALTEMNLQLHHVVADITGSTGLRIIRAILAGERDPEVLACLRHYSCHSSAETIAKALTGSYRTEHLFALEQALALYDAYHEKASACDVRIEAVLKELCIHRGRGIGSVAPAPRRRHRTDQANALAFDVRAALFALLGKDITTIDGLGPYLSLKLVAECGDDLSSWPSAKHFTSWLGLAPSNKVSGGKMLSSRTRRSGGRAAALLRLAAVTIGRTDTALGAFYRRLSSRIGKAKAVTATARKVAVLFYNAVRHGMEYVDPGASSYETRYRTRVVNNLHRRAKAFGFVLQPLEPKAGAVVS

SEQ ID NO: 308911 - protein, 345 aa, unidentified
MNYYIGCDVHKKYSIFVIRDEKNAVSQPVRVEHAKELYQNFLATLPAGSPIAVETTGNWYWIIDAMEQAGHSPILAHAAKSKLMMGQINKTDKLDANGLATLLRNGTLPSVWIPHGELRDQRELPRMRLTLVHMRTALKNRIHATFAKYGITFEDESDLFGKKGRRAIVQRLPELPPETRRTVEQELEILDRLGEQIDQAEKRIKDVIAMSPDMKLLMSIPGIGPVLAITIALEVGDIKRFPDNHRLASYAGTVPRINASGGKTRFGKTRPDVNHYLKHAFVEAANAIVVSQARWPDRHAVRLYQRLKLNKGHGKAVVAVARHLAESTYWVLKKQEVYKEPATMK

SEQ ID NO: 308912 - protein, 349 aa, unidentified
MGEVSTIGVDIAKSVFQIHGVDAEGTVVIRKRVGRARVLEFFANLPPCRVGMEACATAHQWARELKKLGHDTRLMPPTYVKAYVKRGKNDAADAAAICEAVTRPSMRFVPIKSVEQQSVLMLHRTRDLLIRQRTQLINALRAHLAELGLVAAKGREGVHQLVAVVMECGDERLPSNARFACQAIVTQLHAVQIEISGLDKRITQIHRVNADSRRLDTIPGFGVLLSTAVVATMTDPKAFKTGREFAAWIGLVPRQNSTGGKERLGSITKQGDRYLRRLLVVGATSVINSARARPYKYPWVIELLGRRPTKVVAVALANKMARIAWAVLAKGKPYQAPTRSSNAAVPAAA

SEQ ID NO: 308913 - protein, 336 aa, unidentified
MEHLAIDLGGRESQICVRSSDGHIVEERRCPTTTLPRYLASRPRSRVIVETCSEAFGVADAALAVGHEVRVVPATLVRSLGVGARRLKTDRRDARILSEVSCRIDLPSVHVPSRESRERKTMCGMREGLVGARTKLVNMVRGWLRADGRRPRGGELSTFAARVRALSQAAPLPSHVERHLRMIDALNAEIADADRELAVAAKADPVARRLMTAPGVGPATAVRFVAALDQISRFRGAHGVESYVGLVPGEDSSAERKRRTSITKAGPTALRWCLVQAAWAARRTRRKDPMHHWADEVEKRRGTRVAVLALARKLAGILFAIWRDGTVYEPRRSGAM

SEQ ID NO: 308914 - protein, 349 aa, unidentified
MSDTITVGMDLGDKSHITVCFDSQGNELEVGKVTNTKAAIRKYFSRFKGSTVAIEAGTHSPWISRLLEQIGCRVFVGNPRKLRFIWDSQDKSDERDARMLGMVCRLEPRLLHSLHHRGPQAQADLVLLKSRDLLVKSRTKLVNHARGVVKANGERLPSCSTDSFAKRCAAHVPADLWPALESIFDAIAQLGEQIHQLDAKIGRMCRQQYPETARLQQVAGVGPVTALCFVLTLEDPGRFDKSRQVGPFLGLTPRRDQSGGTDKQLRITKAGNRYLRSLLVGCAHYILGPFGPDCDLRRHGLSIATRGGKNAKKRAAVAVARKLAVLLHRLWISEQAYQPHYGKRYQEAA

SEQ ID NO: 308915 - protein, 327 aa, unidentified
MKLKFIGIDVSKKTLDICILEQKTKLFNIKNTEESIRKFFDKTLKDKSFEYHICIENTGKYSWLLESVLSTMECKFYVVNPLHLKRSLGLVRGKNDKIDAVRIANFIKKNYEETALFIPQREEIRAIQILLSERRFKVEQCKQLEVKNKELELLQNSALENLLAADNEKLISELNEQIKRIEKEIQRIIKNDDTMKKLDEQMQSVPGVGKILSWNFLAKTNEFKNITTPRKFACYTGIAPFKNTSGTSVFGRSRVSLFADKSLKKLLHLGAMSAIRLENDLSIYYRRKVEEGKNKMSVLNAIRNKIVHIIFALIKNQNFYQNRLVLS

SEQ ID NO: 308916 - protein, 323 aa, unidentified
MDSIVNGKDNLMDSIVIGIDVSKDRLDVATPDGVVDYPNAPHGHQQLIKLLAKWSLEAILVEATGGYERAVVAELAAVDLPVVVINPRQVRDFARATGRLAKTDRIDAQVLAAFGQAVRPERRPLPDEKQRELQQQLARRRQLVEMLTAENNRLQQATDKLVCKTIKAVCTTLRKQLDHLDEQLQRLIEATPAWRAKEDLLRSVPGVGPQTALALLAELPELGNCSRQQIAALVGVAPINQDSGKHRGVRTIWGGRASVRSALYMATLVATRWNPVIRLYYQHLQSLGKRKKVALVACMRKLLCILNAILRDQQPWKNPLPNS

SEQ ID NO: 308917 - protein, 386 aa, unidentified
MHHATTLPVSEPTRSQGDCTTLFVSLELSRSTWVATSLVLGSRKMSKHTLVSGDAGKLLDLLARLKSRAEQRMAAPVKIVAIQEVGLDGFWIHRLLEANGVESHVVDPASIAVPRRHRRAKTDAIDGETLLRTLMAWQRGEPRVCAMTVPPSPSEEDRRRVSRERAMLLRERIRHTNRIRGLLFGQGITNYNPLHKNRRKRLEELRTGDGRAVPAHLKAEILREIDRLELVLRQISEVEAERDEMVRPGQASSPAALLMQLKGIGAEFAGVLYLEGLFRHFENRRQLAAYAGLAPSPWKSGSVDHEQGISKAGNPRLRTTMIELAWMWVRYQPASALSCWFRQRVGSERGRTRRIAIVALARKLLIALSRYINHGEIPTGAVVKPA

SEQ ID NO: 308918 - protein, 351 aa, unidentified
MLIIGCDYHPSVQQIAFVDLETGETGERQLLHKDGEAERFYRDLKLRGISVRVGIEATGHARWFERLLAELGFELWIGDPAQIKAARVRKQKTDRQDAELLLKLLVEDRFPRIWIPSPENRDVRQLLWHRHRLVQMRTRVMNQLQAVAMNEGVRRKKALWSKSGRALLESFVLSPWASRRRQDLLDVLDRLSPIIDELSTAVEQEAKKRPEVLRLMTHPGVGALTGLAFVLIIGSAERFACGKQIGSYLGLIPCEDSSANRQRLGHISKQGNTLLRFLLVEAAQAAVRCDAEWRRKYVHLAMRRDPRIAKVAMARKLAVSLFWMWRKEWNYEQVIKFGSHAGQSDYVHGVK

SEQ ID NO: 308919 - protein, 342 aa, unidentified
MRDYTGQFIYLGIDVHKLTYSVTAIHQGQIIKRDKMQACPQKLVLYCRKFFIGASIYSAYEAGFCGFSLHRYLIENGINNIVVHAASIEIAARERVKNDKRDSLKIATQLSAGRLNCIYIPSIEREAFRSISRLREKLIRDKTRLSVQMKSFLNLNGMISSSKRVSRSWVLDFLSISDDREIFFYLKTLAKRWIATDDEIKIIEEKLKEQASKEIDLEKIYRSVPGIGPIASRLLINELGDMSQFKNERVLFSYTGLTPREYSSGENVRVGHISRQGKPVLRRILVQAAWTAIKKDKGLKKIFEKISIRAGKKKAIIGIARRLIGHVRACLQKNEPYKYKEI

SEQ ID NO: 308920 - protein, 414 aa, unidentified
MYYVGIDVHQKSSSVEILDCNGKLFKRREVRGRWPVLIEELAKVPKPFAVCYEASCGYGYLHEQFSKLAQQVKVAHAGGLSWIYRSKRKHDRIDARKLAKLLFLDEVPSVHVPPKEVRLWRQAVEFRQKVLRSRVAAKNQARALLRERGVESPRNLFSGKGLAWLKDLKLEDLGDALRRDLIVEQIKEADEKIKKVVRHLDGLSNNHAGVALLRTIPGIGPRTAEALAAYVDDAKRFSNLRNVGAYFGLVPCQDSSADKNRLGHITRDGPPTMRKLLCEAAWTAVRESPTVRAYYERVMRKDPDRKKIAIVATAHYLVRVAVSMLKTGECWRESVKEDPGNVKEDSSPKPDRGGGETPSGPQGFSPPPVASPASDEATSPPPLSASPFSPQRGRRKRHRNKASREERGVKIQKE

SEQ ID NO: 308921 - protein, 343 aa, unidentified
MERTDGVETFVGIDAHSKQCSIKAISRQGEELRELDVPTRRPALRKALKGLPGPVWAIVESSYLAPLMRELIEGSVDRLIVCETRENRWISHSEDKGDQADADRLCRLLRMGEFKAVHVPSGVGRDRREVLRMYQKAQGDVSRTKNRIKGKYREHGVPLQGKRVYGEIHRKDCLKQVSRPQGRFLLEVLYQKLEAEERSCDDVLDRLVELMRGDARYESLKEIPGLGKVLSAVLAAVIDDPDRFANKRKLWSYAGLGVRSRWSGDPSKAKVSGSKGGNRLLKYAAFTAATAALRGENRFSRHYRKMVAEGADPSMAKRTVARKILATALVLMKTGAAYEDDQV

SEQ ID NO: 308922 - protein, 418 aa, unidentified
MIQAHPRLRINDATLVVGVDIAKHHHVAVAQVPDGRISKPLTFANTREGFTQFQQWLQHEQTRSQSTAAVMGMEPTGQYWQPLAEWLQREGHTIHLGSPFFTKRAKELVDGSPLKTDAKDAWVIADLTRQGKGRLLGSQPTLFQELRHLASLRRRLVVARGVTLNQLHRVLDTLFPELTGVFKSFDGATFQALLRTAPTPAEVVALGLEGLTQLFKQHSRQRLGQRKALALLTVARQSIACQQGVQALRLELSLLLPRLTALNLDVAKVEAQMGDRVDQVAYTPLLLSIPGLGRVTTAIILGELGDLRNYHHANQVLKMAGLNLFERSSGTQHGRQHVSKRGRSQLRQILYMSAVRFTQRGGPLRGLLEKFKPHKPGPKVMVIGMRRLLRMMFALVRDEQTFQQAQFEVRPAMARVAT

SEQ ID NO: 308923 - protein, 330 aa, unidentified
MTMIGAERPDTKAEVILGVDTHLDVHVAVAVDYLGRRLGESSLPTTAKGYERLLCWAKSFGLVRCAGLEGTSSYGAGLARYLKAQGIEVLEVERPERRQRSSRRNVKSDPSDAESAARAVLAGEASGLPKSSEGSVEMIRALRAARRSAMKARTQAANQLQGLRVTAPEELRHRLRGLSTKELVSVAARFRLGDDPRDVPTATKFALRSVARRYEALSAEIDELDAQLDRLVTQLAPELVSLAGIGTDHAATLLIAAGDNPQRLKSEASFASLFGVSPVEASSGKVVRHRLNRGGKPGRQPSAVHDLSGSNETRSSHTGVRRKAHRRRQE

SEQ ID NO: 308924 - protein, 411 aa, unidentified
MQTLVERGCGLDVHQATVVACLLIVLKNGQVQKQIRTFGTTTRELLALREWLLSQGCTHVAMESTGVYWKPVYAVLEGGALEIVVANAQHVKKVPGRKTDVKDAEWIADLLCHGLLRSSFVPPKPIRELRDLTRYRRKLVESQAAERNRLLKLLETANIKLSSVTTDVFGVSGRLMLEALVEGKATPQEMAELAKGRLRQKIDELGPALEGKLEEHHRFLLRLQLDRLEAAEKDLAVLEQRLQEKLKPYAEQLTLLDEIPGVDWTLAAVIIAELGVDMSVFGSVSQLASWAGVCPGNNESAGKRKSSRIPKGNVYLKTALVEAANSAAKAKGTYLRDKFYRLKARRGYKRAAVAVAHKILVAIYHMFSDRVCYNELGDVYLDKLNKHHLTRNLVHRLERLGYAVTLEQKAA

SEQ ID NO: 308925 - protein, 316 aa, unidentified
MKTKTETKPAPTYVGVDIGKAGLDVSFAGQSPCRYANSAAGIAELLKALKKLKQPQVVCEPSGGYERDLLEALWAAGLAVSLVHAARVRAFARAQGLLAKSDPIDAVVLREFGELLRPGTLAAPSPERDRLAALVQRREQLVNLLSMEDQRLAQSRDATVRKMSERLLKELETQIEQMDEMIAAQIDADATLKNQSERLQQVQGIGPVTATTLLAEMPELGTLSRNESGALGGVAPYIKDSGDHRGRRTIRGGRVKVRRGLYMAALVATRYNPILKTFYARLLAAGKPKKVALVAVMRKLIVLLNHLLKNPNFKLA

SEQ ID NO: 308926 - protein, 411 aa, unidentified
MENIFPCCAGLDVHRDSVEACVRRIEPNGRWHQQTRHWGTMTRDLLAMADWMAAQGVTQVAMESTGVFWKPIYNILESRFTMLLVNARHLKQVPGRKSDVRDCQWIAQLLQYGLLKGSFIPPRSQRELRDLTRHRTQLVEEKTRTANRIHKVLQDTNIKLSSVATDVLGVSGRAMLEALITGEEDPVKLAHLAQRKLRSKIPELEKALEGHLTEHHRFMLQLLWKQLAQQEELIAELDRKIEEQTRPFAAEIDRLDAVPGVDRRVAEVVLAEVGADMKPFSAHENLASWAGMCPGNEESAGKRRRRRITPGNPWLKPTLAQAAWAASHTKNSYLASQYRRLAGHRGRKRALIAVGHSILVIFYHMLKTGTSYTDLGGDFFDRLQPERLTRYYVKRLERLGHKVTLESRAAA

SEQ ID NO: 308927 - protein, 348 aa, unidentified
MWIIGCDFHPSWQQVAWCNTETGETGEQRLEHSNGEAERWYRQLPVGSRIGLEATGNSQWFVELLQRLGHEVWIGDAAQIRASYVRKQKTDKRDAAHILRLLLEDRFPRLWRPSPEQRDIRQLLIHRHKLVEIRTRVKNGLQHLAMNRGMQKKRQLWSEAGQRALRELAMPGWAGCRRQDLLETLAYLDRKIAPLDRAAEETAQRDKMALLLKTQPGVGPITALAFAVTIGEASRFPRGKHVASYLGLIPREHSSGGKQRLGGISKQGNRFLRQLLVEAAQSAVRYDESLRRPYLHRCHRKPKGVAKVAAARQLAVRLYWMLRTQTPYPEIVRIESSPRVALVVRHGG

SEQ ID NO: 308928 - protein, 366 aa, unidentified
MKKNSTVANRGKRIFKGKKLTIGLDLGDRWSFYCVMDEAGQVVVEQKLPTTPEGMKQVFGKMVRSLIALETGTHSPWVSRLLTELGHQVIVAHAQKVQLITKSNRKDDRHDARTLARLARVDPDLLGPVRHRSVQAQLHLTVIRARAELVSARTALVNAARGLVKSYGQRLPKCGTYQVSRELADGLSAELRDVLEPLLKEIESLNERIKEYDERMEKIAKELYPEVSLLKQVKGVGTQIALTYVLTIEDPYRFAKSREVGCFLGLRPGRRNSGESEPQKGISKEGDRYLRTMMVQGAHYILGPFGEDSDLRRWGLKLAERGGKNAKKRAVVAVARKLAVLLHRLWVDGEVYEPLRNSQKAMREVA

SEQ ID NO: 308929 - protein, 416 aa, unidentified
MSLALPEALFFTGIDWAAETHAVCVMDAGGTIAAEFTIEHSADGIAALIRRLARHGQPGGMPVAIERPNGRLVDLLLEAGHAVVPVSPNAIKTWREGEVLSGAKSDAGDAAVIAEYLRLRQHKLRTAAPYSDETNALRTVVRTRDDLVEMRVAATNQLSALLEAHWPGAKAIFADVESPVSLEFLTRYPTPAAARNLGEKQMAAFCIKHGYSGRRTAAELLTRLRAAPAGTTGAAVTEALRDAVLAAVGVLTALNASVKNLDRSVAAHLGEHPDGAIFTSLPRSGQVNAAQVLAEWGDCRQAYDGPDSVAALAGVTPVTRQSGKHRDVHFRWACNKRFRKAMTTFADNSRHASPWAAKIYNDARAAGKDHPHATRILARAWIRVIYRCWIDGIPYDPARHTAAAALARQSATQTAA

SEQ ID NO: 308930 - protein, 430 aa, unidentified
MGLIVPSAMDSEREDQPLPYDWFVGIDWGSQQHQVCVLDRDRRRVGERVVDHDGASLGRLADWLWTVSGGHPQRVAVAIEVPRGAIVEGLVERGFHLFAINPKQLDRFRDRHSVAGAKDDRRDAFVLADSVRTDQLSFRRLQLEQPQLLRLRELSRAEETLLEDFRRSANRLRDQLHRFYPQMLELCSAADESWLWDLLDLAPTPAHAALLSEEQVQRVLKAHRIRRVKAHEVLACLQTLALPVAPGAAEAAQAHCGLLLPCLRVLAEQLQACSQQVSALLRTLAEELGEGEGPSDVAIVQSLPGVGRKITAWLFAEAAQPLAERDYQVLRTHGGVAPVTKQSGKRRVVVMRRGCNPRLRQALYHMARVAMQRDAHFSHVYATLRAKGQRHGQALRNIGDRLLRILMAMLHNRTYYDASRMRREPIVQMG

SEQ ID NO: 308931 - protein, 492 aa, unidentified
MDQKGKRKPTPAGRSVPVEIADAEHELVIERAAAIDVAKESGKVCVRLPGNSGRRRFSRVWDVSARTGAITELAEQLVGLRIEKVTVESTSDYWRIWYYLLEDQGLDVQLVNARDVKNVPGRPKSDKLDAVWLAKLTEKGLLRPSFVPSAPTRRLRDYTRLREDLTRERSRYWQRLEKLLEDAAIKVSAVASTLDTLSTRDMIEALIAGERDPRRLAELARGRMQTKRSELIAALDGRFDDHHAELARLLLGQIDSLTAQIGTLTARIEQLVAAMSESDHDSHDHHGSGTARPQATSPAGTGDQPTVPGSGAPAEIGVETDTATVIECRRLTAVERLDEITGVGQRSAQTIIAEIGLDMTRFPTPEHLVSWAKLCPRSIQSGPISRGGKTGKGNPYLKGALGEAAAAAARTNTFLGERYRRIVKRRGKLKALVAVARSILVIVWQLVSDPTARFHDLGPDYHTNRVATERKVRNHIAQLTAMGFHVTLQPAA

SEQ ID NO: 308932 - protein, 321 aa, unidentified
MAQTCAKLESNAVVVGIDVSKDHLDAAQYPSGDLIQTSNDTKGLRTLLRWIGRQRAVHVVFEATGPFHRQLESHLAKAGIPFSRINPRHARKFAEATGKLAKTDRVDAVMLARMGALLEPRTSDICNEQQSALQELAVARRNLIRDRTALLNRQQNLQLSLLKRLTRYRLRQIEAQIAAIDQAISELISTDGSLSRKRAILVSIPGIGEATAAMLIADIPELGTLENGQVAALAGLAPVTRQSGKWQGKSFIRGGRIHVRNALYMPALVAMRHNPDLQSIYLRLTDKGKHAKVALTALMRRLVILANVLLRNDRLWEPRRT

SEQ ID NO: 308933 - protein, 341 aa, unidentified
MGQASTIGLDIAKRVFQAHGADATGRVVFRKRLVRAKVFEFFAGQPRCLVALEACGGAHYWARELGKLGHTVRLIPPAYVKPFVKRQKNDVADAEAICEAAQRPGMRFVPVKDEAQQANTVVFRARDLLVRQRTQCINALRGHLAEYGHVVPQGPAHVNRLVALVEDPKSAVPESARGILQVLIRTLNALEEQLKELDGEIARRAKADPVARRLMTIPGIGRIAATAITALVPAPEGFRAGRDFAAWLGLTPLQRSTGGKHKLGAISKMGERTIRRLLILGASAVVRWASRRGAAAGSWLARMLARKPRMLVTTALANKMARIVWALLVKGGTYRAPAVAA

SEQ ID NO: 308934 - protein, 419 aa, unidentified
MSFKIFKFNCCGLDVHKTWIYACIGITDSNNRTEYKQARFSSFTKGLNELCDWLAKYNCKDVCMESTGKYWIPVFNILEQHSFWVTLSHPKYTKPMKGNKTDRKDAKWICDLYMCGMVKPSFIPPADIRELRDLVRYRFKLTCMITGEKNRAQNCLTVSNLKLDDVFSDVFGKSSRSITEHILQHPGEKFDIAPFVDSRCKTPITEIQAAVDGAISKEQVVKLRQCLDHIDELNKHISEVEQEILRLSDKYEAALNLIRTVPGFNKNPLTAIQVLSEIGGDMSVFPTAKHLVSWAGCCPRNDQSNQKIKSTRISRAGSYFKPVLVQVANALIKSKKHSEFTSRYKRIKARRGHKKAIIAICRMILTAIWHILSDLKPYTSEGFLESRPVKEGKVLSTSQALNLLKQRGYIIKGEPLAVS

SEQ ID NO: 308935 - protein, 327 aa, unidentified
MNRIIKIGMDVHSTNYTLCAVEPLLEGDVNELFTLDVHPHYQEILGFIEKLKKRFRGDELSITCGYEAGCLGYKLFHDLEANGVKCVILAPSTMEVPGGKRIKTDKRDALLIAKCLARGGFSAVHIPTKNDEAVRDFLRMRDDHKQSIKSTKQQINAFCLRHGYKYDRTKWTQIHVKWLREIELGEIDRETLNSYLATYDLLTDAIERYDARIEELSCMDEYREKVQMLRCLVGIKTHTALSLIVETGDFSRFIKENVYGSFVGLVPGEDSSGPHTNRCPITKAGNKHLRTLLIECAQAIGRSRPGYKSKELKSRQKGCPPGDRCVC

SEQ ID NO: 308936 - protein, 417 aa, unidentified
MLNEPTLFVGVDWASTEHQVCILGPSGPIQKSFPHDGLGLGAMVDWLLEHAPNPADIAVAIEMPHGPVVEALMDRGVLVFSVNPKQLDRFRDRFSPAGAKDDRRDALVLASSLKTDRHCFRHLESMDPTIVELREWSRINDELKEERVKLTNRIRQQLWRYYPQALDLTEDVGMEWFLDLFLLAPTPTHAQALKEKKIARILSAHRIRRISAFEVLEILKRPALTVAPGTTEAASAHITAISERVKLVNHQLKEATRRLDVLVSKLAEQETEPGQLNEQPDAAILRSLPGVGRIVVATLLAEAHYAIRARDYHALRTLTGIAPVTKRSGKSCRVEMRKACSRRLRTAIYHWARVATQHDLPSRAKYSALRSRGHSHGRALRGVADRLLAVACAMLETKTTYDPTKRNSIGSPQLAAC

SEQ ID NO: 308937 - protein, 304 aa, unidentified
MGAKKRSPSQPTPPRRRGHSPTTPTTIRALVQRLAQLPVQRVLLESSGGYEKPVVSALQQAGIPVVVVPAQRACSFAKSMRGDLKTDRADARMLAYFVCCYPVQPTAPCSPVQAELKELWARREQSVQELEREKKRLQTVPFAAVRASLEQMIAVLQDAIAQIEARVEELIASDAALSQKAALLQTAVGVGRVVACGLVAELPESGCVSHRAIAALVGLAPVRCESGEWVGQARVRGGRGRVRRLLYVASVVAKSHDGRWGGVYEALVGCGQAKKVALCAVARRLLVVLNAMVRDGRAYEQTGE

SEQ ID NO: 308938 - protein, 372 aa, unidentified
MTSMPEPTPIDRARDEREEVVLGVDTHKDLHVAAVLSGLGALLATRAFPTTAAGYRGLVAWARSFGALRRAGVECTGSYGAALTRHLQAEAIEVVEVNQPDKATRRKRGKTDAIDAEAAARAVLSGRATATAKTSNGPVEAMRVLRMARNSAVNASTKAINQLKAVLVGADPALRDSLAGLGPATLVRRCAELPDPTPGSGLSEVDRAVVFTLRTLAARIMALKAEAYQLHKQLRALIAAHAPELLERRGIGPDSAAALLIAAGDNPERLCSEGSYAALCGASPVEASSGKTQRLRLNRGGDRQANAALYRITVSRLRWDSRTQDYLRRRLTEGKTRREAIRCLKRYIAREIFTLITPKAATALANQTANAA

SEQ ID NO: 308939 - protein, 353 aa, unidentified
MANPMANLTIGVDLGDRYSELYVVDAAGACVETGRIRTTVAGLEQWFGGRPPARVVVEAGTHSPWASRVLQRLGHEVLVANPRKLRGLYENDSKDDRVDAEYLARVGRLDPALLKPITHRGEAAQADLAVLSSRDVLVRARTLLINHTRGVVKALGGRLPRCSAEAFARRVGPHVPPAVRPALAPVLEQLQQLTTTIRGFDRAVEQRCAQSYPETARLRQVTGVGPVTALAYVVVLDDPTRFRRSRAVGAYLGLRPRRSQSGEQDPQLRITKAGNPFLRRLVVQAAHYILGPHGPDCDLRRHGERIAARGGKNAKKRAVIAVARKLAVLLHVLWISGEVYEPLRPRLVLAQAS

SEQ ID NO: 308940 - protein, 433 aa, unidentified
MQDIEDEPLFAERVAGIDIAKAGIEVTIRVPSDTRPGRRQQETRSFGTTRRQLLALADWLRSWGVIKTGMEATGDYWKPVYFVLESQGLDCELYHAAQVKALPGRPKTDRADSVWLARITERGSLPSSFVPPEPIRRLRTHTRYRRHLTQARTAEKQRVEKLLEDGHLKLSSVISDIHGVSGRAMLEAIIAGEHNPKVLAQLARGTMRGKIARLEEALDCSFLTEEHAAVLRMMLSLIDSYTAQIDELTAKIEVLTEPWLHQIEQLDAVHGTGRISAQDVIAEIGTDMTVFPTASHLVSWARWCPQVAQSGGKRKGANASGRGNPYLSAALGEISISAGRTQSFLGAKYRRLVKRMPKKKALVATGNSVLTIFHALLSDPAATYQDLGPGYYEQRMNTRRQARNHVRGLERLGYQVTIQAINPDTGELLTATA

SEQ ID NO: 308941 - protein, 348 aa, unidentified
MSISMIGIDTAKSTFQLHGIDATGKVQLKRKLRRDELIPFFERQPRCTVVMEACGAAHHWARVLSGLGFEVKLIASEAVKPFVERGKKNDPADAAAICAAASRPEAKFVAVKSLEQQGVLALHSVRSLLVKQQTMLANAMRGLATEFGLVVPKGMDKLKELMTLVEEDKSFPEQARKAFAELREHCRVTTERIEKLERQIVAHARYDDTARRLATVPGIGPITASLIAATVGDTIGNFPSARHFAAWLGLVPRQHSSGGKTRLGRITKTGNRQIRTLLVLGATSMVYRAERWNSAAGAWVRGLLERRPVRHVTVALANKMARIAWAVMARNEVYRAKGGVAPAAAATA

SEQ ID NO: 308942 - protein, 344 aa, unidentified
MKNPNVIGIDLAKNVIQVCKVSEHGELTSNKAISPKKLKELLAKSIPSIVAMEGCSSCHYWGRLAQQYGHDVRVIAPKKVKAFLQGQKTDANDALAIAMASIHFGMRFSQIKDEEQQTLQTLETSRKFLDKELTALNNHIRAYVYEYGITINKGRKSLSESIVQIVDELDTRLPLCLKETLRLLWERYQITVTQLKQTKQLKAALVRQLEPCKRLLELESVGEVCAGMLYANIGDGRGFKNGREASACFGVTPKQHSSGGKVYMMGINKQGGNKELRAALYQGALSVISCLPDEPTTVKQAWLVELVHRVGVKRACIALANKTVRTAWALLATGEPYKPAYLVR

SEQ ID NO: 308943 - protein, 385 aa, unidentified
MTEATEFSKFIPRDYDLFAGLDVDKKSIAVTFTDHGTMQQSLKLPYDARALLNYTRKHFPGQRVAFVYEAGPTGFGLHDELRAARHACLVVSPSMVPSAPRNKVKTNRLDGKKLSEGLRGGQLRGIHVPPQSYRELRHLVQLRDTQVGQLTATKLRIKSLLLYEGIAFPAANGKWTAPALRALDTLPCNATVRFKLDELLNALQFHFLTAARVQKEIRRFCQNDPELRRSISLLTSLPGVGTITATHALARIGDWRQIKNGRQIGGFLGLVSSEHSTGDKENRGEITHIGDKRLRSKLIQCAWVAIRKDPELRAFYRRIFERQAKKVAARKAIVAVARKLTLRMYAVLKQQRPFVIRADSDIAPLTAEETAGLRVRLDAAQNDQP

SEQ ID NO: 308944 - protein, 373 aa, unidentified
MRLIALDLHQDNIVTAVLDFSTASRPLLAHRYGLDEASLGEFIGLLDKGDVVMMESTFNAFWLYHRIAPLVSSCHVLNVNAVHLRGNKTDKLDARKLLELLSTFVVTDTLHRMPTVFVPPENVTKLRSLFSSYRLLKKSETQLRNRIHAIYRQNGVVIDRKELGSAKYRATLLKDHPLKDYWREQVETFLETLQLIIPKHVRLKKAILSLALALFPEEIRLLTTIPGFSGLTAAAFMSDVADIRRFASAKKLCAYLRTAPSIKSSNKTRHLGPVSKCGRSLTVSLLTQSVNHLKTASPSYADFYNRLRTGKSAGKCRIALIRKTLTAAYHMLRRGTDFNNKNNVAYERKQKVLKRFIKDYQPPMGGKEEVETA

SEQ ID NO: 308945 - protein, 336 aa, unidentified
MRFIGVDLHTTQITVCYLKTLDEYRFETYGLDEMEKFLAGLEEADKLAVEATGNTRWLVKLVKERVSRVVIVNPREFEVVKQSVKKTDKRDAMNLARFLAVDMLPEVRPKSDAAEQVQRMNETRTKFVRLKTSLLNKIHALAVSNGRKLKKESLASERGLARVMEQEWTLGERTELQIIIEQIGSLKQSIKRMDMAIGEESRKLRGFVNLITITGIGERSAGVLLSVIGEVEDFPDENKLASYFGIVPRVSNSNETVNHGRITKRGTKTGRTTLVQCTLVAIRYSSYLKKYYEQIKERRGHGKAKIAAARKFLTIIYNTLKNNWVFADFNNFELAE

SEQ ID NO: 308946 - protein, 402 aa, unidentified
MKASKQYLRFCGIDVAKQKHVACIIDNNGRYLIKSKSIRNDAAGYQQILNCLKQSGRKKSILTAMEATGHYWYALHDFLIRHGYTVAVLNPIQTAQQAKQAIRKCKTDKYDAFHIANLLRYGQYKAAVVPGELAMTCRLLTRMRYRMIRQSAMTKQLVNSRLHPVWPEYEGLFSNTFGTTSMELLQTAPTPKELLELDVDDLSERIRKASRGRFGPAHTQKILHSAKNSVGMQRGHYGISTGIKFLLEQIVALEPVRKKLDVEIQKLAARLPEYLFTLPGATELTIVSLYGEVDPIETFERPSQLVAFAGLDPKVFQSGQYDAPRRHVSKRGSPYLRRTLWQMAYRAVCTEGDLRDFWRRKHRQNKHHLVAVTAAANKLCHIVWRIMTDKRDYIPKGYNPKS

SEQ ID NO: 308947 - protein, 368 aa, unidentified
MAKKCTLAKCDELQPSFHAAADQVTIGIDLGDKYSDCCLLGADGVMFAEGRVRSTPEALESHFRNLPPSRFAIEVGGHSRWVSQMLQTWGHEVIVANPRNLPMITSNIRKSDRVDAQLLARLARVDPQLLSPVSHRDKEHYPAVAQLRARDLLVRTRTRLINAVRGISKATGIRIPACSSPSFSEKAAPFISEELKPSLAPLLNTIEHLSQQICSFDKEILRLGRQQYPETAQLRQVSGVGPVTALEFVLTIGNPKRFVSSRDVGPYLGLTPRRDQSGNTDQQLKISKAGNKHLRSLLVQCAQYLLGRFSPDSNLKRWGLKLASRGGKNGKKRAITAVARKLAVLLHHLWVTGDVYEPLHNATISSCA

SEQ ID NO: 308948 - protein, 343 aa, unidentified
MEQYAGIDVSLDSASICVVDASGRILREAKVASDPEALIAWFGKLGVEMTRIGFEAGPLSQWLYAGMRDVGLAVELLETRHVRDAFKAMPVKTDRKDARGIAQLMRLGWFRSVHCKSLPAQELRAVLTARKLVQGKHHDIEMSLRGILRGFGLKVGATTPRSFEGRVRELVEGHATLLAVADALLLTRATLGEQLGKLQKRVVSLARHDTRARLLMSTPGVGVLVALTYVAAIDDPGRFKSSKAAGAHFGLTPKKYQSGETDVTGRISKIGDASVRTALYEAANVILTRPVKGSSLKSWAMRVAKRAGMRKAKVALARKLAVVLHRMLADGTRFTADKAAAAA

SEQ ID NO: 308949 - protein, 317 aa, unidentified
MSYNIAAIDIHKKVLIVVVAAVAEEVADATGAAVELEGRKFGSGARERNHLVSWLQQRRVHEVVLESTAPYWKPVWLDLEPHLEKLHWAQAQSNRAPQGRKNDFRDAQRWGRRWLAGELMLSFVPEPEQRTWRWMTRGRLPLVRERVRLPNQVEALLEEARIKLSSVISDLLGVSGRRILEALSQGETDAVKLAELGDDRLRCTQEQLADALRGSPEPSHRALLKLHLERLKLLDQQIDQLSQRSATALKQHQDAVVRLAEVPGFGIESAQQRIAEVGVDAEAFPSAGELASWCGACPGSDVSAEENHSSRCPKGNR

SEQ ID NO: 308950 - protein, 408 aa, unidentified
MNTLYVGIDVSSRSNVVYLMLPNGNKHSNFSVANSHEGSVQLVKRIHSALTSHSLDTVLIGLEATSVYGDNLVYFLREDAALAPFNRKIHVLNPKQVKKFHDAYNDLPKNDYVDSFVIADCLRFGRINKEVYLGNYRYKALQNLTRARYFAVQNLTKEKQRFINVLFKKYSTLTQEKVFSNTFSTTALAVYNEFESAEALANMDLHELTDFIMEKGKNRFPDPDTVAKAIQKAARSSYRLPKTVNDSVNQVLSISITSMKALEAQIKEFDKAIKSQMELLSNVLISVPGIGPVYSAGIMAEIGDINRFNNQAALAKYAGLAWKQHQSGGFEAETTRLIPSGNRFLKYYLCEAAFSLVRCDKEYSDFYHLKYKEVNRYQHKRALALTARKFVRLVFRLLKDNRLYCPAK

SEQ ID NO: 308951 - protein, 399 aa, unidentified
MIGNHESIDVFIGLDVGKGEHHAVAVDRAGKKLFDKALPNDELRLREILASLDKHGRILLVVDQPATIGALPVAVAQAAGVTVGYLPGLAMRRMADLHPGEAKTDARDAFIIAAAARTMPHTLRSIQIADEQLAELTMLCGFDDDLAKQATATSNRIRGLLTQIHPALERVLGPRLDHPAVLDLLRTWPTPEALRHAGRRRIGNRLKKLAPRMGERLAGEIIEALDQQTVTVVGTNAATIVLPQLARMLADIRESRDTVFAQVEALVEAHPLHPVLTSLPAVGVRTAARILTEIVGKDFASAGHLASYAGLAPVTWRSGSSIRGDHPSRKGNKILKRALFLSAFAALKDPLSRAYYDRKRAEGKRHNQALIALARRRCDTLYAMLRDSTFYEPRLPSAA

SEQ ID NO: 308952 - protein, 506 aa, unidentified
MNVQPQRPSMKKSRSSRSPQTASSTARRSSRARRSGGVPVDAQVLEGLKQINLSAAGIDIGSAENYLAVPAHAVKEGEPTVRCFGVTSPEHDAAVEWLRACRITTVAMEATGIYWITLYDKIEAAGMKVVLVDPHSVKAMPGRKSDVLDCQWLQQLHTYGLLRGAFRPDGPTRRLRTLTRQRAELVAASAMHQEQMQKALIEMNVQLPRVVSDIDGDTGLRIIEAIVQGERDPKVLVKLRDPRIRKSTVAEMEAALQGHYRDELVFVLGQNLESWRFYRRQLEACDQRLLTTLESFPLATPKPVAPVPPKPVAVETQPGKTYVLKGKVLGRGKNAPTVDLVGVLQRICGVNLMAVTGLNVLSVLMLLGEIGVDMSRWRSAKAFCSWLGLCPGTKISGGKVLSRRSRRVVNRAAVLLRVVAVAVGRSDTWLGRFYRRKKAHLGAPKAVTATARKLACIIYHVLKYQDPYVPINEAAYEAKARVQRLERLRREAKQMGMQLVDLEAAA

SEQ ID NO: 308953 - protein, 342 aa, unidentified
MAEYVGLDVSKEETSICVMNVAGEVLWSGKALSDPASIFAALREHTLCPQRIVLETGTLSNWLARGLRAQGLPVDVIDARQAHAVMKLQHNKTDANDARLLAAIARTGFCRPVSVSSEAAQKQRIVVKARRHLVRQRCATENAVRGFLGALGVRFPKGAGKLAERVREALETRLDLVAMIEPLLASAAAQREQIKRLDVEIAAATAASSPARLLITVPGVGPIGALAFAATIGDALRFSGSRAVGAYLGLTSRRHQSGEMDYTGRISKHGDSLLRSLLYEAANVFLTVVRKAHPLKDWARRIRKRSSHKKACVALARKLAVIMHRMLVTGEPFRWPEKPATA

SEQ ID NO: 308954 - protein, 366 aa, unidentified
MSSLTSPAGAIHLGMDTSKNTIVVAVLMPGEEVPVIDRMWNEEGSVRHLVGRFADRAALRACYEAGPCGFELHRLLASMGVACDVVAPSLIPRRPGDRVKTDKRDAGRLARLHRAGELTAIRVPTEAEEAVRDLVRARAALRADRKRAQQRITAMLLRHGRVWRSGSYWTQAHEQWIAAQRFSEPALGAALAHYRAALDTRQAELDAVEAELAPWARREPLAAAVARLGCYRGIAELTGLVLAAEVVDWRRFPSARAFMCFTGLVPAEYSSGERTRRGSITKAGSEPARTALIEAAWSYRFRPAIGVTLRRRQHGAAPQTLARSWRAQRRLHARYKTMTARGKPAAVAVTAMARELAGFVWAEMTS

SEQ ID NO: 308955 - protein, 312 aa, unidentified
MESAPLWIGIDVAKQQLDVAISSTGDTWTVTNDETGIETLLADLRDRNCVVVLEATGGFEVPAVSALAAAGLAVVVANPRQVRNFARATGQLAKTDRLDARILALFGERIQPEVRPLPDDAARLLDALLTRRRQISGMIVAERNRQGFAPAPLKKSIEKHIRWLERELDGVDDGLNKAIQASPVWRAKEALYRGVPGIGPVISRTLIADLPELGRLSHREIATLVGLAPLARDSGTMKGKRMVFGGRAPVRSALYMAAVVGVRHNPVIRVFYLRLRDRGKPPELALIACAHKLLTILNAMARTGEPWRLEHA

SEQ ID NO: 308956 - protein, 374 aa, unidentified
MTTTPTTVCQMAVAIEIAAAKWVVVSTTGGLRRQRRRVLAQATATERFAALRAELDEARRKLNVAMDARVVVAYEAGQEGFWLVRALRAAGVEAEVIDPVSLPVDRRARRAKTDRLDGEALSLALWYWLGGDERALRMVRVPSVEAEDAREWQRERDRLKTEHRSVEDRITKKLRTQGIWERSRTWRSDLRDGALRTFAGTPLGAQLQAALVVELARLELIEAKLKEWQAQQADLPAATTQTINHLAHLRGVGPVGATALATQLFWRTFDNRRQVGACVGLTGTPYDSGTLRQDQGISKAGDPKLRALLVELAWLWLRLQPDSAITRWFRERTQGAGKRGKRVMIVAVARKLAVALWRYVQLGEIPQGARLKAA

SEQ ID NO: 308957 - protein, 316 aa, unidentified
MPATARILGIDVAKAQLDLADPSGALTQRIANSATAIAGLSDELAHDPPALIVVEATGGYEMPLVSALQQARLPVAVINPRQARDFARASGRLAKTDAIDARVLAQFGAALHPAPLPPVDPSQAALAALVARRRQLVDMLIAERNRLEHATAAIHGWINEHLAMLKTQLAQTDAAIALSVEASPALQRRREILTSVKGVGPLTAAVLLAELPELGTIGHKQIAALVGVAPFNHDSGTQRGQRHIGGGRPSVRCALYMATLVAVRYNPTIQTFYRRLRDGGKRPKVALVAAMRKLISILNALVRDNRTWLPPSQDGC

SEQ ID NO: 308958 - protein, 354 aa, unidentified
MRCSTKYVGLDVHQATTVATVRESSGRIIARSILPTEDAALLEFFAGLRGAVHVAFEEGTQAQWLHDLLSPRVSRVVVCDRRGAPRQGNKGDQVDSAQLSELLRTGQLRSVYHGRSDRLVLKELTRAYDNLVEDSVRAMLRMKALFRARAIRTEGSQLYEAQTRGSWLDRLPDRGCRFRADTLGAELDVVRELRRRAKAAMLAEARKDPAYERLCGIPFFGPVRVAQLLATMQTPWRFRTKRNLWAYAGLAVVTHSSADYTIVEGRPVRRRRQPMTRGLNKNHNRVLKNVFKGAANAAVARPGPLKDFYDAMVARGMREELARVTLARKLAAVVLRLWKKGEPYDARKLTMQAA

SEQ ID NO: 308959 - protein, 345 aa, unidentified
MTTMNYIGLDVHKKTISYCVKDMSGRIQQEGKIGSTRRELDCWMKTLPQPWTVAMEATIFSGWIYDHLLPHATQIKVAHPLMLRAIAAAKKKNDQIDASKLADCLRCDFLPECHMMPRAIRDRRRTLRYRHLLVRQMVQMKNRVSGLLMETGVEYNKQRLHKVSYFRELLSANGEVPPSIRPLLKLSRETIERCQKTEYALVSSLQRDPVLADRIKRLRTVPGVGPITALTWALEIGDVSRFRSIRQAISYCGLCGDERSSADKAMRMPLSKQRNKHIQRALVEAAKLAPRQSHELAVIYDQERQKGNSNRATLAVARKMVAYLLAVDRQQRDFVPAEERRTTAA

SEQ ID NO: 308960 - protein, 437 aa, unidentified
MSKRLQVGLDIHQKHNHVCSMTRDGQMVSPLQRFDNNWPGFQEFIEMLVSVLQEGPFEGVDIAGEATGLLWFHPFYHLAQAKELAPFDPHLYLFNPRTIKHFKKALAERDKVDPKDAQAVAERLRFGGRMPHEVTFDERYLPLQRLTRYRYHLSHALAQEKVYARMVPIYLKASDYTRKPKPFSNIFGATSRHILSEYATLDELAALPLDDLADELERVGRYRFKDAADNAHRLQRAAEHSYPLPPCLIEPVNVILDSLLAHIRFLEELLENLDPLIEATLVDVPGAPYLRSIDGLGLVYSAGLLAEIQDLSRFMQGLKRDKQGNLRPKTRHDGQAALARFTGLWWPRGDSGDFQAEDRRLPKTGNHYLRYYSIEGANSLRRHNAEYTAYYQRKFDESLKHKHWRATVLTARKLVRLVFALLHDEEMYQPPEVRYRS

SEQ ID NO: 308961 - protein, 387 aa, unidentified
MSKQNDLSKSLVALEQDATLIAVVEMGQTSWLVAGIVPGLNRYPLKKLGPDRGALLQLLHRWREEAAKAGHAINRIAVAYEAGRDGFWLARWLRAQAVEAYVIHPSSVPVPREHRRAKTDRLDTELLKRAFVGWLRGEPKHCSMAAIPTLEDEDARRPGRERQTLVGERTRILNRLKANLARLGIRGFRPNLARAEGQLEALRTPEGAAIPRNTLAEMRRDMDRLQVVKRQIKEIEKTRAKRLSKEPSEQRDAMVRVLGRVVGVGVETADMLVQEVFSREIRDRRALARYAGLTGAPDESGQRRRERGLAKAGNSRVRRGMIELAWGHLLHQKGSPLTEWFWKRASDARGGTRKTMIVALARKLLIVLWRLATTGETPAGLRLRPAA

SEQ ID NO: 308962 - protein, 312 aa, unidentified
MDATFVGIDVSKDRLDVAVVPSGELFVVGRDEAGLERLVARLGPLGAESIALEATGGFETVVAAALGAAGLPVVVVNPAAVRSFARALGQRAKTDPIDARVIARFAAATRPEVRPLPDEATARLAELVGRRRQIIAMMVAERQRQKRFTEPRLLRSIARLLEALQRELSEVERQIGEDVRASPAWREKEALLVSVPGVGPVIARTLIAELPELGTLDRREIAALAGLAPWTRQSGQWKGRSFIGGGRAPVRAALHMGAVTASRHNPVLSAFHARKIAEGKPPMVALTAVARRLLTILNAIARSRTPWRHAEA

SEQ ID NO: 308963 - protein, 354 aa, unidentified
MQNDRQSSETVILGVDTHLDIHVGAVISQAGKLLGTHIIQTNQAGYLELLDWARSFGSLERAGIEGTGTYGAALTRYLIKNSIYVVEVNRPDRSKRRLEGKSDPLDAENAAQTVLSGSSKAIPKMQSGACEALRIISVARRSAVKACTQAINQLRALLVSAPQDVRDKLWKSKPHECVTVCINSEVSEHSPLRIALCSTLRSLAKRWMALTEELNELDESLDKLTRKYASNLRSQFGVGPQTAATLLAVAGDNPERLKNEAALASLCGVNPLPASSGKTVRHRLNRGGSREANNALWTIALVRMRSDPRTRIYVDRRTGEGLSTKEILRCLKRYIVRELYPLILSDLAYANRRS

SEQ ID NO: 308964 - protein, 407 aa, unidentified
MGLKVLYERCAGCDIHKVTVTVHIAVPEGGETRTYGTTTTELLEAVEWLQARRVTHVAMESTGVYWKPLYNLLEATGLTVFVVNAAHMKAVPGRKTDVQDAVWICDLMRHGLLKPSFIPPKPQRELRELVRYRISLTQERADESNRIQKVLEGGNIKLGSVVSEILGKSGRAILDAIVAGTTSPATLADLAQGKLRPKREELKAALQGRLNDHQRMLLRMQLDHVRYLDQQIESLDVAVTKRLAPFEAQLQQLDTIPGVSQRNAENIVAVIGTDMSRFPNADHLVSWGGMCPGSNESAGKRRHSRTRKGNSILRSTLVQAGHAAGRTKNTYLAATYRRIAGRRGKKRAAVAVGRSILEIAYFVLRDGVVYEELGANYYDEHKKAAVVRNAIKRLERLGYRVAVEPAA

SEQ ID NO: 308965 - protein, 387 aa, unidentified
MPELNDQSRSHTALKPDSTLIAVLEMSQSAWLVAGLVPGIERHPLKKIEPDEAALLRLLRRWQEEATKAGHPITRITLAFEAGRDGFWLARWLRARGIEAHVIHPTSVAVSREHRRAKTDRLDTALLKRAFLGWLRGERGHCSMAEIPTLEEEDAKRPTREREGLVRERTRLVNRIKGALARLGIRGFKPTLRQAPERLSALWLPEGAPLPSNTLAELRRDMARLRFVLDQIREIEAARLEQLEQQPETGTHTMVRVLARILGVGIETADMLVHEVLSRNLRDRRAVARYAGLTGAPDESGRRRREKGLAKAGNARVRRGMIPLAWRFLRFQPESALTRWYRARTADARGTTRKTMIVALARKLLIGLWRLVRSGEPLEGVVLRPAA

SEQ ID NO: 308966 - protein, 410 aa, unidentified
MAERFVGIDVALREHRIAVLDRDGEAVGPSFTIAASQDGVTTLARALGARDATPAHTLIGLEASGHLWENLEAALGGAGYRVLVLNPLQTRRYRDVVRRKAKTDDIDAHVIAGLLRSGVAQASYVPDEQIQSLRELARLRARLMADRQDYQRQLVAQLDVVLPEHRAVLGDLLTARARGILAHFPTAQHLAQANPRAIRRAAEDAGARGFSLNDATGVRDSARRSLYRGKAAVARAHVVRTLVSQLERLTSAIDEIDRAATTLLPPSEPGTGPSDAELLQTIPGIGAQTAATLLGELGALTRFTDARALVAYVGFYPVIHESGDRAATPRLSRVGSRIARRSLYLAAVNAVRQSGEWRTIYLRKKAQGKTAKQALVVVAVKLLHALYAMLKHRQPYNPSRLLVAPATIGT

SEQ ID NO: 308967 - protein, 366 aa, unidentified
MKQVTTYVGIDAHKKDLFVAMLNGPGAAPVTWQLANEPAAVRRLVRKLEREASGPVHVFYEAGPCGYVLQRQMTTARVHCDVIAPALMPRKPGERVKTNRRDARKLAELGRAGLLTVVQPPTPADEAVRDLARARDDAREDLQRGRHRLGKLLLRRGLHYAGRNWTQAHRRWVDSLPWTHVAERAVVDDYLLAIDHTEARLLELDARLAEIAEQEPYREPVGWLRCFRGIDTLTAMLILAELHDFRRFGSARALMAFLGLVPGEDSSGEKHRRGRITKMGNALVRRILVEASWHYQHRPGVGRALKARRTAQPARVIAIADKAQQRLCRRFRRMMAEHKPAPKVAVAIARELAGFIWAALQPPVVA

SEQ ID NO: 308968 - protein, 376 aa, unidentified
MTKIIRIGVDTSKSVFVLHGVDAAERVVLRKRLRRRQVLELFAQLEPTKVGLEACGAAHYWARELQGLGHEVVLLPPQYVKPYVKRNKNDAADAEAICEAMSRPTMRFVPVKTAEQQAALMLVGTRDALVRRRTQLTNAIRGYAAEFGLIAAKGLDKIEPLLARIAAHAPLPGLAQELFAAHAKEHVRLQAQIREIEAKLRAWHKHNELSRRLAEVPGIGPIGATLAVMKVPNPKAFRCGRDFSAWIGLTPKDHSTAGKTRLGVITRAGDEALRSALVAGATAVIQHVKQGKGHPSPWLIELVRRKPAKLAAVALANKNARIAWKLMVSTERYNPAHSRAVAASGGRGPALRGGSAPRPPLAPHDKSREITATTRA

SEQ ID NO: 308969 - protein, 314 aa, unidentified
MSSPSCYLGVDVSKDTLVVAGQNRRWQFANTKEGQRKFIAQIKKLSAAGHVVCESTGPYHLPMCLALQEAGIAFTIANAARIYYFGLSEGIIAKNDPIDAELIARFAQAKRPPADPPLCREQLALSESVTHRQQLTEMIKVLRTHRQQVLHAALVTEIDRSILVLEKRLAALDRQLRAKIDAHPLWKAKFVRLTQTKGVGFVTALTLLAKMPELGTLNRGQCAALAGLAPYDNDSGKYAGKRTIRGGRQEVRNSLYMAALSAATHNPILKTFYQRLLQQKKLFKVTITAVMRKLLLHLNTVLKTLTPPPQTAAS

SEQ ID NO: 308970 - protein, 423 aa, unidentified
MTKLTPTPAGAVLVAIDMSKSRQEVLIERPEGGRRRRMTVMATRQDYDGFAEQLAAIGRRIIVGFEATGNYHRTLAHRLLTAGFELRLISSVALARTREALHNGWYKNDPKDAQVILHMLRIGATQRYVDPLAAGINDLQELSKTHETISRMKTQTWHRILTHYLPLYFPEIARFAGNSRSDWFLALIERFPTPASITALDAGAFSAAAWPLIGRKVSKARLVNDIYETACASVALPVPEDSAAITMFRMVIAQGRSLIHQRDEIERLAHDRLAEHVDYKLLRNIPGIGPINALTILAEAGDLRRFNHHRQFLKFCGLDLATCQSGTFRGRTKLSKYGNARLRRTFWMAAQVAARQRDNSFRDKLGRYTAGHADDADRRRKAMTALTAKMARVAHAVVKTGTEYRPFLERSDARWKDPSLQVP

SEQ ID NO: 308971 - protein, 341 aa, unidentified
MNVKTIGIDLAKNVFQIHGVDEHGKRLFNKQLRRAQMASFFANIPPCLIGMEACASAHFWANKLISMGHNVKLMAPQFVKPYVKTNKHDAADAEAICEAVTRPNMRFVPVKTAEQQAVLALHRSRQSFIKQRTAQANQIRGLLAEFGIVVPRGIQQLQRRLPELVEDADNPLPVLFRTQLSLLQHHMAYLFDVIATLDKQIEQCYRQNALCQRIGKIPGIGPVTASALIATIGKANNFENGRHLAAWLGLVPRQHSSGGKQVLLGISKRGDTYLRTLLIHGARAVLQSAKHKQDAVSSWANQLMARRNNNIASVALANKNARTVWALLAKEREYCAPIISA

SEQ ID NO: 308972 - protein, 340 aa, unidentified
MTIVMGLDQHRAQITAEWIDTETGEISRTRVAPADRAAVRRFVERFSGQSLEVALEATTGWRFVVEELRAVGAGVHLAEPAQTSALRGPKKHAKSDRADTRHLRELLLTGRLPECWIPPDHILDLRAQVRLRHSLVDERGEWQQRIRAVLYHHGLPRRSDLDLLTAAGRDWLTELSLSAATREQITIALRMIGALDIEIPAIDKQLRAYARRQPGCRALMGHYGIGELTSVAILAELGDCRRFSSSRYAVRYGGLDITVHASDRRRAPGHLSRQGPPVLRWALYEAAQAASRPSSPDHAYYRQAAQRLGHNRACLAIARNLLKRSYHTLKELGDQALAPA

SEQ ID NO: 308973 - protein, 397 aa, unidentified
MIAVGIDIPKAKSTVAVIDSDGTVLASPFTMAHTQPEMEAFVTYLKGLGEPTTILMEYTGHYHYPVLKKLQDEGFPVCIVNPYQMKKYGDVEIHKAKTDKKDALRIAAYALEKSYKLVPYSSMEQKYEDLKFLSRQYNQRISYVAKLKVQLIALLDQTMPGITRILPLNSRNPEKCALLLFIKRFKSFDEIQRIGKARFLASYDVLAKKASERSASSKGLSIYELAVDSITTRGEDPYIWLSQNQCVDLLSATQNAADEIISQMRNIAETIPEYKVLRAMHGVGDRLGPIILAEIGDVHRFHSGKALNSYAGNDAPPYQSGQFESRNRHISKRGSSALRKACYEVMQALKLIKPQDDPVYLFMLKKEQEGKPFNVAKMAGVNKFLRIYYARAMELYK

SEQ ID NO: 308974 - protein, 355 aa, unidentified
MESVKYLGFDVHQSTISVAVVNADGKLVMQSVIATHAATILDFIHGLRGTLHLTFEEGTHSAWLYDLLARRVARVVVCNPRQNALLKAGNKSDTSDARKLAELLRAGLLAPVYHGEGSTRTLQELVRSYAALTEDTTRVMGRVKALYRSQAIACAGKKPYGRRHRREWLSKLSEAGLHRRAERLYEELDALQGLRRAAKRELVLESRKHAAAKLLRTVPLLGAIRAALLIGRVQTPHRFRSKRQFWAYCGLALETRSSADYRFEDGQLVRAKKPVFIRGLNRNHNHDLKNLFKSAATTASVIHGPFREFYEGLLAKGMQPAMARLTLARKIAAITLSVWKKGESFDAEQLKPQAA

SEQ ID NO: 308975 - protein, 357 aa, unidentified
MDIMHYVGLDIHKKTISFCVKLADGTIVREGVVKATRKDLDRWMATLPRPWMAAMEATIFTSWVYDHLLPHAAAVKVAHPLMLRAITAAKRKNDRIDAGKIADLLRVNLLPECYMAPQELRDLRRSLRYRNLLVRQSTQMKNKVSGLLMESGIEYSKQKLHQKRYFSELLKRQGEEQLPPSLTPLLELSRTTIETTQKMERQIVRGLRQDPLLAERVERLLTIPGVGPITGLTWALETGEPGRFSSVKQAVSYCGLCGAEDSSAGKPKRTPISKQRNKHLQSVLIEAAKLAPRHNPELARVYQQEKDKGNHNRATLAVARKMVAYLLAVDRRKTGFVIPPAEKVASVAKVASVAKVA

SEQ ID NO: 308976 - protein, 332 aa, unidentified
MSKQTNAIAASTIGIDTGKNTLHLIGLDKQGTIVLREKLARGRIGTRLANVPPCLIGIEAGMATHYVARELLALGHDVRQVPPAYAKPFRQGHKNDFRDAYAIAEAVQRPSTRCVPVKTDDQLDLQALHRVRSRLVGQRTAVINQIRSFLLERGIAIRQGLRFLRQQLPELLAKRIDVLSPRMIRIIEDLSGDWRRLDERIEHVTKEIEVLAHGSESCRQLMTVPGIGPLIASAMVAAIANGAAFAKGRDFAAWLGLVPKQMSTGDRTILGRISKRGNRYLRTLFMQGARVILLRPASWAKHSFGPWLTAAAKRLHHNVLAAALANKLARIA

SEQ ID NO: 308977 - protein, 452 aa, unidentified
MSKIKNHFELTHPNAAGIDIGASSHFVAVPPDRDEQPVREFLSFTEDLYALADWLTACGVDTVAMESTGVYWIPLFELLESRGFTVYLVNARHVKNVSGRKSDVLDCQWLQQLMSFGLLSGAFRPQGDFCALRAVARLKDMLLRNQAKHIQHMQKALLLMNLLLTEVISDVVGETGQKIIRAILAGECDGQALAKYRNNHIKASEEEIAKALQGNWREEHLFALKQAVALYDAYAVQLMECDQQLEKMLKDLARNDLKAEKPKRRGGKSKNAPNFDARTLLMQMCGVDLTRVDGIDVTTAFKVLAEIGADFSRFKDAKHFASWLGLCPGTKISGGKKISAATSRTTNRAAQALKMAAVNLRASQSALGAYYRRLCGRMDKAKAVTACAHKLARLIYAMLTKGAEYVDQGQEHYEEKYRQRVIKNLTKHAEKFGFQLIPVPETALEMQIISIS

SEQ ID NO: 308978 - protein, 311 aa, unidentified
MPNVKEHFVGIDVAKDWLDVAVLGEKSTMEFANTKKGCTKMVEKLGQLKPKLIVVEATGGYEEALLLALFAAGLPVALVSPQRVRQYARAKGLLAKTDQLDARNLAEYGKSIQPRLFTGKSEAHRKLSALVARRKQLEEMLQAERNRLRTASCQMRASLERSIAFLETEMRQIEKEIQTCIQEHADFQAQEKLLRSAKSIGPVTAATLLADLPELGQLDRKQIAALVGVAPMNQDSGRKRGYRRTKGGRPAVRNALYMSTLTGIRYNPVIQTQYQHLLKRGKEKKVAITACMRKMLTILNAMVRDQQPFRM

SEQ ID NO: 308979 - protein, 421 aa, unidentified
MVTDQDVAAPELVACIGLDWGDERHAVHLQAAEGGPVERVELEQKPDVLHAWVAQVRERFHGRPVGIAIEQRKGAVMHALMMYEFFVLYPVNPKALARYREAFRTSGAKDDPADAELLLDLLRKHRDQLRPWLPDTVEARTLQSLCEQRRKLVNHRVALTNRITSLLKQYFPQALDWVGDVASLQGCDFLRKWPDLAAVQRVRPSTLRTFYQQHNCRKATVIDERIRQIASACPLTSDPAIVDPLSLSVQTYATQLRVVIEAVQAFDTRIAHVFAHHPDQALFDSFPGAGQVCAPRLAAAFGTDRSRWQSATDLQSHSGIAPVTERSGKALWVHHRLACPKFVKQTFHEFADQSIRFSQWARAYYDQQRGRGNDHHAALRALAYKWIRILFRCWKDRTPYDEATYLDALRRHGSSLVKNNA

SEQ ID NO: 308980 - protein, 358 aa, unidentified
MLGRTRVVSSRRQAQRLIAWAAPWPDRVWAVEGATGVGRLLAQQLVAAGESVLDVPAALATRVRVLSGQSGRKTDAHDAVAVATAAIHHPRLRAVQAEDHNAVLRLLSVRRTQLTASRTQAVSRLHGLLAELIPGGAPKNLAADKAAELLRSIRPSTAVDATRKALARDLVDDVRRIDRKLDANKADIVEAVKASGTTLTEIQGIAEITAAKILGQTGRIDRFEDRAHYASYAGVAPIEASSGAISRHRLSRRGNRQLNSAMHGIAITQATHPGRGREFYLRKRDENKTEGEARRALKRHIIDLVFATITADTERAQRSPGRQVGATRESSAAGQSPTANTSERSVPGLRKQATPSVA

SEQ ID NO: 308981 - protein, 421 aa, unidentified
MKKSDTVKVKSVKDGTLIVAVDVGMEMNRGYCTTPDGRSTKSFKFDNTREGFDTLWGMIMASKNRFKCNEVIVGYESTGPYGEPLVHYLIKKPVKMVQVNPMHTKRVKELNDNSPLKTDDKDPRVIADIIKWGHALSIVIPEGDAAYLRRLNNSRERHVRERTALLNQLQQLVFLVFPEFRRVFKNIKCRTPLYLLTHYPTPDAIGVLDKDYLGGELKKKSRGKFREHHADMLINLAKDSVGIREGTEGVSMDIRHILVQLELVNRLIAEIEDEMETALGRIPYSSKLLSIKGFGVVSVAGIIGEVGDFKKFRTRGEIMKLAGLDLYEISSGKWKGQRRISKRGRSLLRKILYYVAIQMIRKNGIMHEYYTRLTDGGMTRMKALVAVSRKLLGIIYAIVRDDSEYLVNFESIKRQVIKKAA

SEQ ID NO: 308982 - protein, 423 aa, unidentified
MKPLHTHPFSAYVGIDWSDTKHDICLQVAGDDRREFDCIAHQVPCIDEWAKSLHKRFGGTIAIALELAKGPIVYALQKYDFIVLFPINPSTLAKYREAFKPSRAKDDPTDAELALDLLLRHPERFAPLQPQSVPMRTLLSLTEHRRELVDDKTRLTNRLANTLKQYYPQALEWFDQRDTILFCDFLTRWPTLAQVKRARQASLKAFFHAHNGRRPKVIGARLDSIKAAASLTEDRGVIVPCRLHVLVLVEQLRVTLQAIDRFDREIADLAPTLPDYSLFQGLPGAGPHLAPRLLAAFGEQRQRFQGADELQKYTGIAPVTERSGKKSWVHWRWQCPTFLRQTFVEWAGQTINKSFWAGAYYRQQREKGSSYQAAVRALAFKWIRILYRCWITRTPYDETTYLNALRKRGSPLLNNLKLNPQIA

SEQ ID NO: 308983 - protein, 346 aa, unidentified
MKVTTSGIDVAKSLFQVHGVDAGGSVVLRRQIRRSQLLLFFSKLEPCLIGIEACASSHYWARKLTALGHTVRLMAPQFVKPYRKNDKNDGNDAEAICEAVQRPSMRFVPVKSPEQQAELAVHRIRRRLMSKRTALINQLRGLLAEYGRVLAQGASHVRSQLPALLEDSSESLPPLAVELFRDLYEELVQLDQRIGAHERRVERLYRGNSVCQRLGQLEGIGALTATAFVATVAHAAQFKNGRQCAAWLGLVPKQDSTGGKPRLLGISKRGDVYLRTLLVHGARSAMRHTPKRNDPKSRWVEQLRKRRGENIAAVALAAKHARILWALMVQGESSAQPATQGIEQPV

SEQ ID NO: 308984 - protein, 344 aa, unidentified
MAIATLGIDLGKSVFHLVGQDVQGTTVLRRCMSRRQLITLTATLPACRIGMEACCGAHCLGRILAMQGHDVRLMPAQYVRPFVKSHKNDYVDAAAIAEAVQRPSMQFVPLKSEAQLDQQALHRVRDRLVRRRTAVINQIRAFLLERGVTVAQRRRNLELALPRILADEVLQLSPRLRLLLAELREEWRELDCRIEALTREIETAAKADPACRRLLTIPGVGPMTASALVAAIGDGSAFGRGRDLAAWLGVVPHQHSTGGKTRLLGISKRGNSYLRRLFIHGARAVIGSLAARPTPLGRWIAALLTRAHGNVAVVALANKLARIAWAVLRGATPFETLHRLASTA

SEQ ID NO: 308985 - protein, 341 aa, unidentified
MSIVGAFDVHRRQLTFDYSDTVAGEVKRGRIAPADREHLREWLARFAGCDDVHFALEGCTGWRYVTEELAAARVTPHLAEPADTAALRGRKRHAKTDKTDSRHLRVHLAAGDLPECWIPPAQVLEARAIVRLYKDLLDERGGWHQRIAATLFHQGVPVTASMSTAPGRAAVAGMALSPAGLQAVETGLRQVGRLTAELEPLRRQLDMISRRQSGCRALRATQFGVGAVTSVAIWAELGDVRRFGNSDDVIRHTGLDITVYSSDGKRSAGHLSRQGPQLLRWALYEAAKCAARPGAPDHGYYAATRDRRTGGLATLPVARKLARRCYHTLRELGEEAMRPAA

SEQ ID NO: 308986 - protein, 336 aa, unidentified
MKHWIGIDVSKATLDVALLDERGTLTAETKVENTTRSVKTLLRRWTKEFALVKGEYLVCLEPTGYYGHALLEVLVELEIPTWLAHPNDIKQSIGMTRGKSDRVDALRIADYARRFQDKSRLFTADQLKMNKLKQLLSKRQNYVMRKTMHQRQIKDMNKLMDKDLRGPFTWFDKAQIKALDKAIKELEGMIEDTINAEPELSKRFELLKSVEGVGLILGSHLLALTDGFTRFTSPRQLACHAGCAPFENRSGTSIRGRTRVSHNANHTLKALLHVSVVGLIRFPGEFRAYYDRKVAEGKHKMLVFNAMRNKLIHRVCAVIRKGVPYEIRTPLAHVIE

SEQ ID NO: 308987 - protein, 456 aa, unidentified
MAKQASKKRDRKIRQLNANAAGIDIGSQKHYVAVPSDRDNEPVRSFGCLTPDLHQMAKWLKSCRIETIAMESTGVYWVPVVAVLQSYGFDVKLVDAYKVKNVPGRKTDVKDCQWLAELHRFGLLSGAFRPDRQIQVLRSYWRHRSTLVEACSTQIHLMQKALEQMNIQLHKVITDITGVTGMKIIRAIIAGERDAVKLAGMKHPLIKSSTDTIAKALTGEYRQEHLFTLKQALEIYDVYQNKIADCDRQIEEYMKTFEQKADANDLNSKSGKNNRTKRRKNQPNFDLRTRLFEMTGVDLTRIDGIETMTAQTVISECGFDMSVFPTEKHFTSWLGLCPNNQITGGKIRKRSTRKVQNRAARALRLAAQSLHSSKSALGAFYRRMRARLGAPKAITATAHKLAKLVYRMLKYGMDYVDSGQQYYENQYRERVIKNLTKRAREMGYAVVCTNTGELVS

SEQ ID NO: 308988 - protein, 339 aa, unidentified
MRLYAAFDLHSRSSHLAVLDEQGKRVFKAKLANNAGTMILALEPYRERLVAIAVESTFNWYWLVDDLMKAGYSVRLANPAAIQKYKGLKHADDSSDALWLAEMLRLGILPQGYIYPREERPVRDLLRKRMHLVKLRTSLVNSLDNIIARNAGVSLGANKIKQLRCDHVSPLLEGDDDLALSGRVSKETIDYLTRQINTVERVVESKVQLKQQYELLLTIPGVGTILSLTIMLETGPIDRFDHAGKYASYCRKVPTRWTSAGKGKGSGNKKNGNRYLAWAFSEAAEFSRRFDPTIRAYYNRKASKTNFMIAHSTLAHKLSRAAYYIMRDQVPFDRDKLFA

SEQ ID NO: 308989 - protein, 311 aa, unidentified
MTEHTIGIDISKTHLDVFRLEDQAARRFENAPRGFRALIRWLGQTPVARIVFEPTGPYHRAFETALSGKLPLVKVNPLQARRFAEACGTRAKTDAVDARILARMGAALKLEPDAPDAENLLVLKDLQVARTALVKDRTRLRNRSHVQLNPILKRQIKARLTLVARQLAELDAEIARHIACDKALERKREILCSIPGLGPIAAALILTFLPEIGTLDRKQAGSLAGLVPHSRESGQWKGKSFISGGRKPLRDALYMPALVAMRFNPDLKAKYHALRAAGKPAKVAIVTLMRKLIEMANALVKADRHWAPKPA

SEQ ID NO: 308990 - protein, 434 aa, unidentified
MDEVTDEPLYRDRVCGIDIGKAGMVATIRVPSDASPARRMAETRSFGTTRREVLALADWLRAWQVPAVVMEATSDYWKGPFYRLEAEGFECVLADAKQVKNLPGRPKRDPSDSRWLAACFERGAVTPCFVADPEFRVIRLHTRYRRDLIGERTRDKQRAEKLLESAAVKLSSVVSDLHGVTGRDIMNHLITGERNPKVLAQMARGRARAKIGQLEAALDGAEFFTGHHAALLKLMLERIDRLAAEIAALTEVTEQLLAPYEEQLAQAESMPGWGRRTAQDALAETGPDMTRFPTGAHLASWAGRTPLDNSSGSRTRRSKSKKGNRYLAAVTGETAVAASKTQTREGARYRRLARRRGKLKAQVALGNTQLKVYHKLLSTPGLRYQDLGPDYYDRQRGTRRQIAHHVAKLGALGFEVTLCRIPGPDPGPETHQAA

SEQ ID NO: 308991 - protein, 356 aa, unidentified
MSRRRRELTIGIDLGDRVSRYCVLDDEGNVLFERSAATTKKGLAQAFASVAASRIALEVGTHSPWVKRLLESWNHEVIVANARRVKLITESTRKDDRLDARTLARLARADPQLLSPIRHRSETAQAHLVMIRARAALVDARTKLVNSARGLTKSFGERLPSCDTDRVSVGLLVDLPPSLQAALQPLMTVARSLTEQIHIYDQKIAQIARSEYPETARLRQVTGVGELIALSYVLTLDDPQRFRRSRDVGGFLGLRPKRRDSGNSRPQLRITKEGDGYLRKLLVQGAQYILGWRGPDTDLRRWGLTLAARGGKNAKKRAVVAVARKLAVLLHRLWVTGDRYQPLRPSQAAPNSSAAA

SEQ ID NO: 308992 - protein, 386 aa, unidentified
MQASTAATPTTRDYGTIFVAIELSQKTWLVTLHSPDKGKISRHKLEGGDHAGLLALIDRIRERAAQALGGVPAVVSCYEAGYDGFWLHRLLLAAGITNYVFDPASIAVDQRSRRVKTDRIDGERMLRTLMAYLRGEPRVVRIVQVPAPEQEDARRASRERSRLIKEQTAHTNRIKALLRLLGMAVGNPRRRDWLSWLATQRDWQGQAVPPQMLSELRHQHARLMLVRERIDALAKTPAQADPSPAAAQMAERSELLLRLKCLGPAFATTLTHEVFYKDFRNRREVGSYFGLTPSPWQSGGIDRDQGISKAGNPRARCAAIELAWLWLRHQPDSVLTQEYRRRTLDASKRIKRVAIVALARKLMVALWRYLTTGLVPDGAVLKTVKA

SEQ ID NO: 308993 - protein, 338 aa, unidentified
MTIIAIGIDLAKNVFAVHGVNEGGKAVLVRPTVKRDALLEMVAKLPPCLIGMEACSGAHYWAREFAKFGHDVRIMAAKFVAPYRLSGRRGKNDAADAQAICEAVQRPHMRFVPIKSEDAQARLAIHRVRQGFVEQRTATINRIRGLLSEYGHILPQKAEVVRREAGRCLEDLPGWANTAIGDLLSEVHRLDERIAEYDRHIAVMAQADERCRRLMGMPGIGEKTATALMASIGNGHDFKCGRQLAAWLGLVPGQYSSGGKQRLGRITKAGDSYLRMLLILGARSVVVAAKKKTDRLSRWVTELVNRRGYWKAVVAVAAKNARMAWAMLSKGEAFQPIS

SEQ ID NO: 308994 - protein, 316 aa, unidentified
MTEAQIYVGIDVSKDTLDVAVAPSGQQWRVRHTEEGFGPLVERLQGLTPALVVLEATGSLEVPVAAALGAAGIPLAVVNPRQVRDFARATGKLAKTDKLDAQVLALFAQRVRPSARPLPDPQTQELNALLARRRQVVAMLVTEQNRLGTALPNVRPGIEEHIAWLEGKLGGLNDGMGKLLRESPLWREKEDLLRSVPGVGPVLTLTLLAELPELGTLGRRQVAALVGVAPFNRDSGTLRGKRSVWGGRAKVRAALYMAALVAARFNPVVRAFYQKLLAAGKPKKVALTACMRKLLTILNAMLKHHTPWQPDLAFIS

SEQ ID NO: 308995 - protein, 342 aa, unidentified
MSIAVLGIDSGKNSCSVVGLDLDGRVVLRRRMRRETVLAFGEKLPACVVAMEACCGAHHMGRTLAAQGHTVRLMSPEYVRPYVKAQKNDDRDAEAIAEAATRPTMRFVTLKSQAQLDMQTLHRVRDQLVGERTALMNQIRAVLLERGHIVPQGRAKLAACLASLMDEAAVPALSARMRVLVAEVRERWQDLDKRIAALDAEFAETARSDEHARRLTTIPGIGALNATALVAAIGDVATFARGRDLAAWLGLVPRQLTTGGRPKLAGITKRGSKYLRKSLIQGARAALPTLRQSETRLGQWLRGLLSRAHINTAVVALAAKLARVVWALLRHGRTYEAIAVAV

SEQ ID NO: 308996 - protein, 366 aa, unidentified
MKKTSTVRVNGNRIFKGHKLTIGLDLGDRWSNYCVLDEAGEILLEQKLATTPEAMKQTFEKIPRSLLALETGTHSPWLSRLLKELGHEVLVAHAQKVELISKSNRKDDRHDARTLARLARIDPELLGPVRHRSAKAQIHLTVIRARAELVSARTALVNAARGLTKSYGERLPKCGTEQVSRELAAKLSAELRDVLEPLLKEIESLNERIKEYDARMEKIARESYPQIALLKQVKGVGTQIALTYVLTLDDPHRFAKSREVGCFLGLKPGRRDSGQSQPQMHISKEGDRYLRTMLVQGAHYILGPFGEDSDLRRWGLRLAERGGKNAKKRAVVAVARKLAVLLHRLWVSGEVYEPLRNNRKAMRAVA

SEQ ID NO: 308997 - protein, 368 aa, unidentified
MSKAIICGTDMHDNSLVCRVAVGKEDAKTKRYGNTDSGRKHLFGDLKGMSMKHGGGRIIVAYEASTHGFCLYDDCRDVGIECYILAPTKMRKSKKEQKKKTDESDAQLILETIKGHILAGNELPSIWIPDDKTRADRETVRARLDLGTKLTTVKTQVQTLLKAHRMKKPADVNKAWTKPYRKWLMSLSMDWPALATLVRQIENLEREIMILDLEIKKLSETERYAIPSKALVENIKGVGLLTAMVYLTEMGDLSRFSSRQKTGAFLGLAPSSHESGEADDRKGHITREGSFRVRRVLCQATWSHVTHGGVETQLYNRIVKRNPKHKKIAVVAVMRRLGIRMWHIGLNAQKSANVFNDVEKKVEVKKVA

SEQ ID NO: 308998 - protein, 330 aa, unidentified
MTVIGIDISAQSFDLVSRRHGRNAKVQRFEQSPQGHARAIRYLKGLKPECIVMEATGVYYLDLALALHEADLPVCVINPRSFRHFAEIHLTGSKTDAIDAALLAEYAERMTPRRWTPPPQHCLALRDIGRQINRLIHARTQAKNRLHALSAKTSTPGLLIEDEQDGIAQLDRRIERLKQAALELIAQSEALSRHFEHMSTARGMGQASSVAVLAELCTLPSDLKAAQVSRHAGLDVRLTQSGSSVNSPGRLSKAGNAYLRAALYMPAMAAIRHEPRAKAFYEALVARGKKKIQALCAVMRKYLTGLWACIKTQTPFDAAALFSDQHLNKA

SEQ ID NO: 308999 - protein, 379 aa, unidentified
MTSIDAQAETRETVYAAIELSKKTWMLGIAHPGRDRPSIHRVCGGNIVELVSRLRVAARNNRRILVCYEAGYDGFWLARALAKIGIECRVLDPASIQVNRRARRVKTDRIDVLALLRALIATDRGERHVCAIVRVPSVEEEDARRSHRERQRLVRERTGHINRIKGLLFAQGIRDIKPKLRRTRIDFAALKTAEGHPLPDRLRRELEREYARLALIETQLREVEKERDTADAQDPVVERKRQMLVAVQGVGGTSAAILAREVFARSFANRRQLGSYLGLTPSAYDSGSMTRSQGISKAGNSWARRILIEVAWLWQKHQPVSPLSHWYTQKTSGQSSRIRRIMLIALARKLAISLWRYVETGLVPEGVAIARAEPRCAPA

SEQ ID NO: 309000 - protein, 382 aa, unidentified
MEQSTTAYVAIDTHKKTISVAIAEAGRREETRFIGEIPSRPEAVAKMVDRLAKKHGTLAFCYEAGPCGYGLYRQITALGHECVVVAPSLVPTRPGDRVKTDRRDALTQASLLRSGELTPVWVPEDAHEVMRDFCRARQVAVESLRRARQQVSGFLLRQGRVYSNGAHWTRKHRFWLAAQRFEHPARQIAFEELVQAMDEAQARRDRLAKQMQELLPSWSLAKIVAAIQALPGIALIAAITLVAEVGDFKRFANPRQIMAYLGLTPSERSSGAKTARGAITKAGNTRARRMLVESAWTYRLPARMGAQILKRNEAPSRRSKRSPGRRRRGFAPDIAGSFGPANQPMSFASPSRVNSSPLSGRLRRMTPSPRRPDQQGKTKHSA

SEQ ID NO: 309001 - protein, 349 aa, unidentified
MRFYNRQHRHYCGIDLHVKTMYVCILNATGDVLLHRNVATTPAAFLAAIAPYREDLAVCVECMFTWYWLADLCTAEGITFVLGHALAMKAIHGAKAKNDKIDSHKIAVLLRGGLVPQAYVYPADMRATRDLLRRRLHLVRKRGQLLAHIQMMREQYNLPAFDRRLAYPANRDGVSAHFPDPSVRKSVEVDLALIDEYDVLIADLEQMLVREAKCDDADAFHRLKSVPGIGPILALTILYEIHDIHRFDRVQQFASYARLVKGRHESGGKVLGAAGAKMGNVHLKWAFSEAAVLFLRHTHTPRMQKQRARWEKQHGKGKALSILAHKLGRAVFYMLARGTVFSMDKFLAA

SEQ ID NO: 309002 - protein, 430 aa, unidentified
MRIKLSAHIRTGTIMELQRNKVCGIDVHKRFLIATILCRDGKKDTQRFSVTLEDLLKFRDWVIENGCEQVAIESTGIYWHPVHSVLEGKIDLIVANSYKIKHTPGRKTDVSDSEWIAELCLNGMIEPSRIFPKDDRELRRLTRAREGYVKQMTQEKNKIHQSLDSACIKLASVISDIFGKSGMYLLNCVLEGREIDDIIDGIPSGRLKKKADQIKESIKSRLDVSQVILIRGSLSLMKSIQERIDELDGEISARIQYRKNDLAIAMSIPGTGFVSATAILAEIGNYTDFKKPEQLAAWCGLVPSLYQSAEKTILGGITKQGSKHIRRMLIQVAYAISRTKDSKLKKFFLRIQAKKGSKVAAVALARKVLCILHHLLINQEMYIEDRDKKNMRQKPLIPPSPIEMSIQEMIDCIVRAGYVVTKSDSIGGFG

SEQ ID NO: 309003 - protein, 347 aa, unidentified
MTIVDSARPRVGGVDTHLDTHVAAVVDPNGGVLGVESFPTTPAGYSALSGWLTSFGPMERVGVEGTGAYGAGLARHLAEHGLIVIEVDRPNRQARRRNGKSDELDAVEAARGALSGRVTGHAKTGTGNVEALRVLLIAKRSARSNRVRTIVQLRHLMFTAPDELRQRLATLRVSALVSDTALLHPDPDDPAVLAAFKATAVILARRVQGHDTELAALDAQIEPLVKATAPALLNVYGCGIDTAAVLLTAAGDNASRIRSEAAWAKICGVAPVPAKTGKTSKRFRLNQGGNRHANNALWRIVLTRLGQHEPRTVAYMNRRLAQGKNKSEIIRCLKRYVARETFRALPR

SEQ ID NO: 309004 - protein, 411 aa, unidentified
MEILYPRCAGLDVHKETVVACARLATGSGEVAREVRTFGATTASLLELAAWLTAQGCTHVALEATGVYWKPVWHILAADGFALVLANAAHVKNMPGRKTDVGDAAWLAELLAHGLVRASFVPEAQTQVLRTLLRTRKQLVRERVAHTQRLQKTLEDANIKLDAVLANLLGASGRAMLEALAEGESDPATLAALAHPRLTATPERLEEALRGRVAPHHRFLLRLHLDQVDALDAAIARIDREVDAGLAPFQAAVELLTSIPGVGGLAAQVIVAEIGLDMGRFPTAGHLLSWAGMCPRNDESAGKRRSTRLRKGAPWLKTTLVRCAWAASRKKARCLQARFHRLRGRRGPTKAICAVAASILTAACHMLKDGTAYQDLGPAHFERRSKQTQAQRLVRRLADLGHAVEITPVAA

SEQ ID NO: 309005 - protein, 421 aa, unidentified
MKNSVARKLKQVPVGYLVVGVDPHKKKHAAVAINEDLVVQTKFKFANSRDGFDEALEKARAEMIKAGCRGVMFAIETGGHFWRNFAYFLEERGIPFRLISQFTLKRMRDGRDLNRRKNDFRDAEMAAGVLRTGDFTETKLPQGVYAELRGTHSAYYRLVKERSRIINLMKGLLDGLFPEFTQVFKNPCGLTALVVLSICPSPTAIASMNEDVFMDLIRSGRQGHLMKKKLCALHQVARTSIGVKPGADAVATEVTLLVSRYYLIEQQVDRLVKSLIRLVEKTEEGKYLLSIPGINYLSAAALLAELGSFRSYHNARQLIKMAGTNPIESESGGKRLGKTPMSKKGRPRLRYSAWSAVIPLFRHNPDFRAWAKRLRERPAHANPLNGKEVVGAALNRLLRLVYTLVKKQEFYRSPQLVLVAN

SEQ ID NO: 309006 - protein, 344 aa, unidentified
MGEVSTIGLDIAKAVFQVHGVDGAGTVVIRKRVSRVKILEFFADLPPCLVGIEACPSAHHWGRELTGLGHTVKLMPPSYVKAYLKRSKNDANDAAAICEAVTRPSMRFVPIKTRQQQTALMLHRTRQLLVRQRTMLSNALRGHLAELGVVSAKGRNGTAELLKIVADAEDHRIPPAARGILDVLARQYGAIGAEIGSIDKSILAWHRSCEASRRLAEIPGIGPIVATALVAEIGDWKAFASGRNLAAWIGLVPKQHTTGGKDRLGSITKQGNRYLRWLLVVGATAVIRYAQKHGTKNRPWLARLMERRPAKVAAVALANKIARMAWAIMVRGNRYKEPTLLMAA

SEQ ID NO: 309007 - protein, 342 aa, unidentified
MNITTIGLDIAKNVFQVHGVDANGKVAFRKQLKRTQVLAFFANLSPCLIGLEACAGAHYWARELLKLGHDARLISPQFVKPYVKGNKNDANDAEAICEAVGRPSMRFVPAKSIEQQDIQMLHRVRSGLVKERTAQANRLRGLLSEYGIVIGQGLAQLRKRLPEILEDGENGLTMAARQLFADLQQQLVELDKQVSIYGEKILVLHRSSAVSKTLGTIPGIGPITATALLASLGDGKAFDKARQVPAWLGLVPKQDSSGGKPKLLGISKRGDTYLRTLLIHGARAVVKAAAKKDDAPSRWINNLVKRRNANIAAVAVANKNARIVWALLTRTESYHAPESVSA

SEQ ID NO: 309008 - protein, 465 aa, unidentified
MSKLSRRNRTRSSHGETRPFEGMRTVNPHAAGVDIGAHEIMACVPDGDDQQIVRAFGTYTADLEALADWFIDRGIQTVAMESTGVYWIPLFETLEARGIQGCLISAQSLKHVPGRKSDVLDCQWIQTLHSYGLLSASFRPEADFVALRTLLRHRAQLLEHRAPHILHMQKALLQMNIQLSQALSDVTGVTGQCIIRAIVAGERDPRRLAALRNYRCTKDADEIALALTGTWRAEHRFILTPALALFAFYTAQISACDAQIEHTFAVIKPRFEPAPPVPAPTEATTSPRRKPHSPSKNAPEVNTRAHILRITGVDLVAVHGISDALAQTILAEIGTNMDKWPDDKHCCSWLGLAPKHDLSGGKVLKSRTMKNRTRAAQAFRMAAHAVIRADCAFGAFYRRLKGRLGPTQALVATAHKRARTVYHMLKDQVSYHDIGAAEYNKRFRERELKYLQKKATKLGYTLSPV

SEQ ID NO: 309009 - protein, 347 aa, unidentified
MDVHTQSISIAVRNSVGKVLMDCVIETKASTILQFIDGLRGDVRVTFEEGTWAAWLYDLLKPHVTQVVVCNPRKNALLKEGSKSDKNDARKLAELLRLNHLQPVYHGENGIRTLKELSRSYLTINKDLTRVMNRLKALYRGWGIACPGNDVYAPRHRAEWLDKIREAGVRRRAEHYYQQLDVLRLLRQEVRRDLLVESKKHRGWKLLRQISGIGPIRAALLIALMQTPHRFRTKRQLWNYSGLGLETHDSAQYRVVKGQLERSNKPVTLRGLNKDYNHDLKDIFKGAALRASIAAGPLHGFYEALLAKGRKPTMARLTLARKIAAITLIIWKKEVRFDANHLKQQAA

SEQ ID NO: 309010 - protein, 371 aa, unidentified
MKSILSVGMDVHKNSFSLCAYDGYTGKIVSESTFASDVKLVIKFIETLKSRYENDVEIKCGYEAGCLGYSLYKSLTARGVDCVILAPTTMQVSAKNKMVKNDRMDALNIAKNLASGSYKSVYVPDEEDVEIKEYIRMIHDFKKELKRVKQEICAFVLRHGYQYDGKSKWTIRYMNWIRELEMSEIQRETLNEYIAEMENLNDKINRFMNRIDEMYQSERYHEKVSKLRCFKGIETFAAMTIQVETADFERFPSAKAYASYTGLTTGEHSSGDKNNRIGITKQGNTVIRKTLVECAQSLVKGNVYAKKSQGLKSRQKGMDVNIIAYADKATERLKKKYQKLIERNVPRNKAIVAVARELACFIWGMETGNIH

SEQ ID NO: 309011 - protein, 353 aa, unidentified
MKQVTTIGLDIAKSIFQVHGVDAAGRSVLRQRLSRRRVLEFFGKLPRCLVGLEACASSHYWARELMALGHEVKLMPAQYVKPYVKRGKNDVADAEAICEAVTRPTMRFVAVKTPEQQSIMMLHRVRLILMRQRTQLSNALRSHLAEFGIVSPIGREGLDRLLTIVADTDDGRVPAEARASLEMLAVQLAGVKAQILANDRRVIASARATEVGRRLLEVPGIGPVLASAFVASVADPAIFKSGRDLAAWIGLVPRQNSSGGKERLGRITKAGNRYLRQMLMVGAIAVIRYAQRNSARRPWLAQLMGRRPTKVAAIALANKTARTVWALMSSGERYRDPQAIQAAVLANGIETPH

SEQ ID NO: 309012 - protein, 359 aa, unidentified
MEYIAFDAHKHYTLASVAQADGQLLREERIEHERGALQAFLARCERGSPVAVETVGNWYWIVDEIDAAGCRPKLVHARKAKLMMGQINKTDKLDARGLNLLQRNGTLPTVWIPPGELRDQRELPRTRMVLVRQRTRLKNRIHATLAKYALRCDEVSDLFGVRGRALLRRHLEALPPHTAFATRVLLEQVEHLDRQVRALEDRMRSVFEPTPMVQWLMTLPGVGFILAVVIALELGDIRRFPDAERFAGYAGTTPRVHASAGKTRHGPLRPDVNRYLKGAFMEAANVTNMQRRHDPRRHVTRLYARLARRKGHSKAIGAVARHLAEATYWMVTRQEGYREPLASRPSRLGRSRGASAVSP

SEQ ID NO: 309013 - protein, 342 aa, unidentified
MQVTTIGLDIAKNVFQVHGIDAAEKVIVRKQLRRRQVLEFFKTLPACLVGMEACATAHYWARELTKLGHRVRLMPAKDVKAYVKRNKNDAADAEAICEAVRRPTMRFVQIKSTEQQGRLMLHRARDLLMRQRTQVINAMRAHLAELGIVAAQGRDGIKELLEIIASEADARLPVDAHTSLVVLAAELQAMQTLIGSIEKRIMVQHRLSEASKRLKSIPGIGLIGATAIAATVPDPKVFGSGRDFAAWIGLVPREDSTGGKQKLGPISKRGDRYLRRILVVGACAVLRYARHKPEKYPWLTKLLERKPFKVVAVALANKMARIAWALLAKGDTYRVPALAAAA

SEQ ID NO: 309014 - protein, 367 aa, unidentified
MYIVGIDIGKNHHEASIVSPEGKQIGRSLRFATTHKGADSLMSFIFKNIGNSPCVFGMEATGHYWYPIYSFLKAKGYTICVINPIQSDSLRKMYIRQTKNDSIDSFLIAEVIRFGQFGTTSMADENILAMRQLCRYRDSVISSRTEIKLRIGTIMEQIFPEYEKQFSSLWVSTSMGILEKYLTPENIENAPIDELFEIIKDKSHNRLTKAKAISIKEAAADTFGIKIAQDAFSFQLKQLIDRMNFLDKQIEALDIEIMKYYEQFDCYLHTIPGIGIIAAATILAEIGDINRFKSSSALVAFAGIDPTVRQSGEFSSTHNHMSKRGSPYLRHRTAARGRRRRQAQSTAAARSSSRPRAARAVCRSANR

SEQ ID NO: 309015 - protein, 429 aa, unidentified
MTRISAGVDVPKNRSTVCIMDQDGKFIMRPFLVWHSTEELDFLADTLKRLNGEVRVIMESTSIYQYPIALHLKEKGIFISIVNAYKVKKFANTDFRGGKTDKKDSRTIASYGISYWDKLVEWQIPKDTYFNLDLLNRTYMNAKKHRQIILQELQHYIDCAMPGMDKELHSLNLSTKKDFMLDFVEKFWHRDEIVNMTEAEFTEVFTAWAKKKGYRPVEGKAAKIYAIAKSCIPYYPANPTVKTILQCIVDKLSGVNRTLVTIVTQMIEEAKKLPEYQIVREMPGVGDPLAARFFGSAGDIRRFKNSKALVAYAGIDSPPDESGDFSSTHRHITKKGSKVFRDTGYEIMMALRAQKRTWEKVRKNPEVYDYMLKKEAEGKPRKVAKIAALNKFLRIVYARIKELYDNMALAERAKTKTRSKTRAKTKVTA

SEQ ID NO: 309016 - protein, 340 aa, unidentified
MPLYGGIDLHANNSVVVLLNEQDEVIYQKRLPNDLPTILGQLAPYHTELKGLVVESTYNWYWLVDGLMEASYLVHLANPAAIQQYSGLKYTNDHSDARWLAHLLRLGVLPEGYIYPKAARAVRDVLRKRAHLVRQHTANVLSVQNIMARNTGARFSVKRLRELTKQELATLLADETQVLAVTSSLMVLDCLQQQIKTLEKTVQKRLHHTPSYEQLLTVQGIGTILAQTITLETGAISRFPTVGNYASYCRCVDSTKISNGKRKGTGNVKNGHRYLAWAYMEAAQFALRFQPEAQRFYQRKLAKSRNNTILARKAVAHKLARACYYMMRDLVPFEATKAFG

SEQ ID NO: 309017 - protein, 346 aa, unidentified
MEHYVGLDVSLKLTAICIVDRTGKIEREGVVASNPEAIAAFIKSHAPHVARIGLETGATSTWLWTELNKMGLPVICIDARHAKAALRMQINKSDRNDAVGIARIMQCGWYKEVRVKDLDSHAIKALLVSRALLVKIKRDLENQIRGLLKNLGLVIGRAKRNVFAVRAAELTEDRPELAGAVEPLLKAREAIERQIADLDRKVLRLARNDAQVRRFMTAPGVGAITALCFLATIDDPTRFKRSRSVGAYVGLTTRRYASGEVDWTGRISKCGDKLLRSYLYEAANVLLTRVAKWSALKAWGIRLAKRSGLRKAKVAVARKLAVILHRMWIEGTEFNWSSKKTANQPA

SEQ ID NO: 309018 - protein, 354 aa, unidentified
MNHLGIDVGKRKCRAALKDDKGKILNEFFFGNDKQGIRDLLSKIPSKEIGPTQAVLESTGNMWMRIHDTLEDNGIDTILANPYKTRIIAEARIKSDKLDARILSDLLRTDLIYESYVPKKEDRDKRSLVRHRITLSRTKTRLVNKVHSILDKYDYKTDVTDIFGVSGIEWLKSLLPKVSSVDRIILVTSLESIQAINHQIDAVSKEISKYASRDSTDVKLLLSITGIDIFAAMLISSEIVDVKRFSTPWKLVSYAGLAPSTRESAGKMITGRITKQGSPWLRWILLQCALVAVRYDKRLGSFYTRIKNKKGHGKAIVATAKELLVIIWYMLTRNQLYRNMNKQRYENKLRKLGQ

SEQ ID NO: 309019 - protein, 428 aa, unidentified
MKKADLLLSTLYVGIDVSSRSNVVALMEFESQKPIMTFAVANNRPGAMELAEKLSGFMEGRKDLHRLIIALESTSFYGIHVANYLSSCRTLAMFQTAVYCLNPKIVANYKKSFVDIGKNDYVDAFVIADFARAGRIKIKPWRGSQFLALQRLTRHRLHLAKSLTREKAYMLSNVFLKFSEFSLLDKEEQPFSNSFGATAEAVLTDFLSMEEIVDMPLEELISYICKKSRNRFSEPEKTAKLLQQAARNSYRLDKCLYEPITVSIASSFNLVSAYENEMKSVNKAIEKTLRGIEPTAYQSLLSIPGIGPVMASGILAEMGSVDAFKSESSLAKYAGLIWRDSQSGGFEAEDTPLSKAGNAYLRYYLIEAASHVKNHCNEFAAYYQKKYDEVKTHQHKRALALTARKLVRLIFGLLAKHQLYSPSGVDQA

SEQ ID NO: 309020 - protein, 329 aa, unidentified
MKKSYIIGVDVSKLKLDLHCYGQSNGLIISNDNKGFKSFLKWLKKEVSKDTREVMLVMEYTGIYTYGLEQFLEQQAIAYVKRPALDIKRSVGMKRGKTDQADARMISQYGWYRREELKPMKPVSDAQQQLQQLMNYRDKMVADRASYEARVKELKGQLGEKLPAQIVASSEYIIEVMDVEIKEAQQAIEQVIESDKELKVNYDLVKSVQGIGFVTAVHMLIVTENFSRFSNPRKFACYAGVAPFEHSSGSSIRGRTKVSQLANKKIKSLLTLAAICAVKHDPELKAKYAQKLQEGKPKMSVLNMIRFKLIERIFAVIKRQSPYILSQAA

SEQ ID NO: 309021 - protein, 423 aa, unidentified
METIESTKHDYAAWIGLDWGSEEHAIALQAADSTCVDRCLLEQKPELLHEWVGKLQARFPGRKLAVAIKQSKGAVINFLLGFDFVHVFRVNPKSLSSYRDALYPSGAKDDPTDAELLMDFLKLHANKMKPWVPDTPESRALLRLVEFRRHTVDQRTALTNALTQALKEYFPQALEWAGDLDTVMACDFLSKWPTLEKLQKTKPEKIRKFYTDHGSRRSELIDERLKQIRSAIPLTQDTAVVSTSVVIVETMLVQLRPLLEAIGRIDKEIEAIFRKHPDFEIFDSFPGAGAAMAPRLQAAMGSDRDRFDSADEVQEYSGIAPVTRHSGKKRLVSQRRACSRFVRQSFHEFAGHSIPQCEWARAYYDMQRDGGKGHHTAVRALAYKWIRIIFRCWKARVLYDDAKYMESLRRKQAPCLAFLPAAA

SEQ ID NO: 309022 - protein, 369 aa, unidentified
MKKSTSKVKDRFWVGMDDHAATIAVAVLKNEEAAPKAVFTVSNDERGHKQLIKRLLELESEVQCVYEAGPCGYGLQRGLAKAKIHCDVAAPSLTPRRPGRRVKTDRRDALKLAEMLRGKVLVMVTIPDLEREALRDLVRAREDAGEDLLRVRNRLSRFLLRHEQQYRAGDRWTRAHWRWIRSLKLEQKYAQQTLDEYITVTEGRKDRVDALTQVLKTVAEEHHAVISRYCALRGVDWLTALTVYAEFGDLRRYTKAPGFMAAIGLVPTEDSSGPNQRRGAITKTGNAHVRRVLVESAWHARHAPSRAGERLRKRRQNLPAEVVRIAERAEVRLHRKFSRMIYRNKRSTVAAVAVARELCGFLWAIAQLP

SEQ ID NO: 309023 - protein, 343 aa, unidentified
MQVVTTIGLDIAKSVFQVHGVDAQGEVLIRRQLKRRYVLAFFQKLPPCLVGIEACASSHHWSRELKALGHTVRLMPPAYVKPYVKRQKNDAADAEAICEAVTRANMRFVETKTPEQQSGLVLHRTRHLFIRQQTAVINAIRSHLGEFGIVAPVGRNGVEDLLDVIADPSDKRVPEIARACLAALGAQLRKLKEQILEFDRMIRAWHRSNEMSLRLDDCPGVGPVLATALAATVADPKAFRSARNFSAWIGLVPKQHSSGGKNRIGSISKQGDRYLRNLFVAGALAVIRYAKIHGTKHRPWLTALLARRPTKIAAIALANKIARMAWAMMAKGECYKQPVALAT

SEQ ID NO: 309024 - protein, 414 aa, unidentified
MLFIGDDWAEGHHDVVVQDEAGKTLARRRLPEGADGVARLHELVASRFGGDGEPDPAQVVVVIETDRGPWVKALAAAGYRVYPVNPRQAARHKESIANSGKKDDFFDAGCLADMGRTRRHQMRELAADSDVAEALKIAARAHQRLVWERTRHQLRMRSALLEYFPAALEAYKDLGLAGPDALELLQKAPDPESAAGLTVTQVTAALRRARRRGDLAQRARDIQAALRAEHLAQPPVIAEAYAASVQAGAAVIAALNEQVKIMEIRVSAFFRRHPDAGAYLSQPGIGDITGARILGEFGDAPGRYASAKARKNYAGTSPLTIQSGKKKTVQARYIRNRHLIDALHAQALSALTASPGARRYYDEMRGREIGHEDALRRVASRLTGILHGCLKTGTSYDESTAWPANRNEALQAAA

SEQ ID NO: 309025 - protein, 351 aa, unidentified
MEEYIAFDSHKRYTWVEHQEANTGKTRAYRLEHGTGAIRQALAGCAPGTAVAIEATANWYWIIDEIEQAGCVARLVHPRKAKLMMGLINKTDKLDAHGFNTLQRNGTLPTVWIPPGMLRELRELTRTRLVLVAQRTRWKNRITATLAKWGLPPSEYSDPYGKKARTELEQQLERLPEQTRWATRQMLAQLDSLSEQAQQFEKRLEELVEVTPMMQWLMTLPGVGVILGATIALEIGEIERFANGERLASYSGTTPRVHSSGDRTRHGRTRPDVNRYLKWAFAEAANSVAVNHRRNPERHVSRLYTRLRASKGHARAVGAVARHLAEAAFHVLQRKEVYRDPSLNPRPERGV

SEQ ID NO: 309026 - protein, 413 aa, unidentified
MDVIHARCAGIDISKKDAKVCVRIAGDNKRGKAQETVTTWSSMTNQILALREHLVSQRVTCVVMEATGDYWKPFYYLLEDLPGVELMLVNARHVKTLPGRKTDVADATWLAQLGAHGLVRGSFVPPEPVRELRDLTRTRTAITRERSREVQRLEKLLEDAGIKLSSVATDIMGVSGRAMLQALIEGQREPVVLADLAKRRLRNKTPELVEALTGRFREHHAFLARMHLDLIDRHTAAINQLTERIEVVIEPFRGFRELICTIPGISTLVADVITAETGADMTRFPTAGHLASWAGVCPGHHESAGRIKSTKTRPGNPYLKGALGTAAMAAGRSKDTYLGARYRRLAARRGKSKAIVAIEHTILIVIWNMAHTGALYDDPGADYYTSIQPQRTKRRAIGQLEAMGYHVTLDNAS

SEQ ID NO: 309027 - protein, 489 aa, unidentified
MLEESLDDQQIIERVAALDIGKAELVCCVRLPGPGGSRRRLQEVITYSTMTPSLQVMAERLLDLGVTRVVMEATSDYWKPPFYLLEAHGLQTWLVNAKDVKHLPGRPKTDRLDAVWLCKVAERQMIRPSFVPPPPIRRLRDLTRYRAALVSDCTGEKNRVEKLLEDAQIKLSVVASDIFGVSGRDMMAALIAGQRDPKVLAQLARSRMRVKIPQLEEAFVGRFGEHHRFLLAKMLQRVDAISADIAEVDARIDAEIAPFADTVARLDQIPGVGVTAARVIIAEVGLDMSRFPTSSHLTSWAKFAPEVKRGQGVRRAQERPRVHRPRQPVLGQRAGRGRRRLSQDRHLPRRTLPAPGPAPRQQEGHGRGRPLHPGHRLAAALRPQRPLPRPWPRLLRQPPRRRPHQAQPHPPTRGTRVQGHPRTRGLNRHTAPTPAGHARSHPRPVTFIFGLDIIRGPGLVRPGWRRSQVTARMPAGVGLRVVHLWEALL

SEQ ID NO: 309028 - protein, 423 aa, unidentified
MCYRIAGIDVHKRMLAVVVADVATEGDYEFERRQFGANPDELRRLADWLVAQNVQEVVMESTAQYWRPVWNTLERYWSAQCRGAEGAGPMSGSLVLALAQSNRGPRGRKRDFVDAERLLKRLVAQELVLSFVPDAEQRMWRTVVRRKYQLTRDRVRLQNQLESLLEEAQVKLSSLVSDLFGLSARRMLRALADGETDPAALAALGDRRLHASQEQLCDALGAVTDLKSTYRRLVGMALDELQLLERHMSKLDQEMADLLSSHQDAVQRLAEVPGLGVESAHQIIAEIGAAARTFPSEKHLASWIGVCPGEQESAGVSASNRSPKGNRLMRRLLNQCAHAAVKVKGSIFEIVFRRLLPRLGFKQAIWAIAHRLSRLIWKILHQGVRYDERGPAVNQKSRSARTAKMIKELKNLGYRVELTQDPA

SEQ ID NO: 309029 - protein, 268 aa, unidentified
MSSQVFVGIDVAKAQWDMALRPAGERWAVTNEDAGIAALGTRLPEIAPPLMVLAATGSYQRAAVAALSVAGLPVAVVHPRQARDVAQATGPLAKTDALDARALAHVAEAVRPPPRPLPDAQTAALRALLARRRPLVAMRTAEPHRLGNAPPRRQTDIQAHLTGLHPRLAALDDDLATTRRTSPVGRAREELLRRVPGMGPVWTRTRRLDLPEWGTLSRQQLAALVGVAPVNRDRGPLRGSRTIWGGRACGRATVYMGSGVAVRSVPVL

SEQ ID NO: 309030 - protein, 368 aa, unidentified
MPVAVTRISDDRVVVAVDPHKASWTAAVVDGSLQPLATVRVPVSRDGYRALRRFAHRWPHARWAIEGAAGLGAPLTTLLRTDGIEVIDVPAKLAARVRALSSGHGRKNDDADARSVGIAALASPALGTAKIDAATTALRAVVEHRDDLVKTRTQTVNRLHVVLTRLVPAGAGRHLSADHAADLLRGVRPRDAAAKTLRALAMDLVSEVRQLDRRIAKAANDIQMAVSASGTTLTALHGLGALTAGKILGRVGDVSRFRSAAAFASYTGTAPIEVSSGEVVRHRLSRAGDRQLNFCLHVMALAQVRHDTPGRAYYLRKRSEGKNHNEAMRCLKRRLSDIVYRQLIGDAVKQKAGPGGHSGAALSSRAAS

SEQ ID NO: 309031 - protein, 351 aa, unidentified
MSHKTAVTVAHTIGIDTGKNTLHLIGLDDKGAIVLREKIARGRIAARLANVPRCLIGIEAGMATHYVARELSALGHDIKQVPPAYAKPFRQGHKNDFRDAYAVAEAVQRPSTRCVPVKTDNQLDLQALHRVRSRLISDRTAVINQIRCFLLERGIAVRQGLRFLRHQLPDILATRTDVLSPRMVRIVENLVGDWSHLDERIENMTDEIEALARGDASCRQLMTVPGIGPIIASAMVAAIGNGIAFARGRDFAAWLGLVPKQMSTGDRTILGRITKRGNRYLRTLFMQGARVILLRPANWAKHSFGVWLTAAARRLHHNVLATALANKLARIAWTVLAQGRSYEARVEPTVA

SEQ ID NO: 309032 - protein, 361 aa, unidentified
MLYLGIDQHRKQLTVCVRNEEGDVILRRQVSTEWDRVRAFGAEIRKLGGPAGFVVIVEVCGFNDWLLKLLAEYDRRETFVVQPEKQSKKKTDRRDANALCEILWLNRQRLLDGKPVQGVRVVHLPSVQDAADRQLTELRKRVGQLRTRTINKVKHLLRKHNLEQECPTKGLDTVKGKKWLATLALETMDRLEMDLALTQWKQWDEQIETLDAAIRKRQAKNAPAALLATIPGCGAYSSLALASRIGDIERFPRPASLANYWGLTPGCRNSGEATDRLGSITKQGSVTARFILGQLVLHVLRRDAAMRSWYGRIKKRRGSKIARVAVMRRLATIMWHMVKHWQPYVVGGPPRQKLRAQAGSR

SEQ ID NO: 309033 - protein, 351 aa, unidentified
MIIGVDPHKASHTATAVDSSTNTPVASLRIDATLAGYRELLRWARQFEGRRWAIEGARGLGRHLAQWLVARDEDVVDVPSTATARVRELSRGSRRKTDVIDAAAAACVAALQGDATPVPREDHTTVFAMLEERRANLAAQRVRAANQLHAVLRDLVPGGAKLAITAKSASTMLRSVRPASLCERTRKQLAQDLVRDLRAVDASLAEIEQRMSEALDDHGTRLRQVDGIGSVTAVRLIGRTGPASRFPTADAFATYAGAAPIEVASGERTRHRLSRSGDRQLNSAIHLIAVTQVRMRDSIGRRYYDTKIAEGKTRNEAMRCLKRRLANHIWRMMIADERCSPATAEGDKRVA

SEQ ID NO: 309034 - protein, 368 aa, unidentified
MNKETITSNGISAASLVNHVNRVLNLGLDVHYRQVTVAMQEDGGRIKSAGKMGHPEFLNWVGKKLEEGWEIYSCYEAGASGYWLHRELVKLGVKNLVVVPKAMGRGGQKQKTDKRDAGELCDSLDRYLRGQKKALSVVAVPTEEQEEKRALIRYHRQIMKDRGRCEARGKGLLCAQGIEVRGRWWQGDTWLALTSDPRVKDWMKEQLVGWRSKILSTDEEQRALRQRIAALAPAILPKGVGAYSAAVLHYELRGFEHFKNRRQVGSITGLCPGVHLSDGRGKEGSINRCGIGIVRWTLVEMVWRLMIWQPQYPPVRRLAAGFVKSKRAKKRLVVQAARRLAIDLWRLSTGQTTPEKLGLVMQYNSPAN

SEQ ID NO: 309035 - protein, 339 aa, unidentified
MKLYTGIDLHSSNSYVAIIDETGRRVFQKKLANDATIIIGVLAPHKAEITGIVVESTYNWYWLVDALMEEGYKVHLANPSEIQKYTGLKYADDRHDAFWLAEMLRLSILPEGYIYPKEDRAIRDLLRKRSHLVRLRSSLIISLQNIISRNNGCRPSVNDIKARKEDRVSQYLTDNEDINLAGKVSKESIDFLGRQISSIESAVEKKLELRAPYTNLLTMPGIGKILGLTIMLETGPIDRFAKVGNYASYCRKVSTRWLSNDKKKGKGNKKSGNKYLAWAFSEAAELARRYHVEPKAYYDRKKQRTNRMVAHSALAHKLARAAYFVMRDGVPFSPKRVFV

SEQ ID NO: 309036 - protein, 360 aa, unidentified
MNRHIFAGIDLGDKNSVARIATDRDKSERLGFMNTRAGRARLFLELKRRSGAAGGATIVMAYEASSCGFVLRDQAEAEGIVCHVLAPTKMEKSSQQKKHKNDDRDADDVLEKLRGHVLAGNRLPTVWIPDLEARDDREIVRTRLELGEKQTQVKTQIQMLLKRHGLERPKDLSKRTVAWRHWLTALSKSETLQWATRESLSSMLRQLGAIESELQQLDFRVQQLAQQERHKPIIEALTEEKGVGLLTAMVYRTELGRASRFRRGRHVGKYVGLTPTSHESGEQNDRKGHISRQGPPRLRKVLCQASWVHIRHDSQSRQYYQRLVARNPKKKKIALVAVMRRLAVRLWHRMRKAESLMTNR

SEQ ID NO: 309037 - protein, 340 aa, unidentified
MGEYVGLDVSLKETAVSIRRAGKRIWRGMCASDPQILAALIRKHAAVPERVVFETGPLSVWFFHALSAEGLPAICIDARHAKAALDMAANKTDANDADGLAHLAEVGFYKEVRVKSFDSMLSRTLVAARTRLVRIGTELSNQVRGLMKTFGLVVPPVSGSKFERQVEALLADNADLGCIIRPLLEAWHAVRLRAAELGRKLLADARRSDACQLLMSIPGVGVVTATSFITAIEDPTNFKRSRSVGAWVGLTTRRYQSGEIDYGGHISRRGDSHLRGLLYEAATVLLVRSRSECDLRKWGLELRERLGFKRAAVAVARKLAVIMHSMLITGEPFRETSVTA

SEQ ID NO: 309038 - protein, 426 aa, unidentified
MDIVYPRVAGIDVHKKVVWVAVRLPGEAPGERKVIIKRFKTFWRPLQKMAAWLADLGVTDAAMESTGVYWCPVYHALAGAGIEVCVCNAAHMRNVPGRKRDIADCQWIAELHEYGLLRPSFIPAAEVAALRQRTRYRKRLIEQRTAESQRLAKVLEDAGIKIDSVASRLLGVSGRAMIEALIAGERNPGRLADLARGVLRRKADDLQMACDGRFTGGHGQMCRLHLDAYDHLTAKIAELDALIAEAAAPFAAVIARLMTIPGIGRRTAEVIVAETGGDMARFASGARLAAWAGLAPGDNESAGKRRHAAARQGNQHLRAAMAEAAWATARTRTRPGARFRRLARRFGKGHEKKAAIAVARTLICIAWAVMARGQDYADAGEDYYDQRDQRNREHLIRHHQQALARLGCQVTLVPPGDGSPPPGQAA

SEQ ID NO: 309039 - protein, 350 aa, unidentified
MAYIGVDLHKKDFHTCYRRAGAAPTFNKYINDEEGLRRFIATLHSEDWVAVEASGAARPFIFRIEPYVERVIMVAPYQFRLIAKSVKKSDRLDAAALARGLEKDYLPEARVRSENAVQLHSVLTLRANLVRETVQSCNCLGSMLQRKGKPLPRNQLTSLTKWREIRAFEWDWADAAYVRLLHEQFLATKGRILKTEKVITRIAEKFPGYDVLLSVPNIGPITAATLLAAIDGIDHFPCPKKLAAYIGIVPITRQSGSHRWGGRMTKFGDASARGLLCWAAWRAMYKNESLYSFYDKIRKRRGAGKARSAVGRKFLYLLYFALKANRPVAHFEDLNFSDLKRTLPGALARI

SEQ ID NO: 309040 - protein, 350 aa, unidentified
MGEISIIGLDLAKQVFQVHGADKTGRCLLRKQLKRREVLRFFAGLSPCLVAMEACGSAHYWAREIARLGHDARLLPPAYVKPYVKRGKTDRIDAEAICEAASRPTMRFVPVKTIEQQSLATLHRCRDLLVKNRTMLVNALRAHLAEFGFVAAKGIGKLPDLIEIVSEAPAEALPEMARAPLSGFIDAIALINRQLDGLEKRLRAWHKGNAQSKRLETVPGVGLIGATALCALVPDPKLFRNGRHFAAWIGLTPRLDGTGGKVRLGRISKAGDGTLRRLFVLGATALLRSLSNKTTPLALWVQGLLARRSGRAVAVALANKLARIAWAIMASGKAYKPLSAAQLPMPAGRA

SEQ ID NO: 309041 - protein, 387 aa, unidentified
MYFVGIDISKFKHDCAIIDELCDTVMPSWSFSNDREGFSHFKALLDSLEGEKKIGLESTGHYGQNLKQFLESNGFTFMEFNPLLVSRFVRSKSLRNTKTDSIDALSIAQYVMTVEYKPYPSSFYHLDKLKSLTRFRNSLVRQRSRQLVELTNVLDKLFPEFKPFFKDKFSVTALYILAHYQTPERIANMNARSYEALRKLSRGRFTLSNFTQLKALAKNTVGTQSDYLLDQMNILLELYSQLDSKVDELDAQIKECVRGIDPPCLSIPGVGELSAAMILSEFGDFSKFQTPSKMLAFAGLEPGYFQSGQSEYTGHMVKHGSSRLRYALMNCCLPLISNEPVFAAYYTKKRSEGKPHRVALTHVAKKLLRVIYTLQTKNIRYDPTMIH

SEQ ID NO: 309042 - protein, 375 aa, unidentified
MKEKVRFLGLDVHAETIAVAVAEPEGEVRSLGTIPNRAESIRKLIKKFGPAAKLRACYEAGPTGYVVYWQLAELGVECEVVAPTLVPVKAGDRVKTDRRDAEKLARCYRSGDLTAVWVPDEGSEALRDLVRAREAAKQDQTRARHRLSKFLLRSGQRPPTGVRPWTRPYLIWVAQLRFTQIAQESTRQDYLHEVEHMRERVARLEQAIMEAVKLASPALQQVINDLQALRGIADISAVTIASELGQVSRFESARQLMGYCGVVPSEDSSGKRTRRGGITKTGNAHLRRIVVEAAWSYRRPPGIWYGLRRRQESISEETKEIAWKAQHRLHKRYVKLGAAGKDQRKIVTAVARELLGFIWAVGTRAETVSRQQVAA

SEQ ID NO: 309043 - protein, 427 aa, unidentified
MEVLYPHCAGLDVHKSLPSGKRGRRWWLARHMVNGTVTREVKTFRTTTKDLLALSEWLASQGCTHVAMEATGVYWKPVWHILSDGDVTLVLANAAHVKNVPGRKTDVNDATWLADLLAHGLIRGSFVPDAQTQELRGLLRTRKQFVRERSSHVQRLQKTLEDANIKLDGAISDIIGLSGRRMIEALIPTGQARGLKAHGESDPEALAGLAHRRIKAPPAALREALRGRVTDHHRFLLQLHLQHIDALDAAITAIDREVNVQVEPFHTQVLLLTTIPGVSDLSAYVIRAEIGGDMGRFPSVGHLISWAGFCPRNDESAGKRRSNRMRKGAPWLKTTLIQCAWAAARKNGSYLQAQFRRLRARRGAKKAIGAVAASILTAAYHMLKNGTLYHDLGPDHFDRRAKTVQTKRLLTRLQRLGYAVQITPLAA

SEQ ID NO: 309044 - protein, 453 aa, unidentified
MKKDKKKEQKVVELDAFEQINHNAAGIDIGAEEFYVAVPKGRDTESVRRFPTFTADIHRLADWLAQCSVKTVAIESTGVYWIPLYEILEKRGFEVYLVNARHLKNVTGRKTDVLDCQWLQQLHTYGLLRASFRPSEQICAIRSLVRHRDMLVAYRSAHIQHMQKALNLMNVRLTNVLSDITGVTGMKIIRAIVSGERNRKVLASYRDAKCAKSEEEIEKSLEGNYKLEHLFVLKQALELYDFYDQQIKQCDQELETLYNEFEEPDQPGTPAPEKRKRKRRKNQPHFDLSESLYRMTGGIDLTKIDGLESLTVQEILSETGTDMSKWRTVKHFCSWLCLAPNNKITGGKVKSSHTPHTKNRASNAFRIAAQSLMKSKSALGAYCRRMAALHDAPTAITATAHKLAKIFYFMLKRREAYRPLATDYYEKEHRDKVVRSLQRRAATLGFRLETVTS

SEQ ID NO: 309045 - protein, 346 aa, unidentified
MIIVGCDFHPTWQQIAVFDSETGEITEHKQIHGNGEAEQFYRRLPIASRIGIEACGNSQWFVDLLQRLGHEVWIGDAAQIRASYVRKQKTDRRDAAHILRLLIEGRFPRLWTPSAEERDLRQLLVHRHKLVAIRTRVKGGLQHLALNRGLQKKSKLWTAAGQKALRELPLDTWAACRREDLLGLLASLDKQISKLDAAVERAAEEHPQARLLMTQPGVGPITSLAFVLTLGDVSRFQRGKQVASYLGLIPRERSSGGKQRLGAINKQGNSLMRTLLVESAQSVTRLDPGFRKQYLHRCHRMAKGVAKVAAARRLAVRLFWMLRTNTEYPEIVRIESSPTLAVVSES

SEQ ID NO: 309046 - protein, 345 aa, unidentified
MSMVGGLDIHRKQITFDYLDTVTGEVGRGQITPADRAHLRAWLARFAGRDDVAFAVEGCTGWRYVAGELAAAGVAAHLAEPADTATARGRKRHAKTDKTDSRHLRVLLAEGRLPECWIPPAHVLEYRALLETYHDLRAERTAWAQRIHAVLFHQGAPGLGDGALRTEQGLAALRDASAACLSPAGQLQVATALDMIAALEARLHELRHQLLDAARHLTGARVLADRLYGVGPVAALALTCWLGGAGRFSSSRKAVRFAGLDITVWSSDRKGPPGRLSRQGPPVLRWAVYEAGKTHARATAPDHAYYAAVKDRKNGKRAALSEARKILRQACHILTELGDEALTVA

SEQ ID NO: 309047 - protein, 385 aa, unidentified
MKKSTTAKMSRESKNLVKNNQVHELAAEQRLTIGIDLGDRTSRYCILDERGEIVSEERLATSKEGFNSLLEKMPRSRVALEAGTHSPWVSAQIASLGHEVIVANPHKLKLITQSAKKNDRIDAERLARLARVDAKLLSPIRHRGAEAQADLAVIRARAELMETRTALINSARGLAKPMGERLGKCEADQVKESLASGMRDEVREVIGPLLKSVEAISRQIAEYDKKIEKITGRYPETELLRQVHGVGPLIALTFILTLEDAQRFQQSRDVGPYLGLTPKQHDSGDSAPELRISKAGDGLLRSLLVQGAHCILRRNAPDSDLKAWGLGKQDNGGKKGGKTRKKKAVVAVARKLAVLLHRLWVTGEVYDPLYNRKSVQTARAQEKAA

SEQ ID NO: 309048 - protein, 368 aa, unidentified
MDTEYYTTIGMDASDRTTKVCVMAKERGARRILEETTIPTTRDGLRAYLSGKRADWPVVFETGTHCRWMKREVESLGMKAIVANPSKLRMVTESNTKNDRNDARELARFALADVELLHPVRLRGERCQQVLRLMKARDMLVKVRTMHVNELRGFAKSMGFRLPSCPAGRMHALDKSGWPDDFEAVAWPMMDVLETVDLKIRAYESQIRSLAESRELKEKVDRVREVYGIGLLSGVALVASIDADPDRFRKARDAGAYFGLVPKQRQSGEMDAQCHITRAGSDFVRRLMIEAAQIAMRESARDTDVKLKGLRICARGGKIAKKRALVAVARCLVVTAVALLKKPDADYVPLSERARLEFEAMRSAETAA

SEQ ID NO: 309049 - protein, 339 aa, unidentified
MEKHNKVTRQGAPTETIGIDLGDKISCYAIVDEMGNLMEEGKFRNQPESIRKHFGQGVPARVALEVGSKSAWITRELKQLRHEVIVANARQVKWITASDQKNDRVDALKLARLARVDTELLAPVEHRSESQQAELSVIRARDAVVRARALLVNAARGMAKGLGHRLPKAITKTFGVRTLKDLPAPLRPALAGLLEQIDQLSATIHGYDEAIARLIERHPEVVRLKTISGVGPLTAMTFVLTLGSAERFTHSRDVAGYLGLRPRQKQSGVCDPQLGIAKSGDRYLRKLLVQCAHHVLGCFGRDSALRRWGLVKSEGSKNAKKRAIVAVARKLAILLHVCG

SEQ ID NO: 309050 - protein, 409 aa, unidentified
MRPILRSCCGIDVHKSMIKACVAKGPLNKPPKIEIRTYSTMTSDLLKLSEWLKENKVQAVAMESTGVYWKPIFNILEADFPVSIANPKYLKKVPGKKTDVSDSEWIATLLRCGLIPKSFIPPKPIRELRDLNRTRRKMVEHMASEKNRLQKVLEDANIKLTSVVSKVDGISSMNMIQALLTQDEISREDIAAMVHGKLKNKIDQLVQALHGRLTDHHRYLLRLHLKQIAFLADQIKELDDVIQKKMKAFKKESDLIKTVPGIGDTTSAAIIAEIGIDMSQFPDEAHLSSWAGICPGNNESAGVKKSGKIRKGNKFLKATLCEAAWSASKKKGSAYSAYYNNLAKRRGKKRALVALAHRMLMDIYRTMKTGEPYVDEGAEAVFERNSSGRQKSAIRFLEKAGYAVTKASA

SEQ ID NO: 309051 - protein, 375 aa, unidentified
MSETTSRIRYVGLDVHKETITIAVAEEAGRPEAWGTIANDPQAVRRLVRQLGQEGCQLKLAYEAGPTGYVMQRQLTQLGVECQVVAPSLIPKSTSGRRVKTDSRDAEQLARLLRSGDLVAIWVPDEGHEAFREVVRARFVAKKDLERHRHQLGKLLLRWGLRPPVSVTRWSKPYRRWLAELSHPLRDLQTVLDDYRSALWAAEERLAYLEKQMSEAARRRPQLALLVALQMFRGVGELTSATALAEVGDFRRFARAGAFMNFAGLTASEHSSGEKQQRGPITKTGNSNLRHVFIQAAHNARHQPQPRARLKQRHEGAPADLVEMAAKAQERLYHRYWHLARRIGREKAVVAVARELAGFVWAMGQRMSEPARQAA

SEQ ID NO: 309052 - protein, 387 aa, unidentified
MIYVGIDIAKETHVAAAVDSDGVIVIEPFSFSNNHEGFKLLKSKLDSLDKSNLLIGLESTAHYAENVIFFLHGCGYELAVINPVQTAAMRKTGIRKTKTDKVDSLLICKTLMVNSFRRYTENDIKTLKLKSLCRFRQNLKKSKARLKIQLTSYVDVIFPELQYFFKSGLHIKSCYELLKVYSSPDDIAALHLTKLSNILTKASRGRFGKQDAESLKSLAKSSVGVKNTYISIQITQTIAQIELIESQLNELETVIETAMDELDSVIMTVPGIGKLNGAMILGEIGDIKRFSDSSKLLAYAGLDPVINQSGKFNAKRTRMSKRGSKILRYALINAAWNVSLNNDTFKRYYDSKVAQGNSHYSALGHTAHKLVRVIFKLLNDNITFALV

SEQ ID NO: 309053 - protein, 432 aa, unidentified
MKHNQSNKQNQRISRISETTLVIGTDIAKHNHVARAFNYRGIELGKRCLFQNDENGLLNLLAWAESIKQEHGLTDVLLGVEPTGHYWFPLFHFLKQYGVEVVLVNPHHVKKSKELDDNLPTKNDIKDAKVVAKLVIDGRYTQPQLPEGVYADLRVLMNQRDRLCGDLNRVKGRIHNWLDRFFPEYTQVFKDWEGKASLITLQHFPLPQDVIAAGETTVVAIWKKNDVKRAVGPKRAELLYRKAQKSIGLTEGAMAARHELAMYLEQYAMLCRQIEQLMELVAGLVEQIPGATHMMSIPSIGLTTVAGFLAEVGDLSGYDHSQQIVRHAGLSLRENSSGLHKGETTISKRGRCRLRALLFRAALTMVAKNQEFRALHLYFTTRRDNPLKKKQSMIAICNKLIRVLFELGRKQKEYDASKVLGPHREAQLQAAA

SEQ ID NO: 309054 - protein, 356 aa, unidentified
MSSMTTPAVAVQEAFGGVDTHKATHHGAVIDQGGQVVAEQEFATTSAGCHALVAWLGQWPVTRVGVEQTGTYGAALARELTEAGCIVIDVNRPEVWVRAAHGKSDPIDAVMAADAVRTGRAAVIAKDRRGVIESVRYLHTTRGSAVQQRATLLTQIGDLAITAPAGLRDRLGTRNRDIVAASLRLRPDRDRLAEPEQAAKIALRNTAERIHDLDTQIHALDEDLSILLGQIAPRLLERPFVGVNTAAQLLITAGQNIDRIGSEAKFARLTGVAPIPASSGQTHRMRLHRGGDRAANAAIHLVAIGRLGRHQPAIDYAARRTQEGLSKKDIIRAMKRLIARELYGALKADLRALDAT

SEQ ID NO: 309055 - protein, 311 aa, unidentified
MTLTQNYIGVDIAKGWIDVFYASSSKHERITVTKQFLAKFARAARGCLVVLEASGGYERPLTEALTKAGVDYARVNPRNAREFARSLGKLAKTDKVDAAVLARMGRALDLAPTPPPDPDRAQLAALVARREDLVTTIGRENNRLGVAVDPWIAKEISSLVKVLKSHLESVEVQIATLIETREPLATANRRLHSVTGIGPVVAAVLLARLPELGQLDHRQLASLAGLAPHARDSGLHRGKRLIWGGRAEVRRALYIAAKSASQWDPVFKAFRKRLIEAGKPFKVAIIACARKLLTVLATMFKKGEDFRKATV

SEQ ID NO: 309056 - protein, 454 aa, unidentified
MDSSIIRFVGLDVHKRVVEACIVDKAGNVVHRERFGLSRRILEVFATRVLQPTDHVAFEATTNCWAVADALRPHVAKVVVSNPMATKAIAQAKVKTDKVDALVLAQLLRCDFLPEVWQPDEATRRLRELTGRRAALVGQRTKMRNRIHSVLAMRLIEEPSKVFTCVKNREWLATVEVDPQGRMLIDSDLRQLEFLEKEIVALDLELAQRGHASEPVKLLMTLPGHDVATAESLLAAWGDWTRFPDADHAASYIGLAPSTKQSADKCYHGPITKRGNSHARHMLVEAAQHLDKHPGPLGHFFRRLLKKKSRNVAVVAGARKLAMIAWLMLKGNEPYRYAIPRTTEAKLAKLRVKATGQRRKSGPPKGVKAEPKLPAAAPGESRKSRTVKSLPAICESEGLPRPKGLSQGEQRTVAAAGCQAFVAESAATQVQPRKRARRLTGSSSLLPVHAHGGN

SEQ ID NO: 309057 - protein, 350 aa, unidentified
MMIIGCDLHTRYQQIAMVNTDSGELVERRLEHESGEARGFYAGLKGAVRVGIEATGHTAWFEALLAELGYELWMGDAAKIRAAVVRKQKTDARDAAHLLDMLCTNRFPTIWRPSLQERDLRQLLWHRQKLVWMWGAVKNQMHALAMGEGVCRKKKLFTAKGRTELEGLRLGPWASYRRQELLRMFDELQNSVKKLDQAVELAAQSEPLAARLMTHPGVGPITSLAFVLIIGPVERFDRSKQVVSYLGLNPQEHSSGGRQRLGSISKQGNPMMRSLLVEAGHTAARLDPQLQRVYQRLKFRRGAAVAKVAIARKLAVRLYWMLRSTADYAQLVRMRGSSWATLVEDSPSLG

SEQ ID NO: 309058 - protein, 419 aa, unidentified
MSFKILKFNCCGLDVHKTWIYACIGITDSNNRTEYKQARFSSFTKGLNELCDWLAKYNCKDVCMESTGKYWIPVFNILEQHKIRVTLSHPKYTKPMKGNKTDRKDAKWIGDLYMCGMVKPSFIPPADIRELRDLVRYRFKLTCMITGEKNRAQNCLTVSNLKLDDVFSDVFGKSSRSITEQILQHPGEKFDVSPFVDSRCKTPIEEIQAAVDGNISKEQAVKLRQCLDHIDELQKHISEVEQEILRFSDKYEAALNLIRTVPGFDKNPMTAIQVLSEIGGDMPVFPTAKHLVSCAGCCSRNDKSDRKIKSTRISCAGSYFKPVLVQIANALIKSKKHFEFTTRYKRIKTRRGHKKAIIARCRMILTAIWHILTDLKPYTSDGFLESRPVKKEKVLTTSQALNLLRQRGYLIKDEPSPVS

SEQ ID NO: 309059 - protein, 360 aa, unidentified
MNSLPATVGDFYQYVVGVDTHAATHSYAIIEAPNGGLIDQNAFPTSPAGLRRAREWITRRTEGDLDGVLIAVEGTGSYGAVLSGVLQQGGYRVVEAPTPRRARARSKTDALDALLAARSSLVMPLTTLRDRRAGELQSALQVLTGARDQQNADRLRCINALTALVRTHDLGIDARRALTGTQIATIASWRRREETLGAAIVRAEATRLAKRITMLEEDLAENREQITHLVEATAPELLDLPGVGAVTAAVILTVWSHPGRIRNEAAFAMIGGICPIPASSGNTTRHRLNRGGDRRLNRALNTIVLTRMRTDPATRAYIERRLSDGKTRREIRRCLKRYISRQIFRALAVAHPAPDVVATA

SEQ ID NO: 309060 - protein, 410 aa, unidentified
MQTLVERGCGLDVHQATVVACLLIISKQGKVQKQIRTFDTTTRELVSLREWLLSEGCTHVAMESTGVYWKPIYAILEGAFEIVVANAQHVKKVPGRKTDVKDAEWIADLLCHGLLRSSFVPPKPIRELRDLTRYRRKLVESRSAERNRLLKLLEGANIKLASVASDVFGASGLLMLQALVEGKATPQEMAELAKKQLRKKIPELELALEGKMEEHHRFLLNLQLRRLQSVEQDLGILEQRIREKLKPYAAELTLLDEIPGVDGTLAAGIIAEMGVDMRVFGSVSQLASWAGICPGNNESGGKRKSSRIPKGNVYLKTTLVEAANAAAKAKGTYLRDKFYRLKARRGYKRAAVAVAHKILVASYHMFSHRVCYNELGDLYLDELNKHHLTRNLVHRLERLGYTVTLEQKAA

SEQ ID NO: 309061 - protein, 343 aa, unidentified
MQTITTIGFDIAKSVFQIHGVDAGGQVVIRRQLKRRSVLGFFQKLSPCLVGIEACASSHHWSRELQALGHTVRLMPPAYVKPYVKRQKNDMADAEAICEAVTRANMRFVPTKTPEQQSCLMLHRTRHLFIRQQTAVINAIRAHFAEFGIVAPVGRRGVAELLRVVADPNDNRLPEVARACLAALGTQLLALKEQILEFDRMILAWHRSNQTSKRLHYIPGVGPMLATALVASVADPRTFRSGRNFSAWIGLVPKQHSSGGKERLGSISKQGDRYLRSLFVAGALAVIRYAKIHGTGQRPWLTALLGRRPTRVAAIALANKIARMAWAMMAKGERYKQPAALAR

SEQ ID NO: 309062 - protein, 348 aa, unidentified
MRQETKVYVGLDVHKEFCQACVMNKSGKVISNERFLSTQEALDKYLDRFKDAEFVLESTGIWEFIYEGIEKRGFEVVLAHPLKVRAIAEAKVKTDKVDAEMLAHLLRADLIPRSHVPPRDIRNLRQLVRHREYLVRQCTSIKNRIHAELLRRGIRRPDSLKKTFTFKHVGWMRSLGIFTITSSLNCLEGIQEQIKEVESFLLAEYNSRKDAQLIATIPGIGFYGALLILAEIDDIHRFSHPEKLCAYAGLVPTVHQSGSRGHNGSITKNGSPHLRWILIEAVHVHTNYCPESKLSAFHRKIAQRRGKQRATVATARKLLHTIYWMLLNKEKFHCQGFNLVEKAASMNA

SEQ ID NO: 309063 - protein, 413 aa, unidentified
MERVLERCAALDVHKAQVTVWVRVPDGQGGREDLRERYSTMTDELLALRDWLRELGVTHVAMESSGVYWKPVYYVLEDEFELLLVNAQHVKNLPGRKTDMKDAEWLCQLLECGLLRSSYVPPREFRELRDLTRYRKSLISERQRQANRLHKVLEDAGVKLACVATDVLGVSGRAMLEALIAGTRDPEVLADLARGKLRHKIPELQRALTGRFSGHHALMVGHILAHLDFLEEQIASLTDEIDERLRPFVEKVERLDGIPGVGALTAQVIIAELGMDMTRFVSHRHAASWVKICPGNHESAGKRRSGRTGKGNQHLRAALVEAAQAATRTRNTYLRAQYEQIKRRHGHNKAVVAVAHSILIAAYYMLRDDVAYHDLGGDYYARRSDPERQTRRLVAQLERLGHKVNLEPMPQAA

SEQ ID NO: 309064 - protein, 373 aa, unidentified
MKSTTKYVGMDVSKETIAIAVAESGRDDPRYWGTIPHKPEAVRKWLKEIGEKESLEVCYEAGPTGYELYRWLQAMGVSCTVIAPSLIPKRAGDRVKTDRRDALRLAQLFRSGELTGVYVPDRDTEALRDLVRAREDAKEDLHRARQRLLKFLLRHQIHQPKHLKKRWTKSYKKWLGELKLERSAAHFVFQDYLHVVLESEKRLERLEKEIENQSETAPQTEVIQALQALRGVGLVTTMTLVAEIGSFSRFRSPQQLMAYAGIVPQERSSGNSNWRGRITKSGNGHVRRVVTEAAWQYRHRPAMTERMQNKNQNQEQTIQAISWKAQHRLHQRYYKLIVQRGKQKCVAATAVARELLGFIWAIAVEVEQRKIVA

SEQ ID NO: 309065 - protein, 428 aa, unidentified
MTNYEQITDERVLIAIDFAKKYNMVLVQYPDGKKKAFSMANQKADYDAFLGYLKSLPATPIIAFEATGDYHRPLAYQLGRDGFKLRLVSTVAVARTREALYNTWDKNDPKDTQVILHLLRTGIIQVYRDPLLEQTNDTLEISRTHYQVSLRKTQVQHGIMNHFLPLYFPEVVKYYTQSRAQWFSRLLMRFPCPSAITRYTFEEFMEEAWDVVGRKVNKQGFLKDLYLTAQQSIGLDVSDQSQAMGVFRLVLEEHQELCDKRAWIERQAETHLAQHPDYQRLKTLPGVGSILALTILAEAGDLRRFSHHRKFLKYCGFDLSTQQSGQFRGLSRISKRGNARLRYAFWLAATVAIRMRENSFRSKFDRYVKNDPLNADLKRKAYTAVAAKMARVAYSIIKAESDYHPYHEAGITSGKIPSVRAVEATLTS

SEQ ID NO: 309066 - protein, 335 aa, unidentified
MNGSTGHWVGIDISKGKLDVALLDQRGKIKNHVFANDGKGHAALITWLHERSPDAPPSVCMESTGHYGEAAATALADAGFRVSVVNPARVKGFAQSELARNKTDRADAALLARFGLALQPEAWVAPPREVRELRSLVERLQSLKEMHQQETNRLEAAAQQPSMRDSIESHLQWLQAEIKALERRIDDHIDRHPGLRADVELITSIPGLGNTTAAKMLAYLGDVRRFRSAKALAAFIGVTPRLKLSGSSVRGRSTISRSGHSMVRHALYMPALVALKHNPLVHEFGSRLKAAGLAPKAVVAACMHKLVLLVYGILKSGQPFNPSFGVNRLDFQDGI

SEQ ID NO: 309067 - protein, 318 aa, unidentified
MILVGIDIGKNKHTFSIIDKNSGEILLSPSDFSNNLKGFLFLIQKLSSYTKSELLIGMEDTGHYHFALLKYLLDRRYTVALINPTTTDLTRKLQGGITKNDPLDSLTICDVISSNHRNKPYRVTTLNRFDLYEQKQLTRHHHNLKEELNTYKNRLQKCIDIVFPEFNSLFHSKYGIVYMNILKAFSSAKAIANADIRSIRKCFEFKGQGKRISLSAEQLKLTAKSSIGIPSVAEEIQIRHLVSQIELLEKQLSEIDKRIEEFSLKNNSPILTIPGISHFSGTSIISELGDICNYTKASQIIKFAGVAPYHYESSQFTA

SEQ ID NO: 309068 - protein, 378 aa, unidentified
MNRIIKIGMDVHTTNYTLCIFEPSFEHDGTVHCITQVKPEIKKIIHVIETFKKKHENEELNIVCGYEAGCLGYSLYHELKEKGVECVILAPTTMKTEKGGRKLKNDYRDAKMIAECLAYGGYSAVHVPTELDNSVKEFIRMRDDIKENLKSIKQQIIAFLTRNGKQFNGKSYWTRKHIDWINTISFSEPLLQDTLKEYMIEYNHLCDRVETLDKQIEEVSLKEEYVEKVQQLQCLIGIKTHTALSLIVETSDFNRFKKGNMYSAYLGLIPGDDSSGGHENKLGITKAGNSHLRRLLVEAAQGYTRGRVGFKSKDLKSRQEKCSSEVVAYADRANERLRRKYYRMTLRGKKFNVAKTAIARELACFVWGIMTDHIDLCN

SEQ ID NO: 309069 - protein, 412 aa, unidentified
METVVERPSALDVHKEQVTACVRVPGKGRSREQHVAEFPTTVAGLLTLRDWLAAFGVEQVVMEATGVFWKPVWAILEDEFDCVLVNARHVKQVPGRKTDVKDAEWLCQLAEAGLLRASFVPPKPIRALRSLTRYRKTQIQERAREANRLHKALEDTGIKLDCVATDILGKSGRAMLDALVSGTRDPEILAELAKGRLRAKIAALKEALEGRFDHLHAVWIGAILAHLDFLDEQIANLTEAIGEQIAPFEKAVELLCTIHGVQRRTAEVIIAEIGVDMSIFPTAKQLASWAGQCPGNDQSAGRRRSGKTRKGSKWLDWALEEAAMAAIRTNDSYLAAQYARLRPRRGHKKALGAVKHSILCICWHMLSTGELYTDLGGDYFRKRDPERITKRLIAQLESLGHKVILEELAQAA

SEQ ID NO: 309070 - protein, 396 aa, unidentified
MPMYYAGIDVSKYKHDCFIQTDFGDVIHAGFTFDNTACGFGELQAELEKYGRGNIRIGLEATGNYGINLKLFLESIGYDFMEINPLLVKEHIRSMTLRKTTTDKLSARAIADYVVAKVNKSADGYKPHPVGFYPKFALKQLTRLRSSLVKGRSRYMIQMTNVLDCIFPEFKPLFNNKFSVTALYILDNYPSPKAIADMTSDDYDILRRKSRGHFSMDKFVRLKHLAKNTVGVYHEFYSLELETLLDLYHQIDAKINELEAEITEIITTLNPPTLSIKGVGAISAAVIVSEYGDFNRFDSPNKMLSFAGLEPGYFQSGTSEYRGRMVKRGSSHLRNALMNCARAIRLHNETFAAYFSKKMSEGKSYNVATNHVAKKLVRLIYALETKGVMFDPNALK

SEQ ID NO: 309071 - protein, 476 aa, unidentified
MARRSSAHPDLVAVPQLAHETLYVGVDVGKFRHVAGFLSRTLLKRHERFEGCPTLTFEQSREGFRAVVDRIRELVPIEQATILLEHTGHYHKNLEQYLLDLDMTVYRIHVQERPKGMMKTDKRDALGLANRLYTQLELGAQVADKMQLVRRTVPPTPAAAQLRGFMQHRYELSQQCTQLRNKLTAICDEIFPELTQIFHDPNREVALAFREKFPTPHELATASLAALRELRHRNFPSEANLLRLQQLARQTIGITNMDRLRGLKVEQELLVKELRLVQEHLERLDTEIAAIVKSCREGQILLSIPAIGEGAAATIIATIGNIANFEKASELKCYFGWAPRQDQTGNSFDRTRLATRGVRPMKQMLYLTAARSVTFECEWARIYQRLLPRMGTYDERTKDYRGKKRIFGRIAGQMASMIYALLKTDQEKLSQVSPGGTPPPPMLYDPEVHRKHQEGHYRSLKPGTQPRKILQLSKKM

SEQ ID NO: 309072 - protein, 439 aa, unidentified
MCGGTVNGFSLSFQKGAMSMKVVYQTCCGVDVHKSFLVATIIKTTSGVQPSYQKKRFSTFNNSILEFKKWLLDNSCRDICMESTGKYWVPVFNLLEDEINVTIANPKWVKAVKGNKDDTKDSKWIGDLFRLGLVPGSYIPCKPIRILREFTRYRYKLVSARSSEKNRFQNSLTVCNIALDSVVSDIFGKSATSVIDYLLEQSDNSINHEEISSRLLRSLKKKSESVIESIEGYQMTDSQKYRMRLVHAHMDYITSTIADIDSMIDSLVEPYDSAIKLLCTIPGVDRNSAVTIISEIGTDMTQFSNSKRLCCWAGLTPGNNESAGKKKSVRITRAGVYLKPALVQVAHAAVKSDKSPYYKAKYERIMKRRGKKRAIIAIARMILTAAYHMLSTGEVWNPTDLYKIDMPEPLKNKQKEKAIKQAMKLLIAEGILEESPIAS

SEQ ID NO: 309073 - protein, 350 aa, unidentified
MSLELQSLLPYPNSCLGASPHQQERDTKMAMRSFCGIDVSKDRLDVMVLPEQQCSSARNDAAGWFQLIEWLRGFSISAIGLEASGGYERGIMRALLAAGMSVRQINPFKLRQFAKASGVLAKNDRLDARMIASFVAVMPTNPVQRQGPAAERLAEMVTVRRQLSDAKIAAENASRMLENAMLQRLSRRRIARLAADIAEIDERLVEIVMSDAALARRYRLLTSMPGVGAVLACTLIALLPELGQLSRTKIAALVGVAPYDFDSGKLKGMRCIWGGRMPIRNVLYMAALSASNWNPRFKAFHDRLAATGKKPKVVIVAVMRKMITMLNAMVRDDIVWADRYGGRHSVPTAR

SEQ ID NO: 309074 - protein, 338 aa, unidentified
MEYGAIDLHARQSLIRIVTAEGAVMLERTIPTRAERFHEVFGGGARLRVLIESSTESEWVAQCLERWGHEVVVADPNYALMYGHRGRHIKTDRRDVAALAEANRLGLYRAVHRVSATQRQRRRTLRIREQLVRTRTQLINLLRAQLRQEGYRLPSGAAEATVARYRRLAVPDALTTTLAPLLTVLESLAPVLQAAEIETTAAAAADPVATRLMTVPGVGPITALTFRAALDDVTRFTDAKAVSAYLGVVPREDSSGGRRRQGGITKVGPRSVRTLLVQGAWTIWRQRRRRTALHVWVEQLAARRGRRIAIVALARRLARILFALWRDGTTYHAAMQPV

SEQ ID NO: 309075 - protein, 346 aa, unidentified
MSNVTIGIDLGDKNHEVCVLNMDGEIVERFSVKNTKKQMEKELKRFLNPVIAIETGTHSPWISRMLTAMGARVLVGNARKLRAIWANSQKTDVRDAEMLARIARFDKKLMYPIHHRSEQAQVDLEMIKARDILVSVRTKLINHVRCTVKAFGERLPACSAECFHKRAEVSMPDKLRATQTPLVEQIASLTQQVRDYDKKIEQLAKVSYPETACLRQIQGVGVLTSLTFILTLESSDRFETSRSVGPYLGLVPRHDQSGESDKHKRITKEGDVFLRKLLVSCGQYILGRFGQDSDLRRYGLRLAARGAKVAKRKAVVAVARKLAILLHRLWSTGELYQPLYNAKKVA

SEQ ID NO: 309076 - protein, 382 aa, unidentified
MLDCWNRKLGEITFENKPSEFSKLTRKVSRFVTEGKEPVYGLENAYGYGRALAVWLIEKGFAVKDVNTALSYAQRKSVPMYQKSDSYDAEAVALVLINMLDKLPDAIPDDKYWTLSQLVNRRDNICTHLHRLKNQLHEQLCMAYPSYKLFFSDISRATALYFFMEYPSPAHLLGKTAEELAEELRPVSHNNCSVKRAEKILSLVRADGDTKRDHQESRDTITRSLVSDLEHYRVQLEEVNQAIKMLMPEFDCTLMTMPGIDLITAANMLSEIGNISRFSSAAKLAKFAGIAPVNFSSAGKGKDMCPKQGNRRLQAIFYFLAIQIIQISINGTPRNPVFREYYLRKVEEGKNKQQALICIARRLINIVYGMLKNHTEYREPEQ

SEQ ID NO: 309077 - protein, 411 aa, unidentified
MLEVKVEKCAGIDVGKKFLAVCILIGLAKQKPVGEVRRFGTSVKELERLRTWLLESGCTEVVMESTGSYWKPVFNILEGSLKVILANPEQVKALRGKKSDPNDSRWLASLLRHGLVQGSFIAPRDIRELRDLTRRRRRLVGDGAAEKNRVQKILEDANVKIGNVLSDVFGSPGQAMLEALLENKQGPAEIAQLGHWSLAPKIPLIVEALEGHRMSDHHRFMIRQCLGHMRHIEEMIEELDKEIGVRLKPYPQQVKLACTVPGIKPTAAASILAETGMDMSPEGPFPDCHHLASWATVCPGNNESAGKRKNGRTRPGNRWLRATLTQTGWAGVADKKSLFQFRYQRLKLRRGGQRAVMAIAHAQLIAIYWALRNGTPYPEQLQKLEQDRREAQIRYHLQKLNKLGYAPDMHG

SEQ ID NO: 309078 - protein, 315 aa, unidentified
MSEPESIKVNVGIDVSKSLLDIAIHETGETWSSNNDSSGCGVLAAKLKQLKATSIVLEATGGFETLVTATLSAADLPVIVVNPRQVRDFAKATGQLAKTDRIDCRVLAHFAAAIKPPIRPIKSADSQHLEALLARRRQIVEMLVAEKNRLANNHDRAVVKDLNAHIGWLERRLKSSDDELQRVLKISPAWRERDDLLRSVPGVGPVLSLTLLAQLPELGHLNRREIAKLVGVAPFNWDSGQWRGSRHIWGGRAAVRSPLFMATLCAIRINPTIKSFYRRLIAAGKAPKVAITACMRKLLTILNVMVKTQTSWRTA

SEQ ID NO: 309079 - protein, 470 aa, unidentified
MEVLHPHCAGLDIHKDTVVACVRHMVDGAVKREVRTFKTTTKDLMALSEWLSAEGCTDVAMEATGVYWKPVWHILADGDFKLMLANAAHVKNVPGRKTDVNDATWLADLMAHGLIRGSFVPDEPTQEMRNFLRTRKQFVRERTSHVQRIQKTLEDANIKLDSVITDIMGLSGRRMIEALIAGETDPFALAALAHRRIKASQAELEAALRGRVSDHHRFMLRLLLQHIDAIDAAIGQIDQEVDAHVEPFRTAIQILSSIPGISDLSAEVIVSEIGIDMNRFPTEGHLISWAGLCPRNDESAGKRRSTRMRKGAPWLKTTLIQCAWAAARTKGSYLQAQFQRVRSRRGAKKAIGAVAASVLTAAYHMLKNGTLYEDLGSDHFDRRRAALLAAQIRNLCGKTEGSRRRGRLVAAAVKHDRGSQVRVDSPLEQAGFELSVPPERKAFPTALDRFRRPSVIRRQAWPRRATEAGA

SEQ ID NO: 309080 - protein, 457 aa, unidentified
MSIVHKKKEHIASFHALHQSAIGIDVHANLIVATYQNGDFEKGSLEAHTWSSGATKEELVKFAKWCKQYNPEVLIMESTGVYWQSLYEALENEGFTSSQIVVVNARDVKNKRGSKTDLADAIHLAEIARQGSYKASFVPSKNFRQLRCLWRSLHSLKNVRKKLLNILHKQLCQVGCRASSVFSDIRGKIATKILACLIRGERDEVLLKSIKEIVSTSRGRLKAKPQQIYEALQADMDSMVWFSIREHVEHIKYLDQQISQSEQNIREKLSPYHHIIKLLTGIPAIKEITAMGLLCELGDDLSQFASIRKFCKWIGLAPGNNESAGKRYSGRTTPGNKYLKVLLVEAASGIGLMKKGFLHEVHQRFKERRGTKRANVAIAHKLCRIIFRVLKSLTEYQEQYKPLLKEHRYSKAVEAVAGLKDVGYICSDLEVKDGITGSVAVISGANKRKITAITNCC

SEQ ID NO: 309081 - protein, 363 aa, unidentified
MQTIYIGVDFHARQQTICYLTTETGELVTRELKHQDKEAVRAFYAAFRGQVIVGLEASGYSPWFERLLEELGYEVWLGHATEIRRRARWRQKNDRRDAELILDLMLHNEFPRLHRPAIQSREVMRMLRYRHKLIKIRTMSKNSLQALALQSGVARRSGLFTREGKQELDAALMSPAMQWQREHWLQLLQPLDQQVLEAMAWLKAQSKDDVCIARLRTHPGIGLLSALCLVHTLQPVARFRNTRKVAAYAGFDPVERSSAEHKRFLGISKAGSRLLRHLMVEAANIAVRKDEELKCFYQRVAARRGRPKAKVAVARKLLIRAYIMLRDEIDYAEFRRRAVAARLARLRHRPNVPAVVIGQPAST

SEQ ID NO: 309082 - protein, 340 aa, unidentified
MPAFEWVHVQLHQQKGMISLSPPTICNSAKPKVSRAALSELIAGLPPCVIGMEACSGVHYWARLFRQYGHDVRLMAPKFVSPYRMAGKTGKNDAADAIAICEAVQRPHMRFVPVKDESQQAMQCLHRTRQGFIQERTATYNRLRGLISEFGVIAPQSTDALRHVVSDQKETLPVQVRLCIDDLLTHVTNIEEKIAEYDRVLSRVAKTDHRSQQLMELKGVGPTTASALVASIGNAHDFKNGRQLAAWLGLTPSQYSSGGKSKLGRITKAGDAYLRTLLVQGARSVMVGAENRTDPFSRWVCSLIGRRGYWRAVVAIAAKNARLCWASLHYGDDFRLYSTT

SEQ ID NO: 309083 - protein, 348 aa, unidentified
MYIGIDLHKKYSFVTIMDMNGNIINQKRIEHNSKDFDDFISSIDENDQIAMEATTNWYYFYELLESKTKNIVLAHPAKTRVIAEAKVKNDKVDSKMLAHLLRTDLLPKAYIPSRETRDLRELLRYRASLVRFRTQIKNKIYAILSKNGITSPYSDLFGKAGMAFLKHIKLRESYRQSVDGYLNIIQQINTQINDVSKDIDQIAKLDDKAQILMSISGIGAYSALLILSEIGDISRFPHENSIVSYAGLAPSVHSSGGRTYHGHITKQGSRWLRWILIEAVPHVVDSSPSYRCLYNNLVAKKGKGTAKVAIARKLLVAIYYMLQRGERFDKWKQSLSIIAVYSVRCHSS

SEQ ID NO: 309084 - protein, 351 aa, unidentified
MEKHSVGIDVSKDYLDCCLGSTDSEQNHIIGKNKRFTNNESRFEELLKWVGSLNITNEIFFVMEATGVYYENLIYFLNDNDCKACVLLPNMVKYYAKSINVKTKTDGKDSEVLCRLGLERKLRLWHVPSSIIRDLKFLCREYREIKYKLTQAKNQLHARSHSYRCPENIEKRLKIQIKLLNEQSLEIESEIRLLVQTDSVFNERIKKIITIPGVSFMTVVCIVAETNAFSLITNSKQLVSYTGLDIQQNQSGQKQGKSKISKKGNSFIRHSLYMPALCASRYNPPMKEFYDKLKDRKPAKKIAVTAVARKLLILIYQLWKNNEEFDSNYEQNKKQTGLRLSEQDEHIILLK

SEQ ID NO: 309085 - protein, 342 aa, unidentified
MNKVIGLDLGDKRHVAVIFDADGTEHAADGMVNTMQQVKNYFEPHAGAVVVMEAGTHSGWISRLLERMGFEVWVGNPRKLRAIWDSTDKSDARDARVLGLMFRLEPRLLHRVTHRGEQAQCDLALIKSRGILVETRTKLINHVRGVVKGVGARVGTCSGESFHKKASEQVPIALKDALDVVIEQVKQLTAAIKELDQRIEKMCGEKYPETQRLTQVSGVGSLTALAFVLTIEDSKRFTKSRSVGPFLGLTPRRDQSGTTDKQLPITKAGDIYLRQLLVGCAHYILGPFGRPCDLRACGERIAAQGGKNGKRRAVVAVARKLAVLLHRLWVDGREYVPVRKAA

SEQ ID NO: 309086 - protein, 366 aa, unidentified
MSTKLRYLGLDVHAETIAVAVAEADGESRSLGMIPHRPDPIARLIRKLGPPARLRACYEAGPCGYVLYWQLTRLGLHCDVVAPTLVPTKAGDRVKTDRRDALKLARSYRAGDLTPVWVPDAASEALRDLVRAREAAKQDQLRARHRLGKFLLRRGVRRPEGMRPWTQRHRAWLATLRFAELAQEATWVDYLHEVDHAAERVARLAAAPPEIQAVIAALQALRGIQQVAAATIVSEVGPLTRFAHPRQLMAYSGTVPSEYSTGDRIRRGAITKTGNAHLRRVLIEAAWAYRHRPSCTGALRRRQVGLPDPIRAIAWQAQLRLCHRYRWLTARGKLKPQVVTAIARELLGFIWAIGCALDAPARGRAA

SEQ ID NO: 309087 - protein, 334 aa, unidentified
MEQITTVGIDLAKNVFSLHAVDAAGKTVLRRTVRRERLVETVAALSPCLIGMEACSGAHEWGRRFQQHGHTVKLMAPKFVAPYRKSDKNDGNDAEAVCEAVGRPSMRFVPVKSVEQQALLTLHRVRQGFVVERTALINRLRGLLSEFGVVLPLRSVTVRRQAADAAEVLPELARRAIADLLEQLHLLDGRIDAYDKEIEAQARLSEPARRLMKIRGIGPTTALAIVASVGNAREFKNGRQFAAWIGLVPGQYSTGGKARLGHISKRGDAYLRNLLVQGARSVLQTAPAHQDRLSRWALELQERRGYYRTLVAIANKNARIAWALLAKNEQLHKN

SEQ ID NO: 309088 - protein, 319 aa, unidentified
MAQNDLVVAGIDVAKDKVDVCIRSPSLRRTFASTAEGRRELASWLRRNKVGKAVMEASGGYEREWAKALRAAKIEVRIVDPKRVRSFAQSAGRLAKNDTIDAEMIAWFAETFDEAPGQAYDAMREQLHQMVNARQALKDMQAKLESQGEHAVPAAVQRIHARISKTIAIELVKIEAAITALIQATPHFAELAEIIESVPGIGRTTSAALIAAMPELGQANNKIVAALLGVAPYDDDSGRRRGERHIKGGRRRTRNVFYMACLGAATQHNPVLKAFYDRLVAKGKEKKVALIACMRKLISILNIMIERRQKWDASRYAVS

SEQ ID NO: 309089 - protein, 351 aa, unidentified
MIIIGVDYHPSFQQIAFLDKDTGGYEERQLNHGEGEAEKFYRDLKLKTSDVRVGMEATGHGRWFERLLADLGFELWIGDPAQIAATRVRKKKTDREDAKLILKLMLEDRFPRIWVPDAENRDLRQLLWHRHRIVQMRTRIMNQLQAVAMNEGKRWRSKLWSGQGRADFEKLRLAPWTSRRRKELLELLDRMKPTIAELTAAVEQEANKRPEVQRLMTHPGVGALTALAYVLIIGTPQRFQSGKQIGSYLGMIPSEDSSAGKQRLGHISKQGNSLLRFLLVEAAQAAVRVNPDWRRRYFHLALRREPRIAKVAMARKLGVCLFWMWRKEWTYQQFLQFGSHAGQLVTGHGVK

SEQ ID NO: 309090 - protein, 390 aa, unidentified
MRYFIGIDVAKFKHTACVIDTDGIALVEPFDFTNDIIGFQSLLKNIKPFLKKKHLIGMEDTGHYGDNLRNFLLEKQYKVVMLNPIVTSHIRKASNKAKNDRIDCFVIANTMMNPNFYRDQQVQSIDYATIRQLTRMHHTHTEEINRYKCQLQKSIDIVFPEFNSLLNTKYSKTYLEILDTYHGAYTIANTDIRLLRNTLKNVGVGRSVSISAEQLKKSAKESIGQHNLAIEMDIPFLISLIRRLTSILGEIDKKIEEFSHQLNSPILDISGISHFSAMSIISELGDITYFSNEKKLIKFAGVNPCVYESGTYSMTHTRLEKKGSKYLRKTLYQIIDSVIRFNPIFQAFYQKKISQGKSYRCAQGHCIRKLLRVIYKILSTGEGFDSAKLK

SEQ ID NO: 309091 - protein, 453 aa, unidentified
MRIMYERCCGLDIHKASITACALITEKGKTQEETRRFGTMTDDLRALAGWLQQKEIRQVAMESTGVYWKPVWNILEPAGLELLLANAQEVKVVPGRKTDQKDSQWIADLHKHGLLRNSFVPPRAIRDLRDLTRTRAMLTQEHSSICNRIQKVLEDANIKLGSVASDVFGVSGRAILRALMNEENDAEALANLSKGTLRKKIPQLRRALEGQVTPHHRLLLTEHWDRMEFLERQIADFEIQIADRMKPTPEERALMMQDATEDAPAPLSPREEAIQLWMEIPGVGWTAACSMVAELGINMDQFPSAAHVASWAALCPGNNESAGKRLSGKTRKGNVWLRRTMCEVAWAASHTKDTYFAAQFRRIASRRGNKRALMAVAHSILVTAYHMLKHKRHYTELGADFFDVINRDKVRDRLVQRLSKLGFDVTLKSKGTLESVDHLADNSHPVVPASPKS

SEQ ID NO: 309092 - protein, 366 aa, unidentified
MKKDSTVAAGRKKVFKQAKLTIGLDLGDRTSHYCILDEAGTVIWEGNLPTTSNGIRQAFRRIPRCRMALETGTHSPWVSRQLAQMGHEVIVAHARNVRLIGESSRKDDQVDARTLARLARIDPGLLGPVQHRSAQAQVHLTVIRARAALVGTRTALVNAARGLTKSYGQRLNKCGTEQMNRNSSQGLSQELREALDPLLREIESLNERIAEYDRRIEQIAKEVHPEVARLKQVKGVGTLIALTYVLTLDDPQRFRRSRDAGCFLGLRPGRRNSGQSEPQLHISKEGDRYLRTLMVQGAHYVLGPFGQDSDLRRWGLKLAERGGKNAKKRAVVAVARKLAVLLHKLWVSGEVYEPLRNNHKVVSAVA

SEQ ID NO: 309093 - protein, 349 aa, unidentified
MPVMIGVDPHKASHTAAALDAHGQLLDQQRIPATLDGYRQLRQWAGRWPQRCWAVEGAHGIGRALAQRLVGDGEQVLEVPAKLAARVRVLSVGHGRKSDPDDAVSVAVAARHAPSLRQISVEDHATVLHLLTKRRQDLVAARTQTINRLHRLLMDLIPGGARRNLTAKRAAALLAAVRPTGAPAVTRWELASELVADVRGLEQRIAVVEARIKAAVAQVNTSLLGLFGVGPVLAATFLGEVGDIGRFPTKHHFAAHTGTAPLEASSGQVIRHRLSRAGDRKLNHALYMMAMVQVRRPSPGQAYYQRKRAEGKSAKEALRCLKRRLSDAVYRCLLADQHLQPRPVGLRPV

SEQ ID NO: 309094 - protein, 344 aa, unidentified
MSVAYDGPQVVGMDLHRRRSVLVRMTPDGRKLETARISNSPAELRRVIARAGKRPRVVLEATYGWYWAADALAAAGARVHLAHPLGVKAFSYRRVKNDEKDAADLADLLRMGRLPEAWIAPAEIRELRELTRYRIKLVRMRTSCKDQVHAVLAKLGIAVTCTDIFGVWGNTWLDGLELGQPYAGKAASLRTLAGELTAEITVLEAAIAGLLAHHDGYHAIRVLPGIGPVLAAVLVAEIGDITRFPHPARLCSWAGLTPRHRESDIKVSRGHITKQGPRWCGGRWWRRSSTCPPATRCASARTTSSPAGARKPRTSPRSPRPASCSPGSSTRCATARSAPWPLAR

SEQ ID NO: 309095 - protein, 371 aa, unidentified
MMNTIICGMDAHDNTLSNRIGVNTEAPETMTAKNTLEGRQKLFHYLKDLAQKKDGARIIVAYEASPLGFGIYDDCVEAGIECHILAPTKMPKSPKDKKKKYDERDAQRILELLRAHVLAGNDLPDIWIPDHQTRDDREMVRSRLDVGRKLTGLKTQVQMLLKRNKVVKPEDVGNSWTLSHRRWLEGLELKPGARIALLSLLRQIERLEEDILILDKEIKALSETERYKLPAEALVIQIKGVGLLTAMVYLTEIGDMRRFDNRKQIGSYLGLVPSSNESGEGSDRKGHITREGPARVRKVLCQATWSRVACDEQEARVYQRIVKKNPKHKKIAVVASMRRLGVLMWHIAWDAQVKASVFKDDSIEVASFQTA

SEQ ID NO: 309096 - protein, 324 aa, unidentified
MIALGIDVGKADFHCALVDESGKPRFNSFPNSRTGFERLTKWLQNRSIDRVHACMESTGGWSEELGAYLHDLGHLVSIVNPLAIRAFGQSELSRTKTDKADAALIGRYCLAMRPAQWEPPSPAQRRLQRLVRRRSALVEMRVQEDNRLQAPGSDDVRSSIEGTIAFLEAQIVAIDEEIRSLIDGDPTLRGKRELLQSIPGIGERVSTGLLGEIPKLEEFRSGKALAAFVGLCPREYRSGSSVSASWLSKVGNSHVRKLLFLPAITACRFNPVLMIFARRLRERGKRPKQIIAAVMRRLLVIAYGVLKSGRPFDPTLALDGQHGT

SEQ ID NO: 309097 - protein, 459 aa, unidentified
MSRKHKKAKRAGQGGAVPSLSCIEPNAAGIDVGATEIFVAVPQDRDPGPVRSFETFTEDLHRLKSWLQHCGITTVAMESTGVYSIPVFQILERAGLEVCLVNAQHVKHVPGRKSDVIDCQWLQYLHSVGLLRASFRPEERICAIRSLLRHRDSLVQMAAAHVQHMQKALTQMNLQLHHVLSDITGQSGLAILDAILAGERNPTVLAQLRHARVQASQEVITKSLVGDYQREHLFTLRQSLQAYRYYQSLITTCDQEIAEQLQNLDSRTPPDASPLPPEPYPHRPRKNEFRFDMRSELYRIYGTDLTAIPSINALTGYTVLAEVGTDWSKFRNGDAFASWTCLCPQNKKSGGKILSAHTRRSANRVNRALRLAAQTLERSTSYLGTYYRKMRARHGAPAAITAAAHKLARIIFHLVTTGQAYDESLFAAEEQRQRKRLENKLKRSAQQLGYQLIPLGQTA

SEQ ID NO: 309098 - protein, 337 aa, unidentified
MTIVFVGIDLAKNVFALHGVDEAGKARLVRPAVRRDQLVETIAQLPPCTIGMEACSGAHHWARQFMAFGHTVRLMAPKFVVPYRMSGKRGKNDAADAAAICEAVQRPNMRFVPVKSELAQARLAMHTVRQGLVAGRTATINRLRGVLSEFGQVMPQKAKTVRLEAATRADGLPQWAQTACLDLLAEIRRLDEQIEAYDQHIRQMAQADERSKQLMAMPGIGPTTASALLASIGNGHDFNNGRQVAAWLGLVPGQYSSGGKNRLGRITKAGDSYLRTLLILGARAVLAAAAGKHDRISRWALALAERRGYWKAVVAIAAKNARMAWAMLAKGEAFKPA

SEQ ID NO: 309099 - protein, 309 aa, unidentified
MLSSVGIDTAKATLEICIKPQKIRFEVANNSAGFEALLERLKDFNISRVLIEATGGYEKDVLIALASAGLETICINPARARKFADAMGKKAKTDKIDAEVLADFAAHLSAPQGQPVSPEREELRELVKQRAQFVQSRDDYKRRRLQCRSAMVMAHFDEHIEQLKVLIKRLDEEIDQAMVQLDDTRARQLLAVSGIGRVTAANLLASLPELGQLDRRQIAALVGVAPYNNDSGSHRGHRQIWGGRAHVRRVLYMSSWIIIRHNTEFKARYEALRERGKCAKVALVACMRVLIVRLNAMLRDNTPWRVQTA

SEQ ID NO: 309100 - protein, 413 aa, unidentified
MERLLERCAALDVHQASVSACVRVPGEGDQRREFNERFGATTPDLLALCDWLRGHGVTHVAMEGTGVYWKPVYYALEGEFELLLVNAAHVKQVPGRKTDTKDAAWLCQLLECGLLRASFVPPKPIRELRDLTRYRKTLIADRASEANRLHKVLEDAGVKLSSVASNVLGVSGRLMLEALCQGANDPVALAELARGRLRSKLPALRRALESRFRDHHAFLVAQILGHLDYLDEAIAVCSARIEEQIAPFASALTLLESIPGVGRRNAEVIVAEIGADMSVFPSSRHLASWAKLSPGNNESAGKRKSGATGKGSPWLRSALVESALAATRTRGYLRAKYWRIRQRRGHQRAVIAVAHAILEISYHMFQSGELYRDLGDDFFDRRDNERARQRHLRALERLGYRVTVEATANPEAA

SEQ ID NO: 309101 - protein, 368 aa, unidentified
MGKFITYVGLDVHKKTIAVAFADEDGSEVRSYGIIDSKLCSLDNIVRKLLSRGGEPRFVYEAGPCGYGIYRHLKEQDIECMVVAPSLIPEKSGDRIKNDRRDARKLARLYRPGELTAVHVPNREDEAMRDLTRAREDSKTAERKARQQLNAFLLRHGLIYGGKSNWSLAHWRWISDIKMEHEAQQFTLQEYVDTARSCSERVERITEKIRLLAGQWRFSPMVEAIQALRGVSLVVAATVVAEIGDLRRFDNPRKLMAYLGLIPSEHSTGEHTKRGGITKTGNGHARRMLTEAAWSYRMPARVSRRLRDRQQNLPDKVWKIAWKAQVRLCNRYQRLIARGKLSKVATTAVARELAAFMWAIFRTVEVGA

SEQ ID NO: 309102 - protein, 345 aa, unidentified
MELFTLGIDLGKTTFHLVGMNQRGEVVVRKRFTRTQLLQFTANLKVGLIGMEACGGSHFLGRALREQGHEVRLIPAQYVKPYVKTNKNDYIDAEAIAEAVGRPTMRFVPVKSDDQLDLQSLHRVRERWVMRRTAVVNQIRGLLLERGITLPKGRRHVDAALPGILTDPATKLSGTVLVLLTELKLELAQLAEKIDRADKSMEKIAQENEACQRLVTMPGVGPVISTAIIASIGNGAAFRRGRDFAVWLGVVPEEHSTGGKQVLWQIPRRGNQYLRMLFVQGARSVMQRRTKQAPGLSAWLAQLTARTHRNVAIVALANKLARIAWAVLTKNEVYRPPLLDGAAVA

SEQ ID NO: 309103 - protein, 344 aa, unidentified
MANLNQFCDFTKLIGIDIAKSVFQIYSCDTQTGEITNVQIKRDKVLESLANCGKCLIGMEACGSSQYWARKLQALGHTVRLMDPKLVKPFVRHNKSDKADAEGVYHALVSGVRAVAVKTETERDIQTLLTMRALLVKQRTARINHVRGLLAEYGHVMPRNVNQFDNKVDECINSLEGDAVQLVINMMRDTVKSIRDDQDRIKTLQREISRLANQTRNAKHFLTVPGVGETIMAYMCVLLADPTQFSSARQFAAYLGLVPMHTGSGGKTVTTKIPGRCDKALRAVLVQGVHAVARSKCRTDWVKNILAKKPKKVAMVAIANRMARQCWAVASKGQDWRRMPVTAA

SEQ ID NO: 309104 - protein, 341 aa, unidentified
MEQFIGLDVSLKATFISVREGGQRIWRGKCPSDPRLIAEVIRKRALNPKRVVFETGPLSVWFYHALALEGLPAICIDARHAKAALDMARNKTDANDADGLAHLAEVGFYREVRVKSFDSMLTRTLITARNQMLKVAVQLSNQIRGLMKTFGLVVPKGAGRVFEGHVRSLLASNAGLEQIILPVLEAWRGMRASAAGLSKQLVASARASEQCQLLSSIAGVGAVTASSFVAAIEDPENFRKSRSVGAWIGLTTRRYQSGEVDYDGHISRRGDNHLRGLLYEAATVILTRSTAESALRIWGLKLKEKIGFKRAAVAVARKLAVIMHAMLRTGELFDRSMTPAA

SEQ ID NO: 309105 - protein, 311 aa, unidentified
MNSEVYVGVDVSKVSLDVKVLPTNETLQISNDDVGINELIKRLTQIDPTLVVFESTGGLEMLSVGNLIENHLPVVVVNPRQVRDFAKATGKLAKTDAIDADTIARFARDIRPEVRPIKDEHTQLLSALNARRRQIVDMLVAEKNRLSRAPKPNRKSIQKHIQWLERSLTDINKDIDKTIKKSPIWRENDRILQSFKGVGPVVSATLLCDLPELGTLNRKKMANLVGVAPLNCDSGHFRGRRRIKGGRANVRRKLYMAAVASLRHNPLMKDFYDRLVEAGKPPKVALTACMRKILTILNAMMRERTYWNAIW

SEQ ID NO: 309106 - protein, 433 aa, unidentified
MISRALPALEGFVLVGGVAVVLFVGDDWAEDHHDVEVQDHTGRRLGKARLPEGVAGIVGFHELIAGFLGEDMAEDTDAEQVLVGIETDRGPWVAALVAAGYQVFAVNPRQVARYRERHGTSGAKSDAGDAHALADMVRTDAHQLRPIAGDSPLVEGIKVVARAHQTMIWERHRHMLRLRSSLREYFPAALEAFDDLTAADTLDLLGAAPDPQRAARLSRSRIAGALKRARRRDVEAKAERIQALLRADHLNQPPELVVAYAATTAATVAVITAFTTQISALQGQVEACFGRHPDAEIYRSQPGLGEILGARVLGEFGDDPDRYQGARARKNYAGSAPITRASGKKTVVLARFVRNQRLAGPLQWQAFCALRASPGARAYYDQLRARGAGHQAALRQLSNRLVGILHGCLKHRTCYDEHTAWGHHQTQDQQAAA

SEQ ID NO: 309107 - protein, 341 aa, unidentified
MSAYVPIDLHRHRSVVMHMAADGEVLGWVRLANDPEALVAEVLKAGEAPEVAIEATYGWYWAVDALQAGGAHVHLVAPSKVGAFDGRRVKNDQRDCQLLGDLLRANMLPEAWISTPQVREWRELVRYRAKLVGLRSGLKAQAHAVLAKLGVHVPMTDLFGVGGRRLLAHLCANDVRFHSAFGQRIESIVALIEAFDHEIGELSVSIAHGFRDHAGYHAIQAIDGIGPITAAILVAEIGEISRFQSAGHLASWCGLTPRHRESDTTVKRGPITKQGSRLVRWAAIEAAQQLRRDSLLHQHREQIAERRNNRKIAKVAIARRIITLTYYGLRDGNIRCLEPAA

SEQ ID NO: 309108 - protein, 382 aa, unidentified
MSAPGWEGQPSAFRPTGTDCGRNRPHPSPLSADKESRVVQRRFTRLRPVSPRYVVLNEPETIMAIPSTLVTLGCDVSQQWLDINVYGEDQVTHINNARSEIDAFLKGYAGAVIAVEATNTYHELIVERALKLGLTVYLVGGYQLKHYAEAIDERMRTDRVDAKLLARFLHRERDRLKPFEPKSPDVKRLWTLMKRRALLVKTKGQIRQSFAGLAEFKSSAKTTVKQIDHVITLIERRIRELVKNLDWQADVLRVKAIFGIGPLTAIALVCAYRSYDFPHRDPYIAFMGLDVRTKDSGKHRGKRKLSKKGDGEFRRLLFNTAMAAKKSYPYFEQRYNGYVSRGLSTTGALMAIGRQQARIAFALLKNQVDFDPNRFNKACNAT

SEQ ID NO: 309109 - protein, 424 aa, unidentified
MKVTYQTCCGVDVHKSFLVATIVKTTGGIEPSYQKKRFSTFNNSILEFKQWLLDNHCHDVCMESTGKYWVPVFNLLEDKINVVIANPKWVKAVKGNKDDTKDSKWIGDLFRLGLVKGSYIPCKKVRILREYTRYRYKLVSCRSSEKNRYQNALTVCNVALDSIVSDIFGKSSTSIIDYLLEQSGTSINHEEIASKLLRSLKSKEDAVIESVEGYQMTDAQKYRMRLVRAHMDYITAEINDVDKMIENMISSNPDFENAVQFLCTIPGVKRDSAITIISEIGTDMSQFSSSKRLCCWAGLTPGSNESAGKKKSVRITRAGVYLKPALVQCAHAAVKSDKSPYYKKKYESLVKRRGKKRAIIAIARMILTAIYQMLSTGEEWNPSNLYKIDMPVALVEKQKAKAIKQAKKLLQREGLLPPDEPLAS

SEQ ID NO: 309110 - protein, 429 aa, unidentified
MIMGFTKPIEHFNLKRKKVITMNTLYVGIDVSSKSNVVYLMLPNGDKHSNFSVANSHEGSTQLVKRILSALTSLSLDTVLIGLEATSVYGDNLVYFLREDASLAPFHRKIHVLNPKQVKKFHDTYNDLPKNDYVDSFVIADCLRFGRINKEVYLGDYRYKALQNLTRARFFAVQNLIKEKQRFMNVLFKKYSTMTQEKVFSDTFSTTALAVYDEFDSAEALANMDLHELTDFIIEKGKNRFPDPDAVAKAIQKAARSSYRLPKTVNDSVNQVLSISITSIKALESQIKEFDKAIKAQMELLPNVLISIPGIGPVYSAGIMAEIGDINRFDNQAALAKYAGLAWKQHQSGDFEAEVTRLIPSGNRFLKYYLCEAALSLVRCDKEYSDFYHLKYKEVNRCQHKRALALTARKFVRLVFRLLKDNRLYCPAK

SEQ ID NO: 309111 - protein, 409 aa, unidentified
MERQLERSAGLDVHRDTVAACVRVPGRGGHREQHVQTFGTTAAELLRLREWLEAHGVTDVAMESTGVYWKPIYYVLEEAFTCLLVNAAHIKQVPGRKTDVQDCVWIAQLLEHGLLRASFVPPVPIRELRDLTRYRKGLIQERQREANRLHKVLQDAGIKLASVATNILGVSGRAMLEALVGGTTAPAVLAELARGKLRAKLPALREALAGRFRPHHAFLVSQGLAHLDYLDEAIETVSTEVERLLIPFAAPLRRLDTIPGINARTAQVVIVEIGVDMSRFPSEHHLASWAGLCPGNNESAGKHKAGTTRKGNRWLRMALIEVALAAIRKKQSAFGARYRRVMRHRGHKKAVVAVAHSLLRTIYHVLAEATEYRELGADYYDRRQTTRTTRRAVAQLERLGYRVTLEPAA

SEQ ID NO: 309112 - protein, 406 aa, unidentified
MKQIVSVGIDVSKGKSTVCAMIHPNTIIKESFEVLHTVEEMSMLADYIGSLDGEIRIVMESTGHYHLPVAQFLYQKGFFVCVENAYIIRQFSRIMLHGAKTDPLDAKKLAKYGLAYWSELKPYKFHPSCYTKLSLLSKQYQTYIKLLIAAKQNVIHLMDEMLPGFKEALDTASSVQFSKVKYVDFAKEFYHVDMIKTMGKEIFRENYKQWCKEKGYRFQSEKADELFHLAEDGIPTLPTEFPSTRLCMEVATEQVSQLGYALEQILSQMQNLAKTLPEYQTIRQMGGMGEKLCVRFIADIGDVRRFHNGKALVAYAGIDAPPYQSGQYTGTKRRISKRGNSALRKTGYEVMKSLKSHPPKTDTRVYDFIIKKENEGKSKKQAKIAGLNKFLQIYYARVMEIYKNIV

SEQ ID NO: 309113 - protein, 418 aa, unidentified
MENLYAVCCGIDVHKKLIVACLRQEQNTQIKEFGASTRELLSLADWLLENHCQAVAMESTGSYWKPLYNVLESFDLNPIVVNAQHMRNVPGRKTDIKDAEWISDLLCHGLLIPSFIPNRSQRELRELVSYRKSLVKTQSAELNRLQKMLEGGNIKLSGTVSNINGKSARNLLDLILEGEKFDEAVYDQMIKDRKISRRLKASKTKLIEDMNGVLSPVQIKMIRELRKHIDELEKHIRELDQDINDAMSDPEKEAAKRLTQIPGIGEDSAKIIISVIGVDMSRFPTDRHICSWAGISPGNKESAKKKLSARTTKGNKLLRSTLVVCAHSAVMKKESYFSSLYNRIAAHRGKKRAIVAVGHSILKIAYHMLKNGESYKELGSNYYQTKTKESKIKSYLTKLENLGIEIPEEYRNQALQMS

SEQ ID NO: 309114 - protein, 366 aa, unidentified
MKKTITVQASKCEIFKEQKLTIGLDLGDRWSFYCVMDEAGQVILEQKLPTTPEAMKQTFGKIPRSLIALETGTHSPWISRLLTELGQEVIVAHAQKVQLITKSNRKDDRHDARTLARLARIDPALLGPVRHRSVQAQLHLTVIRARAELVSARTALVNAARGLVKSYGQRLPKCGTYQVSEKLAEGLSAELREVLVPLFKEIESLNERIQEYDERMEKIAKEVYPEVSLLKQVKGVGTQIALTYVLTIEDPYRFAKSRQVGCFLGLRPGRRNSGESEPQKGISKEGDRYLRTMMVQGAHYILGPFGEDSDLRRWGRKLAERGGKNAKKRAVVAVARKLAVLLHRLWVGGEVYEPLRNSQKALREVA

SEQ ID NO: 309115 - protein, 393 aa, unidentified
MRKPKKQKKPLNDLSRSLTPFDPNQTLIAVVELSKESWLVAGIVPGVERQPLKKLSADENGLLKLLERWRAEAEKAGHKIERITVAFEAGRDGFWLARWLRARGVETHVIHAASVAVSREHRRAKTDRLDTEQLKRAFLGWLRGERNHCKMCAIPTSAEEDAKRPHRERETLVGEQTTIINRTKATLARLGIRSFNPKLKKAPEHLEHLRTPEGEPIPPNTLAELSRDLERKQLVAEQIHQIEKARMEQLKRAPKAGPNLMVLVLMRVIGIGIETADMLVQEILSRNLRDRRAVARYGGLTGSPDESGSQRREKGLARSGNARVRKGMVQLAWRFLQFQKESTLAKWFEARTKNARTSRKKMIVALARKLLIALWHLVRDGVVPEGVVLRPAH

SEQ ID NO: 309116 - protein, 404 aa, unidentified
MKHEGPLFAGLDWASKTHAVCVVDDHGHIVVRFEIPNTGKTFTGLVKRLIKLKVVGVAIERCDGPLVEALLDARLRVVVITPRQVKGLRSRYTGSGAKSDAGDAYLLADVLRTDGHRLAALTRDSDATAVLRALSRTRKELVEARVGLVNQLQAQLERVFPGAIGLFARLDCDVAIAFLHRYPTQHAASRLTQARFAAFLRRIAYSGRRPVEDLFARVHDAPAAGLSPAEADGRAACVLALLRAIEVVRHEERELEADIVEHLDAHADAHIFTSLPKAGHGVRAAALLAEIGDVRSRFPDEESLAALAGVAPVTRASGKMHAVGFRYACDKKLRNAIIDFADDSRHASPWAAKIYQDAINRGKRHPHAIRILARAWIRIIWRCWHDHAAYDPQRHRGAVMLKAA

SEQ ID NO: 309117 - protein, 449 aa, unidentified
MSSTGKTRRFDERLPQIRSAAAGIDVGGSEIWVDVGSRDPEPVRKFATFTADLHELADWLNHCGIDTVAMESTGVYWIPVCQILESKGIEVVLVNARHAKNVTGRKTDMLDCQWLRTLHSYGLLAASFRPARDIGVLRCYVRHRQMLIEYASAHVQHMQKALTQMNLKLQYVLSDITGATGMRIIRAIVAGERDRNRLAAMRDVRTKADEATIAKALDGDYRVEHLFALKQSLELYDSYQQQIEACHRQIAEHLKSLESKADQSELKPARIRRKKPRNRPKFDLREEAFRISGVDLTQIDGINETSALGLIAEIGLDMSPWRTEKHFVSWLALCPNNKISGGKLLSRRTLKSANRARTIFKMSAQGLLHSQSALGAFCRRMCGRLGVAKGITAVAHKLALLVYRMIKLGRQYIDIGQERYEQKYRDRLLKHLARKANAFGFQLVPSTPN

SEQ ID NO: 309118 - protein, 342 aa, unidentified
MVSVATIGIDLGKTSCSLAGLDGTGAVVLRRRFTRERLVAFVAGQPACVVAMEACCGAHHLGRVFAAQGHAVRLMSPEYVQPYVKAQKNDDRDAEAIAEAATRPTMRFVALKSEAQLDQQTLHRARSRLVNGRTRLMNQVRAILLERGITVAKGRRALGLALATLVDDEGSGLSGRMRTLIEETRREWAEFDARIAALDREFVETARTSAPARRLATIPGIGALNATALTAAVGEAEDFASGRDLAAWLGLVPRQTTTGGKARLGGITKRGNVYLRTLLIHGARAALPGLSRGETPLGAWLRGLSERAHPNVVVVALAAKLARIAWAVLRSGAGYDGRAARA

SEQ ID NO: 309119 - protein, 429 aa, unidentified
MEQSDVSWSTEEQYAALIGVDWASEKHDVCLYELDSGKQSHRVIKHTPEALTEWIAGLRAAYPDRPVAIALEQSRGALIHALLGYEFIHLYPVNPATLAKYREAFAPSRAKDDPTDAGLLMELLLKHRDKLKVWKPDDEDTRALGLLNEERRKAVDQRTRFVLRLQATLKGYFPHLLELVAGNVASDLACDFIQKWPTLKALKRAKSETVRAFYYGHNYRRGDLIKTNIEKIRTAVALTEDKAIVTVSTITAQALAKQIRLINAAIEQYDEQIEELYSNHPDAFIFKSLPGSGKVTGPRLLAGFGTDRDRYPEVRDIQTYSGIAPVVERSGKQEWVHWRWACPTFLRQSFHEFAGCSRRFSLWARAYYDLQRERGKKHHAAIRSLAFKWQRIIFRCWQERKPYDEARYIEALKRNGSPLWERIQALQDA

SEQ ID NO: 309120 - protein, 339 aa, unidentified
MKLYSAIDLHSTNSYLAIIDENGKRIFKEKLPNDITVICERLSLYRGTLEGVVVESIYNWYWLVDGPTAEGFTIHLANPAAIQKYSGLKYADDKHDAFWLAEMLRLNILPTGYIYPKEVRPLRDLLRKRSHLVALRSSLLISLQNIITRNCGQKMKTNDIKRLRENRVQPLLAGNEDLALAGQVSKDSIDFLTRQIRAIETFIEKKVELNGAYRQLETIPGVGKILGLTIMLEAGPIERFAKVGNFASYCRVVSSQWSSNGKAKGKGNKKNGNKYLSWAFSEAAELARRFDDKARAYYNRKLRKSNFMVAHAALAHKLARAAFYIIRDQVPFMPEKTFS

SEQ ID NO: 309121 - protein, 366 aa, unidentified
MLIIGCDYHPSVQQIAWADTETGECGEKRLMHSNGEAERFYRELKQKGVQVRVGIEATGHSRWFERLLSELGFELWVGDAAEIRAARVRKQRNDRFDAKHILKLLMEDRFPKIWTASSENRDTRQLLLHRHRLVGMRTRVMNQLQAIAMNEGVRRKSGLWSKKGRARLESLSLPPWTSRRRQELLELLDRLNPMIDKLSKAIEQEAARRSEVQLLMTHPGVGPITALAFVLIIGNPERFHCGRQIASYLGLIPCEESSADHWRLGHITKQGNALMRFLLVEAAQTVARCEPEWRQHYFHLVLRRGRAIATVALARKLAVRLFWMWRKGQDYQQVKKFGSDTGQLEVPNGVKSITVKVIERPAPSMA

SEQ ID NO: 309122 - protein, 340 aa, unidentified
MRTLYAGIDLHSNNSQLGILDQDDKRIFHKRLPNMADVILAEFEPYREELSVIVVESTYNWYWLVDCLMEVGYKVVLANPAAMQQYKGLKHINDKHDAFWLAHMARLGILPQGYIYPKEDRAIRDLLRKRGHLVRLRTSLINSLQGIISRNCGCSLNANKIKQRGKNHVGLLLNSQEDLALSGEVSKETIDFISDQIKMIECLVLDRVKLRKSFQYLMSIPGVGKILSLTIMLETGTIDRFSKVGNFTSYCRKVPSNWMSNNKKKGKGNTKNGNKYLAWAFSEAAEYSRRHSDLAKSFFNRKAAKTNKAVAYCALGHKLARAAYYIMRDQVEFDEQKLFT

SEQ ID NO: 309123 - protein, 354 aa, unidentified
MRRTTKYVALDVHQATTVVSVREESGRVIARSVLPTDRGALTEFVRGMRGARHVTFEEGTQAQWLYDVLAPLVDRVVVCDRRGASRQGNKGDQVDADQLSELLRRGALRAVYHGSADRATLKELTRTYRNLVEDATRVMLRLKALFRARAIQTRGTNVYQARARGQWLAQLGDRGARFRAEALYAELDVLRTLRPRAKAAMVTEARRDPAWPVLRTIPFFGPVRVALLLATMQTPWRFRTKRNLWAYAGLAVVTRSSAEYTLVAGQPVRRRRPPMTRGLNRNHNRVLKDVFKGAATAATARPGPLQDFYHSVIACGTREELARLTLTRKLAALTLRLWKKGERYDPTKLTTPAR

SEQ ID NO: 309124 - protein, 352 aa, unidentified
MHIASITIDLGKTTFHLVALGERNKVLVRKKFSRSQLFAHTAKLPSSLIGLEACAGAHFVGAALREQGHQVRLIPAQFVKPYRKSNKNDFIDGEAIAEAVTKQNMRFAQLKTQEQLDWQAMHRERDRLVQRRTALINEIRGFLLERGITFAAQPIHLRKNLPAVIEDAEQNLSPRLRWLLDRMWQEWKQIEIDVSAITEEIERISNDDPRCRQLRQIPGFGPLISTATVAAIGNGAAFRRGRDFAPWVGVVPRQHSTGGKQRLYGISKDVAEFLVSVQVRHFGGHNVPVSLLLTFHLQVAYEVRHALAHPQCSFAGLGDRSQFGLGLRYPLAIVADAESDRIGCRAPQATRS

SEQ ID NO: 309125 - protein, 391 aa, unidentified
MICVGIDVAKDKHDCFILSSEGVVLADVFTISNNLEGFNTLLDKLRACSTPRDSIKVGLEATGHYSYNILGFLLDNGLATYVLNPLRTNLYRKSLSLRKTKTDRVDARTIAAMLLSDAGLKPYTDTAYHNEELKSLTRYRFCKVKERAKLKQSVSRLVCILFPELEKLVPTLHMASVYALLSEFPGAKQVAAAHLTRLKALLADASRGRYGRDMAVEIRDAARCSIGSRMPAKSLELQHTIRLIRELDAEIEEIEAAIQTIMEELHSPITTIPGIGCRMGAMILAEAGDFSRFDSPDKLLAYAGMSPSTYQSGQLKNCYPHMEKRGSRYLRYALYNAAKYVCHWDPAFAAFLAKKRAEGKHYNVALSHAAKKLVRLIFALEKSRQPYCPAI

SEQ ID NO: 309126 - protein, 365 aa, unidentified
MMRTVYCGVDFHARMQTIAYCDTANGEIQLAQLDHRKDDVRGFYSQFTGEVIVGMETGGYSTWFEAMLEELGHTVWTGHATEIRRRANWRQKNDRRDAELILEIMLRGDFPRVHGHSRESVEVLRMLRYRARLIKMRTMICNNLQAIAMSCGLSERSRMLSRAGQERLKSARMTPVIKQQSEDLLTLLVPINERIGRVDRWLKQQASTDDRVKLLMTHPGVGVLTALGVVHTLEPFNRFSKQRSVVAYVGLEPMERSSAERKRYIGISKAGSRLLRFLLGEAAHIAVRFDPELKQFHERIGKRRGKAKATVAVARKLLIRCWIMLRENIDYAEFRGRGVEARLARLGHRPTMPEVLIERPASSDR

SEQ ID NO: 309127 - protein, 350 aa, unidentified
MSMVCGLDLHRGQITFDILVERSGEVWRGRIWKPDRQRFRRWLENEVGPRASDGEVKIAVEGCTGWRYVVEEIEAVGFEAHVAEPADTQAMRGRKKHAKTDRTDARLLRDLLQAGELPESWIPPGPVLEWRERTRLYKSLVDQRAVWVQRVHAELYQHGVALPEEHIRSENTRRLLSGHDVQLSEAGRERIRVGYRMIDAIHAEAEAVRDQVTRFGRKQKACRTLIDQIYGFGPTAAVIVWSELGDCQRFTRSRQVVRHTGLDVTVDASDSRRGGGYLSRQGPGTLRWALFEAGLCASRATSPDRDYYRSVKERSDGKLAAICVARKLARRSYHIVRSMDPDDVYAIPDT

SEQ ID NO: 309128 - protein, 355 aa, unidentified
MDSKKYIGMDVHKESISIAVMNGAGKIVMECVIETKASMILQFIDGLRGDLQVTFEEGTSAAWLYDLLKPYVTKLVVCDPRKNASMKEGNKSDKIDARRLAELLRLNHLNPVYHGEHGLRGLKELVRSYLTITKDLGRVMTRVKAIYRSWAIPCTGKQVYAPRHRAEWLGKIGEPGVRRRAEFYYQQLDALRAVRQEVRRELLAEGKKHKAWKQLCQIPSIGPIRAAVLLGILQTPHRFRSKRQLWTYSGFGIETHSSADHRNVDGQLQRAKKHISIRGLNRNCNHDLKNLFKGAAIVASSKPGPFQEFYTALLSKGIRPEMARLTLARKIATIVLMVWKRGACFDAQHLKPQTA

SEQ ID NO: 309129 - protein, 338 aa, unidentified
MQKNYLGIDVSKLSFDVSLIVVVNGRKQPLVISQFANNTGGLKEFKNWLTAHQVSFDEHSLLVIENTGIYHRPIWNFCTTHLLPVFIGNAADLKWSFGIARTKNDKVDSMRLCEYAYKNHEDIKPTTGLNKALITLKDLLSNRSKLLRQKNAIKQTLNEHKVSNDKATHQLIEKLNKAALEGLKTSIKLIEAQMLVLVKQDDAVFANYTRMLSVPGIGKITAIFIICCTNNFAIKVTGKQLANYAGVVPHEHKSGTSVKGRNRVHFMANKDLKAILTMGALSAINTYPEFRAYYERKMSEGKKHLQALNAIKNKILLRVASVVNQQKLYENKYQVTCT

SEQ ID NO: 309130 - protein, 344 aa, unidentified
MGEVSTIGLDIGKSVFQVHGVDDAGAVVIRKRVSRARVLEYFGELPPCLIGIEACPSAHHWGRELQLLGHMVRLVPPSYVKAYLKRSKNDANDAAAICEAVTRPSMRFVPIKTKEQQTAVMLHRTRQLLVRQRTMLSNALRGHLAELGIVSAKGRNGTAELLRIITNGADSRVSPAVRDILDVLARQYSAIGIEIASIDRSIMALHRGCEASRRLAEIPGIGPIAATALVAEIGDWKTFSSGRSLAAWIGLVPKQYTTGGKDRLGSITKQGNRYLRWLLIVGAMAVIRYARKHGTEKRPWLGRLMERRPTKVAAVALANKIARMAWAIMVRGERYKEPKLLLAA

SEQ ID NO: 309131 - protein, 336 aa, unidentified
MKKIFDYHVGIDVSKLTLDVTVLFEYKNSTKTEYCKIENNAKRIAQFVKKLLARCGSGQVLFCFENTGIYSLPIAYYLYENKLSYWQVPAIEIKRSKGITRGKDDKIDSKDIAFYAYTHTHKYRPGMMPAKSIQQLRLLFTEREKVLKALALFERTAENRNFVQKDVFKAVESVNKSVIHKLKQTMKCLEEKMLAIIASEDNLSLQYRLLTSIPGIGMQTAIYIIHATKGFESFDNWRQLACYAGVAPFPNTSGTSIRGRTKVHPLADKKLKSLLNMCAMTAIRYDKELKAYYERKVKEGKPKMLVINNVRCKLLARVFAVMNRQTPFINTFKFAS

SEQ ID NO: 309132 - protein, 339 aa, unidentified
MLIIGCDFHPGFQQVAIFDNQTGEVSERRLLHREEAQEFYGSLRGQAVRVGMEACGHYPWFERLLERLGMELWIGDAARIRATEVRKQKTDRRDAAQLLQLLMENRFPRIWVPSLEERDVRQLLMHRHQQVQGRTRIKNRLQALMLSQGVQKKRKLWTAAGRAELEKLELLPYAAVRRERLLAALDQMEAEIAGLNRQVEEEVKRRPAAMRLRTHPGVGPVTALAIVLTLGPAERFANARQVGSYFGLIPSEHSSGGRQQLGRVSKQGSSFLRFLLVEAGQTAARYDAELGRFYRRLAMRKHRALAKVAVARKLAMRLYLMLREDWDYAQLCKAMCRQA

SEQ ID NO: 309133 - protein, 418 aa, unidentified
MDVLHDRCAALDVSKKDVKVSLRTPGKRRNQRHTEVRTFATTTNALLAMRDWLVAEQVSLVVMEATGDYWRAPYYLLEDVLNVELINAKQAKAMPGRKTDVSDSVWLSQLAECGLLRASFVPPEPIRHLRDLTRFRSVLADERVREAARLEKELEDAGIKLSVFVSDILGVSARAMLEALIRGERDPQILAELAKGRMRPKIPDLMEAMIGRFGEHHAFLCRLHLDRIDQLERDMAKLSARIEEVMAPFRDTVTRLGTIPGVSQRVAEVIIAETGGDMSRFPTAAHLASWAGVCPGNHESGGRRKSGKTRKGNRWLRDALGTSALSVTRAKDTYLAAQYARLVRRLGSKQKALVALQHSILTSIWHMLSTNTDYQDLGSDYFLRRDPERERRRAIAALNKLGYTVTLNPIEPPTQAAA

SEQ ID NO: 309134 - protein, 449 aa, unidentified
MAKSRKKPGKLDRDLPQLKPNAAGIDMGAREIFVAVPADRDAESVRSFPTFTEDLHRLVDWLQRCRIDTVAMESTGVYWIPLFQILESRGLQVCLVNAQHVRHVPGRKSDVLDCQWLQYLHSVGLLKASFRPEQDVCAVRSLLRHRESLVQMSCVHVQHMDKALDQMNVQIHHVISDITGVTGLAIVDAIVAGKTNPKELAKLRDFRIKASIETVTKSLVGDYRPEHIFTLKQSLISYRHYQQLIDGCDREVQQRLQAFDTKDDGPNAAADSSSSTKPAASGFDLHHHLERIFGTDLTLMPGFESLRVQTLFSELGADLSKFPTEDSFCSWLNLCPKDGTSAGRRIRAPQIKTQNRVTNAFRLAAQCLYRSKSFLGDYFRSQRARFGALKATKNAAHKLARIFYHLVTNRQSYDETIFAKLEIRNQKRRLNRLQSLAHQMGYSLVQANA

SEQ ID NO: 309135 - protein, 356 aa, unidentified
MPIPFKRYKGMKKIFIGIDFSKEKFDATVIKAEGVEERAERQHEVFDNKVSGFRRLLRWVKSVADEPDAGLWLFCGENTGGYSKALCNHLYGSGYDMWLENALSIKRSSALQRVKSDKADSGVIAEYAMRNYDQMRLYKPLGKNLERLREVFLYRHNLVKIKASMTVRKGEKKLTQEKSDISRFMAQSSKHLISEFNKKIAECDMRIDKIISEDKELRRNFEIITSVPGVGTQNAVCLMVYTDNFSRFDYNSRKIACYYGVAPFGRQSGTSVNTPPHVSPFANKLIKALLTQAALASINFCPQMAVYYKRLVEAGKKKPVAVNNVKNKLLHVITAMVRNGAMYNPDHDYYAALKVA

SEQ ID NO: 309136 - protein, 424 aa, unidentified
MNQNQPEIQYAAFLAIDWADQKHVWSLQEANSSTRLRGEVDHMPEAVETWVAQMSQRFAGRTIAVAVEQSRGALVFLLSKYEQLHIFPVPPAMTANLRKAFYSSGAKNDPSDADLLLDLLQRHREKLRRLSPDTEATRRIQNLVEERRKLVDEKTAQSNRLEAHLKIYYPQIPRWFGDVDSPLVCALLERWPTLEALQKARPDTLRSFFRKQHSRKEELIESRIKAIGEAMTALKDRAVVDAKVAVVKVLVQLIQVLHQGIEGLNRQIQEAAEAHPDFFIFDSLPGAGAVMAPRLLAAFGSQRERYQNAAEVQIFSGIAPVSESSGKSSWVHFRFACSKFLRQSFHEWAALSITQSQWARAYYELQCRRGKKHHAAVRALAFKWIRIIYRCWKEQVAYDENVYLAALAKHNSPLLAATKAAVAS

SEQ ID NO: 309137 - protein, 390 aa, unidentified
MRYFIGIDVAKFKHTACVIDTYGIVLVESFDFTNDIIGFQSLLKNIKPFLKKKHLVGMEDTGHYGDNLRNFLLEKQYKVVMLNPIVTSHIRKASNKAKNDRIDCFVIANTMMNPNFYRDQHAQSIDYATVRQLTRMHHTHTEEINRYKCQLQKSIDIVFPEFNSLLNTKYSKTYLEILDTYHSAYTIANTDIRLLRNTLKNVGVGRSVSISAEQLKKAAKESIGQHNLAIEMDIPFLISLIRRLTSILGEIDKKIEEFSHQLNSPILDISGISHFSAMSIISELGDITYFSSEKKLIKFAGVNPCVYESGTYSMTHTRLEKKGSKYLRKTLYQIIDVVIRFNPVFQAFYQKKISQGKSYRCAQGHCIRKLLRVIYKILSTGERFNPEKLK

SEQ ID NO: 309138 - protein, 411 aa, unidentified
MSETNNIDDHGYTVFCGLDVGKAVHHACALNPAGRRLHDKALPNDEAALLEVFEKLAVHGHVLVIVDQPASIGALPIAVARSLGIEVAYLPGLAMRRIADLHPGEGKTDARDAYIIADAARTMPHTLRRVGTDDDTLAELTVLAGYDDDLAAQSTRLTNRLRDALLHVHPALERLVGPRLERGGVLDLIVAAPTPQALRDLGEHGITEIMRPRSPRLAKTMPTKILAALDAQTVVVPGTAAFGRVIAGVATQLRDVRTERDTLAAELEDRLEAHPLAEVLTSMPGNGFRTALKILTIVGDAAAFPTAGHLAAYAGLAPVTRRSGSSIKGETRSQRGNHALKSALFLSAFASLADPTSRAYYDRKRAQGKRHNAALICLARRRIDVLYAMLRDRKPYQQPAPAEPESSPAAA

SEQ ID NO: 309139 - protein, 348 aa, unidentified
MKELSAQVRVVAIDLSKHVFHVAGEDGCGKVIYEGVCKTRERFAAFLKTLRSDQQVLMETGPGAQSWARELLSRQIEAKVLPAQLVGQHRSGAKNDRNDALAILRAGRDTAIHAVPIKSAERLALQALHRVRSRYVRNRTAVSNEIRGLLLEQGVALVKGEQALESGLRRVLGGTQVPLPRRLRELIAELSAEWDQLGRRIERLTAELTASAHADPVAQRLMTVPGIGPISAAAMVCKDPQPERYASARHFAASFGLVPDQHSTGGKTRLGGLSKRGDPYIRSLFIQGAQAVLRQVKPPTESASENRLQRWLRHHGRKGAAVRLANRNLRIVWRLLREGTDYHAETNA

SEQ ID NO: 309140 - protein, 328 aa, unidentified
MFFIGIDVSKAKLDCSLLMDSNSTTRRSKSVANSPNGVKNLLDWCAKYNVLPHELHAILEGTGVYHEQAALALVDAGVTVSIVNPAQVKDFGRGLGVRTKTDGVDSLVLARYGALLKPKPWTPPAPEARILQALLSRREAIAQDLQRERNRLEKADATETPELIRESLVDSITFLKKQLTKLQQDIDDHIDKHPNLKADRDLLTSIPAVGPQVGNQLLAVMHNHQFQSAEQLAAYLGLVPIERQSGSSIQGCPRLSKAGPARIRAVLYMAAIVGTQYNPHIKALYQRLQARGKTKKSALGAAMRKLVHLCFGVLKTRQPYLPNYENQN

SEQ ID NO: 309141 - protein, 414 aa, unidentified
MKSCLFVGIDIHKDSHTAAVLDGYFEVVTTVSFANSSIGFAVFEEKLKKLRNGKDLIFGLEDSQGLGSFLANYLIGKGYKALEINPVLTDRGRKHTVSRDKSDERDAIVIAKTLIRERLSLYPVRIDRNGVALREMTGYRQLLISESTRIKNRLHMALFNQYKGVLGCFSNPFGKCALAFFARYPDPILLKKADPDTLSTFLKRNSKGRFSDKKARAILSSIDNSIADSLTGTRVHIISAHTERLVQIGKELKRIQEVLEELIEASSYGCLTSIPGIDTVTASKIVSAVMDISRFSSSSKLARFCGIAPREKSTGKKKRYEKSKYGNKSLYSTIYFMALAHISRTKDGKDKNPISRAYYLKKISEGKTKKEALTCLSRRLVDLIYAVMRDRSIYNFSKSTSVKQHDSVVHTVAA

SEQ ID NO: 309142 - protein, 341 aa, unidentified
MDYFAAMDVSLEQSSVCVVDGTGKIIREAKVASEPEALVAWFAESGLKFTRIGLEAGPLSRWLHAGLTAAGFAAILIETRHLRAALGAMKVKTDRNDARGMAQLIRMGWFRPVHVKTVPAQEIRALLTGRKLLQIKLRDIELGIRGLLRGFGLKVGKVSEGKYDARIRELATGHPMLEPVAAAMLQARASLRAEYAKLHRMLLRIVRADAVCRRFMTAPGIGAVVAVSYRTAVDDPTRFHKSRDLGPYFGLTPSKYQSGEVDRTGRITKVGDVMVRTALFEAAHVILTRVTRFSTLKAWALRIAKQRGFKRAKVALARKLAVVLHRMWVDGTDFRWRKAPA

SEQ ID NO: 309143 - protein, 351 aa, unidentified
MPRASTVHAVIAIGIDMGKNTLHMVGLDSCGAIVLREKVSRGRIASRLVNLPPCLIGIEAGMATHYVARELAELGHDVKQVPATYAKPFRQGHKNDFRDAHAVAEAVQRPTTRFVPAKTEEQLDLQALHRVRSRLVSGRTAAINQIRGFLLERGIIVRQGLRFLRQSLPDILATRADVLSPRMVRIVAELADDWRRLDERIEIVTDEIEALAKSNDSCRRVMTVPGIGPIISSAMVAAIGNGVAFARGRDFSAWLGLVPKQMSTGDRTILGRISKRGNGYLRMLFMQAARVILLRPANWPKHGFGAWLARAAQRLHPNILAAALANKLARIAWTVLAQERSYEARVTKAAA

SEQ ID NO: 309144 - protein, 341 aa, unidentified
MKLKTITIDLAKNVFQVCGVNEHIKPQFNQKLKRSELLDFMRQQTPTVVVMEACYSSHYWGREIAKLGHDTKLIPAQHVTPFVRGNKNDHNDAFAIAEASQRANIRFVPVKSEHQQEISCLHRIRERLVKSKTAMSNQARGLLSEFGVVFPCGHKALLSGLTSVIDNPQYSHRLQDMVIDMLSEYDTTIERLKSIKKQLNEFVDESESGKILRSIPGIGVINASALLAAIDKGQAFNNPKEFAVWLGLTPKQHASGNISKMGGITKRGDRYLRKQLIHGARAFVSRAAKSTDPLALWATKLRLTKPFNKVAVAVAHRLARLIWILLTRQEHYRSTPGNLSA

SEQ ID NO: 309145 - protein, 327 aa, unidentified
MPDGIRWVGLDVHARESTFAIFDQDSGEVTTKRVMGRPHELLPWLRGVERPARMVYEAGPTGYGLARRALVEGIELSVCAPSKTERPSDRVKTDQRDAVRLARLLAAGELTLVTIPSVEREQLRDLVRCREDIRADLVRARHRIGNFLLRREIYWEGTGEAWTRKHRSWLTSIKFADHASRSTLADYLHAHDVLISRRDRVEADLAQLALSAPCAHTVARLRCLRGIDTLTALGLCAEIGEWGRFDHPDQLSAYLGIVPCEHTTGNQRRLGSITKAGSTHARRLLVEASYHYRRGPVVGEALERRQRGHAPEIINISWKAQRRLNAR

SEQ ID NO: 309146 - protein, 344 aa, unidentified
MQPMYYIGLDIHKRKISYCVKDSSGQIHAEGSISATRLELDHWMRSLPQPWSAAMEATMFTGWIYDHLKPHAAVLKVAHPLMLRAIAAAKKKNDRIDASKICDCLRCDFLPESYMASAAIRERRRTLRYRNLLVRQMVQMKIKISALLMEAGVSYNKQRLHKAGYFRELLATNPDIDEGLCSLLRLCRETVVRLGKNESALVRSLERDSLLVERVERLMTIPAVGPITALTWALEVGDVQRFSSIKKAVSYCGLCGAEKSSGNTVQRTPLSKQRNKHLQTTLIEAAKMAPRNSPELAMIYNKEKQKGNANRATLAVARKLVAYLMAVDRSHRNFQVAETSNIAA

SEQ ID NO: 309147 - protein, 427 aa, unidentified
MHPGRMGEQGVFYPTSPKMMFTYVGIDSHKETHTAIFLNCFFEKLGAIAFGNLPADFENFLVEAQKYQQNGTTFLFGLEDTTKYGRALATYLLYKGHAVKHTNAFLVAGERKNLGLEKSDHVDAECAARILISKYETLPNAARNADEYHILRSLVVRRSFLVNNNKMLKMYLHSLLMLDFPNYHTFFSDLRVKSAMAFFEKWPSANLLQGVSAEELGAFLELHSGGLLGITRATQILKSTDTSVPTHEIRNKTVLSALRQLKYNQQSIEEVETDLAYVFHQFNTTLTSMTGLSVAGAAQLLSCIGDIRNFATPAKLARYAGIAPVSHSSGKRDMQFASQRGDRELNSCFYNLAVRLSFVHGTTHKVMNPFFYDYYHRKVAEGKTKRQALKCVQRRLVNIIWTMLTHQEAYVNPPMYALPEDEDEGIN

SEQ ID NO: 309148 - protein, 398 aa, unidentified
MTESSDYESVQVFIGVDVGKDTHHAVAINRSGKRLFDKALPNDENKLRSLISDLKQHGQILLVVDQPATIGALPVAVARSEGVLVGYLPGLAMRRIADLHAGEAKTDARDAAIIAEAARTLPHALRTLKLADEQIAELSMLCGFDDDLAAQTTQASNRIRGLLTQIHPALERVLGPRLDHPAVLDLLQRYPSPEKLASLGEKKLAAQLCKLAPRLGKRLAADIAQALAEQTVVVPGTNAAAVVLPRLALQLITLRKQRDEVALEVEQRVLAHPLYPVLTSMPGVGVRTAARLLTEVACRAFASAAHLAAYAGLAPVTRRSGSSIRGEHPSRRSNKALKRALFLSAFAALRDPLSRAYYTRKMSQGKRHNQALIALARRRCDVLFAMMRDGTFYTPQAS

SEQ ID NO: 309149 - protein, 398 aa, unidentified
MLHDHPSVGPTAIRTQFGAIFVSLELSRSKWVLTSLSPGNGEKMSQYSLTAGDVGGLLARFADLKRKAKERTGSDYPIITIHEAGLDGFWVHRVLQDEGIESHVVDAASIATSRRRRRAKTDKIDGEALLRALLAFKRGEPRVCAMVVAPSPEEEDRRRLCRERQTLLNERIVHTNRIKGLLFAQGITDYAPLRRDRRKRLEGLRTGDGRPLPVHLKTQISRELDRLELLIDQIRSVEAEHEALLAAESMAAPEAGPAKAGSEAEPRNAVAMLLTVKGIGDHSAAILWSEGLSRQFSNRRQIAAYAGLAATPWRSGAVMHEQGLSKAGNPRLRTLMVQLAWLWLRHQPQSALARWFNTRGERGRKGSIVALARKLLIALWKYVTQGVVIEGAALKPAA

SEQ ID NO: 309150 - protein, 343 aa, unidentified
MEEITTVGVDLAKSVFQIHAVDAAGRIVVQRALKRRDLITFFEKLPPCLIGLEACSSAHHWGRVLRDLGHDVRLIPPAYVKPYVRRQKNDAADAAAICEAVTRPSMRFVPIKTEGQQAALMLHRARSLLLSQRTALICAIRNHMAELGLTAPRAVRNLRPLLEVLANDADESLPPLARAALKPLSDQLGYIEIQISVLDRQLLEWHRSNPVSQRLASIPGVGPVTATALAASVTEPSMFASGREFSAFLGLVPRQNSSGGKTRLGRTSKMGDRYLRTLLVCGATALLSPTRRRSCALDVWAKTLSEKKKPTKLIALALANKMARIAWALMARGETFRTPAIAA

SEQ ID NO: 309151 - protein, 366 aa, unidentified
MKSNTQNAKIEAITEKTLVLGIDVGSETHYARAFDYRGIEYSKKPFKFSNTEAGFVTFKEWILDLKERHEKDKVVPGMEPTGHYWFNLGKFLQDNEMKPVLVNPHHVKKSKELDDNNPTKNDRKDPKVIAGLVREGRYMIPYLPDGVYADLRTASNIRFQLQAELTRIQNRISRWFNIYFPEYKTVYGKPDAKSGMLILKAAPLPEDILTLGIDGVNQIWRDAKLRAVGKARAKTLIEAAEHSVGSKEGAVSARMEIRMLLEDYESRNIRLQEVMTLIEGLVKQIPMAEKLLEIKGVGIKTVSGFLAEVGDISRFNTPKELQKLAGLALVESSSGKHKGETSISRRGRKRLRYLLFEVAMSLVSKN

SEQ ID NO: 309152 - protein, 425 aa, unidentified
MNFNTNEKINQVSENTLVIGIDIAKYKHFACAIDDRGRVLQKSFPIAQSHMGFEAFYERLLALKAIHDKQEILVGFEPTGHYWMNLAAFLTNYGIPFVMVNPMHVNRSKELDDNLQTKNDQKDALVIARLMRDGRFSYPRILAGVEAELRNGATLRAKIQEDLNALQNRIIRWLDRFFPEFTQVFKSFGKMAYAVLEKTPLPSDINGKTPEELLFLYRQVEGMKSPQLPKAKQLGEVAESSIGVTEGLVMARFEIATLLSQIQLMQTQLEKLTAQLIEQAKQMTDYDYLASVPGIGDITIVDLLSEVGSLTQYAHPRQLIKLAGLTLRENSSGQQKGQKRISKRGRRQLRALLFRVMMPLIKHNPAFRALHEYYTTRANNPLRKKQSIVVLCGKLVKILHALCKKKTMFDEHQMMKDFAHLQMTA

SEQ ID NO: 309153 - protein, 342 aa, unidentified
MLADQLDYVVGVDPHRDSHALAVVHVVSGAIVFESTVVASSDGYAHALKLVDQHAPARRAFAVEGTGSFGAGLTRFLSGRGEQVLEVGRLRRERHSGGKTDALDAIRAARSVLTSERPATPRAGGERQGLQALVAAREGAVNAKRAGLCQLRDLLITTPEPLRSELRPLTRARLLQRLAATRPGGGRDPELRGSMLALRSIARRVLQLTAEERELACEIEALTRKLAPQLLDQPGVGPHAAAQLVLSWSHRGRIESEAAFARLAGAAPIPASSGQTIRYRLDRSGDRKLNRALHMILVTRKRSHPATIAYIERRLQEGKSRREANYLARSLYRLLEHPPMTA

SEQ ID NO: 309154 - protein, 343 aa, unidentified
MQVSTIGVDLAKNVFQVHGVDSAGKVVITRQLRRKQVIDFFSKIPPCLVGMEACGTAHHWAREVSKLGHTVRLMPPSYVKGYVKRSKNDAADAAAICEAVTRPSMRFVPIKSADQQALLMLHRTRDLLIRQRTQLINALRTHLAEFGLVAETGREGLAQLARIITDERSRETLPSAMRQALQAIVDQLAALELQIGALDRAIHAHHRANDMSCRLETVPGIGVIGATAIASTVTDPSDFKSGRDFAAWIGLVPRQHSTGGKERLGGISKQGDRYLRRLLVNGATAVVRNARQHPQKHPWVMRLLAKKPAKLVAVAVANKMARIAWAIMAKGGCYRAPELAAAA

SEQ ID NO: 309155 - protein, 402 aa, unidentified
MKYFAGLDWGSVEHAACVVDEQGTVVAQLEVQHTAEGLGKLLRKLARIAPSQQLAVAIERPSGLVVDTLADAGHPVVPIHPNQLRACRPRYRAAGGKSDPGDAYILADVLRTDGHRFRTLRPLSDEVRALRALVRSRDDLVAERVALANQLRALLDSFWPGAAALFADIDSPIALAFLELYPTPQRAHRLGPQRLAAFLARNRYSGRRQPDELLERLRSAPTGLAGPLEQEAKGEAVLDLVSVLSTLVARLRRLTSAVEHAVEQLPVGRLVMSFPRTGKVNAAQIAAELGDDPKRFPTERQLAAEAGVAPVTHASGKSRGVTFRWACNKRLRCAITTWADNSRHARPWAQRVYSQARDRGCHHPHAVRILARAWVRVLWRCWHDHAAYDPVRHGAASRLQAA

SEQ ID NO: 309156 - protein, 348 aa, unidentified
MVLLGVDPHKDTHTVVAVDQAGLQLGQLTVAAHSQGHTELLGWARRRWPNDRRWAVEDCRHVTGRLEHDLLAAGERVVRVPPRLMAGARAAVRALGKSDPIDALAVARAALREPDLPIAAHDQASFQVKLLVDHREHLVAERTRTINRLRWHLHQLNPDLEHAAQRLPGPNLERVAAWLADTPPTVQVGICQELVATIQTLTARIDQLGMDLRRRAARLAPNLLGLPGCGVLTAAKLLAETAGVARFRSEACFAMHAGVAPIPVSSGRTDRHRLCRGGNRQLNAAMHRIAITQLRLAGPGQTYYRRRRAQGDGTGEAVRALKRRIARAVYQQLKLAEQRPKTSSATAA

SEQ ID NO: 309157 - protein, 430 aa, unidentified
MKYNTQNAKIASITEETLVLGIDVGSETHYVRAFDWRNYEFSDTPLAFSNDEAGFLTFMAWVEDIKEKAGKTAVIPGMEPTGHYWFNLGKFLQDSGMRPVHVNPHHVKKSKEMDDNNPDKNDRKDPKTIAALVNEGRFSYPYIPTGVYAEIRSLSNLRFQTQEEITRIRNRIARWISIYFPEYKDVYGKLDAVSGMMVLKEAPLPVQIKELGAEGINQIWRNAKLRGAGMKRAKTLLSAAEHSVGSQEAPEAASMEIRNLLEDYEKYSSRMDDLMAKIEAKIKEVPYVDKLLEIKGIGLKTVCGFIAEVGDLSRFDDPKQLQKLAGYAIVKNSSGKHAGESHISYRGRKRLRYVLYEAAISVIGKNGEFREIHRYYQTREKNPLKKMQSVIAVACKVLRVFYAILTKGVDYDGEKMLGDIRRPAVSVQAA

SEQ ID NO: 309158 - protein, 351 aa, unidentified
MSRTTSAVAASTIGIDTGKHTLHLIGLDEQGMIVLREKLARGRIGGRLANVPPCLIGIEAGMGTHYVARELISLGHDVRQVPPAYAKPFRQTHKNDFRDAYAIAEAVRRPSTRCVPVKTDDQLDLQALHRVRTRLVGQRTAVINQIRGFLLERGIAVRQGLRFLRQQLPEILAKRIDVLSPRMIRIVEDLSGDWRRLDERIEQVTEEIEVLARESESCRQLMTVPGIGPLIASAMVAAIANGAAFTKGRDFAAWLGLVPKQMSTGDRTILGRISKRGNRYLRTLFMQGARVILLRPANWAKHSFGPWLTTAAKRLHHNVPATALANKLARIAWTVLAQLRNYETRVIAEAA

SEQ ID NO: 309159 - protein, 373 aa, unidentified
MDTIYIGVDFHARQQTVCYLKTETGELVTCELKHQDKQKVQAFYAQFSGRVIVGLEASGYSPWFERMLEALGCEVWLGHATEIRRRARWRQKNDRRDAELILDLMLHDEFPRLHRPTEQSREVLRMLRYRQKLIKIRTMSKNSLQALALQAGLAKRSRLFTKAGQQQLGAAEMSPVMHWQREHWLQLMEPLNQQLLETMVWFKAQSKDDVCIKRLRTHPGIGLLTSLCLVHTLQPVSRFRNTRKVAAYAGFDPVERSSAERKCFLGISKAGSRLLRYLLVEAAHTAIRKDEDLKRFYQRLAERRGRPKAKVAAARKLLIRAYIMLRDEIDYAEFRHRAVAARLARRGQGPSNVPEVLIGQPASAECRDHTSQL

SEQ ID NO: 309160 - protein, 404 aa, unidentified
MELNAIYRCVAALDVHQAKLTVCILFETDAGEVVSQLREFGGFKRDRREMAAWVSSFKPELVVMESTGIYWKSPYAALEWYGLNLAVVNAYHVKHVPGRKTDIGDAQWLAILARSGLLRGGFVPPQHFREYRLISRQLQKLTSLAAGEKNRLHKLLTDAGIRLSVVLSDLYGKSAKAMIKGLLDGETPEQLLAHADSRLKASPDELRDALDGDLSESHRFVIRELMAHIDELEARVLRFRQTLLNHLSSYQVILQNLQTLPGIDELSAAMLFVEIGDDMSAFGSPAKLASWAGVCPSQNESAGKRKSAKTRKGNPYLRRILCEAANAASRTRCSLQDRFKGLMIRRGRKRAIFAIAHKLLKTVFLLIQRGDYYRDANTDYEALSVQRNAPRWIKKLVQYGYINA

SEQ ID NO: 309161 - protein, 342 aa, unidentified
MNSTTIAVDVAKLVFEVAVSEHPGHVRERHRLSRARFHRFLGEQPPATVLMEACGSAHHWARRAQACGHRAVLVPPHVVRPYVLRNKTDRTDTKGLLEAFRNEEVRAVPVKSETQQALSALHRLRSTWLATRTARLNTVRGLLREFGVVIPIGARQVVPHVMTLLEDADAGVPGLLRPALAEATHEIRELEARIRAVERQLETAAAQTVVVGQLRTIPGVGLLTATALVATVGDVQRFPSARHFASYLGLTPRERSTGQRRHLGAISKRGDTYLRTLLIHGARSVLCHAKTKTAPPPDRLRRWALQLERLRGHNKAAVAVANKLARIAWAVWKHGTEFSSAA

SEQ ID NO: 309162 - protein, 356 aa, unidentified
MEQLTTVGVDLAKNVIAVCVLDAHGSIVERRVLGRDAFERWAEQLPASHVVMEACGSAHHWGRWFAARGHTARLIAAEFVVAFRKGGKNDTADAEAVAIAGRQPTMRFVPIKSVDQQAILAWHSVREGWKEERTALLNRVRGLLAEYGVVIGRSADRLLAVLPKLAEDPRLPDAVRALLLEAHEHFAALHARLARCDAQIAAHARSAPAARRATELLGVGLVTASALVATVPDARVFRSGRQFGAWLGLTPRQHSSGGRTRLGHISLRGNVYLRTLLIQGARSTLQAAINTEPSRASRLQRWIVELYGRKGYYKTLIAIANKHARILWAMLAKDEPYDACAWQRHPMNQPSLAANA

SEQ ID NO: 309163 - protein, 461 aa, unidentified
MAESRPRRPRRPRRTSPSVLERINPDAAGIDCGATTHVVAVPPDRDHEPVQSFRTFTTDLHRLADWLVACRITSVALESTGVFWIPIYEILEARGLSVHLVNARHVRNLPGRKSDVSDAEWLRDLHSVGLLRASFRPTAAIVTLRTYMRHRHTLVELAAMHVQRMQKALVQMNLQLPFVISDITGQTGLQIIRAIVAGERDPAQLARFRHGRCRATPAEITAALTGHYRPELLFALQQNLELYDACERQIAECDRVIEAHVRTLTANITPPGPLPAARAARQRIEPAFDVRAVLHHLTGGVDLTQIDGIGASTALKLIAEIGTDMRRWPSAQHFTSWLTLAPKNKVSGGKLLSSQTQPSANRAASAFRLAAASLGRTQTALGAFYRRMAARTGKPQAITATARKLAVLVYHVLKGDFVYRDPGADGYDAQQRARQLRQLRQRATRLGFALVSHETGEVLGG

SEQ ID NO: 309164 - protein, 334 aa, unidentified
MNTNLQGGVANSIQRPTTAGVDVSKNHLDACWLVEQQRVVNASSGWDELIAKFKAAQVELVVIEATGGYERGLVLALQGAGITVARVNARQARDFAKAMGQLAKTDRVDARVLREFANVLALRADLHKFITLPVHAERVALAELTTRRRQLIEMRVAEANRLELVTNPRAVKSIKSVIRLLDKQIMEIDHDADDHLDRHFGTQRELLDSVKGVGPVTILTMTAVLPELGKLQRRQIGKLVGVVPLANDSGNRRGPRRTWGGRSEVRAVLYMATLAAIRHNPVIKVFHSRLIAAGKPPKVAIVACMRKLLTILNAMLRDGNRWDSARHVPPVQTA

SEQ ID NO: 309165 - protein, 355 aa, unidentified
MSSEKYIGMDVHQATISVAVMDSTGKVIMESILETKSSTILEFLGGLRGTLSVTFEEGTWAGWLYDLLKPHVAHVLACNPRKNAALQQGNRSDKIDARELANRLRLNDLKPVYHGENGIRMLRELARSYLTIVKDLSRVMNRLKALYRSWAIPCAGRDVYYTRHRSQWLEKIREAGPRRRAEHLYQQLDLLQHLRQQARRELLAEGRRHSITAKLRKIPALGPIRSALAVALIQTPHRFRSKRQLWKYCGLALETRITGEYVYVHGERRRSKKQLSIRGLNKDHNHDLKGLFKGAATQASVKPGPFQEFYQRSLAKGIKPTMVRLTLARKIAAITLTLWKKGEDFDIHKLNSQAA

SEQ ID NO: 309166 - protein, 446 aa, unidentified
MRIVYQRCCGMDVHKDSVTACLLVINEGGKDRNEKREFGTMTRDLRELASWLASEGVEAIALEATGVYWKPVWNILDAEKKFKMLLVNAQPIKCVPGRKTDQKDSEWIAELLQHGLLRASFVPPVEIRQLRDLTRMRTRIRQTLASFANRIQKVLEDANIKLGSVASDVLGVSGRHMLKALLAGEQDPQKLANLAQGHLRKKLEPLQLALEGHFTEHHRLQLKFLLEFIEFGEKQLSNLDSEVQLLLTRVQPKASLPDPDDGALAESKGSPPQATSLQTAVELWDSIPGIDQLAATTLVAEIGANMDQFPSARHLAAWAGLCPGNNESAGKRRSAKIRKGSVWLRRALCQAAWAASRTKNTYLAAQYRRLIVRRGKKRTIVAVAHSMLIVAYCLLKRQCVYQDLGANFFDRLDERALTHRLVKKLIGLGYQVTLKPGRAEAAPETA

SEQ ID NO: 309167 - protein, 334 aa, unidentified
MSLELLAIDLGKRSFHLYGIDTDGVILSQKVSRAKLADLVGNLAPTAIAMEACASAHYWARCWLAAGREVRLINPRFVKPFVKGSKNDAVDAEAIFEAAMRPTMRFVPVKSTDQQDLQSLHRARDRLICQRTAVINHTRGLLAEYGVVLPQGPWRFMAQAPTAIAGADLSDLARAIFGELMGQLDDLDRRIQKLDAMIVTLCRTNETCRRLAKLPGVGPIIATAIVGSVNDGRQFRSGREMAAWIGLVPRQYTTGGKPRLGGIGRRANHYLRRQLIHGARAVVSRSAKHDDRQSIWLKALAARRGFNRTIVALANKTARIAWVLLSRKQEYAAP

SEQ ID NO: 309168 - protein, 384 aa, unidentified
MNKHSMIFIGLDTHKEFHEVAYCEEQRGATPVHYGRIPSSKVSVKKLLRQFKSKYPGATLHVVYEAGPCGYWIYRLITSLGHCCYVVAPSLIPKKPGERIKTDRRDALKLVRSLKSEDLTPIYVPEPEDEAVRDLSRAREAAMKDLKEAKYKLKALLLRNNIRYEGTANWSKKHLRWLTELILPHPAQQIVLQEQLQTIEERIRRLERLDNELTHHVHQWRYYPVVKAVQAMRGVRLLVAVGVVAELGDLNRFDHPRKLMAYLGLVPSEQSSGGKRHLGAITKAGNGRARRLLIEGAHSYRYPANVSTELQLRQEGLPKDIVDIAWKAQLRLCKRYQRMSKKGKHYNLIITAIAREMAAYIWAIAKEVVLTPVNPKLRLSRVPA

SEQ ID NO: 309169 - protein, 391 aa, unidentified
MSSADRVVIGMDPHKRSVTIEVMAGDETVHGGGRFATDRVGYQALLRYARKWPDRVWAIEGCSGIGHHVAMRLLADGEEVVDVPPKLSARTRVFATGQGRKTDATDAHSVALVGTRMAGLRPVVNDEQLAVLRILVDRRRSLGEDHTRMVSQLHQLLLELIPGGAKKDLSARQARALLAKVRPRDAVGKTRRRVAAELISDLERIYARKKAANKELNELLEQTGTGLLDLNGIGPSGAARLLVEVGDITRFPNKAHFASWNGTAPIDASSGDQVRHRLSRGGNRQINRVLHIMARVQIRNPSEGRDYYDRKKTDGKAPMEAMRCVKRRLSDIVFQQMLNDAMKHQATGPGGQPGNDSDSSATGSHPNAGSSDKPLPGPVTDQPRTPLPTAS

SEQ ID NO: 309170 - protein, 345 aa, unidentified
MDHFAGLDVSVKETSVCIVDEAGRIVREVKVASEPEALLKVLGNPAYRCRRIGLEAGPLSQWLFSALAEAGLLVICVETRHMRAVLKAQINKTDRNDARGMAQMMRVGLYHPVHVKTLRSQKLRMLLTHRKLLQSKAIAIDNDLRGTLRNFGLKVGMVGAAKFEARIKELVENFPDLAVLVEPLLVVRRVLREQLSILHRRLLAVARDDDVCRRLMTVPGVGPVVALTYRATVDVPARFRKSKSVGAVFGLTCAKYQSGEIDRSGAISRCGDEMMRTLLYEAAQSMLFHSTRWSWLKAWAMQIARHRGMKKAVVALARRLAVITHRIWVDGTEFRWTREQATAAA

SEQ ID NO: 309171 - protein, 375 aa, unidentified
MTEPNSHPLLPEQNREPEFAAYVAIDWADKKHYWSLRLAGSKKIERGELDNTPEAVEAWVTELSARLEQRPLAVALEQRRGALVAMLSKYAPLHIYPVHPATLAKYREAWYPSGSKDDVKDADQLLEIVCQHRERLRRLDPDTTGMRLLQFRVEDRRQLVDQRTAISNRLTDLLKIYFPQILVWFPALDAPLVGELLKRWPSLQDLQKARPAAVEKFLRQHNYRHEEDIQQRIEQIRQAIPATDDEALLDSAQFKTRIYVQQMAVLRTAISELEKKIAELASRQADYAIFESLPGAGKALAPRLMAGIGSRRERFESAGELQCYAGIAPVKEASGNSQWVHIRWACSKFLRQSFHEWAACSIPQCAWAKDPSVPT

SEQ ID NO: 309172 - protein, 355 aa, unidentified
MNDAKYIGLDVHPATISVAVLDSAGKLVMEAILETKAETILQFIHGLRGSLHLTLEEGTCAAWLHDLLKPHAASVLVCDPRKNALLKVGNKNDRIDARKLADLLRTGLLSPVYHGENGIRTLKELARSYLALTRDTTRVMNRLKALYRSWAVPCAGQRVYAPRYRSEWLAKITEVGVHRRAEIYYQQLDALRSLREQVRRDLLAEGRKHPAMNLLRQIPSIGPIRAVLLIALMQTPHRFRTKRQLWAYCGLALKTSTSGEYQIVEGRLKRSRKFLAIRGLNANHNHDLKNIFKGTATRAAAVPGPFQEFHAGLVARGMKPTMARLTLARKIAAIALIVWKKGVRFDAEHLKQQAA

SEQ ID NO: 309173 - protein, 407 aa, unidentified
MNNELYSELSSLEETRFQFNGGRCAIKMGIDVHQDFYVVVMQEGGANPKPPQRFSKEAFLQWAAKLKEKSGAEIYAVYEACGFGFGLQRKLTALGIHCYVVCPQKLDELAKRVKTDGLDAKALCLRLDRFVQGNRHALALVRVPSEEEEQQRALHRQREQLVKVRKVLEAQGRSLMVNHGIEPVQQWWKERAFAALDVPVWMKALLANNQPILLALQRKIAQLTLQLENAAAGEPPRGLGKMTSVVIDREIGNWRRFNNRRQIASYTGLCPSEYSSGGKRLQSCVTKHGNPRLRAALVELAWRMVRFQPNYRAVRKWKARLSKGQLTTGAARKKAVVALARQLAVDLWRVRTGRLTQKQLGLEIEKHRTEKQRGGSRGTVLFKHSLGTCEARARRLTGSDSLSRASH

SEQ ID NO: 309174 - protein, 359 aa, unidentified
MQRNKISFKGQKIYIGIDVHAKTWEVCVLTESGYRERHPQQASAKTLFDFLKKHFPDGEYHAVYESGFSGFATYYALKEYGIDCVVTHAADVPTTQYEEVMKTDKVDAAKLARSLRAGDIRPIYIRERENIDDRAVIRIRKTIQKQLSGYKSRVKHLLHCNGVEIPDRFASPGTHWSRAFIEWLKEDVVLLSPSRLSLDLLVKQVETIRQTLLDATRAVRRLARTDRYGSNCELLMSIPGIGVSVAMCILTEIYDVKRFRNENQFASYLGLIPTCHNSGGRTSSGEKTFRGNRHLGPMVIKAAWIAVYRDYGLGLAYARYKQSMKPQEAIVKIARKMSNIIFSLLKNGRKYEPYRWDKE

SEQ ID NO: 309175 - protein, 343 aa, unidentified
MQTITTIGLDIAKSVFQVHGVDAAGEVVIRRQLKRRSVLAFFQKLPPCLVGIEACASSHHWSRELQALGHTVRLMPPAYVKPYVKRQKNDAADAEAICEAVTRANMRFVPTKTLEQQSCLMLHRTRHLFIRQQSAVINSIRAHLAEFGIVAPVGRKGVTELLHVVADPSDKRVPEVGRTCLAALGDQLLGLKRQILEFDRMIMAWHRSNQTSKRLHYIPGVGPMLATALVASVADPGAFRSGRNFSAWIGLVPKQHSSGGKDRLGSISKQGDRYLRSLFVARALAVIRYAKIHGTRHRPWLTALLGRRPTKVAAIALANKIARMAWAMMAKGERYKQPAALAA

SEQ ID NO: 309176 - protein, 367 aa, unidentified
MSTIKFIGLDVHKETIAVAVADDGRSGEIRFHGTILNTPEAIRRLVSRLATPDATLHFYYEAGGCGYGIHRQLLGMGMDCSVIAPSVIPRKPADRVKTDRRDAEMLARLLRSGELTAIWIPDPAHEAMRDLVRSRRQVRQDLVASRQMLLGFLLRHGRKFTGRTNWTKAHWRWLGSQAFEIPHQQFILGESIRRIEEAQQRCDRLDTMLMEALPRWSLAPVVKALQALRGVGPIVAITLAAEIGDLSRFETPKQLMGWLGLVPSEASSGTRTRRGAITKTGNRETRAMLVEAAWSYRLPAREERRYRARVEDLPEEIRAIAWKAQVRLCQRYRTLAASGKALPKVITAIARELVGFIWDIGRRVQPT

SEQ ID NO: 309177 - protein, 411 aa, unidentified
MELTPLYKRVIGLDVHQAQITACALIEGPDGTTEIERRTFGAFKRDRRALADWCASHTPDLVVMESTGIYWKSPYAYLEKVGIRAIVVNARHVKQVPGRKTDVADAEWLATLARAGLLRASFVPPAKLRALRLVSRQCQKLGGQLSSEKNRLGKVLADAGIRLGVVVSDLHGKSARAMTKALIDGATPEAALVHASKQLKAPRKEIEAALDGELGATERFVATEILRHIEELEAQIARFDTYLLNNLSEPVERNALTLLQTIPGIDRIGAAMLLVEVGITMSDFRGADTLASWSGLCPGNNESAGKRKRAKSRKGNPYVRRLLCEFANAATKTRCAIQAKYQALVIRRGRKRAIIACAHKMLRIIFHMLSRKQAYRDTTVDIEALIVKRNAPRWIRALTRHGLLPSAAATR

SEQ ID NO: 309178 - protein, 462 aa, unidentified
MQYGGEPDETQSRSVDWEANAAGIDCGSAEHYVAVPPDRDPNPVQAFTTFTSDLLRLADWLTACRVTSVAMEATGVYWIPIYEILEARGFEVLLVNARHFKNVAGRKSEVADCEWLRELHSVGLLRGSFRPTDGVVALRAYLRHRDTLVETASTYTLRMQKALVQMNLQLPLVMSDITGVTGLRIVRDIIAGERDPERLARHRDPRCRATHGEIVAALTGNYRPEHLFVLHQNVELFDACQAHIAQCDTAIEAHLRALTAAVAAPAAPLPASRSRRKTPKDNDLRFDARPALFHLTSGVDLTQFDGLGSHTALKLVSEIGTDMTRWSTEKHFTSWLTLAPKNKITGGRLLSSRTQPSANRAAAILRLAAMTLGRSDTALGAFYRRVAARRDKPHAVTATARKLAILVYRALKGELVYRDLGAAAYATQQRSRLLHRLRQRAATLGFELVNRTTGEVLATGVS

SEQ ID NO: 309179 - protein, 402 aa, unidentified
MNSVGIDISKGRSMIAVMRPFGEVVISPFEVRHTDSELSELARQLKSLDGETRVVMEATGNYHAPVAQLLHDAGLYVSVVNAKLVHSYGNNDLRRVKTDRKDAVKLANYDLDRWLTLPRYIPEENTRLLLKNCYRQYRQYSKVQTVLKNNLISLLDTVFPNANRLFNSPARADGSEKWVDFVAEFWHCKCVCERSEKAFVNKYQRWCRKHGYNFSEDKAHAIYDEASGHIGVMPKAETTKLLVEQAVSQLRTTSAALAALKQEMHSLASQLPEYPVVMEMFGIGPTLGPQLMAEIGDVRRFYSKKALVAYAGIDAPPNDSGDVIGRHKSMSKVGASSLRRTLFLVMSIYLQTSPPDEPIYQFMDRKRTEGKPYRVYMMASANKFLRIYYATVKAYLESLEQI

SEQ ID NO: 309180 - protein, 345 aa, unidentified
MAAYVPIDLHRHRSVVMHMADDGEVLGWARLANDPETLVAEVLKAGEAPEVAIEATYGWYWAVDALQSAGANVHLVAPSKLTAFEGRRVKNDQRDCKVLGDLLRSGMLPEAWISTPQVREWRELVRYRAKLVALRSGFKSQAHAVLAKHGLAVPMTDLFGVGGRQLLAHICSTDVRFHSAYGQRLESLVVLVDAFDAEIAELTDSIAHMFRDHAGYRAIQQVPGIGPIIAAIFVAEIGDVHRFHSAAHLASWCGLTPRHRESDTTVRRGPITKQGSKLIRWAAIEAAQRLGQDTWLYAERERLAERRNSRAIAKTAIARKLITLTYYGLRDGEIRCLNRPTSRAA

SEQ ID NO: 309181 - protein, 346 aa, unidentified
MTQEYIGVDLHKSFFQACAVSATGERQWEGRFHRTAEGLAQFVARGVGVDQAVAVEASGPTWAFVDALTPTGARICVVDPRKTRLKAGMAAKTDRLDARRLADALRRESVVSIYVPPPAIRELREVCRGRHQLVRLRTRLAQMIRALLLRCDAGEPPGTRLYAPRALKWLSEVSLPPDAATTLQRLEGLYRAVHTEAQAAEADLRQRAATDPIARALDALVGIGPVVALTLRAEIGDITRFRRGPALASYAGVVPRVDRSADRVYHGRITREGSPWLRWVLIEAARHAIKRQDATGRWARRLAVRKGGAKAYVALARVLCNDIVATWPRTTEGPTSSPRADDRERA

SEQ ID NO: 309182 - protein, 463 aa, unidentified
MKHRSKKRKATQRRKPESFPIININAAGIDIGSGEHYVAVPEDRDEQPVRKFGCFTTDLQAMADWLEQCRIDTVVMESTGVYWIPAFQILEAHGLQVTLVNARQISNVPGRKTDVSDCQWLQQLHTYGLLRGSFRPADFICVVRSYWRHRDNLVRYAGAHIQHMQKALTEMNIQLHNVISNITGATGMRIIRAIISGERDTKKLAQMKDSRVKSSADTIAKSLQGDYRPEHLFALKQALELYDFYQTQIAACDKELEDYMGRLEPKVDIQADPLPKTKKSSRGSRKNEPKFDLRTHLYRISGVDFTQIDGIDVTTAQTILSETGLDPSPFPSSKHFASWLGLCPNNRITGGRIKSSRTRKVSNRAADAFRLAAQGLTNSKSALGGYYRRMRARLGAPDAITATAHKLSRIFYHMWTTGEPFHDPGVNYYEQQYQERIIRNMKKRAKSMGFEIQLIPIPENLVT

SEQ ID NO: 309183 - protein, 352 aa, unidentified
MRPDYQLFVGADSAAASVTVAWQAPGAAVSRPITIEQTPAGFAALRQRLLATGEAPATILVVMEATGSYWLALAQALAAHGFAVSVINPLQAHRFAKALLRRAKTDAIDAQTLAQLAAMLQPAPWTPPPAIDEELRQRLTQRDALLALRQQVRNQRHALLHGPTVVLSVQARMEDLIDTLTAQIAAVEAELAAVVDQDTAWAVAIRRLQSIPGVGRLTAAWLVVRTLNFTLCATAEQAAAYAGLVPLPRESGTSVRGRPTIGRGGNGRLRTALYMATLSAAQHNPIIKPFYDRLRAVGKPKKVARCAAARKLLHLAWAVGTTQQALRPRISTTTTRTFPCPSRLTRNTISNI

SEQ ID NO: 309184 - protein, 342 aa, unidentified
MHVVGIDTHKATLAACAIDDLGQVLGERTFPNAPAGFTALAGWLGELGGIERIGLEGSAGYGAGAARFLLAAGETAVEVPPGLSHRERTRTRRAGKSDPGDALAIARVTLREPDLPPVRLPDASREIGLLVEAREDLVAEATRIRNRLHADLVVLVPGYGLAAANLVADKHRRTAARLLRRLPGVHGELARDRLSRLGRVSLEVRSLERRIEALVADHPLRTLPGAGALVTAKLVSEAGDVRRFRSADAFAMLAGVAPIPASSGQVSRMRLNRGGNRQLNRALFSIAFAQVRTYPPARAFMARKRAEGKSWREAIRALKRHLARVVFRLLSLPVIQVPSAGA

SEQ ID NO: 309185 - protein, 348 aa, unidentified
MNRLSKSKSDDKVSMSVGMDLHKNYQQIAIMNEEGRVLRNSKIDNNLRQISRFFDLVNNDKAHVVMESSSVWYNIYRYLSEERSFDVVLSNPVKTRAIASAKIKTDKLDAVKLADLLRGGYIAECYVPNNKIMELRELVRHRIVLVRMRTKLKNSIHGIMLMKGIQLSNTCTNTFTLEYIDELKKLNDYRINHYISLIESLDQEIKDVSKKIILLAKENKMAKLLTTIPGIGHYSALFLVSEIDDINRFPDSYHLCSYAGLVPSTHSSGGVTYHGNITKTGSKHLRWIMLECVHAHIRTDKSSNITQFYQRLAKKKGNSKAAVAAASKLLRVVYWVMKERREYQHRCS

SEQ ID NO: 309186 - protein, 344 aa, unidentified
MTTKCMAGIDLHSNNLFCAIVDMEGKRVFEQRLPCHLESVLQALKPFKKRLEKIAVESTYNWYGLVDGLQDHGYPVVLANPAAMQQYDGLKHADDKSDGFFLAEMLRLNILPTGHICDRQVRPVRDWLRRRMGLVQKRTSLILSLKSLPTRMTGRDLGTGRIKALEPKDAETLFEHPADPLITRLDLQLVEQLGQGIKTIEAAILARVKSLPSYQVLQTIPGVGKILGLTITLETVDPQRFASPGDYASYCRCVDSRRLSNGKKKGENNGKCGNKYLAWAFVEAANFAQRYDTACRRFYDRKKAQVNGIVATKALACKLAKAAWHMMSHNTDYDAGRMFPKAKK

SEQ ID NO: 309187 - protein, 344 aa, unidentified
MQITTIGLDLAKHWFQVHGVDASGKVAVKRRLRRSEVVEFFKGVTPCLVGMEACATAHHWARELIALGHEVKLMPPAYVKAYVKRNKNDAADAEAICEAVTRPSMRFVPIKDVDQQSVLMLHRARALLIRQRTMLVNALRAHMAEFGVIAPQGLRNVEQLIAAISDARTVLPELARSILQLIVGQLTDTAARIRLLEARLAKWHRTNTVSRLLASVPGVGIMGASAIAATVTDPSLFRSGREFAAWLGMTPRQNSSGGKERLGGISKRGDKYIRSLMIAGAVAILRHARNRTTKDAEWVRGMLARKPAKVVAVALANRTARIVWAVMRRGSAYRATESLGPAAA

SEQ ID NO: 309188 - protein, 372 aa, unidentified
MKKTTRWVGLDVHAETIAIAVANKDGTVTSVGTIPNRPDAVRRALKKLADGGKLHACYEAGPCGYGLYWQLAEMDIECDVVAPTLIPVKAGDRVKTDRRDAEKLARLLRSGDLTAVWVPDAEQQALRDLVRARHAAKRDQLRHRHRLGKFLLQLDVRRPEKVAAWGTKHMTWLDAQKMSHASHQEVFVDYLNEVKRAKERIERLEKAIDTGIERAPRHLQDLIAALQALRGVAKIGAATLVTEVGRFSRFESPRQLMAYVGVVPSEHSSGGSTHRGSISKTGNARMRHVVGEAAWSYRHRPSNGPALKKRQEGQSEDVKAIAWKAQHRLHQRFQKLSAKGKHHGRVVTAISRELLGFVWAIGCKLEAKLDAA

SEQ ID NO: 309189 - protein, 342 aa, unidentified
MKDTTISVDVAKSVFEIAVSVHPGRVDETHRLPRPRFAAFFAARKPTTVVMEACGMSHHWGRELQNQGHRVVLLPPHAVRPYVPRNKTDRTDAKGILEAFRNQAIHPVPVKTVAQQAIAALHRLRSRWMATRTSRINTVRGVLREFGLPIPVGSRQVVPAVRVALEDADSGLPDAIRPALATACDEIRDLEARIASVEHQLEALARETPVVPVLRSVPGIGLLTATALVAVVGDIARFPSGRHFASFLGLTPREDSTGLRRRLGAISKRGDCYLRMLLIHGARAVLCHAKKADTHDRLRAWALEREQHRGHNKAAVALANKMARIAWAVWKKGVPYQDTQTA

SEQ ID NO: 309190 - protein, 428 aa, unidentified
MTPSSESALSRTFVAIDIAKQVHDVLIEPPTGSRQRWRMVNCQRDYMVLRQRLRAWQTPVVIGFEATGTYHRPLAYFLHQCGCELRLISSLAVARTRDALYNSWDKNDPKDAQVLLHLLKTGVSQRYHDPLVHAMNDLQELAQTHYQVSLRKVQVQHSIMTHYLPLYFPEAERYYTNSRAQWFTRLLHRFPCPGAITRYEPEAFEQEAWTIVGRKVNKRGFLHDLYTTASQSVGLPVAEDSGAIQMFRVILAEHQQLCARRAAIEQQADQTLCTQPDYLRLRTLPGVGPILALTILAEAGDLRRFPHHRQFLKFCGFDLSTQQSGQFRGMSRLSKHGNARLRYAFWMAAQGAVRMRENTFREKYARYLKHDPQNPDRKRKALCAVAAKVARVAHGLIKTGTDYRPYFEATPPSGVLRSHGPSRQSLTS

SEQ ID NO: 309191 - protein, 321 aa, unidentified
MSAPSAVTVGIDVAKAHVDVSVLGANLDIRRFNNDAEGHSALAVALQPLNVQLVVMEATGGYETELACALQGAGLPVAVVNPRQARDFARSMGRLAKTDAIDARMLAELASVLLRRDDLSRLLRPVPDERQQWLAALVTRRRQLLTMLLSERQRLQITPVGLHSSLLAIIAAIQAQLDDIDAQMVAHVRQHFGELDRLLQSTHGIGPVSSACLIAELPELGRLNRRQIAALVGVAPIACDSGLRNGRRRVQGGRFAIRRVLYMATLTATRYNPAIRAFYQRLKAAGKLSKVALVVCMRKLLTMLNAMVKTNTPWDDSLHRA

SEQ ID NO: 309192 - protein, 347 aa, unidentified
MNNSDLDFAPCGIEVSADLLVVALRRPGQAAGRREFPNTPDGHQALLRYLERSAGRVRVCMESTGLYGLDLALTLHQAGVAVMVANPRAVRHFAQALLQRSKNDDLDAGVLCEFAARMPFVAWRPPSPAALKLVAVARRLEALTDILAAEKNRLHAASVSQAIPPIIRLDVQRSIQAQQRAIERLTRAAQEFILGDPELGRRYELLLSIPGFGATSALHTLAELTLLPAGMEVRQWVAYAGLDPRQYQSGTSVHKKVRISKAGNKHLRRALYMPALVAIVREPHLRAFYEHLLARGKTKMQALVAAMRKLLHAIFGMFKHNQLFEGEKVYAATATAPTLTPCVVEVL

SEQ ID NO: 309193 - protein, 347 aa, unidentified
MDHIGIDLHKNQSQLCILTEDGELIEKRIATTRTRFAAELGNRAKARILVEASTESEWVARCLEELGHEVIVADPNFAPMYASRTRKVKTDRRDARALAEACSNATYRPAHRTSDRQRHIRALLAVREALVRTRSRYVGLIRALLRREGLRVRSGNADSFARRLRELELPAHLEQEIAPLLVMLRELNREIDAAEKSIVEATKNDRVVDLLCTAPGVGIVTATSFVATLDRVDRFQRAQQVQAYLGLVPREMSSGEKQLKGRITKSGNKRTRYLLVEAAWGVLRTKGAEAKPLKEWTQRIAVRRGKKIAAVALARRLAGILYAMWRDRTEYRAELVGRPARQVEVAA

SEQ ID NO: 309194 - protein, 401 aa, unidentified
MKRLSGGIDIGSESHHIIILDEEDNVLYNKKITHKIDEFTKSINLFRKIEKKERGKLSFALEGKNGHSNPLDRILLNKGFTLYNIDNLKLKRFREAFAGEWRDDERDSLMLSKMLKLKDHINSQREKVFIKIEKPSPVTESLKLLSRHQQTLINEKVRLTNRLRKKLLEICPQILELGKVKNKKIIAILAKYPDFSKYKRITLKSLLKIKGIGKRQAPFLLKRLNNIEYMPGLTDIYKTIILSFTKRILVLREEIKDIDKKLDEIGNQSKEVNHLKTIPGVATKLASRLIGEMGDITRFPSEKKLAIYCGVACVDNNSGKVTKAKAVYKANKICKQTLITMAGGSIRLSLQCKAYYLKKRMEGKSHNHALRCLARQMIKVIHRMLTEDRDYIVRKELKKVA

SEQ ID NO: 309195 - protein, 358 aa, unidentified
MNRSTGMNAGQIIGTMNDLQVVGLDIAKHVFQIHTVHMGTGEISNLQIRRAAVTEYFANKSPCLIAIEACGGAHHWARELKKLGHTVRLIHAKVVRPFVVGNKTDATDARAIWLAVQQPGVKFVGVKTAEQQATLTLHRQRELLMKMRTMQTNALRGLLYEFGATFAKGRNALFKDIAQTLENLADKLPQMVRDSLREQLERIKALGQDMLAIEKRLALQLKADPQMQRIVQIPGVGVLTATAALATMGDANAFKSGREFCAWLGLVPTQTGSGGKVRLGNISKRGDIYLRTLLIHGARSVLHHVKEPGPWLQQIKQRRPANVVIVAQAAKMARTIWAVTAKQQDYQRGFKSVRPLAA

SEQ ID NO: 309196 - protein, 415 aa, unidentified
MNRLIERCAMLDVHKSQVTACVRVPDGDGGRRQEIREFRSTTAGLITLADWLRSWAVTVVGMESTGVYWRAIYYLLEDEFECQLFNARHLRHVPGRKSDVQDAEWGCQLIEHGLVRTSFVPPRPLRELRDLVRYRKAKIQERGREVQRVEKTLQDAGIKLSSVASEVLGVSARKMLDALISGTHDPDVLAELAKGALRKKIPALKEALEGRFTGHHALLIGQMLAQIDFLDETIATLSARVEELTRPFSREIELLDTIPGVDKRAAEMLLAEIGPDMSRFPTEHHLASWGGMCPGQRESGGKKHSAATRKGSKWLRGTLTECSKAIVRTKGTYLSARYHRIKSRRGHAKATVATGHKILTAAYHVLNQGVPYNELGEEFFYRRDTENTERYRRRLVKQLERLGHQVTLQPLPEAA

SEQ ID NO: 309197 - protein, 392 aa, unidentified
MIFIGIDIAMNKHDIIIINDLGEIIYDHFIIQNNLSGYKKLHTVIKSCTKSVNDIRIGMEATGIYHNNLRDFLISKGYTVYCTNPMLVSNSRKSMSPRMTKTDKIDAIAVCRHLMYNLDKLHPYTPPLYHLVELKQLTRDYESNKKNLTKEKCELKRLLQVIFPEFLKHFKPFSKWSLDLLSDYPLPSDYKGLHIDSLANRIGSHSNHFEQAKLLKHIAEYSIGNSSGLNSHLLKFCISNIIHYDSQNKELKKIISKTMRLFPQILSVPGIGPINGATILGETGDITRFPNKHKYTSLFGIEPIVHESGKYKRKRTKISKRGSKYLRTAIHSAARAACVNPFTKDNKFKRKYQLLISKGNKHHNAVLFAIAKNMVHSIYTILKYNSFYNDKL

SEQ ID NO: 309198 - protein, 406 aa, unidentified
MNTGTITAVGIDVSKHKSTVAARRPGGEVVLLPFDVEHTAEGLKKLITKLRELDGEIRIVMEHTGMYWRPIAMTLKEAGFYVSVVNAILIHNFSDNSIRKVKTDRADAMKIANYGLTFWSDLQEYAGEDENRQLLKIQSRLYERTATTAGMLRNGLISLLDQTFPGANKLFRDESRNSKGHVKWIDFVLRFWHKECVAALSLATFTDTFQKWCKRTGYKFSASDAERIHAIARNAVATLPKNDSTKLLITQATNSLNAIYDSLQAIRTEMDRLASMLPEYELVMGMEGIGKVTGPQLMAEVGDVRRFSHKGALVAYAGVDASPYQSGSFDSKSRHVSKRGSPHLRRVLFVIMSMTLIRANTANPVFCFMDKKRAEGKHFYVYTVAGSAKFLGSVKYFSQNGLQALA

SEQ ID NO: 309199 - protein, 348 aa, unidentified
MIIIGCDFHPSWQQICWLDEATGETAEQKLVHAAGDAQRFYQPLAAPAQIGMEATGNCQWFVEMVKAAGHEVWIGDGARIRASDVRQQKHDRRDAALLLQLLLEGRFPRIWTPSSEQRDLRQLLIHRYKLVRLRAQAKNGLQHLALNQGLQRKRRLWSEAGQKLLRALPLKPWASRRREDLFGVMELLDRQIGSLDDAVKEAAEKDPNARLLMTQPGVGPVTSLAFVLTMGDVTRFARGKQVASYLGLIPREYSSGGHQRLGSISKQGNRFMRMLLVEAAQVAVRCDPQMRQEYLHRCHQKPKGVAKVAAARKLALRLYWMLRTQKRYPEIVSIESSSRVPLVVRHSG

SEQ ID NO: 309200 - protein, 388 aa, unidentified
MLPSIHCTSTEQTATVQPDLTLYASLELSRSTWLVTCLSPERDRMSKYSTPGGDGGALLGLLERMRARGQQLTGRPVQIVAIQEAGLDGFWVHRLLEANGIESHVVDPASIAVPRRRRRAKTDAIDGETLLRTLLAWTRGEPRVCAMVVPPTPEEEDRRRVCRERAILLQERIRHTNRIKGLLAGQGITGFNPLHKDRRQLLDAARTGDGRPLPHQLKAEILREIELIELLLRQIADVEAAREALAGPKAAKASSPIVLLKQLKGIGPEIASVLYFEGLFRSFGNRRQLAAYAGLAPTPWRSGTVDQEQGISKAGNPRLRSTMIEFAWLWQRHQPASTLSRWFHSRVGKERGRIRRIAIVALARKLLIAVWRYVTQGEIPEGAMLKAA

SEQ ID NO: 309201 - protein, 345 aa, unidentified
MDHVGIDLHKRESQICIETELGEIVERRIRTDRERFEAVFGSRPRAKILLEAMTESEWVARCLEALGHEVVVADPNYAAMYATRSRRVKTDRRDAVTLADACRLGAYRPAHRASDRQRHVRAELAVRDTLVRTRVKCVALVGALLRRHGVHVPSGNVDGFIGRVERQPIPEEQRLEIAPLLTLIRTASVEVTAADRRIAAIAADDPVIQRLRTVPGVGPVTASAFVATLDTWERFEGPHQVEAYLGLAPSEKSSGERQHKGRITKAGNSRARWLLVEAAWAILRSRRDDTEPLRRWAQRVALRRGMKVGIVALARKLAGILYAMWRDGSTFEKREGRAAAESTTA

SEQ ID NO: 309202 - protein, 357 aa, unidentified
MIVIGVDTHKCTHALAAVDEGTGRSRGQLQVEADEDGHLAAVRWAARLDGERVWALEDCRGVSARLERALVAAGERVVRVPPHRMGASRRAERERGKSDQIDAHAIARAVVKDGADAFAPAHLDERALEIRLLCDHRTNLVAHRTKLQNRLRWQLVALCPERERSIKRGGLSQTVVLERLDRALRAIGDTRARIARELITQIRQHTRRIEELHTQLTALVKHYCPRLLREQGCGTVCAALLIGHTAGAERFGRDGQFAMHAGVAPIPCSSGQRQKVYRLNRGGDRQLNHALHIIAVTRARTDPATRAYIERKLAQGKTPKGALRCLKRHLARHIHRLLTTPPTTQTSPAPPLMPCTQ

SEQ ID NO: 309203 - protein, 465 aa, unidentified
MPVRPQQPGRANARRPQTKPAGPPRPWVITHPHAAGIDVHSDTHWVCVGPGPDGVRQFGAYTCDLRAVADWLAARGVTTVAMESTGVYWIPLFELLEARGFDVHLVEPGQLHSCGGRPKTDRLDCQWIQRLHTYGLLKGSFRPPDALLALRGYVRQRQTVVRAAASHVQRVQKALEQMNVKLTEVLSDITGVSGTKIIDAVLAGERDPVVLAGHASPKCAADRAEFAKALAGTWRAEHLFALKQEWELLQFHHRQIDACDEQIRAELGRLPDRAGAKAVPVKPRQRGRKKNDLRFSACGPLFRALGVDLTAIDGIDVGTALVILAEIGVDVSKFPTEKHFAAWLGVSPRTGRSNRTEKRGRPRRGKHRVKQALRMAAQAVGRTQTPLGAFYRRIKSRIGGAGAVTATARKLACLVWRLLTHGAEYVRQGLDEYEGRVKAKLAQALRRKAAALGYELVAKPTPAPA

SEQ ID NO: 309204 - protein, 316 aa, unidentified
MEHYAGIDVSLESASLCVVDATGRIVREAKVASEPDVLIGWFRGLEFAVTRIGLEAGPLSQWLYAGMREAGLPVELLETRHVRNAFKAMPVKTDRKDARGIAQLMRLGWFRSVHCKSLPAQEVRALLTARKLLQTKNHDVEMSLRATLSTVAEALLAARGTLFEQWQKLEKRLRSLAREDRRVRLLMTAPGVGTIVALTYASAIDDPGRFRSSKAVGAHFGLTPKKYQSGETDITGRISKIGDGGVRTALYEAANVILTRPVKGSTLKSWGMRLAARTGMRKAKVALARKLAVVLHRMLADGTSFLANKAAPAVAR

SEQ ID NO: 309205 - protein, 340 aa, unidentified
MFKNFVGIDVSKSKFDMALIKGHDKDHVIQGVFDNTQKGIKSMSKFLEKEHHVQLSETIFCMEFTGVYCRPLTSFFVEQDCHVWIEMPVNIIRSLGLQRGKNDRVDAYRIALYAYKNRDDIKLWTPQRDIILQLRDLLALRERLISSQKALTNPIEELVAMGAKSAASRVRKGCQKTLSSIEKEIKQIEKDLDDIIKEDPNLKELFQLATSVPGVGKLTALFMICFTNEFSMYTNPKQLACYCGVAPFEHSSGSSIRGRTRVSHMANKVLKRMLHMGAMSVISRDPELRDYYQRKVAQGKNKMLVINAVRNKIIHRLCAVIKRGYGYKSENIFKERLVLS

SEQ ID NO: 309206 - protein, 331 aa, unidentified
MKKNSIIVGIDVSKSTLDVHLHSTNFHFVVDNTSKGFVELLETTCKTCNCKKQALFFCFENTGKYSRMLSVFLHSQSITFAMVPALEIKKSIGMARGKDDKICSRRIANYAFEKKQKLTPTVLPGKEIDRIKMLLSLREKLIKHRTAYKNGNQDLHDCFEEGETLIIKESQNRLINSLNEEIGLLENEIMEIIERNEMMARNYDLIQSITGIGRITSWYLIAYTGNFTLFSNARAFACYAGIAPFAYSSGTIVGKSKVHHYANKQIKSILNMAAMSAIKIKGEFKVYYEKRTHQLGKNKMSTLNIIRNKLLYRVFAIINRGTPYVNLYKFA

SEQ ID NO: 309207 - protein, 360 aa, unidentified
MNKKLNHLGIDVGKRKCRAALKDDKGKILDEFFFGNNSDGISDLINRIYDHGTKECNAVLESTGNMWMRIHDTLEDNGIDTILANTYKTKIIAQAKIKSDKLDARILSDLLRTGLIYESYVPVKEFRDKRSLVRHRIALSRTRTKLANKIHSILDKYEYRTELTDIFGKSGIEWLKSLSVSPIDRIILDTTLTSIESIDNQIQIVSKEIARYAWQDNKDVKILLSMTGIDIFSAMLISTEIVDIHRFSTPWKLVSYAGLAPSMRESSGKIKMGRITKQGSPLLRWILVQCALSAIRYDHHIRTFYERIKQRKGHGRAIVAIAKEMLVIIWYMLTRQQLYRYKNRTRYEQKLERLKKIGSK

SEQ ID NO: 309208 - protein, 355 aa, unidentified
MHTKIVKMDYTGQNIYAGIDVHKKSWRVSIYSDHLYHKSFTQPPNPKLLHQYLMKNFPNGTYYTVYEAGFCGFWIHFNLESLGINSLVVNAADVPTTDREKKYKTDKIDSHKLAKQLRNGDLNAIFIHSEDHLEDRYLIRTRRTISKELTRYKNRIKSQLFFWGITIPPEFDRENFRWSNRFITWLEDIELSSHTGTESFRFLLNHFKNLRQDLLHITKKIYELSTNEYYQKRVKLLTSIPGIAVITAMTIITEINDINRFKNLDKLASYVGITPTSHSSGEKEVHGEMINRGNNYLKSIIIECSWIAARRDPILHNAYIHLSKRMNKNQAIVRIARKLLNRISFVLKNEIAYCA

SEQ ID NO: 309209 - protein, 427 aa, unidentified
MKKADLLSTLFVGIDISSRENVVALLDFESSKPILSFAVANNQPGAVDLAQKLADFLSSHRDLSRLMIALESTSFYGIHIANYLSSCQLLMPFHTAVYCVNPKMIANYKKSFIDLGKNDYIDAFVIADFARVGRITIHPWRGSQFLALQRLTRHRLHLAKSLTREKAYMLSNIFLKFSEFSLLDEEAQPFSNNFGATATSVPTDFLSTEEIADMPIDTLISYICEKGHNRFPDPKKTASLLQQAARNSYRLDKCLYEPLTISIASSLNLITTYMAEMKSVNKAIEKTLKGLDPNAYQCLLSIPGIGPVMAAGILAEIGYIEAFKSQDALAKYAGLVWRENQSGQFAAEDTRLSKAGNAYLRYYLIEAVSHVKNHCGEFTAFYQKKYDEVKTHQHKRALALTARKFVRLIFGLLAKHQLYSQSRVSQS

SEQ ID NO: 309210 - protein, 345 aa, unidentified
MHIASIGIDLGKTTFHLVALGERNKVLLRKKFSRPQLLAYTANLPAALIGLEACAGAHFVGTALREQGHQVRLIPAQFVKPYRKSNKNDFLDAEAIAEAVTKQNMRFAQLKTQEQLDWQAMHRVRDRLVRRRTALINEIRGFLLERGITFAAQPIHLRKNLPAVIEDAEQNLSPRLRWLLDRMRQEWQQLETDIQTITDEIEHISNEDARCRQLLQIPGFGPLISTATVAAIGNGAAFRRGRDFAAWVGVVPRQYSTGGKQKLYGISKRGNVYLRRMLIHGARSVLFRVKYDTGGFGQWVHRLAQRAPHNKVVVAIANKLARIAWAVLSSGQDYRHQPLQQLAAA

SEQ ID NO: 309211 - protein, 411 aa, unidentified
MEAIIERCCGLDVHQATVVACVLVGSADQRAKKQVRTFGTTTRELMELGAWLREQGCTHVAMEGTGVYWKPVHIVLDDGTLSLVVGNARHIKKVPGRKTDVLDSEWIAQLLRHGLIKSSFVPPKPIQQLRDLVRYRKKLVQTRTTERNRAQKLLESANIKLASVLSDVFGTSGMAMLRALLEGDQTPAQIAHCARGRARSKLVELEAALEGRFEEHHRFILRLQLGRLEQVEADIDMLDSRIEAQLAPWKEQRTLLQTIPGVSRVASAQIVAEIGVDMSAFEDEAHLASWAGVCPGSHESAGKNKSGKLRKGNRHLTAALVEAAQAAARSTRTYLRDKFHKLRVRRGHKRAVIAIAHKILIAAYRILRDMVPHRELGDGYLDSRSQRTVVSSLVHRLKRMGYDVALTQTAT

SEQ ID NO: 309212 - protein, 371 aa, unidentified
MNSIIYAGMDVHKENYTLCCYRFEDDEVKYKQTLSPDYKDVLKYLETARKLYGEESEFICGYEAGCLGYALYRQLTDRGVKCIIIAPTTMGIINTGGVKTDKRDAANIAKCLAFRTYSEVNVPTQKDESVKEYIRMRDCQKKALKIVKQQILALVLREGCRFDGGKNYWTIKHVSWLKGIDMGGVLQESLDEYLITYKYLIDKIERLDQRIEELAKDDDYKEKVKKLSCLLGVKTHTALSVVAEIGDFNRFPKAEKMAAYIGLVPGENSSGGKIIRTGITKAGNSHIRRLLVESAQSYTRGTIGHKSIDLKKRQSGNAPEVIAYADKANERMRRKFYHMVLKNNVKRNVAATAIARELACFMWGLMTNNIA

SEQ ID NO: 309213 - protein, 365 aa, unidentified
MKKSSTAKAASNKNFERKLTIGLDLGDRSSWYCVLDEAGEVVGEKKLGTTPKAMKEVFGAMPRSRVALETGMHSPWVSRLLSELGHEVIVAHARNVRLIGESRRKDDRLDARTLARLARIDPQLLSPVKHRSAQAQADLTVIRARASLVRARTALVNTARGLTKSYGERLRGCNPRNMDAEKAQSLSPELQAALGPLLQALESLSERITEYNQRIEAIAQQSYPQTALLKQIKGVGTLIALTYMLTLEDPHRFRKSRDAGCYLGLQPGRRNSGQSEPQMHISKEGDPYLRTLLVQGAHHILGPFGADSDLRRWGLKLAERGGKNGKKRAIIATARKLAVLLHRLWVSGEVYEPLRNTKRTRLVAA

SEQ ID NO: 309214 - protein, 436 aa, unidentified
MDQVIIGMDPHKASVTIEARDTREVLRATGRFGTDNRQYKAMLQVARQWPERLWAVEGANGIGRPVAQRLLADGERVLDVPAKLAARALFDTCQGRKTDATDAHAIVMVALRDKGLREVGLDPALMALRLLCDRRDEISHARAQALNRLHRLFLELLPGGAPVKKSTAQYKALLATVRPRDVVGKTRRRMAAEELADVARYDAKLKAMKAELKAAVQALGSHLMDIHGIGPAGAARILADVADVARFPDRNHFASWTGTAPIDASSGEHTHHRLSRAGNRRLNHVLYMAGIVQLRNDTEGRTYYRRKCAEAKTSLEALRCLKRRLFDVVYRQLVADAKARAAFVEETGPGGHSGATLSSSATDLTPDIGSSDKPQPGPAPTTLPSQAPTRKTSGSRTAATSRRRAGGVNVERHTGRTTLTPTSVGAHSTASRTPTP

SEQ ID NO: 309215 - protein, 385 aa, unidentified
MGSQTFIPRDYDVFAGLDVDKKSISVTFTDHQGFLKSMRMPYSVEHLVNHVRKHYGDKKVAFAYEAGPTGYGLYDGLVAQQYPCLIASPSMIPKAPGQRVKTNRLDSVGLAENLRGGQLKSIHVPTTLYRELRHLTQLRDALVSEVAAMKQRIKSLLLMEGLEFPPAPPGSQWSFVVKAKLRKLPCSSVVRFKLDQLLDNLEFGEKQVLKTTREIHRFCQNDPELSQCIGYLKTLPGIGWIVASQMLARVGDWRQIKNIRQLPAFLGLVPTESSTGERITRGSITHSGDPRLRSKLIQASWSAIRQDGELLEFFRTVVKKHPSPLGPRVAIVAVAHKLCVRAAVVLMKQRPYEMREKVQSAPLTQEETVPQGTTRRRRVPGDKTS

SEQ ID NO: 309216 - protein, 367 aa, unidentified
MSNYVTAIGLDVHARSISACAFDPMTGEVVRARFGYDPASVAEWVLGFESPKAVYESGPTGFHLCRALRALGVDCAVGAVSKMHRPAADRGRKNDRRDAEWLARLLACRNVVEVWVPDDRTEAARDLSRALEDARDDLQRARQRMSKFLLRHGLVFDETTPAGRRRSNWTEAYWRWARSIEFGEADDAAAYEHYMDAVERCAEAKRELERKVEEAAARPGWAPVVDALCLVKGIDVASAFLLAAEAGDFSRFPTAPSFASWCGLAPSERSSGETESRGGITRAGNGHVRRALVEASWHVPMSTRHPKKPRPGHGVAPAVSRHAAKCNRRLQDRRDAMSQAGKRPCVANCATAREMACWVWAIALMAR

SEQ ID NO: 309217 - protein, 457 aa, unidentified
MSKRSKRTPGLETAHPFAGLRPVNPHAAGVDIGATEIIACVPGDATTQLVRAFGTYTIDLQAISQWFRAQGITTVAMESTGVYWIPLFETLEAQGFTCLLISARALRRVPGKKSDITDAQWIQTLHQYGLLAGSFRPEAELVALRTLLRHRAQLLEHRAPHILHMQKALLQMNVQLSQALSDVTGVTGLAIMRAIVAGERDPQTLAASRDPNCKKSVEEIGQALTGTWRAEHLFVLQQSLELYDFYTQQVETCDVEIARTYGETRPDWPSAPVASLSPRKRSSHSKNAPPNQEDLRQHLKRLSGVDLSVVAGFGVSLAQTVIMEVGTDMSKFPNEKHFCSWLGLAPKHEISGAKVLKNKTLKTKNRAGQAFRLAAHALQRADCVFGVMYRRLRARLGPAQATVAVAHALARVVYRMLKDKVEYEPLSVGEYEKQYEAQQLKYLQKKAAKLGYQIVSA

SEQ ID NO: 309218 - protein, 322 aa, unidentified
MKKDRVHAGVDVSKSSLDIAVYATKQHWSFPNNDKGISQAVSLLASLNPTLVVLEATGGLEVPLVAALGVARVPVAVVNPRQVRDFARAIGRLAKTDALDAEVIAHFAAAVNPAPRPLPEAMAQELTAIISRRRQLQQMITAEQNRLHTARKSMAQRIRMHVSWLEEELASIDDDLGRMVRESPVWRGKDDLLQSVPGIGPATSTSLLAGLPELGSLDRKQIAALVGLAPFNRDSGTLRGKRTIKGGRTHVRGALYMPTLVATRFNPVIRSFYQHLLSAGKPKKVAITACMHKLLTILNAMLKHGTVWNQVAPQFKFIGPCS

SEQ ID NO: 309219 - protein, 360 aa, unidentified
MNKYFGCDAHKRYSVFVSMNDRGKSGVPVRVENNRVLFREFLRELPSRSPIAIESVGNWYWMIEEMEKAGHNPLLVHAAKAKLMMGQINKTDKLDARGLALLLRNGTLPSVWIPPGELRDQSELPRMRMSLVRMRTMLKNRIHAALAKYALDIPEVSDIFGATGRMLLKNRLEDMPLYTRQSVEKQLELLDQLETHIGQCEKQIQVVVKACPAMKLLMTLPGVGMILAVVMALEIGDVTRFPGPEHLASYAGTVPRIKSSGGKSFYGKVRPDVNRYLKWALVEAANVAVINQWRWADRHVVQLYKRIMKRKGHAKAVVAVARHLAEAAYWVLRKNESYKEPGPKTPISSTRMSTRVMHET

SEQ ID NO: 309220 - protein, 347 aa, unidentified
MRFYTKQHKFYCGIDLHTKKMYLCIIDETGEIRLHRNITTDRELFLKVIAPYRGDIVVAVECMFTWYWIADLCVKEGIPFVLGHALYMKAIHGGKAKNDKIDSRKIAALLRGGMIPQSYVYPAKMRATRDLLRRRNHLMRKRAELFAHIQNTRSQYNLTDHLGRIANPHNREGVVERFDDPSVQNMIATDLAVITAYDPIIAKMERDIISSAKHHDPVAHALLNTIPGIGRILSLVILYEIESIKRFPRVQDFVSYSRLVKSAKESNGKKYGSSGKKIGNAHLKWAFSEAAVLFLKGNEPAKRYLDGLTNKHGKGKALCILAHKIGRAVYFMLKNKRPFNQKKLLGL

SEQ ID NO: 309221 - protein, 358 aa, unidentified
MQSIALQHSDVVVGVDTHKDEHVAVALDGVGRRLGEILIEATAAGYAEVLTWADELGPPAVFGVEGTGSYGSGLARFLRREGRNVIEVSRPPRRGERRLDGKSDPIDAEHAARAVLAGTATAIPKLADGVVESIRLVKIARDTAVKAHSQAMITLKSVIVTSPDELRAELKSLTDFRLMTTCAAFESAGHLSDPSAALRHVLSSLALRWLELHEEIKIHTRHLKNLTETAAPELVAEFGIGFDIAAELLVAAGDNSTRVRSEAAFAKLCGACPIPASSGKSKRHRLNRGGNRQANAALYRAVIVRMRWHAPTISYVERRTAEGLTKREIIRCLKRFVARDVYKLLPAPFIPSALENAT

SEQ ID NO: 309222 - protein, 391 aa, unidentified
MLICGIDIGKNNHEACLIDETGRQLAKTLRFENTTDGAARLLSYIHGCNQEKETTVIGMEATGHYWLSLYCFLFDQGFQVNVINPIQSDAIRNLFLRKTKNDARDSFLIAETIRIGRFSNTELADEDILALRQLCRHRMDLVDYTSDQKRRIIGVMDRVFPEYQNFFSDMFGKSSKELLAQAVTPEEILELPTDELCAILRKASRGRFGEAKTEEIRAAAKNSFGITIATSAFAMQLRQLLEMIDLLERQLDELDFEIEQYMIKLDTCITSCPGIGNVLGGIILGEIGDISRFSEPKKLVAFVGVDPSVHQSGEFVGTQNKISKRGSPHLRRAIWMAAVVAAFHDPVLSAFYQKKRAEGKHHNTAIGAVARKLTLIIYAVLRDNKPYVPNC

SEQ ID NO: 309223 - protein, 411 aa, unidentified
MVKENFIYVGIDLHKETHTAVMIDCYNQKLGEITFPNRPADFPKLVTKVKKCNTDAKEVVYGLENAYGYGRPLAVWLIDKGYFVKDVNTAISHRQAKHRGAMYRKSDSDDAEAIALATLNMLDKLPDACPNDAYWSLGQLVHRRDNIMKQRTRLVNQLHEQLCIAYPSYKQFFNDISRPTALYFWEHYPSRKYLKGKSVEDLRTELVPVSHNRCSTKNCEKILDAVASDKVKNNAYQDARDMVTLSIVSDLQHYDSQLAEVDKMLEQMYKMLGCTLTTIPDVNVITAVKILAEIGDIKRFSNANKLAQFAGIAPLHLSSSGKGKDVATKQGNRRLQATIYFLAIQMVQVSSKGTPRNSVVRAYYEKRKAEGKTSQQALICISRRLISIIYGMLKNGTEYRMPVVENAGEKL

SEQ ID NO: 309224 - protein, 386 aa, unidentified
MAQPSSVSQRAINYDHTLVLAIELSNKSWVLAAQVPGLPQTKAQRTIEPNKNALLAAIDGYRARAVAVGYVADRVIVTYEAGWSGFWLARWLVAQGIEVHVVQPSSVPVDRRLRRAKSDGIDAELLLRTLLAWLRGEPRVCSMVPIPDEADEDARRSVRERTELLSDRVGLTNQIGAVLATLGVNDYNPLLQSRRRRLVELRTGLDEPIPPNALAKIERLLARLELVLAQIAELERGRNEVAAAEAPDRAGKMIQQLTSLRGIGVQSATVLVREGFVRHFSNGKALGSYAGLTSTPYSSGGTDREQGIGKAGNRRLRTVMVELAWLWQRYQPGAAQVTWFRDRVGSTGRRIRKVMIVALARKLLIALWRFVIDGVMPEGAMMKPSI

SEQ ID NO: 309225 - protein, 345 aa, unidentified
MAIVEVTRPVTGGVDTHLDAHVAAVLDGTGGVLGVESFPTTPAGFTELHDWMIRFGDIERVGVEGTGAYGAGLARFLGGCGLEVIEVDRPNRQARRQAGKSDPADAVEAARAVLSGRATGIAKTGDGAVEAMGALLIAKRSGREARISCLNQLRHLGFCGPDDLREAFRGVPRTALGARAAALRPRVSGDDVAHATKIAMRSLGRRVLALDADNDELDALLAGLVHTTAPDLLGVYGVGVDTAAILLVAAGDNADRIRSEAAWAHLCGVAPLPASSGKITRHRLNRGGNRQANHALWRIVFTRLGSEPRTRDYLERRLAEGLSKREIIRILKRYVAREVYRHLPR

SEQ ID NO: 309226 - protein, 348 aa, unidentified
MRQVGMRPDYHLFVGADIAAASVTVAWQAPGAAVSRPITIEQTPAGFAALRQQLLATGQAPATILVVMEATGSYWLALAQALAAHGFAVSVINPLQAHHFAKALLRRAKTDAIDAQTLAQLAALLQPAPWSPPPAIYEELRQRLTQRDALLALRQQVRNQRHALLQGPTVVTSVQARMEDLIDTLTAQIAAVEAELAAVVDQDTAWAAAIRRLQSIPGVGRLTAAWLVVSTLNFTLCATAEQAAAYAGLVPLPRESGTSVRGRPTIGRGGNGRLRTALYMATLSAAQHNPTIKPFYDRLRAAGKPKKVARCAAARKLLHLAWAVGTTQQPFDPGYQQQQHAPFPAQAA

SEQ ID NO: 309227 - protein, 416 aa, unidentified
MGVDCAGETHVAVLLSEDGQLERRWEMTNRRDEIEECLSEVMLCAGEGAEIVLVVESARSYGRLVADVGRQLGFELRQVGTVALNRFRVVEGQPRKSDLWDAFLAARMEFLGVRGVRRVPEVSDSERTLSRLTRAHRRLKKDRTRKVMQLEALLLELAPEVLHTSWEGPKPNSKGMLYLLKRWPGFEGLERAHLSSIEKILHRCRYGAKSTPVARLIREMARRIVMPAEERTALTFEMSVLVEGIGTCDASLNGLDKEIATRVKRDVVGAKLLALPGIGPVRGGVLVSELLPVARVATEAQAATYSGVTPLGRTSGKTMDRSHLTEGVNKRILEALYESSVASIKHSAINQAYYKKKLKDYAGHPKPTVAALIALSRQRHKLIYKLMTTDVNYDGEILVARHLERLQAGEDAEAAA

SEQ ID NO: 309228 - protein, 401 aa, unidentified
MQQDQQHDSVDVFVGVDVGKGQHHAVALDRNGKRLYNKAMPNDEAKLRALISELRAHGRLLFVVDQPATIGALPVAIARDEGVMVAYLPGLAMRRIADLHAGEAKTDARDAAIIAEAARSMPHTLRSLRLADEPLAELTMLCGFDDDLAAQITQTSNRIRGLLTQIHPALERVLGPRLDHPAVLDLLERYPSPATLAAASEKTLANRLTKLAPRMGKNLAAEIVQALNEQAVIVPGTQAATIVMSRLAQQLAALRKQRDEVASEVERLVLAHPLWPVLTSMPGVGVRTAARLLTEVAHKAFASAAHLAAYAGLAPVTRRSGSSIRGEHPSRRGNKVLKRALFLSAFAALRDPISRAYYTRKVEQGKRHNQALIALARRRCDVLFAMLRDGTIYQPKAAANA

SEQ ID NO: 309229 - protein, 392 aa, unidentified
MYIVGIDIGKNHHEASIVSPEGKQIGRSLRFATTHKGADSLMSFIFKNIGNSPCVFGMEATGHYWYPIYSFLKAKGYTICVINPIQSDSLRKMYIRQTKNDSIDSFLIAEVIRFGQFGTTSMADENILAMRQLCRYRDSVISSRTEIKLRIGTIMEQIFPEYEKQFSSLWLSTSMGILEKYLTPENIENAPIDELFEIIKDKSHNRLTRAKAISIKDAAADTFGIKIAQDAFSFQLKQLIDRMNFHDKQIEALDIEIMKYYEQFDCYLHTIPGIGIIGAATILAEIGDISRFKNSSALVAFAGIDPTVRQSGEFNSTHNHMSKRGSPYLRHAIFLAATTCSFHNSPLNAYYKKKRDQGKHHLTATGAVARKLTTVIYAVLRDSKPYEPKKFC

SEQ ID NO: 309230 - protein, 417 aa, unidentified
MKHNQQRKRTGRSERQASVSLFERIQPDAAGVDCGQKSHFVAVPPERDPEPVREFRSFTADLQRLAQSLAQCGVKPVAMESTGVYWIPLYEILEQRGFEVVLVNARDVHNVRGRKSDVKDCEWLQQLHSVGLLRASFRPAAAMVPLRSYLRQRAILVEELTARIQRMQKALTEMNLMLHTVVSDITGVTGLKIIHAILAGARDPERLAVHRDGRCHASDQELVSALTGNYREEHLFCLRQNFTAYQFHLQQIAECDAEIEALLNLLAAQQPPPAAALPAPRAKTTKKHAPAFDIRTPLHVLTGGADLSQIHSIGPQAALQLVAEIGTDMSRWPSEHHFASWTTLAPNNKISGGRLLSSRTPPSANRVAVILRRCAMSLGRTSTALGAFYRRLAARVGKAKAATIDRALPKPRCSRIS

SEQ ID NO: 309231 - protein, 315 aa, unidentified
MHIHNKKMHRVFENCPKDIAKMIKWVLKNTDFDREEMIFTFEHTGLYSLQLSATLSELGMRYVAIPGLEIKRSLGLSRGKDDKVDAAKIALYAYRLREELESCQMPSEDLQSLKRLLSLRDRLVKQRAGYKASLKEEKRVLKQKDNKILLNAQEEMIGHFSKKIKKVEKEMNRIIKENRKLDKIYGLVTSIKGVGPQTALYMIAYTQGFTKFENWRKFASYCGTAPFPNSSGTSIRGKTKVSHLANKKIKSLLDQCSKTALQHNPEIRQYYRRRVDEQGKNERSTINVIRNKLLARIFAVVKRRTPYVDTLKYAA

SEQ ID NO: 309232 - protein, 397 aa, unidentified
MFYLGIDIAKHKHYASIIDQTGKPITKPFPFQNHKEGGQALLNWMYQYIESPTEILIGMEATGHYWLAVYSFLLDHGFSVVVLNPIQTNAWRKGTEIRKRKTDAIDATMIADIIRFGRFVETPLVDEKMFALKQMSRFRNALVSNMSDLKRKALVVLDQTFPEYQSIFSDVFGKTSSQILLEYASPSDYEQISIDDLTQIIEQTSRNRLGKKTANKLMELASNSFGVTFCKNAFSFQLKMLMEQISFIEDQIKECEEEMSQLLIDLDTPIMTIPGVGPILGATILSEIGDIHRFDKPSKLVAYAGIDASVSQSGQFEASGTSISKRGSSHLRRALFQAAITAHKHDPVLKAFYEKKRKQGKHYYVCIGAVARKLCYIIYAILKSNKPYEVPPHTTET

SEQ ID NO: 309233 - protein, 456 aa, unidentified
MSKFRIKKKSKKFKAADLPTELKHVNLDAAGIDVGSDRHMVAVPVGRDEVSVREFGAFTTDLHALADWLEKCGVTTIAMESTGVYWIPLFEILERRGFEVKLVDARKSKNVSGRKSDVLDCQWLQTLHTYGLLTGAFRPADEICVLRGYLRQKEMLVQSSSMHIQHMQKALQQMNLLLHNVVTDITGVTGMTILKAIIAGERDPKALASRRDPRCRNSVQTIAKSLVGNYREEHVFALTQAVELYEIYQAKINDCEVAIARFLTTQAQQTDDEPPPSQKNIPPQQRMRAGVDLRSRLFKLTGVDLFSIPGLGADTLLTILAEVGFDMTPWKTEKHFASWLALCSGTKISGGKVLDRKTKRSANRAAQAFRLAASSLARSHTALGAFYRRIRARIGAPQAITATAHKIAITFYSLLKHRTTYVEIGQTAYEQKFKERRFKSMQKQALAMGYRLIPAA

SEQ ID NO: 309234 - protein, 393 aa, unidentified
MAAGLRVAVDVGSRFHQVAVGTDGGALVDEFRIDHRCAGFARFFDRIERHGARDIRVAMEGYNGWARPLDQQVLARGWRLYNVNNLKLARYKEIFPAPAKTDAIDARRMLELFAFDAQRALGRDVLQAVTPASEAQRHLKYLTRRRRQLVSDRAARLTRLRCDLQAVCPDLLAITGAVDNRWFLRFLTCRDRLTALPRLQAKTVAAVRGVGAKTLPRIRAWQRSAHFGGDIDLADADLVNDARAIMALDEQINALNRRIEAAASNCAMAQRLRSIPGFGVTGTAELAAEIGALARFASEASLALYLGMAPLDHSSGLQRRGKRPKCVNGRCQRALMTCIVRHMAAVPESRAYYDRKRQQGKSHNQAVRALGRHVVRVIWKMLMTNRDYILKSE

SEQ ID NO: 309235 - protein, 313 aa, unidentified
MPQDTFVGIDVSKDTLDVHVLPTRRRLQCSNSAGDIQTLAAQLASLEPALVVLEATGGYQTQLAATLHDHGLVVAVVNPRQVRDFARATGRLAKTDRIDAAILAQFAQRIQPPPRDLGDENDRQIKALVTRRRQLLDMHAAESNRLGQARHQAVTASIQAVLKLIEAQLKDTDTTIDEFIRRSPIWLRKATLLDSTPGVGPATIRSLLAHLPELGRLNRRQIAALVGLAPMNDDSGKRGGYRAIRGGRTAVRNALYMATLVATRHNPRIRAHYQHLLKQGKKKMVALIACMRKLLIILNSMLKNNQPWRCQMT

SEQ ID NO: 309236 - protein, 343 aa, unidentified
MKIIRVGVDLAKSVFQVHGVDRCEKIVWRKKLGRAEWLTALLEKIEPGCEIGMEACGGAHHWARQLQKRGYTVKLIAPQFVKPYVKSNKNDANDAEAICEAMSRPSMRFVAVKSVEQQDLQAIHRIRAELVSQRSAKGNQIRGLCSEYGLVAPREMIQLRAAIPLWLEDMENGLTQRFRRMLRGLWLDLLNLELRVKELDQEIEIAASTDPVASRLQQLRGVGPIIATAIVANVGDAKQFSSGRQMAASLGLTPRQNSSGGKERLLGITKRGDAQLRTLLIHGARSVLRTAASKNDRMSRWVTHIAETRHHNIAAVALANKTARIAWAMITKGTDYQPGLEAV

SEQ ID NO: 309237 - protein, 334 aa, unidentified
MKSGIVHIGVDVSKEKLDVFVPAQKEGMRPTTKGVDNCVAGFREIRDIARKARATVCVEPTGGYELELIAFLHKFEVPVAYADALRVRQFARAEGSLSKNDTIDAALISRFADKIGVRVLAPQEVEAVELKRKAKFRQTMVDSRTAMANRLETETDPEMKALLKEQIRHMDKVIGKAERLCLDTVKKDERMNALLERFTKVGGVGDMTAMSILAGLPEIGNLTDAKLNRLVGVAPEEKQSGTKEWQRRIWGGRKDVRNALYMACLASIQWNAVLGGYYRKKRAEGHPHKWAIVPTMRKLLSLLNRIARDPDFIPSPEPESTKRNATAGRKRKAA

SEQ ID NO: 309238 - protein, 344 aa, unidentified
MGEVITIGLDIAKSVFQAHGVDEAGAVVIRKRVSRAKLLEFFASLQPCLVGIEACPAAHHWGRELQALGHTVKLMPPSYVKAYLKRSKNDANDAAAICEAVTRPTMRFVPIKTKEQQAALLLHRARQLLVRQRTMLSNAIRGHLAELGIVSAKGRSGTGALLEIIADAEDSRVPPVARGVLDVLARQYSALGAEIGSIDRTILAWHHSSEASRRLEEIPGIGPIVATALVAEIGDWKAFGSGRSLAAWIGLVPKQQSTGGKDRLGSITKQGNRYLRWLLVAGAMAVIRYAQKHGTLKRPWLGRLMERRPTKLAAVALANKMARIAWAIIVHGDRYREPKPLLAA

SEQ ID NO: 309239 - protein, 381 aa, unidentified
MRFYTKQHKAYCGIDLHARSMYMCILSQDGEILLHRKMKTSPEMFLKAIAPYREDLVVCVECMFTWYWLADLCAREGIPFVLGHALSMKAIHGGKAKNEKIDAQKIAVLLRGGMLPQAYVYPAAMRATRDLLRRRTHVMRKRAELLTHIQQTNSQYTLPEIGKKIAYKANRDGVAERFPDPAGQKSIEVDLALIGHYDQLLRDVELSILTTAQQHHAQTLYLLRTVPGIGEILSLVLLYEIHDITRFPRVQDFLSYCRLGKCTKESAGKRYGTSGTQIGNAHLKWACSEAAVLVLRANPAGQKYLTTLEKKHGSGKALTLWGQKLGRTVYYMLQRQTAFDMDKFLNGSGSGADEPYASLDHHGLSLRIVLCNACFTVSLHT

SEQ ID NO: 309240 - protein, 371 aa, unidentified
MTDYDAYIGLDVHKASISIAIADAGRSGEVRLFGTIPNEPEAISKLVKKLGNRRIEFVYEAGPCGYNVFRQIEALGFDCRVVAPSHTPVRPGNRQKNDTRDAMMLARLLRAGELTFVWVPDAVHEAMRDLVRARSVASHDARKARTLIQLFLLKHDLRYPAKSWTCRHRAWLRNRQFHHHAQQIAFQSYLNRLEQAEARKKELEEQIALVSQTWSLGRTVLNLQAFKGVGLVVAATLVAEVGAFSRFDNPRKLMAYLGLVPGEHSSGGSIRPRGITKTGNCALRALLFEAAWSYRGQAKVGDWIHKRRPDVPQAINDIAWKAQVRLNARYRKLVGSGKKSTVAITAIARELVGFLWDVARRSEDGIASPTA

SEQ ID NO: 309241 - protein, 344 aa, unidentified
MKITTIGIDVAKNVFQVHGVDERGKTVLRKQVKRDQMAAFFAKLPGCLIGMEACGSAHHWARKLQGFGHTVRLMAPQFVKPYVKTNKNDVADAEAICEAVARPNMRFVPVKSVEQQAVLALHRVRQGLVKARTAQANQIRSLLGEFGLVMPKGITHIRKRVPELVENASGELPAAFRQLVERMLDHLKDLHRQVGELEAQIKAWHRSSELSQKLEKIPGIGPLGASALVASIADARSFDNGRQMSAWIGVVPRQHSSGGKPTLLGISKRGDVYLRTLLIHGARSAIVAAQRRASVNPWLAGLVQRRNPNVAAVALANKNARTVWALLAHDREFQPDYVPTRPAA

SEQ ID NO: 309242 - protein, 356 aa, unidentified
MKQNNKLDFTGQPIFIGLDVHKKSWEVSIYTRHGEYKNFSQPPRAATLVHYLRHHFPGALYYAAYEAGYCGFWIHDQLVQEAIGCIVVNPADVPTRNKERKRKRDPVDCRKLARGLRNDELEGIYVPPRAQLEDRSLIRTRLSMGRKQSRCKNQIKSMLLFYGVQIPEQREMGHWSRRFLRWIEGIRLERASGDMALQIHLEELYHLRQILAMLNRAILALSRTEEYRPWVSLLRTVPGISTLTAMILLLELGEITRFPSLDHLCTYVGLIPDIQSSGEKEHVGGITQRGHSYLRWLLVEASWVAIRKDPAMMETFNDYCKRMRKSKAIIRIARKLLNRVRYVLKNKPEYVPCVIE

SEQ ID NO: 309243 - protein, 349 aa, unidentified
MIIIGADYHPAFQQIAFVDTETGDCGERRLEHSEGAEKFYRELATQGKKVRVGMEASGHARWFERLLGELNIELWVGDAAVIRAKRGRKAKTDRQDAQHMLNLLLKDDFPQIWVPSWENRDLRQLLWHRHRMVQARTRIMNQLQAVALNEGLRCKKKLWGEQGREQLEAFRLAPWASRRREDLLQLLDEINPTIAKLTLAIELEAEKCPQARLLMTHPGVGALTGLAFVLIIGKAERFQCGKQISAYLGLVPIEESSGERRRLGHITKQGNSLLRFLLVEAAQATTRTIPEWRSKYIHLMMRRGRKIAKVAMARKLAIRLFWMMRQGWNYQQVSKFGSHVGQPGHRHGV

SEQ ID NO: 309244 - protein, 354 aa, unidentified
MDNIKYIGLDVHRDTISAAVLNGSGRLIQQSVLMTRAAAILDFIGGVRGTLHVTFEEGTHSAWLYDLLSRRVEKLVVCNPRRNALLKSGNKGDAIDARKLAELLRAGLLSAVYHGETSALEVQQLARSYTMLTEDTTRVMGRLKAVFRGQAISCTGRKLYGHHRNEYLAALGVCALRRRAERLYLQLDALQLLRRQARHDLVVECRKHTAAKWLQTVPFLGPLRAAVLIARVQTPHRFRTKRQFWNYCGLALETRDSAEYRVIDGQLERKKRPALIRGLNWNYNHELKNVFKGAANAASTGQGVFREFYLGLLTKGMRPEMARLTLARKIAAIALKIWKKGESFDAEHLKSQAA

SEQ ID NO: 309245 - protein, 414 aa, unidentified
MSQTSSPMPPPAALAYVVGIDIGMESCMMCCLTMEKRQVIKPNQFSNDAPGFEWLFAHLELLQVAPQQILIGLEATSRYGENLYHALLSRGYRVCLLHPGQIHAFAQQRGLRAKTDRLDATTIARALLSGEARFGYVPSEEVATYREVVRLHQQLTEEITRYKNEIHALLVVLFPEFSQVFADPSRPTALSVLKTYPSAQAMREADPKALSQLLHKECPGHYGRSTAETLIRLAEGSVSSGQATQARQNSLRILCDQLEHTQSNLKLLQQELERLLDHDPKVKGVLSIPELGPMTVAVLRAELGDLDRFARVDQVVAYAGMDLHVKQSGKWKGQTKLSKRGSGRLRRILYLAALRSIRLPTSPFGIYYHRLVARGMKKGMAVVAVMRKLLIVAAHLIQTQEDYDAGKVGIAGVS

SEQ ID NO: 309246 - protein, 401 aa, unidentified
MIGVDPHRGSHTAVALGADEVALGQVRVRASAAQAERLLAWAQAWPERTWAVEGAAGLGHLLAQQLVAAGERVLDVQPKLAARVRLLAAGAVNKNDPNDARSVAVAALRSPSCLPVRPDDHAAVLKIWAKRHRDLSRTRNQVVCRLHAALCELVPGGVGKELYAAHAAQILAEAEPSGAVAQARAELAAELVADLRHVDALLRETKKKLAVAVRACGTSLTEVFGVGPVIAATVIGDVRDVSRFRGRDRFAACNGTAPIEVSSGNRIIYRLSLRGNRRLNHAIHMAAITQIRHKHSDGRAYYDKKLAEGKTGKEALRALKRQISDAIYKHLKADAARTAASSVQGPGGQPGNDSDASAAGSHPEHQLFGQATPGPVPTLRRPVHQQKKVTSRTRRKTARTT

SEQ ID NO: 309247 - protein, 352 aa, unidentified
MVSIVAKKYDYVVGVDTHAKKHVFALINNIGELIGCGEFRVLARDFQQLLFHIKRKTEGAQVLFAIEGTSSYGETLTRFLMQGNEDVCEVKPPKAKARGSTGKSDRIDAEMAARGVLHLPMDKLIRPRRGNERKILRTSLSSRGLLVRQQTMDKNALCALVRTTDIGIDARKALDNATIHMIATSRSRALDAPHEAVVRAEAKRLAENIADRNIMLRDNKRALRDSVNSVAPGILSLCGVGPVCAAQILCAYSHKGRIHSAEAFAMLAGVAPIPASSGNTNRHRLNKYGDRTLNKALDVIARNRMRVDAATQIYVAKRTADGLSSREIRRSLKRYIARSIFRYLETLNLGVD

SEQ ID NO: 309248 - protein, 426 aa, unidentified
MNTTTDFAATIGWDWADQKHDLWLQPADGGKAEHLQLEQTPEALHAWAAKLGKRFGHRRVAIAIETSRGPVIAALLAYDFIVFFPINPKALKDYRGAFSVSGAKDDRTDAMLQEELVRLHRDKLHALEPDTQLTRKLGGLTENRRRLVDERTRLANQVHSLLKTYYPLAETLLDGQMTTPMAADFLARWPDLPALQKAEVKTLRAFFYEHNSRGARKMEERLAALSQAQPLTQDEAILTPARYLVTALAGMLKPLHQAIAGLDQAIAQAFDQHPDAALFRSLPGAGPALAPRLLVAFGTRRDRFASATEVAQFYGIAPVVKQSGHSKTTHMRSRCPKFGRQTFHENAACAFKKEAWAKRYYEDQKGKPEGEHHQAVRALAYKLIRIYYACWKNNSPYDGQRYLQALEKHASPLHKKLQPSTQKSSE

SEQ ID NO: 309249 - protein, 384 aa, unidentified
MDQATPSTASANILHCALELSKKSWLLAIQFPDREQPSLYPIAGGDAEKLMAKLTQARDRWAKTSGALPMITLCYEVGYDAFWLARCLKARGVECLVIDPGSLQVSRRGRRVKTDRVDVKTLLRTLIAWCRGERHVWSLVRIPSIDEEDLRRSHRERSRLVRERTAHINRIKGLLFAQGIRDINVKSRYKTLAVDELVTGDGHRLPPRLAGEIAREIRRLATVQEQIAEIERERDAAPTTCEATERKRNLLSQLKSIGPAISAFLSREVYYRQFANQRQVGSFLGLTPSPYDSGDEERCQGISRAGSGHARAVMIETAWLWIKHQPKSALSRWFVERTAGQSKRVRKIMIVAVARKLAIALWRYVELGLVPQGAILNPRMKARS

SEQ ID NO: 309250 - protein, 358 aa, unidentified
MYIGVDTHKKTHRLVAIDARGQMHATQTVANTPQGWVTALEWAREYGDACRWGIENSGSLGKGFAQFLLADGETDVREVSPQRTAQYRRRGRTQGKTDAADALAIARLISAEGEQLPLVQADDLSTELRLLSDHRDNLVAERTRLINQLHAQMLQIDPCYMERSGVLTTATGVRYCHALVLPHADGVLETRLLIVHQLAGQILGLREEIETIETALRQRVQETGTPLLQLCGVGTLVAARLIGELGCTPRIRSAAALAALAGIAPVEVSSGGRHGHRLNRGGNRQLNKTFHVIALSQLRREPLAQAYYAKKRTEGKTARAAMRCLKRRLVDVLYRLLPKSEDGNRLREGQELPIEAAA

SEQ ID NO: 309251 - protein, 336 aa, unidentified
MVQIYGIDLGMSSFDVSFLSESGSVRHLSGVKNTVHGISKFLLSLPSSAVLCAEHTGVYGDLLLRLCTLNRTCLCFVPGYQIKHSLGLQRGKSDPLDACRIREYAERFYDLLRPCFYPGEEMSELQELYRTRSLLVDSRKRLDTLNIGDNCKSSVSLAADHARRAVLAELNTQISGLDHEIEALIQNSSEFSRNYQILTSIVGVGPVTSCELIIKTENFRKLDTAKKCAAYAGIAPYPKESGKMKCGHKISPMGDKQLKTLLFLCARSAKEHNKEIRLYFLKKHKVEKKHFFVAMNNIANKLLRLIYSLIHKQQTYDRDYIQRDPRCVVISDTNKC

SEQ ID NO: 309252 - protein, 369 aa, unidentified
MDVHAETIAVAVAETGGEVRSHGVIPNRLESVRKLIGKLGPVGALKACYEAGPTGYVLYWQLTQLGVACEVIAPSLIPTKAGDRVKTDRRDAEKLARCYRAGELTAVWVPDAAHEALRDLVRAREAAKKDQLKARHRLGKFLLRHGRRPEGLKAWTKKYLEWIKTHVHFDQAALEVTLADYLEEVDHVAARIVKLEKAIDEAVRQAPPEIRAVIEALQALRGVAQTTAATIVSELGSVSRFQSPRQLMGYSGLVAREHSSGNRVRHGGITKTGNSHLRRVLVEAAWAYQHRPNVTGFLLRRQKNLALSDEVKKIAWKAQQRLHKRYQAFAARDKNKNQIVTALGRELLGFIWAIAVHIEGQQKQLRKIA

SEQ ID NO: 309253 - protein, 372 aa, unidentified
MNYNTVYVGMDVHKESFSLCAYTIEAEKASHYQRTEADYKKVLNYLEFLRTIYGDDANFICGYEAGCLGYTLYHQLTANNVKCIILAPTTMLEQRSKKRIKTDKRDAEIIAKCLAQHNYSPVHIPTAKDEETKEFLRMRDDHKLALKKVKQQILAFCLRHNYRYDGNSHWTAAHLKWLKALTPEALYKEILDEYLLTYQTLSDKLERLDKRIEELATQDEYKEAVKKLCCFIGVKTHTALSVLVEVGDFKRFASARHFASYIGLVPGEDSSGDDQNRLGITKAGNRHVRLLLTEASQCYARGQVGFKSKELKARQSGNTPATIAYADKANERLRRRYYKMVLNKCKKHNVAKTAIARELACFMWGMMTDNIA

SEQ ID NO: 309254 - protein, 376 aa, unidentified
MTKIIRIGVDTSKSVFVLHGVDAAERVVLRKRLRRRQVLELFAQLEPTKVGLEACGAAHYWARELQGLGHEVVLLPPQYVKPYVKRNKNDAADAEAICEAMSRPTMRFVPVKTAEQQAALMLVGTRDALVRRRTQLTNAIRGYAAEFGLIAAKGLDKIEPLLARIAAHAPLPGLARELFAAHAKEYARLQAQIREIEAKLRAWHKHNELSRRLAEVPGIGPIGATLAVMKVPNPKAFRCGRDFSAWIGLTPKDHSTAGKTRLGVITRAGDEALRSALVAGATAVIQHVKQGKGHPSPWLIELVRRKPAKLAAVALANKNARIAWKLMVSTERYNPAHGRAVAASGGRGPALRGGSAPRPPLAPHDKSREITATTRA

SEQ ID NO: 309255 - protein, 477 aa, unidentified
MLVVFRGMEDYPKTLMELERRFSDEDSCRDYLIALRWPDGPACPRCGQGKGVAIRRSLWRCNACRHETSIMAGTVCPVLARGRAVVGIDIGKRKHSAFAVGPQGQKMASLASFDNDRTGVDRLEAVVLRVAGPPTEILFAMEATGHYWMPLYHELVRRGYEGVALNPIQTHGEARTRIRKTKTDHKDAEGIARFILTGKAHATRIPDEETEELRIMTRRLHQLTRMKGDIERAAHSLIDRAFPEYSGCFSKPFLPSARKLILEVGLTPDRIAREPDGVRDLLRRAGRGRLSDTTINDLIMRAQTSIGIGRAGMVINEELSTTVEIIEELEMQIVLLDARLTSIMEERESPLMSLGIGPAMAATIHAESDPASDFPSARQYAAYAGLEPDTFQSGAMKGTRTRISKRGSPHLRNALYQTAFVTYRRHDCFHRMYKRFRKEGHKHKSALVIVARHVAMVIWRMLVDNRPFSKRPPKRTK

SEQ ID NO: 309256 - protein, 357 aa, unidentified
MPSSNVKYIGLDVHKEAITVAVRNGAGKLVMESIVETKARTLLDFLDGVRGELHVTLEEGTWAAWLYDVLKPHVQELVVCNTRRNALLKEGSKNDRVDARKLSELLRGGLLRAVYHGENGLRTLRELARSYQVISKDLQRVMNRIKALYRSWGIPCTGTQVYGRRHREQWLQKINEAGVRRRAELFYQQLDGLQGLRRTVRGELLAESRKHAGVKLLRQIPFIGPLRAAQLVALMQTPHRFRSKRQLWTYSGLAVVTHDSAQYRYVDGQLQRSKKPQQLRGLNQNHNHAIKEIFKSAALSATVRPGPFQDFYAGLLARGMKPEMARLTLARKIAAITLTLWKKGECFDAGYVKPQAA

SEQ ID NO: 309257 - protein, 327 aa, unidentified
MMFYVGIDVSKQKLDCLWLRDLETLKVKTKVFPNGPDGYSRLEEWLRKTVSSDAASIHIVLEATGVYHEALAYALEAQGFRVSIANPAFVHDFAKGLGSRHKTDKKDSMILARYGALVQPEPWIPEPEEIRVLKALLARLSALEKDLQREVNRREKAEISQSSVAVLNSIVVMIDQLQQEVERVKRQIDDHIDRHPGLKADRDLLSSIPAIAQVMSREMLGVLRSRDFRTAGQVAAFVGLVPKQQESGQWRGRTTLTKNGNSRLRAKLYLAAVVATQHNPDIRAQYRRLLNAGKTKMQAIGAAMRKLVQICYGVLKHQSKYQPQYAI

SEQ ID NO: 309258 - protein, 417 aa, unidentified
MQYAPPALADQPVNGLTCGIDWARDDHAVSIVDGRGCEVHRRIVAHSASGLGELVAVLARAGVSEVAIERSDGPVIDALLAAGITVVVISPNQVKNLRSRYGSAGNKDDRFDAFVLADTLRTDRARLRPLVPDNADTCALRANCRARKDLIAHRVAVANQLRDHLKGVFPGSIGLFDDLDSPISLKFLTRYDCQDRADWLTPARLGRWLKSVGYTGRTHPSVLHTRLTAAPRGATGASAASYTPITHALVAVLTTLVGQIKILDNQIAHQLAEHADAHIFTSLPRSGTVRAARLLAEIGDCRARFPTPEALISLAGMAPSTRQSGKTRIVGFRWSCDKNLRDAVCDFANDSRHANPWAADIYNRAIARKKKHPHAVRILARAWLYVIWHCWQTNTAYDPAKHGALQALLKQHKQSAA

SEQ ID NO: 309259 - protein, 345 aa, unidentified
MPVDHPSVPSPYRLFAGIDIAATTFTAVWITPGTTPSRALTLDQTPHGFATLQERLLAAGHTRGEILVVMEATGSYWVALATTLAQAGFAVAVINPDQAHNFAKALLQRAKTDAIDARTLARLAATLQPTPWTPPPAIYAELQQRLAERDTLLDLRQQVRNQLHALVQLPVVIPAVRARMEELIATFSAQIAVIEREVERVLPLDAEWAASAALLLSITGIGVLTAAWLLVTTLNFTIGASAEALTAYAGLAPHPKESGTSVRGRERIGHGGNKRLRTALYMASLSAAHRNPLIKAFYDRLRAAGKPMKVARCAAARKLLHLARAVVLTGTAFNPSQTHLQDKAA

SEQ ID NO: 309260 - protein, 370 aa, unidentified
MRQSTPLFVGLDVHKDSIAVAHAAGDSTAPPVFVGAIGSRQADLDQLLRRLQSKAASLAVAYEAGPSGYGLYRYLTAKGVACQVVAPSLIPRKPGDKVKTDRRDAITLARLLRSGDLTLVYVPSVEDEAIRDLCRARDAARVTMKDAKLRLKALLLRLGRHYVGRADWNAAHQRYLAKVVCPTPAQQIVFQESVRAVDEQVDRVARLEAELREATPHWRLAPVVEALQALRGVQWLVAITVVAELGDLTRFDNPRQLAAFVGLIPSEYSSGASRRQGGITKAGNGRARRALIEAAWAYRHPAKVSAHIQQRIDRLPKPLQDIGWKAQVRLCKRFRRLTARGKHPNVAVTAIARELIAFMWAIAKAVPITA

SEQ ID NO: 309261 - protein, 379 aa, unidentified
MNLKYSVGLDIASKKIDICMSVIDVNQKVTVVSSKSFLNTLKGFKEIDSWIVNKHKEKGIPLVLCMEATGVYHENCALYFFERKYNTSIILPNKAKHYMISLGLKSKNDSIDAKGLSKMGAEQCLELWQPMGKYFYELRQYTRQYQNLQEQKTVFNNQLHALEYAMFKSKEMIKQQQSTVKLFDKQLKELDRLIKNHIDSEALIKQKVTNICKIKGVGILTAATILAETNGFELFKNYKQLVSYSGFDVVERESGTSTGKTKISKKGNGHIRRALFMPAFTAVRYKEKPVVDLYNRTFEKHGIKMKSYVAAQKKLLVLIYHIWKKNEEYNPDYKEKINQHQENISSILVNDTAKKNSPKQVEAIPDKQIIFKDEVLSIS

SEQ ID NO: 309262 - protein, 424 aa, unidentified
MKVSYQTCCGVDVHKSFLVATIVKTTGGIEPSYQKKRFSTFNNSILEFKQWLLDNDCHDVCMESTGKYWVPVFNLLEDDINVVIANPKWVKAVKGNKDDTKDSKWIGDLFRLGLVRGSYVPCKKIRILREYTRYRYKLISCRSSEKNRYQNALTVCNVALDSVVSDIFGKSSTSIIDYLLEQSGTSINHEEIASKLLRSLKSKEDAVIESVEGYQMTDAQKYRMRLVRAHMDYITAEINDVDKMMENMISSNPDFENAVQFLCTIPGVKRDSAITIISEIGTDMSQFSSSKRLCCWAGLTPGSNESAGKKKSVRITRAGVYLKPALVQCAHAAVKSDKSPYYKKKYDSLVKRRGKKRAIIAIARMILTAIYQMMSTGEQWNPSDLYKIDMPVALVEKQKAKAIKQAKKLLQREGLLPPDEPLAS

SEQ ID NO: 309263 - protein, 394 aa, unidentified
MLYLAIDQHRKQLTVNLRDEAGDVILKRQISTEWARVRKFLEELRQRSMPEGGFVAIVEVCGFNDWFLKLLMEYGCREVVLVQPEKQSKTKTDRRDADSLGELLWTNRQRLLAGKKVQNLRRIVPPCARDAEDRQLTALRQRVGRLRTRTINKVQHLLLKHNLQQECPTKGIQTQAARKWLARLPFAVIDRLEMNQLLAQWELWDKQVAELEAKIRERQAENPTAAIVATMPGAGAYSSLALACRIGSIERFPHARSLAHYWGLTPGCRNSGDATRRMGSITKQGSGLARFILSQMVLHVLRRDARIKEWYRRIKKRRGAKIARVAAMRRMATVLWHLIKRQEPYRSVGRPEAEDKYGVILPDRNAFFEELQGRSRETKQKGRRSPATPAAARP

SEQ ID NO: 309264 - protein, 341 aa, unidentified
MEHIAIDLGGKESQICVRDETGAIREERRCPTADLDGFLMQQPPSRVILETCAEAFRVADVARAAGHDPRVVAATLVRALGVGARRTKYDRRDARVLSEVSCRVELPSVHIPTLAARERKSMCGMRETLVRARTRIANCLHGWLRMQGLRLPKSNVVSLPARLRAQVPSRPPYVERQLEMLDELNARIRQANTELRRLAKQDPVCRRLMTAPGVGSTTALRYVAALDGVGRFPDAHQVASYLGLVPGERSSGDTQRRTGITKAGSPALRHCLVQAAWAAKRTRVHGALQHWGARIERRHGKQVAAVAMARKLSGILYALWRDGTTYDPGRAAHDPPPRPRP

SEQ ID NO: 309265 - protein, 343 aa, unidentified
MNSTTIAVDVAKAVFEVAVSEHAGQVRERHRFSRERFRRYLGEQPPATILMEACGSAHYWGREAQTRGHRVVLLPPHAVRPYVVRNKTDRTDAKALLEATRNDEVRPVPVKSETQQALAALHRLRSAWLATRTARINTVRGLLREFGVVIPIGARHVVPALGSLEDDDGGVPSLLRPALAEAAREIRELEGRIRTVEHQLEAVAEQTPVVSRLCSIPGVGLLTATALVAAVGDVQRFPSGRHFASYLGLTPRERSTGQHRQLGAISKRGDAYLRMLLIHGARAVLCHAKTKTAPTPDRLRAWALHLERFRGHNKAAVALANKLARIAWAVWKYDTDFAAAPAA

SEQ ID NO: 309266 - protein, 403 aa, unidentified
MNSVGIDISKGRSTIAVMRPFGEVVISPFEVRHTGSELSKLAKQLKSLDGETRVVMEATGNYHASVAKLLHNAGLYVSVINAKLVHGYGNNELRRVKTDRKDAVKLANYGLDRWLTLPRYIPEEDTRLLLKNCYRQYRQYSKVQTVLKNNLISLLDTVFPNANRLFSSPIRGDGSEKWVDFVAEFWHCRCASEKSERAFTSKYLRWCRKHGYNFREAKAHTIYAEASGHIGVMPKSETTKLLVKQAVSQLRATSTALAALKQEMQSLASVLPEYPVVMDLFDVGPTLGPQLIAEIGDVRRFYSKKALVAYAGLDAPPNDSGDVTGRHKSMSKIGASSLRRTLFLVMSVYLQTAPLDEPVCQFMDRKRAEGKLYRVYMMASANKFLRIYYATVKAYLESLEHTA

SEQ ID NO: 309267 - protein, 333 aa, unidentified
MNKQFYVGVDVSQQTLDVAARTASAEPRTAQFTNTSAGHRQLIKWLTKGGRCARVVLESTGVYSLDLALALDTAKRIEVMVVNPRAARKFADACLQRSCTDTTMAVALQEYAARMEFVPWTPPSAAVREVRAIARRIAALTLEKSRECNRQHAAGASADTPAVVSNDVAVNVRHLERRIAELERHAVTLIIADAQLQPIYQHLLSVCGIAETTAIQLLGELVVLPADMTARQWVAHSGLDVRHVTSGTSVHKVPRISKQGNAHLRRILYMPALVAIRHEPHVRAFYEHLLAAGKKPIQAVVAVMRKLLHAIWGMLNSKTDFDGSKFRKLPEAA

SEQ ID NO: 309268 - protein, 429 aa, unidentified
MNYNTQNAKIASITEKSLIVGIDVGSETHYARAFDWRNYEYSKKPFTFNNDEAGFAAFKAWMEDIAEKHGKEVVIPGMEPTGHYWLNLGAYLQEQGMKLVHVNPHHVKKSKELDDNNPNKNDCKDPKTIAGLVNEGRFSYPYIPTGIYAEIRNLSNLRIQTQEELTRIKNRIARWFSIYFPEIKDVYKNPDAVSGMMVIKKAPLPCDIKELGVDGVNQVWRDAKLKGAGLKRARTLVSAAEHSIGSTEAPESARIEIRNLLNDYEVYKNRMDDLMREIEAKLSEIPYIDKLMEINGIGLKTVSCFIAEVGDIRRFDNPKQLQKLAGYAIVADSSGKHNGESRISHRGRKRLRYALYEAAISVIGKNKEFREIHDYYRTRKQNPLKKMQSVIAIACKLIRIFYTILTKGVDYDGQKMLSDIVRPETVMAA

SEQ ID NO: 309269 - protein, 448 aa, unidentified
MAAHSVSQTPAVVVPSQLERHWQQAFRQRWQAVAPAQWRCIGIDVGKYEHVAVAYDGLGQLLAPPLRFGIRAGDYQTLFAWVATVVPDPALRPLFGLEPTGHYYEQVVYELAQQYGPKQVYIVQTTDVARRRADWNQGTFKTDEVDAAIISELLRQGHGRPYHPDEGAYLSLYQLERYRWAREQASTRLKNQIIGHVDRLYPGLVISDKPLAERYQPLWRSLWADETPRRLLTLYADPRDLRCADVATLCQRFRTAGYWMTRPYAAKILAAVQALPLPDAELGARRSTFLERDLAGLAYVEQQLAEVAAEMVDLLDLTWGHWLRPSGVDPLRLACLVATVGDMRQYHAARQLFGRSGLHSGCRDSGTRQQHGQGEHMVKPGDRHLRRQLLRFTLSMLAHYPALQTYRNRLLQRGKGKITANIAVARKLCGMLYALASQERPFDPTRLA

SEQ ID NO: 309270 - protein, 372 aa, unidentified
MTMTGREGRCSEDLATVVEEVVLGVDTHLDVHVTVALDSLGRRLGELAIPTTERGYERLVSWAEGFGPVRCAGVEGTSSYGAGLARHLRSAGIAVLEVERPKRRHLRRRGKSDSRDAEAAARAVLAGDTAGVPKSGDGHVEMIRVLRAARRSAVKARSQAANQLRGVLVTAPEALRHRLRGFSTKQLVAVAARFRLGDDPEDVESATRFALRSVARRYRALSVEVSELDAQLDRLVAEAAPELVSLPAIGTDHAATLLIVAGDNPERLGSEASFASLCGVSPVEASSGKIVRHRLNRGGNRDANRALHLICVVRMRVDERTQAYVARRTAEGKSKREIMRCLKRYVAREVYRLLAPSVACADASVRKGVSSM

SEQ ID NO: 309271 - protein, 425 aa, unidentified
MPPIQNPEPEFAAFVAIDWADQKHYWSLQVPGLQQIERGAWDNMPEAIEVGVTELHLRLGGRPLAVALEQRRGALVAMLSKYGQLPFYPVHPLTLAQYREAWYPSRSKDDRKDADLLREILCQQRDRWRRLDPDPTARRLLPFQVENRRKLVDQRTALSNRLTDRLKLYDPPILLWFPDSKTLLVGDLLLRWPTLLELQKAKTATREKFFHQHNCRDQQTIQQRWEQIRRAMPATRDEAVIGSARCLALVCVQQIACLQRAIGEWEKEIAELARQQPDWDSFDSLPGAGAVLAPRLMAAWGSRRERFASAAELPCFSGIAPVKEASGNSPWVHRRWACPQFLRQSFHEWAAGSIHFCDGAKAYYDQQRSHKKPHHTAIRALAFKWMRILYRCWQDRQPYREVIYLLSWAKRNPPRQRLAHSVPMP

SEQ ID NO: 309272 - protein, 343 aa, unidentified
MQAVTTIGLDIAKSVFQIHGVDAVGNVIVRRQLKRRYVLPFFRKLPPCLVGIEACASSHHWSRELQALGDMVRLMPPAYLKPYVKRHKNDAADAEAICEAVTRANMRFVATKTPEQQSCLMLHRTRHLFIRHQTSVINAIRAHLAEFGIVAPVGRNGVEQLLDVAADASDKRLPEAARACLLALGAQLRTLKAQILNFDRKIMAWHRSSEASKRLDEIPGVGPALATALIASVADPKAFRSGRNFLAWVGLVPKQHSSGGKDKLGSISKQGDRYLRSLFTAGALAVIRYAKIHGTKHRPWLTALLARRPTKVAAIALANKIARMAWAMMAKGERYKEPVALAV

SEQ ID NO: 309273 - protein, 348 aa, unidentified
MGEYSELFVAFDVAKKKHAVAIAAGGRGGDIRFVGEIENSPATIERMIKKLAARYDRLHVCFEAGPTGYELYRQIRALGHDCMVVAPARIPKRAGERVKTSRRDALTLARLHRAGELTAVWVPDAVHEAVRDLVRAREAAADDLRRNRIYSGGGHWTLAHRRWLAKQAFEHASQQIVFQEGLHAIEDAAQRLRRLEQQLAVIVPSWSMAPVVAAYQAMRGASFLVAVTFAAEIGDVRRFDTPRQLMSFLGLVPAESSTGDTVRRKGLTLAGNRRARRALVEAAWTYRYPARVSETLRARIEGLPKPVRDIAWKAQLRPCARYRRLSAAACGGGCHCSRDGRLSVGHRS

SEQ ID NO: 309274 - protein, 428 aa, unidentified
MPYKIAEIDVHKRMLAVVVSDVEVDGEYAFERRQFGSNPAQLRLLADWLLEQQIEEVVMESTAQYWKPVWAALERYWTPTCKKREGAGAMSGTQHLAQAQSNRARQGRKNDFADAERLVKRLVANELTLSFVPDPEQRLWRTVTRTKYQLTRNRVQLQNRLEALLEECHIKLSSLVSDLLGVSARRMVKALADGETDPAALAALANYHLRATQEQLRDALGACQELNPVYRRLLKLALEELQLIEKQISQLDQEIADLLRPYQDQVQRLAEVPGLGVDSAQQIIAEVGPIAATFPSAGNLSSWVGACPGDDESAGVSHSHRSPKGNRQMRRLLNQAANAAVKYKGGIFEILYRRYVPRLGHKQTIGVIAHRLCRLIWKILYQGVRYEERGPDVRKKSQRYRAARMIRELQSLGYRVEQANSQSADVPA

SEQ ID NO: 309275 - protein, 412 aa, unidentified
MLFIGDDWAEGHHDVVVQEDSGETLARRRLPEGADGIARFHALVASCCGEDSDPDPARVVVVIETGRGPWVKALAASGYRVYPVNPEQASRHKEAIANSGEKDDFFDAAGLADMGRARRHQLRELAADSDIAEAVKIAARARQKLVWERTRHLLRMRSALREYFPAALEAYAGLTLSGADTLELLARAPDPAAAAKLTASQVTAALRRAGRRGDLAQRARDIQAALRAPHLTQPAVIAEAYAASVQAAAAVIAALNVQVKVMEAKVSELFRRHPEAGIYLSQPGIGDITGARVLGEFGDAPGRYASARARKSYAGTSPLTTASGRKKTVHARYVRNRHLTGALHAQALSALTASPGARACYDGLRARGAGHDDALRRVASRLAGILHGCLKTGRDYDEATAWSHRAALSRAA

SEQ ID NO: 309276 - protein, 366 aa, unidentified
MLQKAELSGTADSENNLGGSSETMYYIGLDVHKRTISFCVKDAAGCVLQQGKIGSSRLELDAWIRTLPQPRMIAMEATIFTGWIYDHLLPHAEKVKVAHPLMLRAIAAAKKKNDRIDAAKIADCLRCDFLPECHMASTPIRDRRRVLRYRNLVQRQAVQMKNRISGLLMETGVSYDKLRVHRKGYFNRLLATNEEIQGSIRPLLRICREHINRSIQLDAALLGSLERDPLLMDRLQRLRTIPGVGPITALTWVLEVGDTSRFRSIKQAISYCGLCGAEKSSADKVMRTPISKQRNKHIQHMLVEAARLAPRYSPELAELYERERLRGNANRATLAVARKMVAHMLAVDRRKTDFVTAPALKQTAAA

SEQ ID NO: 309277 - protein, 403 aa, unidentified
MNAVGIDVSKGKSMVAILRPYGELVEAPFEVKHTSSGVQSLIQTIQSIDGESRIVMEHTGRYYEPLFFQLTQAGLFVTAVNPKLIKDFGTNSLRKVKSDKADAIKIAKYALDSWSDLKQYNVMDKIRKQLKTMNRQLNFYMKHKTSMKNNFIGLLDQTFPGINNYFSSPAREDGSQKWVDFATTYWHVDCVRNMSRNAFINHYQNWCKRKEYNFRQSKAEEIYETAKELVPVLPKDNVTKFIVKQAARQLADASETVAQLKAKMDEAASRLPEYPVVMAMYGVGSSLGPQLMAEIGDVSRFTHKGALTAFAGVDPGVNESGSYEQKSVPVSKRGSAQLRKALFQVMDCLIRNMPQDDPVYLFMDKKRTEGKPYYVYMTAGANKFLRIYYGRVKEYLLSLQQSD

SEQ ID NO: 309278 - protein, 299 aa, unidentified
MPNLIIGLDIAKNIFQVYGTNYHGVAIIKRKLRRNSVLKFFATLEPALIGIEACHSAHYWARELTKLGHTVHLLPTQYVKPFVVGGKNDAAAIGMAVTRRDIHCVPIKSAEQQSLQSLHRIREEAIQERTAKSNQIRSLFSEEGIIFPIGLSSLKKGLLEIIEDGESVITPILRKLGRMYLEQLSCLQAWIGELNEMIDRYFKENDVCQRLATIPGVGPVIATAIVSRVGDPRLFKNGRHFAAWLGLTPRQYSSGGKTRLAGITKRGDGYIRKLLVQGAKAVIHHINRRHDNYGDWIKN

SEQ ID NO: 309279 - protein, 431 aa, unidentified
MKNRTSQRIEEITAGTLIVGVDIAKEVHWARFVDYRGVEHGKAVSFKSNRQGFEKIVSKIHDICNAKAMPYPIETVIIGMEPTGHYWKPLANYMSTSGYRVVGVDPYKTKQAKALDDNSPTKSDKKDAITIARLVRDGRYFDPYLPQEIYGELRVLSNARASALKRTSAVKNTITAIMDEYFPEIYTVFKKPIKGKASRQILRSCPFPAYILSKSEADVLAEIRKAVKKTVGIKKVQELMSAAKDSIGVKNGLEAAKMRMVWLLDELELLEKQLGEAEQIMEAALYKTGYAEQILEIKGIGVVTAASFLGEVGDPLRFQNARQIARYAGYNLVEDSSGKSKSGTAISKRGRKQLRSILYQMAFTMVGNNDEMKALYHYLTTRKSNPLKGKQALVVVSKKIITVIYSILKRQETYKPELVFGAVRKEMLKAA

SEQ ID NO: 309280 - protein, 387 aa, unidentified
MYFIGIDISKFKHDCAIIDEAGDTVTASWSFANNCEGFSLLKQLLDALDGQKKIGFESTGHYGHNLKLFLETNNFSFMEFNPLLVSKFVRSKSLRNTKTDSLDAVSIAQYLMTVEYKPYPPSFYHMDQLKSLTRFRDSLVRQHSRQLVELTNILDKVFPEFKPFFDGKFSATALYILTHYQSPEKIANMNAKSYEALRKKSRGKFSMVKFAQLKTLAKNTVGRSDAFLLKQMEITIDIENQLDAKIDEIESQILECIRALNPPILTIPGIGELTAAIILSEYGNINKFENPAQLLSFAGLEPGYYQSGLAEHQGHMVKHGSSHLRYALMNACLPLITYEPVFAEYYAKKRAEGKPHRVALTHVAKKLLRVIFTLQTKNISYDPTLIR

SEQ ID NO: 309281 - protein, 348 aa, unidentified
MSRTKAQSLSRMGIDIGKNTFHVVGMDDKGYILIRRCFTRVKLVEYLARLPQTTIGMEACPGCHWLARKAKSFGHTPCIVPAQFVKPFVKSNKNDLIDAEAIAEAISRPTMRTVIPKTTAQLDLQALHRIRERVVSHKTAVVNQARAFLLEYGLTIHSGIAKFTHDMPSLLSDEQNELSPSMRDILIDLWQEYRSLEEKLLHLRRQIESIADADGIAKRLTSIPGVGKLTATAMTAFVGNGQQFKSGRNLAAWLGLVPREYSTGGKQRLLGMSKRGNAYLRKLLIHGARTCVLHLNRTTNFLGQWVQLMEERGVHRNKIVVALANKIARIIWAVMTRPGAFYLQQREI

SEQ ID NO: 309282 - protein, 351 aa, unidentified
MSIIGCDLHTRYQVVAWIEEGTGEIKVRRLDHAGVEVKTFYAQFSRGTVVGIEATFAALWFERLLAELGHELWVGDAARIRASEVREQKTDTRDAELLLDLLRTGRFPRIWVPSAEERDLRQLRVHRMKLVRARTPVKNPLHALAMSQGVCRKRKLWSAKGRAALEKLTLLPWAARRRKELLEWLDRLDEQVRELDRAVEEAGRARPEVALLRTHPGVGMVVGLAFVLTVGPVERFASSRKLVSYGGLNPREHSSGGRQRLGAISKQGNTLMRWLLVEAAQTAARFDAQRRRIYQRLKSRRNSGVAKVAVARRLAIRLYWMLRTRHNYAQLVRMSGSPSSAVVPPQAESKV

SEQ ID NO: 309283 - protein, 403 aa, unidentified
MGLAWLASTAIRRSGDETKHGDHGRALAVIGVDIGKEVFHLVGFGTDGKIAFRKKIRRLDLKGAFEQLPRCIVGMEACLSAHFVSRTLRALGHEPRIIPAIYVKPFLKGQKNDYNDAEAIAEAALRPNLRLVKEKSQDQLDLQACHRVRSRLVSRRTATINQIRAFLIEQGIAVRAGARALRNSLFAILENRKDEISPRTAKLILGLYEDWCHLDERIESVTEEIESLGKAEAKCQRLISVPGVGPLISTGIVAAIGSGEAFERGRDFAAWLGLVPRQHSTGGRSILGRISKRGSKYLRTLLIQAARVLLMRPHNWPRFSFGAWLKTASERLHRNKLAVALANKLARIAWSVLRHDKAFDTHLEVAAISPPSRPSSRLRNCVERIDRRTLNLVPLMAARRSVR

SEQ ID NO: 309284 - protein, 338 aa, unidentified
MVYGAIDLHMRHSQIRIVDASGATVRDQRVTTSRERLVKAFDGVGPMRIVVETGTESEWVAQALEAAGHAVIVVDPNYAPMYGDLQRRVKTDRRDVAALAEANRRGWYRAAHRTSAAQRNTRQVLRARRQIVQMRSGAVALVRALLKQDGDRLPRCSAERVPMRLARLELPAPRRVILEPLVKMIETATEQIATLDGQLEARAAADPIVQRLCTVPGVGLVVALTFRAQLDDIDRFRHAGQVSAAIGLVPREDSSAERRQRGHITKVGSRELRSLLVQAAWACWRSKQSATLRAWTEQVAARRGRRIAVVGLARRLSRVLYALWRDGTTFEVKKLAAA

SEQ ID NO: 309285 - protein, 328 aa, unidentified
MEPKLSCCGIDVSHLTLDVTYQNNLGELFYLQVGNNNAGFKKLLEHTGLNCHFVMEATGVYYIRLAFYLDSHGCKLSVVNAMSIKRYIQMHLERNKSDKKDSRWICQYAIEQRPPFWEMPDSAYFECKQVYNTIREYAEQVKRFNNQLHSLKLLPIPSKETIKSLEKIKAFLEKEMDHLEVKLEALLKKWQPEQYKNINSIKGLGKRATALLIIFTQGFKHTSNHRQLISFAGLSPTEYTSGTSIKGSNRIYKKGGKPIRDVLYMCAMNAKQTNEACKQLFDRLKANGKTGKQALIAVMNKLLKQVFAVVKNNSLYQPNYCSAKPLNS

SEQ ID NO: 309286 - protein, 392 aa, unidentified
MYIVGIDIGKNHHEASIVSPEGKQIGRSLRFATTHKGADSLMSFISKNIGNSPCVFGMEATGHYWYPIYSFLKAKGYTIYVINPIQSDSLRKMYIRQTKNDSIDSFLIAEVIRFGQFGTTSMADENILAMRQLCRYRDSVISSRTEIKLRIGTIMEQIFPEYEKQFSSLWMSTSMGILEKYLTPENIENAPIDELFEIIKDKSHNRLTKAKAISIKEAAADTFGIKIAQDAFSFQLKQLIDRMNFLDKQIEALDIEIMKYYEQFDCYLHTIPGIGIIGAATILAEIGDISRFKNSSALVAFAGIDPTVRQSGEFNSTHNHMSKRGSPYLRHAIFLAATTCSFHNSPLNAYYKKKRDQGKHHLTATGAVARKLTTVIYAVLRDSKPYEPKKFC

SEQ ID NO: 309287 - protein, 403 aa, unidentified
MELSEIGVFVGVDMAKTDHFAQATTTTGVELFARSVLNDQAAIEKLIDDDAGHGGVAVVIDMTASNAQLLLAVAAGREVPVAYVTGLQMRRAADLYAGSAKTDPRDAWVLADFARRNADRLAWLDVGDELLLELRVLNGRDVDLATDANRIIHRTRDALTALSPGLERAVGQRLVQAGVRDLIAKWSTPTALRAAGKIKIRNAIKKRSPRLANKITDEIWAALDAQTVVLPAEETWGQVVGELLADLDRIQTQRARLAAQIEEAFRAHPLGQVLVTLCGFGPRTGARTLAEIGDPTRFANGSRLASYAGLSPTDWRSGSSIKGAFQHRGGNHRLKNAMFLAAFVATQHDPDARAYYQRKRAEGKKHNAAVICVARRRCDLIHAMLTTATPYDPSRSKKLAEAA

SEQ ID NO: 309288 - protein, 412 aa, unidentified
MSQLQSEYLYRVGVDWASQHHQVCIVDREGHRTEDTVPHTSAGLAALAEKLAALSPEAPERIAVAIEVPRGPVVETLLERGFHVFALNPKQLDRFRDRHTVAGAKDDRRDAWVLADSLRTDQPSFRRVHIDDPLIIELRELSRLDDDLREELSRLSNRLREQLQRFGPDLLALCPAADEPWFWALLDLTLARRPKPVAIKAVSAVLKAHRIRRLTAETVHAALQVPPLRVAPGTIDAACAHIAVLLPRLRLVHDQRQRTVGTQIDRVLADLAKGEGPGEHRDVTIFRSLPGVGRLVAATVLAEAARALAERDYQTLRTQGGAAPVTRQSGKKTAVSMRWACNGRLRNAIYHWARVSVQVDARCRAHYDRLRQRGHEHARALRGVVDRSLAVLMAMLTSRTLYDPARRSAKTA

SEQ ID NO: 309289 - protein, 355 aa, unidentified
MDSKKYIGMDVHKESISIAVMNGAGKIVMECIIETKASMILQFIDGLRGDLQVTFEEGTSAAWLYDLLKPHVTKLVVCDPRKNKSMREGNQSDKIDARRLAELLRLDHLTPVYHGEHGLRTLKELVRTYLTVTKDLTRVMSRVKAIYRSWAIPCTGKQVYAQRHRAEWLGKINEPGVHRRAEFYYQQLDALRVVRQEVRRDLLAESKKQKAWKRLCEIPSIGPIRAAVLLGILQTPNRFRTKRPLWNYGGLAIEMHSSADHRRVNGQLQRSRKNVLVRGLNRNCNHDLKNLFKGAAAVASSKPGPFQEFYTALLAKGMRPEMARLTLARKIATIVLIVWKRGVCFDAQHLKPQTA

SEQ ID NO: 309290 - protein, 408 aa, unidentified
MKTLHRRCAGLDVHSDTVVACARLTARTKASHEVRRFSTATHDLLELADWLAGQGITHVAMEATGIYWKPIWHMLEGRFKLVLANAAHIRNVPGRKSDVNDAVWISDLLAHGLIRASFVPPALIQELRDLTRTRTQLTRELARHVQRIQKTLEDANIKLVSAISDIVGMSGRRILKAMIAGETNGTRLSELGSPRLKCSRSDLAVALDGRVTAHHRFLIDHHLGLIEELERHISAFDARIGEVLAPFRDTVERLITTPGVGRGAAEVILAEIGPDMSPFPTAGHLLSWAGVVPRLDESAGKRRSTRVRHGAPWLKPVLVQCAWGAARAKGTYLQAQFFRLKARRGPKKAAIAVAASILTAVYHMLKDGTFYQDLGANYLVKRDPARTVAKLARRIKDLGFDVQYRATA

SEQ ID NO: 309291 - protein, 404 aa, unidentified
MTVYIGIDWRENEHEVVWLNEPGAIIEHFTMKHRSEEFMKLEQARHRVGLVRDECVVALETAPNLVVDFLWAWGYEQLYVIPPSVIKSNRGRFSSSEARDDERDGHLIAEVVRTDRGRLQPWSPDRPLTRQIRAKVSLWHYLTKQKVRCSNRLRALLMRYYPLALQVFGLWSSQISLAFIQQYPTPQAATELSWDDFAAFGSQYGYPAVKLPACFARLQQPQPQASRETVLTYQDEAVYLAGHLSQLIRTKNQTLKELTGLFEQHPDQPIFASLPGAGELLAPALLSKFGDDRARFPTPASLQALAGTCPVTDKSGKRKVIKFRQACDRQFRHLVQQWARHSLRKSVWANAYWQQVRPHCQSDSHALRCLANRWLAVAWKLWQTGQLYDQSYHLQQRALRAQPR

SEQ ID NO: 309292 - protein, 428 aa, unidentified
MRADGREVRAAVIPLPLGEGARRAGEGQGTLRGTMRFSAGSAVPCMTAMRYEEGAGRRNRQSVCPKATRPRMSKVAGSEASAQSPNSCLDTVRITQGREKPRRRSSIKGESMETVKRVGVDVAKKTLVVCWSDGTTEEIANEKEAVEAFSLKAAAACVDLVVMEATGGYHNELLWALHAAKVRVAAVNPRQVRDFAKALGKLAKTDRVDAEVLCEFAMRVEVRPTPPATEAQIELEALVRRRTQLVEMRTAELNRLQQARLKAVKKNLDAHLAWLKKQLKKVDKDIDTHLRGNADWDKELKLFDGVKGIGPTVSSTFVAELPELGKLNRKQISALVGVAPMNRDSGEYRGERTCYGGRTNVRRVLYMATLSAIVHNPALKEVYRHLVKDLKKKPKVALIACMRRLLTWLNAMVRDGAEWNPQLALSGA

SEQ ID NO: 309293 - protein, 406 aa, unidentified
MINDNVVVFGIDVSSRKSNVCEMIGQGNVIKQYEISNDRVGFNILLNNLKVFAQKPEVIFEATGVYSERLQSFLDMHHFSYCRLNPLKAKQQLMRFRLNKTDKHDAYGLANSQYIFHRRPEYRISPIYKKLKSLGHYYDQLTHDLVISKNRLHRVLQEIFPDIEQLFSTPQGRNYWQCIIKFPHPELVKTAGLDNITKQLMTLKGVGHHRANYLAQRLLNLANITFPSAPVDFPQVVQARDYAQRLITLTSKRKEIVTQMVTIARQLKSDDLTILTSIPGISNTTAVLLLGTLGDIRRFRNPNALNAFVGVDLRHYESGQFIAADHISKRGNAMARKILYRTIGQIASASRCHQCHIADYYAQKKKSSQSQNSKKIAIAAVHKLIRTIYHLIIYGQKYDYQFTNHR

SEQ ID NO: 309294 - protein, 342 aa, unidentified
MKYIGMDVHAVSTTFCIFDPDAPPRRQYQTLTRPTERAALEAVLEPYAGACAVVYEVGPQAQWLAAIIRPLAKTMVVANPSRMPWLFRDGRKNDQIDARKLVTLLYLQQVPTVHLPSAEVSAWRALINNRRTIVRRRTMVKNQLRGVLRAYALRCPEKSCWTHRGRRWLETLDIDPARNFLMRQLLDEVDYHDIQLKRIEQELARIAAQQPAVALLQSIPGVGPRTAEAIVAFADDVRRFGNRKQFASYFGMVPKLDASGGRERLGHITKRGPSVVRWLLGESAHIVIRRNPQLRAYFEQVRRGDKQRTRKAIIATARKLLSIAFAMMRAGRPYDPARVRAA

SEQ ID NO: 309295 - protein, 309 aa, unidentified
MDAKYVGIDVSKDRLDVHVRPTGEAFAVARDGEGLAALVERLRLIAPQLVAVEATGGFEMTVAGAIGGAGLPLAVVNPAQVRHYAQALGRRAKTDAIDAEVIARFAEATRPEPRPLPDEATQALAELVTRRRQIIAMMVAERQRATRLPKRLKRSCERVVRVLEQELAALDQDIDTTVRGSPAWREKEDLLASVPSIGTTTARALIADLPELGTLDRRKIASLVGVAPFTRQSGQWRGKAFIAGGRPHVRAALFLATMSAVRHNPAIRAFRQRLLAAGKPKMVVMVACMRKLLTILNAILRDHKPWQPA

SEQ ID NO: 309296 - protein, 334 aa, unidentified
MENCGIDVAMKSSSVCVLDRRGAVVLEQVVSTDEVGLASVLKARRRMRCVLEAGPLAEWISTLLEQMGHEAVVIDARKATGVIRTKKKTDRLDARNLARMGKTGWYTKVHRKSAEARVMRTFLQARQGLVQTALAQGSRIRGLLRAHGVKLGEVKESEFASEVKRLACEKGPELWEMLEPLVEVRRHALRASVQMRRRMVREAAEGTVARRLMTVPGVGPLTASAFVATIDDPKRFRSSDQVAAYLGLVPSVAQSGELDVHGHITREGDGMLRGYLVEAAHVLLTRTRRSCRLKQWGLKLARKKGHGKARVAVARKLATLLHHLWITGESYRAA

SEQ ID NO: 309297 - protein, 348 aa, unidentified
MDRYIGIDAHAVSCTIVVIGQSGRKLSEQVVETNAKALVDCIRSIPRPRHVCLEEGTQSAWLYEILSPHADELVVVAITESKGPKSDHRDALARAQQLRLGAFDKLVFKAPTRFALLRELARSYDAMTCDVVRTQCRIKALYLSHGIHAPGQTVYGAPHRSEWTDKLPVSCRASALLLYGQLDAMQQLKKDAQRQLVAESHRHPISKLLETCPGLAQIRVAQLIPVVVTPHRFRTARQFWSYCGLGITMRSSSDWVRQDEHWVRAEVNKTRGLTRTFNHTLKHVFKGAATTVITKLPDHPLRQHYERMLNAGTKPNLAKLTLARQIAATSLAMWKHEEQYDPARHHKQ

SEQ ID NO: 309298 - protein, 465 aa, unidentified
MQTHWLFAGGKAALSAVRDISLDFSGMILIREVADAPAIMGISKPAGLKSPCGEVKFMNPLFVGIDVSSKNNVAYLMKPDGTKHSSFSVQNNLGGAKLLSERIVSSLSSLQLCDVVIGLEATSIYGNSLVYALREDGSLGRFQRKIHVLNPKQVKKFKEVYQELPKNDWVDAFVIADHLRFGRITKEVYMDDYRYQALRTLTRARFNVIQNLTREKQRFANYLFLKCSVIAQNKDIKNTSATTIALMEHFETVNDLTNADLDQLTAFITEIGRGRFTEPDATVKAVQAAARGSYRLPKTVNDTVNQAMSVSIAAMRALKEQVKVLDKAIEQQFEIVPNTLTSIPGIGKVYSAGIIAEIGNIQRFDSQASVSKFAGLVWHKNQSGDFEAEHSQMIKSGNRYLRYYLMEAANSVRRCDSEFRRYYDLKFKEVNKYQHKRALALTARKLVRLVFRLLKDNRLYIPPEG

SEQ ID NO: 309299 - protein, 340 aa, unidentified
MKEVTTIGLDIAKQIFHAHGAGSSGAPVFSRRITRQKLIQFFASQPRCVVAMEACAGAHHWGRELMRLGHEVRLIPPAYVKPFVKRQKNDAADAEAICEAAQRPAMRFVPVKSEAQQASAAVFRARDLLVRQRTQLLNALRGLLAEHGWVAPKGLFHASAMMAKIEGPSCELPASARDVFLVMIASVRALDERIHLLDREITKRAREDETARRLMTIPGIGPITATALLALAPAPESFRKSRDFAAWVGLTPLQRSTGGKAKLGSITRMGELTLRRLLILGSAAVVLHASKRGAAKGSWLEQMMARKPRMLVTVAFANKTARIVWALLAKGGVYRAPAVA

SEQ ID NO: 309300 - protein, 371 aa, unidentified
MVKIAKYVGLDVHKDTIAVASCTGGPLASAKDEGILPHDLPKLRRKLLSLADAEHLRVVYEAGPTGYGLCRDLKANGISCIIAAPNKVPLMPGPRIKTDKRDARYLAWQLRMGTLTGIALPDEELESLRDLIRAREDALHTRRRTRQQLGGLLLRHGARWPGKSTWNQKYIGWIGGLRMGSEAQELAKQQYLGEVKHFDERIEMLTEQIERLARMLRDEHGELYRALQGLRGVSTIVAATLVCELGDLRRFKSASQLMSYVGMVPREHSSGARTWRGSITKAGNPHVRRVLIEGAWSGRLRPGMPERLKRRQQGLDQAVIDIAWKAQKRLYARFCRMRARGKPQNVAIVAMARELLGFIWSIGQQVGKQSA

SEQ ID NO: 309301 - protein, 343 aa, unidentified
MQNTIIAVDIAKNVFEVAVSRRTGLVAERHRLSRRRFLPFFAELKPTTVLLEACGSAHHWARQLQNLGHKPILLPAHATRPYVLRNKTDQADAKALLEASRNKDIKPVPVKSIEQQALMTLHRLRSGWMSVRTARLNAIRGHLRELGFTIPLGARLVVPRLWELLEDAETDIPQFLRPALAEAGREVRELEQRILDIEKQLREVSRQSPLIMRLRTVPGIGLLTATALVAFVGNVQRFSSGRRFACYLGITPREYSSGQRRRLGHISKRGDVYLRTFLIHGARSVLNAAKRTENPDRLRTWVLSLEARAGHKRAAVALANKMARIAWAVWRSESAFQSTPAEA

SEQ ID NO: 309302 - protein, 315 aa, unidentified
METTTPTTEVTYVGLDIAKDRLDYTVDGIRCDHVPNTPSGHEKLLSVLAKLRGVRVICEATGGYERAVVAALLLAKHEVCVTNPGRVRAFAHAEGLLAKTDRLDALLLRRFGEKVQPRLHAPMDQAAITLRELLDYRRQVSEQLVAVRNRLELAGPVLRARLDGQVTFLEKELTATDQLLQDHIDHDDTLSRKAARLRELKGAGPVLAATMLAYLPELGEIESPQLSALVGVAPFARDSGRSHQARHVRGGRGLVRRVLYMAAVAATRHNHVLRAYYTRLVAAGKPKMVALVAVMRKMPHVLNRLLADPNFVLVQ

SEQ ID NO: 309303 - protein, 326 aa, unidentified
MNVIGIDVSKDKLDCLWLRDLATGKAKSKVVPNQPCGYQALLAWAEKSVGCPVAELWFVMEATGVYHEALAAALTRAGAQVAVVNPARIRDYAKALGQRSKNDQRDSYVITHYGLTQPLVRWQPEPPEVRELKALLARLEAVAKDAQREANRLEKATISQASKVVIDSIRGMLVALTAEKARLEKLIDKHIEGHPILKRDSALLKSIPGVGAVLSRYLMMTYHSREFQSAAQMAAYLGVVPVEYESGSSVRKRPRLSKAGSGVIRAKLYMPAVVAARCNPQARALYQRLLQKGKTKMAALGAVMRKLVHMCFGVLKHQQTYSPLVA

SEQ ID NO: 309304 - protein, 345 aa, unidentified
MKITTVGLDLAKSVFQIHGVDGRGKAVLRKQLKRSEVVQFFANLPPCLIGMEACGSAHYWARKLTALGHEIRLMAPRFVKPYVKTNKNDRNDAEAICEAVARPNMRFVPIKSAEQQALLALHCARSGWVKARTAQVNQIRGLLSEFGIVLPQGITRLRHRLPEILEDGDNGLPGLMRALLSTLQTHLKELDQQIVALEREIVAWHRRNENSRRLERVPGIGPITASALVASIGNAHNFKNGRQLAAWLGLVPAQDSSGGKTKLLGISKHGDVYLRTLLIPGARAVLRHLEHRPAATNSWLARLVARRNRNVAAVALANKNARIAWALLAHQRDFASDYVSTATTH

SEQ ID NO: 309305 - protein, 361 aa, unidentified
MEVMNRRHIGIDVGKRTMEVRIIDKGKVINWNGKTDERGREALLGILRETDRIGIEAGMPAFLIAKQIIREVKSDVVVLNPGDLQIIYKSLKKTDKEDALKLARMVEKYSNEELPVVTLPTEEEEKNRALVSQMIFYKGERNRLINRLHSVYVRSGIVDLSKKDLRTAGNRAKCKESLYEEGFIKEVNMLEKLIVDTEENIGELDNKKAEALSKNENSQYLLSIPGVGPELALAFLAYVGDGSRFSKASQVSNYVGLVPKVDISGDTIRYGHITKRGCTQIRRVAVQAAWALVRSQWGGDLQKKYNELAPKRGKGIAIVAISRKLIELMWTVITKKTFYWYMPEKNREAKFKLYKIRIVAA

SEQ ID NO: 309306 - protein, 407 aa, unidentified
MPAPPSEIDVWVGVDVGKEFHHAVVLDDDGDTLIDRRVGNDEADLVGLLDAAAGHGTVALVIDQPGSIAQLALAIAARREIPVAYIPGLVMRRAADLYPGDAKTDRRDAYVIADTARTRRSQIHWIGVDDDLLVQLRVLNGLDIDLAADSTRQTNRLRDALTSVSPALERALGTRLHHAGVRDLLAKLPTPTALRRAGKARIRAIITKRSPRLGVSVTERVWAALDAQTVSVPAEETLGRVIAELAVELDRIRARRDTLEAEIEEVFLAHPLGPVLISLPGIGPRTGARILAEIGDGTAFANGSKLAAYAGLAPVTRQSGTSIRGEHRSRRGNHRLKNAMFLSAFASLSDPDSRSYYDRKRAEGKKHNAALICLARRRCDVILAMLRTGEPYLTSDQLAARDTQKAA

SEQ ID NO: 309307 - protein, 317 aa, unidentified
MTYISRFVGIDISKSSFDICLLPDEHSARFSNTVAGIAEFMAFLAGWDGIERIVLEPTGGYERVVVEALLSARLPVARVNAKHIRQFARACGQLSKTDRIDAFVLADYARRMETKVLVQTSAAQNVLTDLVARYKPLSHMIVQEKNRREKLVRQTDGRTRAWIAETLQFLLAQRQSVVDEMTACLKSDADLANRAGVLMSLKGVGLRTACFILAGLPELGLMDKGQIAKLVGVAPINRDSGLMRGKRMIAGGRKPVRDALYIAALPAIRFDPDMKALFERLTSKGKPGKVALVAVMRKMIVILNARMRDYRATALDA

SEQ ID NO: 309308 - protein, 341 aa, unidentified
MSIITVGIDLAKAVFAVHGVDENGKAILLKPKVSRDQLLPLIVQLPPCLIGMEACTGAHHWARLFRDYGHTVKLMAPKFVTPYRLSGKRGKNDAADAAAICEAVTRPTMRFVPVEEEHQQIILCLHRTRQGFVEERTATYNRIRGLIAEFGIVLPQKVACLRRSIGGYLEDLPGYANRCIGDLLAHAEQLDARINEYDRLIAQAAREDARSKRLMQRPGIGPVTVSALLASIGNGHDFKNGRQVAAWIGLVPGQYSSGGKARLARITKAGDRYLRSLLVMGARAILSGLGDKQDGFSRWARSLVERRGYWKAVVAIAAKNARLAWAVLHYGEDFRLHPSAI

SEQ ID NO: 309309 - protein, 403 aa, unidentified
MEGPLISLDVSKGKSNYRFFENGTDRKGKKGVIRHDIQGFDSIRDEAEKMEERLRIKPSVIFESTGVYSDVVEKYFTDKGFDVYVISPLLSASMRKEGVRPAKNDSLDTLSIAKVFYSKDDLRKCSENDKKAERLREMSYELDMMNRRIRPMKCQFLRLLDKVWPCLDEVSDYSSRFMLDFIIAFGHPENIKTVKGVLSVIRKSEMGTAGRKDKIAQDLFDYCHTHLSAVSKDSSYVELLKRMAIELKSMAKKKSELIDRMAEEARNKDEFVRLLTIPAVAKTTALKIMARVGDISRFRNAGALVAYCGLDPRVYQSGKMTGEHRTITKKGDCILRSTLFLAVKLMVMLYPDTKVARFVAAKAKNGLSYKQAVVAGSAKLARIIYSMLTHHENYVEFNADIVA

SEQ ID NO: 309310 - protein, 410 aa, unidentified
MKIAGIDVHKKVLMVVVVDTSVREEKPVRKRFVTLPSELQRFRIWLQAQGVEEAVMESTAQYWRSVWLELEPHMRLHLAQAFSNRAPRGRKHDFKDAERLVRRLIADELILSFVPNGEQRIWRSMTRMKLQLTRDRVRLQNQMECLLEEMRIKLSIVVSNLLGASGLRILRALANGETDPKKLAQLGDERLQCTEEQLVDALTGRVQPMHREMLALPLQRLQLIDQQMAQLNGMIAQAMKSHQDAVIRLAEVPGLGVDSAQQIIAEVGAQASTFCSAAELTSWVGTCPGKQESAEQNHSSRSAKGNKYLRRVLNQAAHAAVAKKGSHFQVVFRRLLPRLGYQSAIWAVAHRLCRVVWKILHEGVRFIEQGREVGPREKKQRAQMLARALRKLGYEVTITPINQLAAKPVI

SEQ ID NO: 309311 - protein, 359 aa, unidentified
MIKDSIVFVGLDLGDRWSQLQVLDQEGEVVEESRLPTRESALRRKFTTTGRWRVAMEVGTHSPWVSRLVKELGHEVIVADARKLRLIYRNPRKNDRIDAEYLARLARLDPQLLSPVRHRSPEAQADLALIRSRDALVRARTMLINHMRGMPKSFGERLPACSAESFHHKVREAMPQALQPAFEPFLDTIGEMTDRIRAYDRQIEDLCRSRDPQTKELRQVGGVGALTSLAYILSLEDPARFRKRREVGPFLGMVHRQNQSGGADPQPRITKTGDAYLRRLLVGSAHLSFDPSVHRALRAHPECERKCGVQELSRQISEERSPRRPLTTKAFSWKWLGGRTEQEGGRLIRRHRWWIVSQR

SEQ ID NO: 309312 - protein, 342 aa, unidentified
MDHFAGLDVSVKETSVCIVDDTGRIIREVKVASEPEALLKVLGNPGYRFKRIGLEAGPLSQWLFSALAEAGLPVVCVETRHMQAVLKAQINKTDRNDARGIAQMMRAGLYRPVHVKTLRSQKLRMLLTHRKLLQSKAIAIENDLRGTLRNFGLKVGMVGTVRFEARIQELVENIPDMAVLVEPLLIVRRALREQIVILHRRLLAIVRDDEVCRRLMTVPGVGPVVALTYRATVDVPARFRNSKAVGAVFGLTPAKYQSGEIDWSGRISRCGDEMMRVMLYEAAQSMLRSKKWSWLKAWAMQIARRRGMKKAIVALARRLAVIMHRIWVDGTEFRWTRETAAA

SEQ ID NO: 309313 - protein, 414 aa, unidentified
MSKARKRMRVKSHQLTVGIDIGKYHHVAVGLAGDGRLTKPMKLPNTREGYEQLLLRIMAWKKEYGADEVLVGMESTGHYWEVPARWLTAHSIPVVQVNALHTKRAKEIEDNTPGKTDPKDARIIAQLVAWGKYLDCHLPDGAVAELRQFVRQRSTLTNELTGKRNYLRYLLDCVFPELFTVFKKSSGKTLLHLLALCPSPHELIGADQADVARTLRQHCPTGAAKRLDRVYALARITVGIAPARHAYAVAIRRTATRILALHEEKAEVEQQMTKLLIELPEAGSLLSVKGIGPVSAAIIVGETGGLHRFGHAEEVIKLAGLNLFEVSSGTHKGTVRISKRGRPLLRQTLFVLATIQAKKGMPFHACYEELLNKKMPRVKALIAVARRMVRVLFALVRDGRCYQDEKPAALKKAA

SEQ ID NO: 309314 - protein, 354 aa, unidentified
MSGEKYIGLDVHQATISVAVMDSQGKVVMESILETKASTILEFLAGLRGTLSLTFEEGTWAAWLYDLLKPHVAKLVVCNPRKNALLKQGNKSDKIDARQLADRLRLNDLKSVYHGETGVRMLRELARSYLTVVKDLSRVMNRLKALYRSWAIPCAGRDVYYTRHRSQWLKKIPEAGTRRRAGQLYQQLDMLQHLRQQARRELLAESRQHTITAKLRQIPSLGPIRSALAVALIQTPHRFRSKRQLWTYSGLGLETRDSGEYHFVKGQVQRKKPVWIRGLNKDYNHDLKGLFKAAAMRASTQPGPFQEFYQRSLAKGIKPTMVRLTLARKIAAITLTVWKKGENFDVEKLKSQAA

SEQ ID NO: 309315 - protein, 354 aa, unidentified
MKEFIAFDSHKRYTLVELEDVGTTKTRQFRVEHAPGAIQGCLQGREKGTSVAVEATGNWYWIVDEIEQAGLQPKLVHPRKAKLMMGLINKTDKLDAHGLNQLQRNRTLPTVWIPPRELRDLRELTRTRMVLAAQRTRLKNRIQATLNKYGWILKDYSDPFGKKARVELNLCILCIDHLPSQTAYVTGVLMNQLDKLEEQIKAMEKRIRALAQETPAIKRLMTLPGIGWILAVVIALEIGEVLRFPSAEHLASYSGTTPRIHQSGDKTRYGRLRPDVNHYLRWAFIEAGHSVCLNQAVHPHRHVTRLYQRVRGRRGHSKAVGAVARHLAEATYHVWNTGEPYRDPALSKGQSREV

SEQ ID NO: 309316 - protein, 344 aa, unidentified
MDHFAGLDVSVKETSVCIVDDTGRIVKEVKVASEPAALLKVLVNPAYRFKRIGLEAGPLSQWLFSALAEAGLPVVCVETRHMKAVLKAQINKTDRNDARGIAQMIRVGLYRPVHVKTLRSQKLRMLLTHRKLLQSKAIAIENDLRGTLRNFGLKVGIVGKVRFEARIQELVENIPDMALLVGPLLIVRRVLREQIVILHRRLLAIVRDDEVCRRLMTIPGVGPVVSLTYRATVDVPARFRKSKSVGAVFGLTSARYQSGEVDWSGKISRCGDEMMRTMLYEAAQSMMHSKKWSWLKAWAMQIARRRGMKKAIVALARRLAVIMHRIWVDGTEFRWTREQAAAAA

SEQ ID NO: 309317 - protein, 360 aa, unidentified
MKNLKYAIGIDVSMKDFACCLTLINEEQDVKVKASHKFTNTTSGFKALWEWTGRHCKEVLPIVFVMEATGVYHEQLAWFLNSKDQAVSILLPNKAKSYLKADGGKSKNDKSDARGLSKMGAEKKLDLWVPPSKELYTLRSYTRQHQNLTEITTSLSNQLHSIQHSHFQNKEIIKQLKKTIKLIESQREEMEAMISETIKSDTVLNAHYQNICVIKGLAMLSFAVIVAETNGFALFENAASVVSYAGYDVIENQSGKHTGKTKISKKGNSRIRRILHMPALKAVRDDQPQFKLLFERVYDRTRVKMKGYVAVQKKLLVMVYYLWKKNEKYNPAFHIIAPDNARATLDEPQINEALITQQNY

SEQ ID NO: 309318 - protein, 410 aa, unidentified
MHHKLKYLYIGVDLHKRHHTAVMMTCFHEKRDEIQFENKPSAFPKFLQQVEKLAKKEGLTPVFGLEDVGGYGRGLAMFLNEHKYEVKSVNPALTISIRRSSPNNKKTDAWDAECVARILISNLDTLPTANPHDLYYAISQLVTRRENIVSVVTGIKLQLHQLLGYHYPSYKKFFSQVDGKTALAFWLKYPSPSCLSGVNVDELANFLYKKSNRNMSTKKAEDILSLVQHDGDTSKDYQEANDFLVRNVVQDLIIRDHQLRQIDTALAKHLALLDYKLETMHGISTVTAAELIAEIGDISRFSSADKLANFAGIAPVQHSSGNKQKSKKSKLGNRSLYDIFYNLAIRQLGVSRAKKPNHPVYHAYYERKLAEGKTKWQAIICVMRKLVKVIYSMMKNKTEYKMPVLTEQAA

SEQ ID NO: 309319 - protein, 404 aa, unidentified
MEVVYSHCCGLDIHKKTITACIITPKGKEIRTFGTMTTDLLGLADWIKAKGCTHVAMESTGVYWKPIYNILESYNVEILVVNAQHIKAVPGRKTDVKDAEWIADLLRHGLLKGSFIPNREQRELKELVGYRKSLIEERAREVNRIQKVLEGAGIKLASVATDITGVSGRSMLDAIISGVDDPTLLAELARGKLKNKKEQLENALLGMVGRHQRMLISMQLKHIDCLDQQIAKLDQEIEERMRPFEKEIALLDGIPGIGVRSAQVILACIGTDMSRFPTPGHISSWAGVAPGNNESAGKRRKAKTTKGNPLLHTTLIQAAKSASHTKGTYLAAQYHRIAARRGANKATVAVAHSILVIIYYMLKNHMPYQELGSDYFDRISSKTIANRAIKQLEQLGYKVKIEVA

SEQ ID NO: 309320 - protein, 320 aa, unidentified
MRNTVGLDISKLTFDATAIVGNAEYSAKFDNDSKGLDQFSDRLKSLGCQNLHICMEATGSYYEEVADYFAQYYSVYVVNPLKISKYAESRFKRTKTDKQDAKLIAQYCRSAKESELVKRQKPTDEQYRLLRMTAAYAQIKSECAAMKNRHHAAKDEEAAKAYAEIIKAMNEQLEVLKEKIKEQTEKPKCKEGVKCLETIPGIGRMTAAVLFHHLTSSKFETSNKFAAFAGLSPQQKESGTSVRGKGKLTKFGNRKLRAVLFMPGMVAYRIRAFPGFIKRLEEKKKPKKVIIAALMRKLAVIAYHVHKKGGDYDPSRYKSA

SEQ ID NO: 309321 - protein, 345 aa, unidentified
MELHTIGIDLGKTVFHLVGVNLRGEVVVRKKFSRKQLLHFTANLRVELIGMEACGGAHFLGRALQEQGHEVRLMPAQYVKPYVKTNKSDYLDAEAIAEAVGRPRMRFVPIKTDDQLDLQSLHRVRERWVARRTAVINQIRGLLLERGITLRKGRCHVDAALPGILEDASAKLSGALRVLLAQLRLELDHLETRINEADAVIKKTVGENEACRRLVAIPGVGPVTATAVIAAIGNGAAFRKGREFAAWLGVVPREYSTGGKQKLLGISKRGNSYLRRLFVQGARAVLLQSAKQSSGLSAWLAQLTSRTHRNVAGVALANKLARMAWAVLAKNEKYRPPMLAGAATA

SEQ ID NO: 309322 - protein, 480 aa, unidentified
MAAKKKATADTDGTSAGAVEHGGDGAEVVEDRVEVVERAAAIDVAKGSGMVCTRVPGSRPDRRRQKVWQVGATFGEVCALMDHLRCEGIQRLVLESTSDYWRIWYYLAEAAGLQVWLVNARDVKNLPGRGKSDRLDCVWHCKLNERGMLRRSFVPPQAVRDLRALTRTRARLAQDQARHQNRVEKILEDALLKVSVVISDLFGASGRRFLDALVAGQRCPKALAALGDKRLKATRTELEAALTGRFRDIHGFEIGTHLRLIDAINDEIARLDQAIEQHLAAIPGTAPACTVCGLVGGGHVPGCASGDIPQLHLAGRLDEISGVGERNAQVIIAELGTDPSQFPTPGHAAAWARLTPRTMQSGDTARPGRTGKGNRYLRGALGQAAMATARTDTRLGAMYRRVARKRGKQKAIVAVSRVICETAWILICDPAARFHELGPDYYSPRSPARQTRDKIRELERLNPGKKVILADAGPEAGAAA

SEQ ID NO: 309323 - protein, 329 aa, unidentified
MKISSILGIDVSKKTLDCYLHVQQQGLPPISNDIKGFKSLQRWLLKTLKSTEGLIVVMEYTGIYTYGIERFLEAQNIKFVKRPALDIKRSIGLVRGKSDKVDSKFISKYGWLRKDDLKPMVPQTDEQVQLKQLMSHRDKLVVDRASYQSKLKELSLQMGTKMNSKIAESMIYVMNVLKQEIKEIEKEIEVLIKSDDALQTNHDLMCSVVGIGFATAVHILIATENFTRFTDARKFICYCGVAPFEHSSGTSIKGKTRVSHLANKKIKSLLTMAATSAIQHDPELKVKYQQKVKEGKNKMSVINMIRAKLLQRVFAVIKNQKPYEIRLAA

SEQ ID NO: 309324 - protein, 411 aa, unidentified
MEIVHERAAGIDISKRDAKVAVRKPGQRRGTYRTEVKTFGATTAQIRELIGYLNAEKVSVIVMEATSDYWKPFYFLMEEEQLPVILVNAKRARNIPGRKSDVNDATWLAELAAHNLLAASFIPPEPIRHLRDLTRARSAVVHDRTKVYQRLEKFLESSGIKLSSVASSLTGVSSRHMLDALVAGERDPQVLADLSIRSMRRKIPELVEALEGRFTEHHAAMVKLHLHHIDTLDEQLRVLDQMITEAMIPFDQACKALETVPGIGKQTAQVIIAEVGVDMNVFADAAHLASWAGVCPGQNESAGRQRSSHTRGGNVYLRAALGTAALAAIKYKESFLAARYRRLYLRSGGSRALVAIEHTIIVAIWHLLANGEVFKELGPDYYDQHNKDRAKSRAVKELERLGYEVHLDSAA

SEQ ID NO: 309325 - protein, 371 aa, unidentified
MRFYSSQHQFYAGIDLHARSMHVCVLDAGGTVVYDRNLACHFPTLLQAIAPYRGDLVIGAECMFGWYWLADRCAENHIPFVLGHALYMKLIHGGKPKNDRLDAAKIARLLKGGNFPLAYVYPQGMRETRDLLRRRMYLVHKRAELITHLEILNAQNNLPPFGKKLSYAGNRAELHIPERFAHPSVHMSATLDLDLIDKLDELIAEVELYLTRTAKVDDVQMYHRLRTIPGVGPILALVLLYEIHDLARFEEVGQFLSYARLVRCEHESAGKKLGWGAKKIGNAHLRWAFAEIACLFLRASERAKQWKQKQEQKHGSGKALGILAARLARSVFHMIRKQEAFDAKRFWSGQVSGEQPGPSRKKPAKSRKKAS

SEQ ID NO: 309326 - protein, 317 aa, unidentified
MQQHNTDHVGIDISKSKFDIRISGRPKGSVYEYTPDGMKQFMRVLQKTQPKLICLEATGGLERKLVACLQKHGFPVAVVNPRQIRDFARAKNRLAKTDQIDAHTIMEFSQVMQPRITPLLTQVQQKMREFSARRQQVSKMIIQEQNRLETTPDREVAKMISDSIQFYKKQLKHIEKKLKELIDADEESRERSEILQSVPGVAGTTAALLISDLPELGSLNRKQIARLIGLAPTNRDSGTLRGKRTIGGGRVRIRNGLYMPTVTALNHNPRIKAFYKRLVENGKPKMVALVAAMRKLLIILNTMVKEGKKWEAYMINF

SEQ ID NO: 309327 - protein, 356 aa, unidentified
MTEVKSLDFSGQSIFCGIDVHKKSWSICLRNEERELKTFSQDPDPLSLSRHLKRYYPNAQISIVYEAGFCGYWPQQELTKEGLNCRIIHPSDVPQTDKDRRYKTDSVDCRKLATELSKGTLNFIHIPSELTIACRTLVRGRQLLVKDQTRYKNRIQSFLDMHGMKEPQGYKNGTHFSNHFLQWLQNLPLDEKRKLILGSQLKMLATVRAEILTINKELRKLTQDPAYSQAIKLLQSIPGIGLISAFIIISELEDIRRFRGFDQLASYVGFKPDIYASGEKHVTKGITHSCNHILRETLVECAWMAIGKDPALTMAYTNYKQRMHYNKAILRIAKKLLNRIRYVLLNNTPYEIGILE

SEQ ID NO: 309328 - protein, 335 aa, unidentified
MEFENYLGIDISKETLDLALVTKDAELIELKLKNDRQVIEKAFNRLKRESQIDLEKTLVCAEHTGHFGNKLINVAVKLGLNLWMESAYRIIHSQGLIRGKNDRTDAFRIMEYAKRYQDKAMLMTPTPKSVELLKRLSSERDLIVRDLAKFKSQLKQEAGFFDKEYFSQKKKRIDKLMKANEKILKEVESEIDQILASDPELKKNLDRITAIEGVGRQTAVATLVATENFTKFTDPKKFACHSGCAPFRYESGTSRKSAHKVSHKADKNLKRIYHMAAVSTLTTKGELRQYYDRKVAEGKNKMSVINVIRAKLIARIFAVINQNREYEKNYIHPLA

SEQ ID NO: 309329 - protein, 358 aa, unidentified
MAGKVTETAVVGGVDTHKDLHVAAVVDQNNKVLGTQFFSTTRQGYRQMLAWMTSFGALKRIGVECTGTYGSGLLRYLQNAGLDVLEVTAPDRMERRKRGKSDTIDAECAAHAAFSGIRTVTPKTRNGMIESLRVLKTCRKTAISARRVALQIIHSNIISAPDELREQLRNMTRMQLIRTLGSWRPDASEYRNVTNVYRISLKSLARRYLELHDEIADLDVMIAAIVDELAPELIKRNAIGYESASQLLITAGDNPQRLRSESGFAALCSVSPVPVSSGKTNRYRLNRGGERAANSALHIIAIGRLRTDDKTKEYVARRVAEGHTKMEAIRCLKRYISREVYTLLRNQNRQINSIPITA

SEQ ID NO: 309330 - protein, 455 aa, unidentified
MPKQKRTRNARTLPVARVLEPNAAGIDIAATEVYVAVPTGRDPQPVRRFSTFTDDLHRLADWLQACRVQSVAMESTGVFWIPLFQILEDHGFRVCLVNARHVKNVPGRKTDVSDCQWLQYLHSVGLLRASHRPTQTICAVRSIWRHRESLVQMAAVHIQHMQKALDQMNLQLHHVISDITGTTGLAIISAVLDGERNPENLATLRDPRIVASRETIARALVGDYRVEHLFTLRQSLQAYRQYQQWIAACDSEIERQLQVLPSNLPDDPKPLSKPRDHHKPRRNEPRFDLRSQLYRVFGVDLTAVPGVSSLTAHTLLTEVGPDLRRFPNAAAFASWLGLCPDNRISGGRVLSVVTRKVKNRLTIALRMAAQSLHRSQSYLGQYFRRMRIRLGTPPAITAAAHKLARVLYHLITTRQPYEESTFAAMEERSRHRQLLRLKKQAASFGFQLVPGSSVP

SEQ ID NO: 309331 - protein, 317 aa, unidentified
MARNDLVVAGIDVAKDKVDVCIRSLSQRRAFESTADGRRQLVTWLRKHKVTKAVMEASGGYEREWAKALRGVEVRIVDPKRVRHFARSAGRLAKNDVIDADMICRFGETFGEAPSQTYDAAREQLQQMVNARQGLLDIKTMLRNRGEHDVPQAVKQVHARLLKNITAELAKLKAAIIVLVKATPDFAKLADIIESVPGLSRITSAGLIAAMPELGQVSDEAIAALLGVAPYDDDSGKRRGERHIKGGRRRVRNLFYMSCLGAATLHNPPLKAFYDRLIAKGKEAKVALVACMRKLIVILNIMISRGEKWDASRYAVA

SEQ ID NO: 309332 - protein, 338 aa, unidentified
MRLYAGIDLHANNSVVVIMDDDDRIVYQKRLHNELGAILQGLGTYQDRLQGVVVESTYNWYWLVDGLMAAGYRVHLANTTAIEQYKGLKHSDDQSDARWLAHLLRLGILPEGYIYPKEERAVRDLLRKRSQLVRQRTTNLLSIRNLFTRNTGGAPSSTRIKHLTAAEVEQLFPQVEVALAVKSNLTVLHCLEEQIAQLEDVVLAQLKLHEGFRSLLTVSGIGQILGMTIMLETGTISRFATVGDFASYCRCVSSQKLSNGKRKGQGNIKNGNKYLAWAFVEAANFAVRYNAQIKRFYQRKRAKTNSVVAIKAVAHKLARACYYMLRDQVPFEVDKAFT

SEQ ID NO: 309333 - protein, 348 aa, unidentified
MAVYIGVDFHARQQTISYLTTEDGEMKRVVLEHSEPAAVRAFYAQFAGQRVVVGYESSGYAAWFEELLEELGCEIWIGHAADIRRFARRRQKNDRRDADLILELLVAGDFPRIHRYSRESREVLQQLRYRQKLVKMRTMVINGLLFMASSRGVTLRTQLQSQRGQARLRQIALPHPLAQQRDEMCQLLLELSSKITTVEDWLNTKAEQDVRVQRLRTQHGIGPLTGLCLTYTLECPARFANPRKVTAYVGFDPVEDSTGERRRMGSISKQGSRLLRFLLVEAGQVAMRKDADLARVYKRISLRGGHAKAKVAIGRRLLVRSFIMLRDEIDLAEFQRRGVAARSSRGSA

SEQ ID NO: 309334 - protein, 340 aa, unidentified
MNYYAGIDVSLEESCVCAIDATGKIVREAKVASEPEALIAWFRSLGVELTRIGLEAGPLSQWLYAGMQQAGLAVELLQTRHARNAFKIMPVKTDRKDARGIAELIRLGWFRPVHCKSMEAQETRAMLTARKLVQKELLETESSLRGILRGFGLKVGKTTPIHFEGRIKELVAGHPSLEIVASALLSVRATLRRELDGFEKRLRAMARTDTRTRLLMTTPGVGVIVALTFACAIDDPSRFKSSKTVGAHFGLTPTRYQSGETDYSGRISKNGDGLVRTVLYEAAHVILTRPLKGCTALKSWAMRIAKRAGMKKATVALARKLAVIMHRMLADGSPFTTQPA

SEQ ID NO: 309335 - protein, 352 aa, unidentified
MEMIAMDCHKRYSQACVQDEMGKIIFEGRIQHDPVEFRAFLGGRTPGSPVAIETVGNWYWIVDEIEKAGLQPLLVHARLAKLLMGLKNKTDKLYARGLNRLQRVGTLPTVWIASADIRDKRELPRTRMLFAQLRTRLKNRIHSVLEKYGLGRSLDAASDIFGKRVRKDLERALGLLPEHAGYTAGLLLGELDRVQRIIYDIEKLMKAVFEDTAQVRLLQTLPGVAWILSVVIWLEVGDIERFGGPDRFASYCGTVPRVHSSGGKTRFGPTCPDVNHYLKWAYAEAANSVGLNHRRLPDRHVSQLFGRIRSRRGSAKAVGAVSRHLAEATYWMLRRQEAYRERGVLAVSSKGA

SEQ ID NO: 309336 - protein, 354 aa, unidentified
MSSMTVDAPTRKVIVGVDTHKHIHVAVAIDQHGARLGDVTVSADTGGYTELEQWAQALGRIDRFGIEGTGSYGAGLSSFLRRCGHRVVECNREDRRARRRNGKSDTVDAEAAARSVLAGTSTIVPKTGYGTVEMIRQIKVARDTARKGRTSAIITLKAIIVNAPAELRESLSGLPDKALLDRCAGFRPGEITDTTGSTKHALRSLAKRWLDLDAEITSHDRLLDGLTAQTSPTLRDGYGIGADTAAEMLIVFGDNPDRIRSEAAFAKLCGVCPIPASSGMTNKHRLYRGGHREANAALHRTVIVRMRFHQPTIDYAARRTAEGLSKKDIIRCLKRFLAREVYQRVMTDHATRSA

SEQ ID NO: 309337 - protein, 392 aa, unidentified
MVVSVGIDVSKDKHDCFILSSEGEVLVDGFTIPNTMDGFNCLLQRIQDYTTPQDKMKVGLEATGHYSYNLLGFLLDNGLTTYVLNPLRTNLYRKSLSLRKTKTDRVDARTIAAMLLSDAGLKPYTDTAYHNEELKSLTRYRFDKVKERAKLKSSISRLVCILFPELEKLVPSLHIASVYALLAEFPGAKQIAAAHLTRLKALLETASKGHYKRDMALEIRDAARNSIGSWMPAKSLELQHTIRLIRELDDEIVEIEERIQAIMDELNSPITTIPGLGFRMAAMIFAEVGDFTRFDSPDKLLAYAGMSPSTYQSGQLKNCYPHMEKRGSRYLRYALYNATKYVCHWDPTFASYLAKKRAEGKHYNIAISHAAKKLVRLIFALEKSRQPYCSAA

SEQ ID NO: 309338 - protein, 433 aa, unidentified
MGLIVPTTIQPEREDQPLPYEWFVGIDWGSQQHQVSVLDRDRRRVGERVVDHDGASLARLADWLWTLSAGQPQQVAVAIEVPRGAIVEGLLERGFHLFALNPKQLDRFRDRHSVAGAKDDRRDAFVLADSLRTDQPSFRRLQLEAPQFLLLRELSRAEETLLAEFRRSANRFREQLHRFYPQMLQLCAAADAPWLWDLITLAPTPAHAMLLSEEQVQRVLKAHRIRRLKATEVLACLQAPALPVAPGTADAAQAHCGFLLPCLRVLAEQLLACSQQVSTLLRTLADEPGKGEGPSDVAMVQSLPGVGRKITAWLCAEATQPRAERDYQMLRTHGGVAPVTKQSGKRRQVVMRHGCNPRLRHALYHMARIAMQRDAHFGSVYAALRAKGQRHGQALRNIGDRLLRILMAMLRDRTGYDASRIRCKPVVEMGQKM

SEQ ID NO: 309339 - protein, 410 aa, unidentified
MYNKATRQKLYGMQYQSSIVCVGIDVAKIMHDCFILNSEGEVLADVLTIANNRDGFKTLLRRIRYCSQPTDNIKVGLETRGQYSYNILEFLLNNGLHTFVLNPLHTNLNRKSHSLRKTKTDRIDARTIAAMLMSDVDLKSYTDTAYHNEELKSLTRYRFDKVKERAKLKTSVSRLVNILFPELESLVSSLHTASVYALLSEFPSAKQIADAHLTHLKTILSGASNGRFGRQKALEIRDAARRSIGSVMPAKSLELRHTIRLIHELDREIDEIEAQISALMETISSPITSIPGIGLRMGAMILAEIGDFSRFESPDKILAFAGLSPSTYQSGNMNASGAYAHMEKRGSRYLRYALFNAAKHVCQWEPSFAAYLSKKLAEGKHYNVAISHAAKKLVRLIFALQTSGQMYLPA

SEQ ID NO: 309340 - protein, 382 aa, unidentified
MQASTEITLTVGHIDTIFVAIELSQKTWLVTLHSPDRDRISRHKIEGGDHAELLAQIEKVRARATAKLGSAPRVVSCYEAGYDGFWLHRLLQAAGIANFVFDAASIAVEQRSRRGKTDRIDGELMLRTLMAYLRGEPRVVRIVRVPSVAEEDARRASRERDRLVKEQTGHTNRIKALLRLLGVAVGNPRRGNWLSFLKQQRDWQGQPLPPHLLAEVTREHARLTMVREQLAALEQAQDAQTYPVPAPMAERRSNLQRLKALGPAFTTSLVDEVFYKDFRNRREVASYNGLAPSPWKSGGIDREQGISKAGNRRARHKAIELAWLWLRHQPDSALSRWFRTRTANAGKRAKRIAIVALARKLIVALWRYLTTGLIPEQATMKA

SEQ ID NO: 309341 - protein, 339 aa, unidentified
MSLYAGLDLHSSNTYIGVLDPQFNRIFKKRVCNDLDLILQTLEPFRDRLRGLVVESTYNWYWLVDGIMDAGYSCVHLANPSAIKQYEGLKHSDDQHDAFFLAQLLILGILPQGYIYPKEARPVRDLARKRMFLVQQRTAHILSLQSLLARCCGQKVSSSQLRKVTGQDLKRWLKEEHLVLSAQANLDNIVFLKQQIGRIEAAIQKQVKLTEAFNCLLTVPGIGKILAMTIMLETGDIHRFANVGNFASYCRCVSTQRLSDGKSKGSGNRKNGNRYLSWAFTEAAQMARRFNSRFRSYYDRKAAQTNSILATRALSNKLARVCYYIMRDQVEFREESVSN

SEQ ID NO: 309342 - protein, 379 aa, unidentified
MNDNMTYVGLDVHDETIVAVWRRPGFRPKEMVYSNDEKGIERLVKDIGTKEIWAVYETSGVGFVLWDTLTRFGWKVDVLATTRLPQSVKSKKRKTDFEDAKRLLDLLMAHAVVGAELPNVWVPPKSIREDRQAVRHRLNLGDEAGRVRTKIKCLLKIHGLKYPGKAGSWTQKYMAWLRGLATPEAGLAESVWCVLASHLRQLEMYEDEIKTLDGQLERLSHVKTYEAQVAAVRAIKGFGLLTALAFLLELGDVARFKNRGQVGSYVGLTPTSHESGAQTDRKGHVTRMGPAGVRKVLNQAAWTYLRSNGCERSWYEQLKYRRGTKRAIVALMRRMAITAWRLASKVVKAGDAGPTNPAEQSGAAAARRAPGLGAPRASA

SEQ ID NO: 309343 - protein, 402 aa, unidentified
MNAVGIDVSKGKSMIAVMRQFGEIVASPFEVNHTTEELSKLAEMLRNLDGETKIVMECTGAYHLPIAYALNESELFVSTVNPIITHKYDNNSIRKSKNDKADAIKIANYTLTNWLKLQQFIPEEDIRHMLKVYSRQYNKYKKILTMLKNNLISLLDSTFPGANELFTSPPRKSDGHEKWVDFVAHFWHCKCISSISENAFVERYRKWCKRAGYNFSQAKAEDIYIDSLGHFFIIPMTETTKRLITQATSQINTISETINTLACEMKSLAGSLPEYPVVMEFRGVGDILGPQLIAEIGDVYRYSQKSSLVRYAGLEPVENQSGKFRGGESISKQGSPHLRKTLFQVMDCLLKHAPADDPIFQFLDRKRAEGKHYRSYMCAGAAKFLRVYYARVREYLEKHFVE

SEQ ID NO: 309344 - protein, 408 aa, unidentified
MVTPIVKRCAGLDVHKMVVMVTVLLEQADGSIAEETREFGTFRKHRRQMCRWLKGHEVELAVMESTGIFWKSIFSSLEESGINTYVVNARYVKKVPGRKTDVSDSQWLATLGRLGLLKPSFIPPKDLRELRLITRHRVKLQGMLAAQTNRLNKVLDDAGIRLGGVVSDINGLSARALIEGLIDGKAPGEIVPHVRGRLKEKIPQLLDALDEPLGERHRFLLQSIAQHLCYLEQEIDNLDKYLFAAMIPYQRQWEILQTIPGVDAVSAAMLLVEIGVDMTCFGRAERLASWAGMCPGNNESAGKRKGGRIRKGNWALRRLLCEISNAANKTKSQFRGQYQGLVIRRGHKRAIIAVGHKVLRVVYAMLKSLQPYRDPEIDYTGIVVQRNAPRWLAALNKYGFLPEMIKAA

SEQ ID NO: 309345 - protein, 523 aa, unidentified
MVTKNRKRKFAGSKKRFVGKPTGQIQERVQAVGPEHFGIVAVDCAKRRSKWMLCNFYGKVLVEPTGVEHTTGGLRAMTQSVAEACQAEGLTDTIVAVEMTGIYHKPAQRAFRKAGFDTRVVHPFASNHYRRPLHPDAKTDDHDLEAIFHAAVKGYGLAILPVGEIYQSLQAVSRHRHNLVKQRARLMVQIRRLLHQTMPGFADLFEDDKLFHKSIALAIALKFSSAEAIRRAGVDGIASHLSETNVRFQSRTIERIVAWAGSAAEPSELAAMYTRQWQQLNDVRRLFDEQIAASEREMAGFLVKTPYVLLLSVTGINVVSAARLAGEAGPIEHYASARAINGRAGLYPSRYQSDEVDHADGSLVRQCNRKLRGAAMLVAENLIKCHPYYRGLSALWMQQKVDPRDRRCRIANRAMRMVYQLVGGRQLWRGKGVNREYLLAKLQEFHRVHETPIDQAIRDLHEAFAWLPKSAYAEEAKPLAEWTRRKQRGLQRIGDLMIPLLIRLGVGIPDEVKSNPSEARSSD

SEQ ID NO: 309346 - protein, 343 aa, unidentified
MGEVSTVGLDIAKSVFQVHGVDVDGAVVIRKRVSRAKVLEFFGGLKPCLIGIEACPSAHYWSRRLQGLGHTVRLMPPSYVKAYLKRSKNDANDAAAICEAVTRPSMRFLPTKSEPQQSGLMLHRSRQLLVRQRTMLSNALRGHMVELGIISAKGRKGTAELIKIINADDDRVPAAARVSLAVLARQYEAIAAEIGVIEKSIHAWHRSCEESRRLEEIPGIGPIVATALVAEVGDWKAFSSGRNLAAWIGLVPRQHSTGGKDRLGGISKQGNRYLRWLLVTGAMAVIRYARHHGTRRLWLARLMERRALKVAAVALANKIARMAWAIMVRKERFEEAKLLPAAA

SEQ ID NO: 309347 - protein, 326 aa, unidentified
MEHELHYIGIDTAKEKLDVDVLRPDGRHRTKKFANTTKGHDELVSWLKGHKIDHAHICIEATGTYMEPVAECLYDAGYIVSVINPSLGKAFAQSEGLRNKTDTVDARMLAEFCRQKRPAAWEAPHPLERALRALVVRHQALTDMHTQELNRTETAREVQRPSIDAHLLWLEAELKRLEKQIKDLTDDDPDMKHRRKLLESIPGIGEKTSAVLLAYIGLKDRFAHARQFAAFAGLTPRRYESGSSVRGASRMSKAGHVSLRRALYMPAMVATSKTEWGRAFRDRLAANGKKGKVILGAMMRKLAQVAYGVLKSGVPFDASRHNPVAA

SEQ ID NO: 309348 - protein, 419 aa, unidentified
MKSWNELTHYAGFDWAGEHHDVAIVDQAGTVVAEFRFEHSAEGWEQFRQKTQVYAALGVAVETRSGAAVEELLRSDCTVFPVQPKAAARYRERKAPSGVKDDQLDAWALADALRLDGRIWRALAPEDPLIQELRLLCRDEVALIQQRTVLVNQLRAALREYYDAALQAFDDWTLPATWALIVQFPTPTDLAQAGKRKWEKFLHVHKMWRPETAQKRLELFAHAADWKRSEPITRAKSRLAVSLAKMLQALKRQLDEYRAAIEALFQQHPDHDLFGSLPGASRKLAPRLLSELGADRTRFNTPQSLQCLAGTSPVSFQSGQIHRVRMRRCCNPHLRHAVHLWADCSRALCGWAQAYYQAQRERGKSHACALRCLGHRWLEVLWKMWQSHTRYDGDLHARNQQKHGSWVIQILTAPAAKPV

SEQ ID NO: 309349 - protein, 412 aa, unidentified
MEVVYPCCCGLDVHKKSITACVLWAEVKGKSRKEKKRFGTFTHDLLQLADGLGQCGVTHVAMESTGVYWKPVWNILAEQFEVLLVNAQHIKAVPGRKTDQKDSEWIADLLQHGLLRGSFVPPQPTRELRDLTRYRVSLVQEINRIANRIQKVLEDANIKLASVATDALGASGRAILEAMLAGEEDAARLAELSKGLLRNKIPELKLALEGRMTEHHRFLLRQLFEHLRFTEAKRSEIEQEIDRRMRPFEDKVTRLCTIPGVDRVTAWGMLAEMGMNMNQFPSSGHLASWACLCPGSFESAGKRLSGKMRKGNVSLRRCLSQAAWAISMMKNNYLSALYRRIAARRGAKRAVMAVAHALLEIAYHMLKRKEVYRELGADHFDRIDVNRIRRSLVRRLERLGHKVTLEPLAQTA

SEQ ID NO: 309350 - protein, 343 aa, unidentified
MKITRVGVDLAKKVFQVHGVDQAGRRVWQRQLKRSSWLSVLTEAVEPGCEIGMEACGGAHHWARELKSRGFEVKLISPQFVKPYLKSLKNDVNDAEAICEAMGRHHMRFVAVKTVEQQDIQAMHRVREGLMNHRKAKANQIRGLVAEYGLVAPRQMAPLRKAIPCWLEDAENGLRPAFRVLLHGLWQDLQSLDVRLKVLDKEIFALSENHADAKRLKQLRGIGPLIATAMVAQFGDGRHFKRGRQASASVGITPRHAGTGGKNYLFGITKKGNPYLRSILIHGARSVVSQAKHKDDRLSRWVTELARRKHPNVAAVALANKTVRIAWAMLRNGTDYDPELAVA

SEQ ID NO: 309351 - protein, 464 aa, unidentified
MCGGLESASMTKEVIPVTRKRTYRVQEVKGVNVARLASGREGMALAVGLDVSKAELIVGLCWEDRTYGGPWRAANPGGIRELISLLQKLGQGRQLIVAMEPTGTYGDPVRQALTDAGLTVHRVNGKAVHDYAEVFDGVPSQHDGKDALMVAELAALGKSSAWPYEESSVEDRERGYWVDRMDSQAQLGQLWTGRLEGLLARHWPEVTELLPLNSVTLQELLAHYGGPAGLAAADEEGAQRLSAWGGAALKGEKIAAVMSSARETLGVRQGEFEARQVRECATQLLRACREQQAAMKEVKRLCRGHAVLEAQSVAIGPGAASVLWVLLGDPREYHSGEAYRKAMGLNLKERSSGKDRGQLKITKRGPGAVRRWLFMAALREVQEVGVREWYEAKKARDGGRGGRALVGVMRKLALALYRMAVKGEAYDRSKLFPGHPLEKEKISARARQKGPPHRAFSATSTQPE

SEQ ID NO: 309352 - protein, 387 aa, unidentified
MKTFQVFYIGLIKSGGANAYVALRLIQPICIMYTHVYIGLDAHTRNCVLGTIDADANVVSVHDFPTSETGLIRHVKALPATFKYLALEESSLAGWIAGVLTPHVTELIVCDPVQNALISRGGSKDDVRDSLKLARLLRLEELKPVYHNHDPSRVDFKIVAQQYLSITNEIVALKNQIKSKYYQGGVLKISGSLVYRKAHRHSYLKHVESEAMKKVILNFYDPLDCMVRVRENALLLMQELGKKYGEIEQFQRIPGIGVVGAHVFSAFIQTPHRFATKQQLWKYCQLGIRVRQGGGKKLSGECLDRSGISVLKAISYQCWMSSLRTKGPNEVSLFYHASAKRTQDLTRARLNTQRNVLATLWTIWRKNVDDHPHLFYRPPVSARKAKQ

SEQ ID NO: 309353 - protein, 413 aa, unidentified
MEWVACVGIDWGDKKHAYMVQTADGKKQDGWFGSSPEEVHEWARGLGERFPGGTIIVAVEQGRGSLLYALMAYEYLVLVPINPRASKAYRESLRLSGASNDPSDAALIGDFAMKHLTELRVWRPDEERTRKIRLLCEQRRSLVDQRTALTHTLSATLKEYFPQVLQWFGDEASPYLREFLTHWETLEQASQASVDDITNVLKSRGRRKASAVSQELIEKIRVAVPLTRDTAILDACSMYARSFIALLDPLDEEIAKYDQAIAVEWADHPDRKIFDSLPGAGAVMAPRLAVAFGFERSRYDAAAELQQYSGIAPVTEQSGRHWWVHARWGYPTFLHQTFHEFAQASLPHSTWARAFYHEQRDRGAGHHAAIRALAFRWIRILFRLWKTGEEYDEQRYIEVLKRKQSPIVRRIAA

SEQ ID NO: 309354 - protein, 431 aa, unidentified
MKNITKNRRLSEINTTTLIVAIDIGGYEHHARAFDWRGIEQQKKAFKFKNDRYGFESFLSWIERLQLMSGFTEVMVGLEPTGHYWFALFDYLLSRNLRLVITSPVSVKQTKEAATTSASKSDTEDPKAIAHVMISGNYQEIYRPQGNYAELRKAYTLRNSVMEQKKATANRIHAWASTYFPEWHKVYTSVQRIGFLTLLRRAPLPSDIVKLGVHGILHHWHECQLLGGISRDRAERLVEEAKCSVGVTEAAEMARVEIQMLLQHYDLQETQLVRLDKRLEELVEQYPGGKRLMQIPGIDLQIAAGFLAEVGDISRFPGAAQLQSYAGLDILRNSSGKRRGQSRISKRGRNKLRRIMFVAALCVVNHTSEFRAVHTYYKHRTKNPLKAMQSLIAVACKLLRVFHVMLTKDVDYDPNKVTCGLVVKSSEKQVA

SEQ ID NO: 309355 - protein, 355 aa, unidentified
MNTVENSFSEEIFYIGLDVHKRSWNVTVRSNHMRLKTFSMEPSPEKLLATISKNWPGGKYKSVYEAGFCGFWIHKQLCDLGIENIVIHAADVPTTHKEKVTKTDKVDSGKLARELENGTLKGIYIPNGFHQQIRSLCRLRHTYTTDSARIKNRIKGTLNYYGIPVPSEGKNWSYRFISTIRNSAEQINSPGSSTLLFSLDELLDQRKRVLDVTIALRKCIRNYKEQLHTVELIRSVPGIGFVTAMTFYTEIMDMKRFPSLDTLASFVGLCPVCHSSGEKSNVAGLTPRRNRYLRHLIIEAAWIAARTDPALFKSFTELSKRMKKTNAIIRIAKKLLNRIRYVWINQEYYKCQIYE

SEQ ID NO: 309356 - protein, 349 aa, unidentified
MSKPNRSMQSTVFCGIDVSAATLAAAVHQEDQRFEQRAFNNNASGHKALIAWLHKRKARVRVSLEATGIYSLDLAMALDRADGIEVAVLNPKLVHRFAQTLRRSKTDSADAQALAEYSRRMPFTPWCAPSLSSLQLRTISRHLLGLTAEYTRQNNRLHAAEKSAATPRCVVNDLKRSMASLERRILRFRREARELVRSDETILKRFELLIGIPGIAEISAVQLLGELSSLSPGMSVRQWVAHSGLDPVHQVSGTSVHKPSRMSRAGNRYRISPPWPWTISLAIQGPRPLPSALALLKESNSVARIDSRIPAPLSATVMIAVERCTTTRTCKLSECGSVSIALIKRFVRT

SEQ ID NO: 309357 - protein, 350 aa, unidentified
MIIIGCDYHPSFQQIAFVDTDTGEVQERRLQHREEAEKLYRDLAAQGMKVRVGMEASGHARWFERLLAELQFELWIGDAAEINTKRVRKQKTDRQDAQLILKLMLKDDFPQIWVPSWENRDLRQLLWHRHRMVQARTRIMNQLQAVALNEGLRCKKRLWREAGREQLEAFRLAPWASQRRRDLLELLDRLNPTIAELSQAIEKEVEKCPEARRLRTHPGVGSLTALAFVLIIGRADRFQCGKQIASYLGLVPLEKSSGNQRRLGHITKQGNSLLRFLLVEAAQVSVRSLPEWRSKYVHLTMRRGRKIAKVAMARKLAVRLYWMLRKEWDYEQLRKFGSYAGKPGNRDGVK

SEQ ID NO: 309358 - protein, 349 aa, unidentified
MTEQRRSYAGECVYVGVDVHKETYTVTCVCHKQIVKTATVQAESASLAASLRRWFPGATLASAYEAGFSAFVLHRALTKAGISNIVVNPASLAVAANDKVKTDRRDSKRLAVDLADGRLRGIYVPTEEEELARLLPRTRAQLVEHRATLARQIKAKLHQFGLIAPSSRRLLSHRYLREIESWTLPPELRASLKLLAEQWRFVTRQLIEMRRLLREQATAQAAIDKVYRSVPGIGEVVARTLATELGDMTRFANERALFSYTGLTPSEYSSGAAVRRGPISRQGSSRVRHLLVETAWRALPYDAVLQTMFERIAATRGKKRAIVAIARRLIGRIRACFRQGTMYAVGTLA

SEQ ID NO: 309359 - protein, 350 aa, unidentified
MSEYIAFDSHKRYTWVDRQDHSGGKSSGHRLEHAPGAVRNYLSGCEPGTAVAVEATGNWYWIIDEIEQAGLQPQLVHPRKAKLMMGLTNKTDKLDAQGLNRLQRNGTLPTVWIPPGSLRDLRELTRTRLVLVAQRTRLKNRLSATLAKYGTPASEYSDPYGQRGRAELDKHLQGLPEQTRWVSGQLLLQLDFVSSQVQQLEQRLKQLVEVTEPMQWLLTMPGVGVILAATIALEIGEIERFPSAMHLASYSGTTPRVHASGGKVRYGSLRADVNRYLKWAFAEAANSVARHHHSHPDRHVSRLYQRVRRKGHPKAIGAVARHLAEAAFHVLRGKQMYRDPSLGRGRTSQG

SEQ ID NO: 309360 - protein, 449 aa, unidentified
MQQPQEIHDEEYEQLVARVAAIDVAKASSMVCTRVPHESAQGRRVTKVWEVPATTGAIIELGEHLVGLGVERVTLESTSDYWRGFFYLLEAAGLGVQLVNARDVKNVPGRPKTDKLDAVWLAKLTERGMLRPSFVPPAEIRQLRDYTRLRLDLTRDRSRHAQRIEKLLEDALIKLSTVATDIMGKSGRAMLEALIAGQRDPGVLAGLARGRMRVKHAALVQALAGRFDDHHAELARMLLDQYDALTAQITKLTARIEQLLAAIPAAQGVDADGTTGPSAGTGADAAVLPAAARLDEIAGIGPGAAQVILAELGLDMGVFPTPAHLVSWAKLCPRTIQSGAKHRPGATGKGNPYLKGVLGEAAAAAAKTDTFLGERYRRLVKRRGKLKALVAIARAILVIIWHLLADPAARYHDLGAGYYASRIDKAKKARNHIRQLEALGFTVTLAPAA

SEQ ID NO: 309361 - protein, 401 aa, unidentified
MHAVIGIDVSKATSQVAVAVDGKVVQNFKITHDVFGFNQLNSVIMQFNTFPDIVFEATGVYSRRLKTFLEAHNYPYTYLNPLTAKKQLDQLRPNKNDLNDAKHLAETQFILKRAKSYVQNPIYIELQDMSRFYQQLNHDIVSAKNRLHRLLQLTFPEIETLFSTTDSQQYWEIVSLIPHATMAKHSRQTLSDTIQSSVSRQIGVARLTRLVDKLVALGSLSAPAVAVASYNVTEVRYYAQRLIALSQSKANVLATMVDQTKDLPEYDIYQSIPGFSDKTVVSLIAELGDLHRFATSNKLNAFVGIDLRFNDSGDYKSPGFITKRGNTIARKVLFKAISNIASTATYGHQNHINDWYQKKKQSSMSKGTKKIAIGAMSRLLRTMHYLVLNNQLYDYDTASKR

SEQ ID NO: 309362 - protein, 339 aa, unidentified
MYYYGIDQHKRDSFITTYDSQGTVVKQMRVANDPLLIQNYFAQFSGSHRAVVESTGSWYWLADLLQKLDVKLTLAHATELKAISAAKVKTDKVDSDILAQLLRADLIPEAHKISADKRGPRDLMRTRLRLISKCASCKNSIERLLEKFNGSAITELDDLYQLQIRAHKEQIALLEQQIHTIERTLHPHLIPNEDIQRLLWIPGIGKIGAFTICTEIDGIERFPSAKQFFSYCRLVPGADNSAGRTRHRSGSKAGNCYLKLAFSHAGVRAVQYYPEIKTFYKEKLRRKPQRIARTLVSLEIARIVYHVLKTREDFNGHFKKQQLSRRKQSQWPRLAGPAA

SEQ ID NO: 309363 - protein, 355 aa, unidentified
MNKIKTNFAGQIVYSGMDIHKGSWNLGIFLNDMFVKNVHQKPNPTIMVNYLKQHYPGARYIAAYEAGKFGFWIQRQLTALGIECLVVNPADIPKSQKDTLQKNDPRDARNLGLRLQSGVLHGIHIPDEQQEADRVFFRHRKRIWKDLTRCKNRIKGMLAFSDIDIPEQYDNASWSHNFINWLKEIDCKQQSRRSALNYMISQMEFLRKELLSISNAIRKMMREQRYKTNYYLLRTIPGIGPLTAASILVEIGDVKRFETFYHLNSFVGLLPMEHSSGQSENKLSLTVRKHRQLRSDLVESAWTARRTDPAMALYFQEQIKRKDSKIVIIKIARKLLNRIRYVLINQQPYEMGIVK

SEQ ID NO: 309364 - protein, 300 aa, unidentified
MHSLVVAAADLPEHTPQGQRKLVGWLRKNHVNKAVMEASGGYERAWAKVLREAGIEVRIVDPKRVRSFALSAGRLAKNDTIDAEMIAWFAETFSDAPGQKHDAAHEELQTLVKARLSLIDLRMRLVSQSEHAAPGLVRKAHAHILKSLASELAKLEAAICAKIKSMPDFAERAEIIESVPGFAETSAANLVAGMPELGQVSDEIAAALIGVVPYDDDSGNRRGERHIKGGRRWVRNSIYMPCVGAATLNNPVLKAYYRRLIAKGKKPKVAIIACMRKLIVILNTMIARRQKWDPSRYALS

SEQ ID NO: 309365 - protein, 376 aa, unidentified
MPDTHDVCCVALELSQSKWLCAFAPPEGGQTSIHTIKAGDHARLTEWLDRQRVRAERDLGRSLQLAVCYEVGYDGFWLARVLLKAGIRTVVFDPASFLKPRRGRWAKTDRLDAEGMTRILRSWLGGDSSVAREVRIPSIEEEDAKRLCRERKALVNERTRLVGRIKGLCALHGILVPGKRVSKRWMLHLDDHRTGDGRPMPPHLRRDIERLLRRYNVLEELIAEVELDCQMAVAAPTSSLPAKEKVRRLATLGGVGNISALLLVAEVYHRSFESRRHLASFIGLAPTPYASGDVSRDRGIGKAGTKLARQTLVELAWSWLRYQSESALSTWWRERFAGAGMRGRKVGIVALARRLAIAFWQFLEQGLVPEGATVKS

SEQ ID NO: 309366 - protein, 341 aa, unidentified
MIMIGIDPHKATHTAVAVDDHEAVLGELTVGASASQADRLCRWADSFDDRRWAVEAANGLGYLVAQQLVAAGETVFDVPPMLASRVRILGTGQAQKNDPNDARSVAVAALRSERLLQVRADDHTRVIRLLVKRHRDIARLRNKHCTRLHALLLELIPGGIRSEITVAKARDLLEQFQIGDPVAHHRVLIANELIEEIARLDVAMKASKRRVAAAVAASGTRLTCIHGVGPIVAAMIIAHTGDITRFPTAGHYASYNATAPIEASSGPKARHRLNPRGNRQLNWAIHTAAITQLRYDTPGRRFYDRKVAEGKTTKEAVRALKRRLSDVIYRYLATDARRLEQ

SEQ ID NO: 309367 - protein, 337 aa, unidentified
MKKKFKYFIGVDVSKNTLDYSVVKDNKELFSCQSENTAKGIKSILKELKSKGIKDLSEVLFCAEHTGIYNNPLVYFLNENGGSIWLESAMHIKRSIGLQRGKNDKVDAQRIAVFAYKNREDAKIFEVPREIIIKLKYLSGLRSHLIESIKGFKVRIKEIKGFEGKVIAGSIQANCKKTIAALESDLKKVEQDIQNLIKSDARLKQLFKIIKSVDGVGNVIATEVIIRTNEFKNINDPDKFACYSGVVPFDHSSGTSVHGKSRVSPIANKVLKTLFHMAALSAIRIKGEFQDYFERKIKEGKNKMSVINAIRNKIIHRIFACVRENRLYQKNYSYKFV

SEQ ID NO: 309368 - protein, 461 aa, unidentified
MIRRLVGVDLGIASAHTVRVLTEDGREVCRRRCEPTVDSLRRVEAAALAGAPAGTVLEVVMEPTGPAWLPIAVFFTARGHRVFRVSSGKAADLRRFLSRHAKSNGIDADTLARLPLVDPAGLYPLELPGTEAAALDRRVRATDRLTVLAAQHKVRIKDLTRQLLPCSPLTGDLGVADLAVLERWADPRALLAAGPARLTALIVKASNGHLGADRAQQWRAAAAAAVELYGDHPAIAWTDLAAEVGTEVRLLRATLGELAAHARERETAYRYADLGGLARSLPGVGDVGGPVLVAGMGRPGRFPNGAAFKSYTGLAPRAAETGNTDRKGQPMSKAGSSLLRTTLIRAADTARKQDPQLARIYYTQMVERGAEHLKAVCVVAGALAERIWTVMNRQMPYVICDIDGTPVTPEQAKQIIAQNFTVPDEVRRRRRSSKTPSRKPAQQPTISSKGGRPLSKPHTAA

SEQ ID NO: 309369 - protein, 341 aa, unidentified
MQITTIGLDIAKNVFQVHGIDPAEKVVVRKQLRRGQVLKFFAALPPCLIGMEACATAHYWARELTKLGHEVRLMPAKDVKAYVKRNKNDAADAEAICEAVRRPTMRFVGAKSAEQQGRLMQHRTRDLLMRQRTQVINALRAHLAELGIVAAQGREGLKQLLTIIADEKDARLPIDARGSLIVLAAQLQALQTMIGSIEKRLTMQHRANEASKRLESVPGIGTIGASAITATVTDPNAFRSGRDFAAWIGLVPRQDSTGGKQKLGPISKQGDRYLRRILVVGAHSVLRRAKQNPEKYPWLTQLLARRPFKVVAIALANKMARVAWVLLARGGTYRVPALAAA

SEQ ID NO: 309370 - protein, 422 aa, unidentified
MLQETQDREEIVERVAALDIGKAELVCCVRVPDEGRAGRRLQEVETYSTMTRSLLALADRLGRLGVTRVVMEATSDYWRPAFYVLEAAGFETWLVNARDVKHLPGRPKTDKLGAVWLCKVAERQMIRPSFVPPPEIRQLRDVTRYRADLVAARTAEKQRAEKLLEDACIKLSAVATDIFGVSGRAMMAALIAGQRDPKELAQLARARMRAKISALEEAFTGRFTGHHAFLLGKMLARVDQTDADIAELDAKIGELIAPHEPAVRRLDEIPGIGPVAAAAIIAEIGVDMGRFPTAAHLASWAKFTPGVKESAGKKKGSGATGHGDPYLARVLGEAAVGASKTDTFLGERYRRIARRRGKKKAIVAVGRSILVIVWHLLSDPEACFTDLGPGFYDRRISGSRKMRSHVSQLEALGYKVTLEPAA

SEQ ID NO: 309371 - protein, 347 aa, unidentified
MKHYAGIDVSLNSSSVCVVDESGKIVREVKVASEPVALIHCIKSLGVRVERIGLEAGPLSQWLYGALRESRLPVELLETRHVKAALSAMPVKTDRNDARGLAQLMRLGWFRPVHCKSMAAQEVRALLTARKLVQSKLYDIEMSLRGILRGFGLKVGPTTSRSFAARVNHLAAGHPSLEMVAEALLSTHAAALCAFKNLEKNVRQISRADARVRLLMSTPGVGPVVALTYISAIDDPKRFTSSKRVGAHFGLTPKKYQSGETDISGRISKIGDSSVRAVLYEAAHIILTRPIHGGALKSWAMRLAKRAGMKKAKVALARKLAVVLHRMWVSASTFDFEKANGCMRAAA

SEQ ID NO: 309372 - protein, 367 aa, unidentified
MVQSDYTIGCDAHKHFSLFTVLDGKGNLVQRTRVGHVPDSIGVFLSQFPKGTPVALETVGNWYWIVDEIEAAGCIPLLAHAAKAKVMMGNIHKTDKLDAQGLATLLYLGKLPSVWIPPAEVRDERELPRTRMSFVQHRTRVKNRIRSTLAKYALSLDTASDIFAPKWRPELQITLQRLPEETGRCVLQQLQILDALSEHIQQLEDRIIERIQATPTIQLIQTVPGPAKVLAILIDREVGSIDRFQAAKHFTSYCGLVPKLSASAGRAHYGRMVKQCNTYLKWAFIEAANVIVRHRHAPNWRHKYVVHLYERIRRRKGHSVAVGATARYLAESTYWVLKKSEPYREPPHWAPEGKKSPVSLSQGQVRA

SEQ ID NO: 309373 - protein, 338 aa, unidentified
MSLYCGIDLHSNNCYLAVLDDQLRPVLGRRTSNSLETILAALEPHQEQIAAIAVESTFNWYWLVDGLMEAGYHVELVNTSAVRQYEGLKYVDDRHDARWLARLLQLGILPKGYIYPKQQRALRDLLRRRFFLVRQRTANLLSIKNLYSRQTGSQVPTKDIKRLTAEQVVEQFTDPWLAQAITCGVNVADALQTEIVSLEKTILEQARQRPEYALLESIPGIGKTLAMTILYETGSLSRFPDAGHFCSYCRCVPSKHLSNGKVKGKGNTRNGNPYLSWAFIEAAHFAIRFEPLAKKYYERKKARSCPLVALRAVAHKLARACFYVMRDQVPFQATQAFG

SEQ ID NO: 309374 - protein, 339 aa, unidentified
MSKLTQPRQAMVFCGIDVSAATLAVAVQQENQRFEERVFDNTASGHKALIGWLRKDKAPARVSLEATGIYSLDLALALDQAEGIEVAVLNPKLMHRFAQTLRRSKTDSADAQVLAEYSCRMPFTPWSAPELSGLRLRTISRHIQSLVVEQTRQNNRLHNAEKSATTPRCVVNDLKRSMASLKLRIVRLRREALELVRSDEAMRKRFDLLILIPGIAAISALQLLGELAPLSPEMSVRQWVAHSGLDPSHQVSGTSVHKPSRISRAGNRHLRHALYMPALVAVRRDPHLKAFYETLLNRHKAKLQALIAVARKLLHAIYGILRAQTAYDGSKLFPLIKTT

SEQ ID NO: 309375 - protein, 348 aa, unidentified
MKRYIGVDLHKNTFTVCYLSRKGKELKSFKVSKEGIEAFKQTLTRDDEVAVESTGNTGYFVREIKDRVGGVKIINPTQFKIISQSVKKNDKRDAKTIAKYLSKGLIPEVRMKSKKEAQLSSLIGTRDKFVKLRTALKNKIHNILNANGIVTKREIFASEKNLDRVLKYELDEDSLFELRIIIRELRNLNKAIEEIDEELKGRGKKLKGHKNLTNITGIGDISATILLNTIGDINDFSGDHKLAAYIGIVPRVHISNKTAHYGRITKMGNKIARTALVQCALIAIRYNPYLRSFYLKLKAKKGSGKAIIATARKLLTIIYRTLKNDWVFEDFNNFKLTSASKGYHLSPA

SEQ ID NO: 309376 - protein, 403 aa, unidentified
MSQRFAGLDWASQTHAACVIDEHGSVAVQFEVKHDAAGLAELCRRLRGAGITAVAIERPSGLIVDALLEAGFTVVPIHPNVVKATRPRYRSHGGKSDASDAYLLADLLRTDGQRFKPLAPQNDDIRALRALVRGRDELIATRVQLANQLRSLLESFWPGAADVFADVDSPVALAFIQRYPTPESASRLGPKRMAAFCAQHAYSGRRSADELLARLHQAPAVALGELEIEAKGELTLSLARTLHRLVAQIRLLTSRIEHHVGSIDDGRILMSFPRAGRVCAAQILSELGSVRERFDSDEHLAAEAGVAPVTYASGKSRAVTFRWACNHRLRAALTCLADNSRHASAWAAHVYAKARARGCDHPHAVRILSRAWLRVIWRAWTDRKPYDPMLHGSAQLLLKTARG

SEQ ID NO: 309377 - protein, 414 aa, unidentified
MTETAYAAYVGIDWGTATHRVAVLDAQRAPLGERAVAHDGAALQAFTEWLTLLTGGEPARVAVGLEVPRGAVVDTLLERGFHVFALNPKQLDRFRDRYTVAGAKDDRRDAFVLATALATDRPAFRRLEFEAPLIVELREWSRVEDELREEWGRLANRLREQLHRFSPQLLALCPAADEPWFWALIALAPTPLAAQRLRRAAVVTLLREHRIRRLSADQVLAVLRSTPLRVAPGTVEAASAHVALLIPRLELIDRQRRDCARRIEHLLDALATTGEHQGHRDVTILRSLPGVGRVVAATMLAEASRLLAARDYHGLRTQAGVAPVTRQSGKRLLVGMRYACNPRLRNALYYWGFISVRYDAHSRQHYRRLRGHGHSHGRALRGVTDRLLTVLMAMLAQQTMYDPARRRAALEQTP

SEQ ID NO: 309378 - protein, 360 aa, unidentified
MRKQSNTLNFEGQNIYVGIDVHLKSWTVSILSEYLHHKTFVQPPSPEALSSYLHAHFPNGNYLSAYEAGFSGFWAHYKLVEMGIQNIVVNPADVSTSQKERLQKTDAVDSRKIARSLRNNELTAIHVPCRETLEVRTLLRSRDALVRDLARMKQRVKAFLYYYGIDYPEEFQHSGTHWSRAFMNWLRNGIRMDTEEGGAGLSLLLDSVESQRRLLLEATRKLRALSRSDGYATDYELLRSVPGIGMITALSLLAELEDIRRFANSDRLAGYIGLVPTSHSTGEKDNKGEMTFRGQMQLRSKLIECAWFAARIDPALSMAFSKLTRRMEPNKAIVRIARKLLNRIFYVLKYKRRYKNETVE

SEQ ID NO: 309379 - protein, 345 aa, unidentified
MTTMNYIGLDVHKKTISYCVKDVSGRIQQEGKVGSTRREPDCWMKSLPQPWTVAMEATIFSGWIYDHLLPHAAQIKVAHPLMLRAIAAAKKKNDQIDASKLADCLRCDFLPECHMMPAEIRDRRRTLRYRHLLVRQMVQMKNRVSGLLMETGVEYNKQRLHKVSYFRELLSTNTEVHPSIRPLLKLSRETIERCQKTEYALVSSLQRDPVLAGRIKRLRTVPGVGPITALTWALEIGDVSRFRTIKNAISYCGLCGDERSSADKAMRMPLSKQRNKHIQRALVEAAKLAPRQSHELAVIYDNERQKGNGNRATLAVARKMVAYLLAVDRQQRDFVPAEERRTPAA

SEQ ID NO: 309380 - protein, 449 aa, unidentified
MSKSVSTQSGLPVVHARAAGIDIGSRFHVVAVGPNLTDEPVQTFQAFTADLVRMADWLVTLGITTVAMESTGVYWVPAFEVLESRGLDVILANAREARAVPGRKSDVNDAQWLQRLHACGLLRASFRPGRDIAALRVYLRLRERLVDYAAAHIQHMQKALTFMNLQLHHVVSDVTGVTGMKIIRAIVSGERDLEVLAAMRDVRCRASTETIRSALTGNYQPEHVFALRQALALYDFYQSRIDECDVQIEQVLAALTADKPNPATPLPQPRHRTKQPSDLSFDLRPVLYQLTGLDLTQIHGIGPHLALRLIAECGTDLGKWPSAKHFASWLTLAPGCKISGGKVLSARTRKTTNRLAAHLRLAAVTVGRTSTALGAFYRRLAARIGKAKAVTATARKIAILFYNAMRFGRDYRDLGADQYERRYRERVIKHLHRRASEFGYTLQQVVRVS

SEQ ID NO: 309381 - protein, 342 aa, unidentified
MIVHLKSWSVAILSEHSVLKRFSQSPEPEALHNYLVSNYPGANYFSVYEAGFCGFWIHEKLTDLGITNIVVNPADVPTMSKEKLRKTDAVDCNKLARELRSGSLEEIYVPKADVLEMRSLIRMRNLIVKDSTRAKNRIKSLLRFHGVEIPQEFIRCSIGCWSKRFLTWLHSLELSTEYGKKTLELHLEQFVRLRKMLLQETRAIREISRKAPFEKPIRLLTSVPGIGVTTAATLMVELDDIVRFKNADHLASFIGLVPMCHSSGESNGTGDITVRRHFMLRCLLVEAAWIAIRKDPAMTVAYTEYRKRMNPQKSIIKIARRLVNRIYYVLKHEKEYVPCVVK

SEQ ID NO: 309382 - protein, 317 aa, unidentified
MDPAVEVFVGIDVSKATLDIHTLPREEAWSTGNDEESIDVLVARLAGLKPTLIVLEATGGLERRVLGAMLAAGLPAVAVNPRQARDFAKATGQLAKTDSLDARVLALFADRIRPIIRPAVDEQTRELDALMVRRRQVVDMITAEKNRFGAAPASKRVVKAIRDHIAWLEKQLDIVDTDLDNSIRNSSAWREKDDLLRSVPGVGKVLSRTLLAQAPELGTLSRKQIAALIGLAPLNRDSGTHRGRRCIWGGRAQVRQVLYMSTLAAIRYNPAIAAFNKRLVDAGKCRMVAIVACMRKLLTILNAMLRSNSPWSTEISS

SEQ ID NO: 309383 - protein, 330 aa, unidentified
MYFVGIDVSKYKHDCFIVTEEAVVIKETFSFDNNRTGFNEFFSILSSLGPPNKIRIGLEATGHYGNNLMKHLSVKGYSFVLLNPIIVSRFRKSETLRRTKTDKLDAMLIAEVIASRDFKNYPLLAYHFNDLKSLTRLRDRYVKQRSQYLVHLTNQLDLVFPEFKPFFDKSLKSKTALYILTKYTLPSRIANMNAQSAENLRKLSRGKFSYAKFVRLKELAKDTIGSSSEVDEFAINSILRLYNQIEEEISTIEAKIEAIMLALDPPTASIPGIGPMSAATIVAEYGDVTRFPNDAKMLAYAGLDAGRYQSGQADHKGHMLSTGPVSFVKH

SEQ ID NO: 309384 - protein, 317 aa, unidentified
MNIKNSQNEINVGVDTGKAQLDIYIRPLGTYFTVTNDETGIKQALAEIKQHNITRVIIEATGRLEQPFIFACAEANIPFVIANPVNIKRFAGAIGQRAKTDKLDAKLIAYYGEAIKPSLSTLKPEQMRLMSDLLSRRRQLMEMQTMEKNRSQIMPKSISSSIKPMLTVIKNQLDKVDKKLFKLIESNDEYKAKNDIIQSVPGVGNVVAFNLLSEMPELGYINNKEAASLVGVAPFNRESGSYKGKRMIRGGRAQIRTAMYMAMMSAIQCNPTFKALYQRLVASGKPKKVALIACIRKLVIILNSMVRDGVMWDPKMI

SEQ ID NO: 309385 - protein, 328 aa, unidentified
MQALLELCCGLDVHKDSVVACIIKSSSFNSSKNKDNVDVEIKTFSTMLSDLEKLKDWITENNCHHVAMESTGVYWYPVYETLETAFDGDITLLVTNARHMRNVPGKKTDINDAQWIASLLRAGLLSGSFIPDNDVRELRQLTRYRRNIVQDVSQQKNRIEKTLQQAGFKLSTFLSDIFGVSGRNLINVLIKKGRLSQIDIDNETKKVSSAKKEEMKFALNGRLTRHQRDFLKLEIDHLDSLLIHQEQVEKSIALKSESFNEAIERLDTIPGIAVSSATSIIAEIGTDMSKFKTAEHFCSWAGLSPGNNESAGKKKVLVSHSETHISKD

SEQ ID NO: 309386 - protein, 367 aa, unidentified
MNNSSTVVGLDVHKDSIVAAVLPARADNISETINIGNSSLEIKRLVERITRRGTAEFVYEAGPCGYEIWRQITGMGVACSVIAPGLTPRKPGDRVKTDRRDAENLARYHRAGELTEVNVPTRQEESVRDLLRAREDLLQDRLRARHRARNFLQRQARQYGKKLWGVNHEIWLKAQKFEYPALTQTFETYLWKLDEANAGLEEIDRLILGWAEGEEYKGAVKCLRCFKGIDTLGAITILAEAQDLMRFGNARGFMSYTGLVGSEYSSGERIIRGSITKAGNAHIRRVLVESAWAYRHRNVSSPALLDRRKGCPVEVVKIARKAQDRLTGKFWRMVSKGKKQPVIVVAIARELAGFIWSMSKHFPAKAA

SEQ ID NO: 309387 - protein, 351 aa, unidentified
MKKIAYLGMDVHQNHCVLGEMDSTGEFRGTSTFPTSETRIVNALESIKAKEKVLTLEEGNLARWVAQVASPYVTEVLVCDPKENALIYKGSHKEDKIDTRKLCRLLRIGELKRVYQAETDERAIFKAAARHYMDLRKQQITLKQKIKAMYTYWGVINVAGEAVYSMKKRHEYLKEVKHLGIRNQIDNLYALMDQTESMQAKALKAMKDMGRRYPEIKQFKKIPGVGEIVSHIFDAFIQTPERFADKRKVWGYCRLGVTDRSSDGKPLGYKRLDRSGIPELKGLFYQAWMSALNGENEVRQFYSNSLKRTYNRVHARLNTQRKIIAVMYGMWKRGEAYRPQLFLDSSQSGVV

SEQ ID NO: 309388 - protein, 408 aa, unidentified
MNAVGIDVSKGKSMVAALRPMGEVALLPQEFLHTEVGLEQMAYAIIALGEDTRVIMEATGRYHEPVAAALHEYGIYVCVLNPLFIKQSGGGSIRKVKTDKADAMKIAKYGLDNWVELREYTPMDTVRQQLKLCSRQYNLYMKTVVSLQNNLISLTDKTFPGVNELFSSPERADGHQKWVDFVMTFWHCDCVCRVSEKAFTERYQKWCKRKGYHFSAEKALDLYASSCGHFTTLPKNDNTKLLITTAAQQLLAGKTTLAALRTEMTRLAKQLPEYDTVRAMYGVGETTAAQLMAEIGDVRRFPRRSSIVGFAGVDPAVDQSGKHSAKSVPTTKRGSPHLRKTLYQIVCTYLKKSPVDEPVYQFLDKKRSEGKPYFVYMTAAQNKFLRIYYARVKECLEAFDAQQDTSQR

SEQ ID NO: 309389 - protein, 344 aa, unidentified
MHIASIGIDLGKTVFHLVALGERNKVLLRRKFSRSQLLAYTANLPSSLIGIEACAGSHFLGAALREQGHQVRIIPGQFVKPYRKSNKNDFIDAEAIAEAVTKENMRFVPIKTEDQLDLQAMHRVRDRLVQRRTALINEIRGFLLDRGIVFAARPIRLRENLPSVIEDAEQNLTPRLRWLLQQMWQEWQQLEIDIRSISDQLDAISKQDGLCRRLRQVPGFGPLVATATVAAIGNGAAFRRGRDFAAWLGIVPRQYSTGGRLQLFGISKRGNIYLRRMLIHGARAVLLRVKYNTGGFGQWVKRLEERAPRNKVIVAIANKLARIAWAVLFSGNEYQHQPLQMNAA

SEQ ID NO: 309390 - protein, 356 aa, unidentified
MSAVAERVLPSQGVVIAVDPHKASWTAVAVTAGLAAAGAVRVEANRAGYRQLRRFAAGWSDVRWAIEGATGLGAPLAGRLGEDGITVVDVPAKLARRVRLLSTGHGRKSDPADTLSVGIAAWSAPALRTVEIDQAIAVLRALTEHRDDLVRTRTQLINRLHVLLVKLIPCGLARGLTAESAAEALRRIRPRDSLGRTLRALAVDLVAELRRLDRRIAETTQALSDAVTASGTTLTQLLGIGDVVAAKILARTGPITRFLSTAAFASFCGVAPIEVSSGDVVRHRLSRAGDRQLNYALHVMALAQIRYDGPGRSYYQRKRAAGKSHKEAMRCLKRRLADVVYRTMINDSVSSLTAAA

SEQ ID NO: 309391 - protein, 391 aa, unidentified
MICAGIDVAKDKHDCFILSSEGVVLADVFTIPNNLEGFNTLLDKLRTCTTAQDSIKVGLEATGHYSYNILGFLLDNGLATYVLNPLRTNLYRKSLSLRKTKTDRVDARTIAAMLLSDAGLKPYTDTAYHNEELKSLTRYRFDKVKERAKLKQSVSRLVCILFPELEKLVSTLHMASVYALLSEFPGAKQIAAAHLTRLKTLLADSSRGRYGRDVAVEIRDAAKCSIGSRMPAKSLELQHTIRLIRELDAEIEEIEAAIQTIMDELHSPITTIPGIGYRMGAMILAEIGDFSRFDSPDKLLAYAGMSPSTYQSGQLKNCYPHMEKRGSRYLRYALYNAAKYGCHWDPAFAAYLTRKRAEGKHYNVALSHAAKKLVRLIFALEKSRQPYCPAA

SEQ ID NO: 309392 - protein, 281 aa, unidentified
MATQPTVLPKLYIGMDIHKKSWSVHLRTDISDHKTITIPSSNDVLYHYVQTNFPEHEVSLVYEAGCCGFTASRYFLNLGWNVLVVNPADVPRTDKQSHQKTDVLDCRNLAKQLQSGHLRGIYIPDQKQDYLKSLVRQRAETTRQLRKIKCSIKALLLYHGIEIPKEFDNPNWSKAFIEWIENIPWQEPVGKLCMESKIRLLKVIYQEYLELANQLRSYCRKNHKKDYYLLKSIPGVGGYLSSVVLAEVGDLRRFNKETQFASFVGLVPNIRNSGMTENVLE

SEQ ID NO: 309393 - protein, 457 aa, unidentified
MKKIKKRNMQNSEFKQINFNAAGIDIGAETHYVAVPEGRDPEGQDVRHFGTFTSDLYALADWLKQCQIDTIAMESTGVYWIPLFEILESKGFDVKLVNPRFIKNVPGRKTDVVDCQWIQQLHSYGLLTGSFRPEEQMSILRSYLRQRTLLVSYASHHIQHIQKALEQMNVKLKQVIRDITGTTGMRIIRAILAGERKPEKLAQLRDPRCKNDIKTIAKSLHGNWRPEHLFLLQQSIELFDFYQKQIADCDLKIEQHLANFEDRSNGQSLDKTRKLTGRNKLTFDARTHLFQMTGVDLTKVPGLDSLTALKIISEIGLDMNRWPTEKHFASWMGISPGSKISGGKILSSKTKKCANRAAHYLRLAAYSLHSSKTAIGAFFRRKKAHLGPAKAITATAHKLARIIYNMLKTGTEYKDMGQEYYEQRYKKRVITNLKRRAKQFGYELKYVKEQQEVMLDV

SEQ ID NO: 309394 - protein, 417 aa, unidentified
MHTHYAWFLGIDGGYEAHQICLMDATGLIVMERQVAHDAAAVQTAITALLERTGAAPAQIAVAIETPRGALVATLLERGFAVFALNPKQLDRFRDRHTVAGAKDDRRDALVLADSRRTDPRAFRRVQLDDAVVMQLRELAHAEDDLKRDLGRLTNRLRDQIYRIAPAVLPLCPAADEPWFWTLLEQAATPAAQRALTRTDVLTLLKRHHIRRLTAADVLAATQAPAFYLAPGVVEATREAVELLMPQIRVVAAQLKRCEARQEDLLTVLRERPASEAEPGEHRDVEILESLPGVGRMVTVTMLVDATQPLATRDYDSVRAHVGVAPITKASGKRRVVSMRYACHPRLREAAYHWGRVSLQHDAASAAYYRRLRARGHTHGRALRSVVDRLLRILVVMLRHRTLYDPIRFVIPVAVPA

SEQ ID NO: 309395 - protein, 356 aa, unidentified
MKIIGVDLHTRQQTIAMVDDQTGELVEKELPHEGDQVRDFYAALPKPVLVGMEATGSMHWFLRLLEELGIEFRVGHPAKIRAAEPRRQKNDRRDARLLLRLLAEKRFPAIWIPSEEQHDLQILLRHRDQFVRLRTRVQLSLQALALSHGLRRGHALWSCGGQHTLQALSLAAHAKAQRDTLLALYPQLQGPIDGLDREVEKQAQQRPQSQRLMTHPGVGPITALASEVFLGDPHRFVDGKAVASYVGMIPSERSSGKRQRLGRLSKQGNSLLRFLWGEAAIHAVRRDPELQRFYRRKLTQKGVGKARVAAARKLGIRLWIMLRDEIDYAEFCRRGQLRRQGSGAACAGMPDAGTVV

SEQ ID NO: 309396 - protein, 350 aa, unidentified
MIIIGCDYHPGVQQIAWVDTDTGEFQETRLQHREQAEKFYRELAIGGVQVRLGMEASGQARWFERLLAELQMELWIGDAAEIRARRVRKKKTDREDARHILRLLVEDRFPRIWVPSWENRDVRQLLWHRHRMVQMRTRIMNQLQAVALNEGLRCKKRLWREKGRQQLESFPLAAWGSRRRRDLLELLDRLNPTIAELTQAIETEVANYPAAQRLMTHPGVGALTALAFVLIMGEAERFQCGKQIAAYLGLVPEENSSGESRRLGHISKQGSGLMRFLLVEAAQVTVRSNGEWRSKYFHLAMRRGRKIANVAMARRLAVRLFWMWRKQWDYEQLKKFGPHAGQPGMSDGVK

SEQ ID NO: 309397 - protein, 470 aa, unidentified
MLPNQRGENEAMKQKRSKKASREPQGWSLNLNIVHPNAAGIDIGNESHYVAVPPDRDAKPVRQFACFTEDLRRMAAWLRSCDIDTVAMQSTGVYWLPVYEILTEAGLRVFLVNARHTKNLPGRKTDVQECQWLLQLHTFGLLNNSFRPPEEICVLRAYWRQRAQHVASASACIQRMQKVLTEMNVQLANVITDISGMTGMAILQAILKGERDRYKLAALADVRIQATQEELARSLEGNWRPELLFILQQEVDLYHIYQQEIAECDTALCAHLQTLEGKAKPDSKLPPTKANKKAGSNAPSNFDLRGELYRISGTDLTQIDGINVMNAQTIIAEIGVDMSRFPTEGNFASFLGLSPDNRITGGKVLRRGTKRVENRAATALRMAATSLWRSKTYLGAKFRRLRARLGAPKAITAMAHMLARLVYRMLRYGEQYVDKGMKYFEEKYRQHEILSIQKKAKDLGFAVTLTPAAV

SEQ ID NO: 309398 - protein, 363 aa, unidentified
MVHVGVDLHKRTSQIAVLTEHGELMRHRLINDVERVRRFFAELPPKTPVAIEASGTWWWLVDLLESLGHHPVLSHPKQTKAIASARLKNDRVDAERLALLLRGDLLPTVWIPPAALREARELIRHRVQLAWVRGEIRNRVVALFARRNLQPTSGQSWFTTRGAQELERLPLAQIPHRVREDSVALLRLLDAQIRQLDVEITQRWGSDPRVQRLCTIPGIGPFIAIVLVLELGHIHRFAHAKQVASYVGLTPRIRASADRIRTGHISKEGNSLLRWVLVLAATQAARRPGPLRAWFYAVRKRRGKKVARVALARRLAEIVYHVWKQECDFFTVVRHGVVRGGARIRTWSRDRRSDWAALFMLDG

SEQ ID NO: 309399 - protein, 337 aa, unidentified
MTRLTAVIDGVIGVDTHRDTLAAATTDPVGGLLAQTSVSADGAGYRQLFDFARVQVPGRRCWAVEGAGSYGAGLAAFLQARGERVVEVGRPKRPPRRTGAKSDALDAVRAAREALAHDHPLAPRRCGDREALRVLLATRHSACAAKVSATNQLKALIVGAPEELRAELRGLATKRQIARCARLRDRPARSLEHRLTVRALRSTAQRVQCLAAEAAGLRAELERLVAAVAPWLLELPGVGPISAAQMLASWSYAGRLRSEAAFAALAGANPIPASSGQVTRHRLNRSGDRQLNRALHTVVVARLRDDPGTRAYAARRTAEGKSARDIRRCLKRAVARQ

SEQ ID NO: 309400 - protein, 343 aa, unidentified
MQSISTIGLDIAKSVFQVHGVDAAGQVVVRRQLRRRHVLAFFQKLPPCLVGIEACASSHHWSRELQALGHTVRLMPPAYVKPYVKRQKNDATDAEAICEAVTRPNMRFVPTKTVEQQSCLMLHRARHLFIRQQTAVINSIRAYLAEFGIVAPVGRRGVEQLLEVVADKVEDRVPEVARMCLAALGVQLRALKAQILEFDRRIIAWHRSNTTSKRLDAIPGVGPALATALVASIADPKAFRSGRDFSAWVGLVPKQSSSGGKDKLGSISKQGDRYLRSLFTAGALAVIRYAKIHGTDHRPWLTRLLARRPTKVAAIALANKLARMAWAMMARNERYQEPAALAA

SEQ ID NO: 309401 - protein, 326 aa, unidentified
MDDAGRIVREVKVASEPEALLQVLGSPVYHFKRIGLEAGPLSQWLYSALAEAGLPVICVETRHMRAVLQAQINKTDRNDARGIAQMMRVGLYRPVHVKTLRSQKLRMLLTHRKLLQSKAIAIDNDLRGTLRNFGLKVGVVGKVRFETRIKELVENLPDLAALVEPMLIVRRVLREQIGILHRRLLAIVRDDEVCRRLMTVPGVGPVVALTYRATVDVPARFKNSKAVGAVFGLTPSKYQSGEINRSGAISHCGDEMMRVMLYEAAQVMLTRTNKWSWLKAWAMKIARRRGMKKAIVALARRLAVIMHRIWVDGTEFRWTREEAAAA

SEQ ID NO: 309402 - protein, 320 aa, unidentified
MSAISVVAGIDVAKAHVDVDVVGAQFVPKRFENEAEGHSAVASALKALDVGLVVMEATGGYEASLACALQGAGLAVAVVNPKQPRKFAEAMGYLAKTDRIDARVLAEFGQTLARRKDLARFLRPMDDADQRWLAALVTRRRQLVAMMLSERQRLQITPKKLHPSLEAIITAIKAQLDDVEAQMVSHVKEHFGKLDALLQSVSGIGPVSSATLIAELPELGQLDRRRIASLVGVAPFAKESGSSKSRRRIQGGRFDVRRVLYMATLTAASHNPIIKAYYQRLINAGKLPKVALVACMRKLLATLNAMVRTGSKWNPEHCRP

SEQ ID NO: 309403 - protein, 478 aa, unidentified
MSRHNRSRGPASRPKPAPPPRPPRDTAPALTVLRPNAAGIDVHSDMHMVCVPAASVPPATGDGGLPAHVRRFGANSCDLHAIAEWLAACGVTTVAMESTGVYWVPLFELLEARGFEVWLVEPGQLSRCGARPKTDALDAQWIQRLHSYGLLQPSFRPADSVLALRGYHRQRQMLIRYAAGHTLHMQKALEQMNVKLAEVVSDITGLTGQRIIAAILAGERNPRVLAALRDPKCKRDAAAIARALEGTWRPEHLFALRQAHELYQFLHRQIAACDAAIQSELAKLPSRAGDKSFSAKPRRSGRKPNDLAFDAAGPLFRALGVDLTEVEGIDVGTALVILAEIGVDVSRFPTEKHFASWLGVCPRQHESNGTRKRRGPRKGKNRVAIALRMAAQAVGRTQSPLGLFYRRIKSRIGGQGAVTATAHKLARLVYRMLRYGAEYVKQSMAEYEAKLRASLERHLRTKAAKLGFELVPRAAAGP

SEQ ID NO: 309404 - protein, 387 aa, unidentified
MPASGPRPDQVAVQTSLAAIFVSLELSRSSWLITSLVPGGADKMSKHTVRSGDVAELMVHLAKLRDKTHARAGASFPIIAIQEAGLDGFWVHRVLERAGIESFVVDAASILTSRRRRRAKTDRIDGEALLRTLLAHKRGEPRVCAMVRAPSPEEEDRRRLCRERRTLVAERVAHVNRIKGLLFAQGICDYEPLRSDRRQRLEALRTCDGRPLPPYLKAQIGRELDRLELLLEQLKTVEAERNALLEPANDVAPVAVKALAALRGIGPELTAMLWSECLFRSFRNRRQIAAYAGLAPTPWQSGSVQHEQGVSKSGNPRLRSTMIQLAWLWLRHQPTSELSLWFRERVKRNGGRGKKTAIVALARKLLVALCKFSSSGVVIKGAMMKAA

SEQ ID NO: 309405 - protein, 341 aa, unidentified
MEHFAGLDVSVKETSVCIVDEAGRITREVKVASTPEALMQVLRAPAYHLKRVGLEAGPLSQWLFGALAEANVPVICVETRHMRAVLKAQINKTDRNDARGIAQMMRAGLYRPVHVKTLRSQKLRMLLTHRKLLQSKAIAIENDLRATLRNFGLKVGMVGTAKFEARIKELVGDDSDLVLMVEPMLIVRRVLREQLAILHRHLLALARDDGVCRRLMTVPGVGPVVALTFRATVDVPARFQNSRAVGAVFGLTPCKHQSGESDYTGGISKCGDEMMRMMLYEAAQIVLIRATKWSWLKSWAMQIAKRRGVKKAIVALARRLAVIMHRIWIDGTEFCWIRQRP

SEQ ID NO: 309406 - protein, 370 aa, unidentified
MVIDADGRRLLSRRVTNDEAALLELISAVTTLADGGELTWAIDLNAGGAALLITLLIAAQQRLLYIPGRTVYHASGAYRGEGKTDAKDAAVIADQARMRRDLQPLRPSDDIAVELRILTSRRTDLVVDRTRAINRLRAQLLEYFPALERAFDYSKSHAALILLTGYQTPDGLRRVGAARLTAWLHKRKARNASEIAARAIEAANAQHTIVPGQQLAATMVARLAKEVMSLDTEIGDTDAMIQERFRRHRHAEIILSMPGFGVILGAEFLAATGGDMSIFDSADRLAAVSGLAPVPRDSGRINGNLKRPRRYNRRLLRACYLAALTSIRSDSASRTYYERKVRHEALDVRGEVEDLRRLAVAVAGLKLGAA

SEQ ID NO: 309407 - protein, 424 aa, unidentified
MNLTQNDRLKQVTSDTLIVGVDVGSQTHFCRAFDWRGFELSRRVFKFSNTGMGFLTFLRWTEELMNKTEMKKVIVGCEPTGCYWLTFQKFLQDHDIQLVTVNPFTVNRSMELDDNSPEKSDLKDPKTIALLVKDGRFSTSYLPSGVYAEIREASVCRDQIMKQHVRLSNQIQGWIQKFFPEYLECYADWDSTSGLMLLREAPLPQDILKIGAGGINQIWRNAKVRAAGIKRAQTLVEAAQNSVGLEAGEAARLEIWVLVNDYILKAEQLKRLDEYLEEKVKEVPNVEKLLAIKGVGMSTVIGFIAEVGDIGRFTDPKQIQKLAGLEIVKKSSGKKKGQPRISKRGRRKLRRTMYESARALMIWNPVFQDVFLYYRNRTKNPLGGMQAKIAVACKAIRIFYVVLQTGCDFDEETFRKDIIRPEAA

SEQ ID NO: 309408 - protein, 340 aa, unidentified
MIGIDPHKATHTAVAVDDDENVIGEFTLRASNNQAERLTGWAEGFGNREWAVESANGLGYLIGQQLVGCGETVFDVPPVLASRVRLLGSGRSQKNDPNDARSVAIAALRSDRLATVQPDDHVVVLRLLVKRHRDTARLRSKHCSRLHALLLELEAGGIGVKISVTNASRLLDSIDVDDETTRYRILIGREVVGDIARLDATLKASKKRIAVAVSASGTSLTDIVGVGPVGAATIIGYTKDIARFPTRGHYATYNATAPIEVSSAGNTKHRLNLRGNRILNHAIHIAAVTQLRHDTTGRIYYRKKIGEGKTPKEAIRALKRRISDAVYKSLIADAAARTTN

SEQ ID NO: 309409 - protein, 404 aa, unidentified
MERVYIGIDWADDHHDIHVTDDSAVALDSFSIPHSYDGMKKLRERLGKSSSDPGNVLVAVESHQGLLIYALLEAGYLVYPINPKAMDRYRDRYRMSSSKSDPKDAMVLANILRTDLHLYKPLPRETAADARLRQLTRSHKSLGQQKTKMLNQLTTQLKSYYPIALRLFSRLDRKITLAFLERYPTPEKAAAASLEDLRKFFQKQGYSQQWKVTFIYESLQQPSLRAPKELEEVHQTIVLSLVPVIRSLRDEIEKLANEIGKEFKHNPAHEIFSSLPTGEITAARLHGELGSDGTRYPTREYVQTAAGTTPVTRRSGKTIVIFFRWQCNKHLRAAFQDLARESVKQCAWARQYFAEQMRLGHKPSRAYRALANRWAAIIWKMLQERECFNQSRLDKSQLKVLSAV

SEQ ID NO: 309410 - protein, 433 aa, unidentified
MNLNRLQVGIDFSRQRADFCLLFPDGQPLVSHRAFANSQPGYQQARQLLLDSLQRYAFDGLDISGEATSYYWFPFFWQLAHDRELESQHLDLFLLNPRWVHWFKKSLPPDDKADSTDPFYIAERTRTRRPKGPWDPQDDWLPLRFYTRLRFHLAQTLTREKNYYLVHLFLLHNTYRRNQPFSDPFGVTSQQVLGGEQSLDELLHLPIEELAERLDDWSSGKLDDPLETAQQLQQVAQDSFPLEEPLLTPVQHILELTLQHIRFLENQIEQVEGWIASEIHARHPEALFLESVPGVGLVLAAGIVAEIGNLDRFFETPKWDKKHNRSRQRTLREVEDAVAKLAGLWWPKADSGGFVAEDRRLAKTGNRYLRFYLVQAANGMRRHIPAYTSFYHRKFQEATRHKHKRALILTARKSVGLFVGLLHRKEPYRSQEV

SEQ ID NO: 309411 - protein, 352 aa, unidentified
MIVLGADMHKSSHTITGVAAATGEMLGDKTSSVGARGFDQVLQWARALGVERVWALEDCRHVSGSLERFLIARGERVVRVPTRLMANSRRASRERGKSDRIDALAVARAALAEGIQTLPTAELAGPELDIRLLVDHRERLVRTRCALNNTLQWHLHDLWPELELPGSSLFYGKWSTRIARRLARAEQTMRVRIARDELRRLRELTQAINALESEITELVGHVAPQLLTEPGFGPLTAAKLVGEIAGAERFATDAKLARSAGLAPIPVSSGRTDRHRLDRGGNRQINAAIHRVAVTRARCHQETIEFVARKKAEGKTHREAIRCLKRHLARRIWQLLRAPHPVSETTPQPSTP

SEQ ID NO: 309412 - protein, 375 aa, unidentified
MGNHSEAFVAFDTSKLRNAVAIADGGRAGEVRFVGEIENTGPATAKLVRKLSAKYERLTFCYEAGPTGYGLYRQIKNLGHECLVVAPSLIPKKPGDRVKTNRRDAVSLAKLLRADELTAVWVPDRGHEAMRDLTRARETAMMDLRSKRQQVSAFMLRQGRPYPEGKRTWTKTHMNWLASQKLEHPEQRIVFEEMMLAVRQAQERMDRLEQAIRTAVPDWSLAEVVTALMAMRGLDMISATTFLAEIGDLSRFQSPRELMAYLGLVPSEDSTGDTIKRGPITKAGNRRARRMLVECAWSYQHPPRVGQEKQEKVAAAPRAAREIAWKAQCRLHGRYRALVRRGKRKTVAITAVAREFAGFIWAISREVTTARAAGK

SEQ ID NO: 309413 - protein, 339 aa, unidentified
MHVTTIGLDLAKNVFQVHGITLDDEVAFNRPLRRAQLLPFFSKLNPCLIGMEACSSAHHWARELTNFGHDVRLIPPIYVKPYVKRGKSDAIDAEAICEAVTRPTMRFVAIKTVEQQSLLSVHRARSLLVRQRTQLINGLRGMVAEFGVYIARGLARVIGFAENILTGEVLELPDIANEVIHNMCEHLMALHARVHWYEDRLKQVAKEDARVRLLRTIPGVGAVTASAIIASIGDGHQFSNGREFAAWLGLTPANKSSGGKEKLGRITKMGDQYLRSLLVVGMTSLVRQTKSHPERASKWLTSLLERKPARVATVAMANKTARIVWAVLTRNEPYTPHTA

SEQ ID NO: 309414 - protein, 321 aa, unidentified
MLNESFVGIDVSKDWLDLGWEPAGQSERLAHDEVAMVGLCERLVQERPCLIVLEATGGLETHLASALAAAGLPVAVVNPRQVRDYARACGRLAKTDRIDALVLAAFARAIRPQVRAPRDDETLELGALLARRRQLIDMRVQEKLRLERASPVQRDSIKEHIAWLTERIARFDTDLTHRLRSSSLWRDQEDLLKAIPGVGTITRVTLIALLPELGKLNRREIAALVGLAPFNRDSGQHRGERVIWGGRAQVRRVLYMAAVAAIRSNPVIRAFYQRLRAQGKPGKVALVACMRKLLTIMNAMLKYNTPWNPNALDLEHSCYLG

SEQ ID NO: 309415 - protein, 402 aa, unidentified
MNAVGIDVSKGKSMVAIMRPFGEIVSTPFEIKHTASDIHSLVELINSVEGESRIVMEHTGRYYEVLAHQLSEANLFVSAINPKLIKDFDNDSLRKVKSDKADAVKIARYALDKWQNLKQYNVMDELRNQLKTMNRQFGFYMKHKTAMKNNLIGILDQTYPGVNTYFDSPARSDGSQKWVDFASTYWHVDCVRKVSLNAFIDHYQNWCKRKKYNFSQSKAEEIYGKAKELVPVLSKDAITKLIIKQAVDQLNSASTTVESLRTLMNETASKLPEYPVVMAMKGVGTSLGSQLMAEIGDVSRFTHKSAITAFAGVDPGVNESGSYEQKSVPTSKRGSSDLRKTLFQVMDVLIKTHPQDDPVYQFLDKKRAQGKPYYVYMTAGANKFLRIYYGRVKEYLSSLPES

SEQ ID NO: 309416 - protein, 381 aa, unidentified
MRNVCGLDVHKDNVFVCIDKEKGEKIQFKTGILTKDLDALRDTLVANDVTEIAMESTSVYWMPIWRFLENDFKLYLVNPYAIKQLPGSKSDIKDAEWIATCLRKELIRGSYVPDSTIQQLRQYNRRIFDINKQSVYIQNKIDAALQRCNIRIGNYISNVRAKSYCQIVDMLSEGKTSPELLIVKVHKRTVNKWGRETILAALEGVVNKTDCRILKQLKEELDMLRKHKIECLVMLREICMENYKEQLLDIQTIPGIGEQGAMQIIAETGVDMKAFITAAMLVGWAGLKPRNDESNGKFKSRSTTHGNKYLRKILIECAWGASRTQGCFFNKFSYHQTMVRKKNKQKVQVAIARKILVVIWNILEKGVVYNDVLEKNKTKDK

SEQ ID NO: 309417 - protein, 411 aa, unidentified
MNKIFCGIDWAEGHHDIALVDQDGTQVAKLRISDDSAGFHALIELLTQHGDSAADPIPVAIETPRGLLVACLRATGRQIYAINPLAAARYRDRASVSRAKSDAADARVLANILRTDRHAHRPLPDDSEGGQAVAVLARAHQDAIWDRQQMINRLRSHLREYYPAALTAFHGPGKPGLDSPRARVILTAAPTPADAAKLTRSQLRALLKHGERPRCGIEAEVERLRAIFRADSLRQLPQVEQALGQQAVALIRQVDAACVSVAQLAVATEETFLAHPDAEIITSFPGLSVLSGARVLAEIGDDRERFADARAMKAYAGAAPVTRASGRSHVVVARTVKNQRLASAGHMWAFAALRTQAPRAHYDRRRAGGERHTAALRNLFNKLLGCLYHCLQRRILFDPDRAFASPMDLAA

SEQ ID NO: 309418 - protein, 421 aa, unidentified
MKVMYERVAGIDVHKQMIKVAIRSPGEKPWTRTTEILEYRTFFGVLQEMTRELRRRGVTHVVMEASGVYTEPVYYALCEQDFAQVAVINPAHAKALKGHKTDAKDCARLAELFECGLLRGSYIPPPELKEVRDLTRYRMKTVQARTSEIQRLGKSLESAGIKLGSVASDITGKSATAMIEALIDGERRGTVLADLAIGRMRTAGKLTDLSMALAGRFTDHHALMCRLNLDRIKVLDGAVDDLEDRITAKAAPWQREAGLLKTLPGFGDAVGQAWLAEIGPAPHLHFASHEKLACWVSLCPGNNISAKKRKHGRTGDAGTYIKPMLIQAAWAAIRVRGRLQARYNRLVRRFGGENNPGAKKKAITAIAHTAQFVAPPVYLHGAWLLYEALKGSGELTPALSPRELPSIGCDLYALLEEQASE

SEQ ID NO: 309419 - protein, 349 aa, unidentified
MSQTLSDAVAVIGIDIGKNSFHIVGLDRCGAIVLRQKWSRGQVEARLANLPPCLIGMEACVGAHHLSRKLKAFGHDARLMPAKYVRPYSKGQKNDFRDAEAIAEAVQRPTMRFVATKTTDQLDLQALHRVRERLVGQRTGIINQIRAFLLERGVAVRQGLRFLRVELPRILAAPPDVLSTRMISVIEDLAQDWRRLDERIDHLSGEITALARQDVGCERLMSVPGVGPIISSAMVAAIGTGDVFSRGRDFAAWLGLVPKQISTGDRTILGKISKRGNRYLRVLFVQAAWVVLIKPQSWERHGLKSWIEAAKKRLHRNVLAIALANKLARIAWSVLAHGRSFETSKLATA

SEQ ID NO: 309420 - protein, 377 aa, unidentified
MNRIIKIGMDVHSKNFSLCAIEPVIGADDRVFANIQVTADYKNILMFIENLKFKLGASDDYSIECGYEAGCLGYSLYNQLTAAGVKCVILAPTTMLTQQGKRVKTDARDALMIAQCLAYGGYHSVYIPTEEDDSVKEYLRMRDDHKIALKRLKQQIGAICLRHGKTYDGTNWTGKHLAWLRKLDLPGIYRETLDEYLATYDELVAKIERFDKRIDEISSQQRYQEKVKKLGCFLGIKKHTALSLIVETGDFKRFAKGNIYASFLGLAPGENSSGDKTKRLGLSKAGNSHLRMLLIEGSRGICRGAVGHKSKELKSRQQGNTAAVIAYADKANTRLRSKYYRMIRHGKKQNVAVAAIARELACFVWGMMTDNTELSLD

SEQ ID NO: 309421 - protein, 354 aa, unidentified
MSSVSMIGLDTAKAVFQVHGIDETGRAVLKRKLRRDGVVAFFAAQPACTVVLEACGAAHHWGRVLGALGHEVKLVPPEAARPFVKRGRKNDAADAAAICEAARRPEVKFVPVKTAERQGVLALHTARALLVKQQTMLANAMRGLAAEFGLTAPRGLAKLEQLMEMAEAQEAAALPEAARQALRALHGRFRALEEEAATLERAITSHARRDETARRLATIPGVGPITASLIAATVTDIGLFKSARAFAAWLGLVPRQFSTGGKTRLGRITKAGNGAIRTSLVVGATSMIVRAGRWDSPTGTWIRGVLARRPTRLATVALANKMARVAWALMTHKESYRPHGRAAAAAIPETAATA

SEQ ID NO: 309422 - protein, 402 aa, unidentified
MNAVGIDVSKGKSMVAIMRPFGEIVSAPFEIKHTASDINSLVELINSVEGESRIVMEHTGRYYEVLAHQLSAANLFVSAINPKLIKDFDNDSLRKVKSDKADAVKIARYALDKWQNLKQYSVMDELRNQLKTMNRQFGFYMKHKTAMKNNLIGILDQTYPGVNTYFDSPARSDGSQKWVDFASTYWHVDCVRKMSLNAFIDHYQNWCKRKKYNFSQSKAEEIYGKAKELVPVLPKDAITKLIIKQAVDQLKSASTTVESLRTLMNETASKLPEYPVIMAMKGVGTSLGPQLMAEIGDVSRFTHKSAITAFAGVDPGVNESGTYAQKSVPTSKRGSSDLRKTLFQVMDVLIKTHPEDDPVYQFLDKKRAQGKPYYVYMTAGANKFLRIYYGRVKEYLSSLPES

SEQ ID NO: 309423 - protein, 388 aa, unidentified
MKKGSTRKANRQQSSLPCRATRSQIRERAAKERLTIGLDLGDRNSSYCVLDEQGEILLEDSLPTTSAGLGQAFAGMPRCRIALEVGTHSPWVSRQLTKLGHETIVANSREIAYITRSTRKNDRLDARKLARLARVDVELLSPIRHRSEAAQADLAVLRARDLAVRQRTQAIVAVRAMVKSLGERLKPCAPERAGRALVAESREEIRRFAEPLLEVVEKLNASIDGYDQQMVEMEKRYPEVELLKQVYGVGALIALTFTLTIDDPHRFRHSRDIGPFLGLRPKKRDSGKSQPELGISKEGDKMLRWLLVQAAHTILRKGAADSDLRSWGLAMMAHTEAEKKKNGSKRSVRKKVVVAVARKLAVLLHHLWVSGEVYDPLYQRRQRMAAAA

SEQ ID NO: 309424 - protein, 411 aa, unidentified
MHNRQNYLYVGVDLHKEYHTAVIINCWQEKLGEIQFENKPSAFSKFLLEVETYVSDGLSVVFGLEDVGGYGRALAKYLVDHEQVVKEVNPALSFLERKSQVMIQKNDSWDAECVARILINKLNQLPDAKPNDLFWSIQQLVSRRNALVKAQSALKNQLHIQLNHHYPSYKKFFSELDGKTALAFWQQYPSPSCLEGANIKQLTAFLLDVSNNTCSVKKASEILKLVKEDGQTMKEYQETRDFLVRSIVRDIEFKKKEMKYIERELNQLVKLLDYQLETMPGIELVTASALIAEIGDVRRFSNANKLARFAGIAPVYFGSGGKGKTHKSKQGNRALHALFYNLAVQQVQVAKGSKMPRNPVFHAYYQKKLKEGKTKGQALVCIMRRLVNIVYGMMKYKTAYELPVVEEKEVV

SEQ ID NO: 309425 - protein, 388 aa, unidentified
MSSMQLRRDDVIIGVDTHKDNHVAVAIDGLGGRLGDVVTPATVAGFDELVTFCLALVGPAGSLIGFGVEGTGSYGVGLARYLRNHGHQVHEIARPARAAERRLAGKNDTLDAEHAARQLLAGHGLSAPKTADGAVETIRLVKIAYDGAVQARTTTMITLKATLATGSEALRAKLEKLTDHKLITACAALEGPTPLPPVRRGAPAVVVPNDPEAAMRHVLSSMAQRWLALHEEAKAHAASLKILTVAAAPRLVEAVGVGYDTAAQMLITAGDNANRIKSEAAFAKMCGACPIPAGSGKTNNRHRLYRGGNRQANAALYRVVIVRMRWHQPTIDYVARRTAEGLSKREIIRCLKRYLARELFRLLPTPDTTAEPRSLTNSKSRPDRLDNL

SEQ ID NO: 309426 - protein, 428 aa, unidentified
MSNQDIIRHELFCQIVKEIHKSNEYLIVGIDVAKDKHHAFMGTTTGKLLLRKLIFGNNINGFSRLMKTVEAIKVQNGLSKIVYGLEPTGNYHKPLARHLIRYDCNVVLVAGQAVKYNRQILDGRWDKNDTKDAANVADLVSRGKCLYYDCPSQSIIDIRVLLSLRKRLKKEEHSLRMRIRNNLLAKYFPELDTFYSACESETLSIVGWCLTPDTIASMEFSKFFQLVTKTRRGTAQTLRLRKIHGLAMESIGCPMGPASEYEAELLVEKLKQVRNQIKETNDLIEDFCLKFPEYNYLLTIPGFGPYISARVLASIGDPFRFKNQKQLIKMSGYDLCANRSGKTSDTAIPVISKKGNSELRYALYQAAKVATAKVDLFRAYFTRLLTGRERERGIKTKMCVKLAAKMLVIAWTLMKKREVFNPDYITIE

SEQ ID NO: 309427 - protein, 366 aa, unidentified
MVITHVALDDSKRVIVAGILRAEATQPELREIPNDPRQVRRLFERLLHEGPVRACYEAGVSGYDLYRQLTGLGVECAVIAPALTPRKPGERVKTDRRDAAKLVRLFRAGELTAIHVPTEAEESVRDLTRCRDDIRADIVRWRHRVLKLLARHGRVYPSGKNWSQAHWAWIRAQRFDDLALARTLEASLDALEQAMRRRTDLDRVIEALASDAPYRDAVNALRCFRGINTLSAMILVAEIVDFQRFRRPRALMAYLGLVPSEYSSGERHRRGALTKAGNSHARRVLVEAAWHYRHRPGLGNRLARHTANQPPTVVAEAWRAQQRLHRRYRHLVGHGKRPTVAVAAVARELAGFVWAAMTQAVARQAA

SEQ ID NO: 309428 - protein, 329 aa, unidentified
MSAFVCGLDVHKDSTYATILNLEGKIVNQMRMKNEKVLSYLARFNVSRVAMESSNQVASLYRQLESKGYDVIVSHPRKTRYIAEAKIKSDRVDSKAIAELTRLDALPLAYMPGREVAALREKVRRRAFLVREHAKLRVKIKSVLTYEGLKWPSEYGLFTGKGVEWLHALNLEPVESYLRVLNPLHDEIKLLSKQLRDVADGDEDMKLLMTIPGIGYYSALLVKSEIGDVNRFPFGDRLCSYAGLVPSTRASGLMVRHGHITKEGSRWLRWAMVEAAQVHVHKYDTAITRAYNRLAERRGKQVAVTAAARKLLSCCYSVLKNKRPFHDQA

SEQ ID NO: 309429 - protein, 427 aa, unidentified
MTTPSSVPKEIPIAVYVGLDWADQQHVVCWQAAGSSQVETATVRQRPEPLQAWVAQLRSRFPEGVIAIALEQSRGPVIAALMHYDFLRLYPINPKSLARYREAFSSSGAKDDPNDAALLLDLLVKHRDRFSPWIPDDALSRQLALRVEHRRQLVDLKTSLTHQLSSQLKLYFPQALDWAGELDSLQACDFLQRWPTLQAVQKARTTQLEKFYTRHNCRRPQLIQQRIEQIGQAQPLTHDIALVAAGSAMVLALVALVRDLICRLQQWQQEISQLFIQHPDQTVFASFPAAGPVFAPRLQAAFGSRRDRFASAQEVLQFSGVAPVTQRSGKSCQVHRRWARPKFVHQSFVEFAALSIPHCGWARALYQQLRARGHRHWAAIRMVAFKWIRILFRCWKDRVPYDEQKYLTSLQRRNPRLWAATTSSRAA

SEQ ID NO: 309430 - protein, 365 aa, unidentified
MQKVSTMRTSGKRIFKGQLTIGLDLGDRSSSYCILDEAGKILLEQKLPTTPEAMKQTFAKMPRSRIAMETGTHSPWISRLLKALGHEVIVAHAQNVHLIVKSRRKDDRIDARTLARLARIDPELLSPVQHRSAQAQLHLTEIRARAGLVSARTALVNAARGLVKSHGQRLRKCGTFQVSREITSDLSTELREALQPLLREVESLNERIQEYDRRIEKMAKEKYPETALLKQVKGVGDLIATTYVLTLEDAKRFRKSRDAGCFVGLQPGRRNSGESEPQMHISKEGDEYLRTLLVQGAHYILGPFGEDSDLRRWGQRLAARGGKNAKKRAVVAVARKLAVLLHRLWVSGEPYEPLRNSQKAISAAA

SEQ ID NO: 309431 - protein, 355 aa, unidentified
MAMLAEVADAVIGIDTHRDNHEVEIADAAGKPVATMRIGNDSAGFARLLAAIAQVAPGPRVAVSIEGSRSYGIGLARALAGAGLLVIECEQPGRKQRRGKGKSDPIDAHLAVLAALRLDASRLPVPRADGDREALRILLVARQEIRTAATAQASRLRALLLAGDDADRQAARRALTGRVLAALGGRELPVQATRQHTVRQAEIARLAHALDQARWQLRDNRAQLLAIVDDLAPGLTSRYGIGPVSAAQAIVSFSHPGRCRSEAAFAALSGTSPVQASSGRTVRHRLNRGGDRALNRAIHAIAISRIRSCPRTRAYVARRTAEGKTARETRRCLKRYIARELYRQLNQSMNLPTGP

SEQ ID NO: 309432 - protein, 348 aa, unidentified
MAHFVGLDVSVKETAVCVVDEVGEVVLEQKVLTEPDDIVTLLTSIGEAYGRIGIEAGPLSQWLVNGLAAAGLPVVCVETRHMQALLKAQQINKSDRNDARGIAQMMRVGLFKPVHVKTLVAQEQRMLLTSRKLLQRKLLDVESDLRGTLRNFGLKVGKVSTRGYEARIRELVEDFPKLAAIVEPLLTVRRVMRQQFAVLHKMLLDTVRHDPVCRRLMTAPGVGVVVALTYRSTIDQPQRFVHSRAVGAHVGLTPKRFQSGEIDYDGRVSKCGDTMLRTMLYEAAQSLLTHSRKWSWLKAWGMRVAQRRGMRRAIVAVARRLAVILHRMWVDGTEFRWNNDPAVAVKTT

SEQ ID NO: 309433 - protein, 387 aa, unidentified
MSDDRPFAEPTAIRTDLGAIFVSLELSRSTWLITSLSPGGGEKMSKHVVAAGDLAGLLAHFARFQEKAQARTRQRFPIIVIQEAGLDGFWIHRALQAEEIESYVVDPASIATSRRRRRAKTDKIDGEAQVRALLAYKRGEPRVCAMVKAPTPEEEDRRRICRERKTLVAERVEHVNRIKGLLFAQGIADYEPLRRDRRARLDAFKTGDGRPLPEHLTKQVRRELDRLELLIEQIKAVEAERDALLAAERARAAPTAMLLDIKGVGPEFAAVLWSEGLFRHFDNRRQVAAYAGLAPTPWRSGSIAHEQGVSKAGNPRLRTTMIQLAWLWLRHQPQSALALWFEERVRRNGGRMRKMTIVALARKLLVALWKYTSAGVVIEGAVMRASS

SEQ ID NO: 309434 - protein, 406 aa, unidentified
MDTRFAVVVGLDVGKSSHHACALDPAGNRLFDQPLPQDESELRELFTQLQNQGEVLMVVDQPNTIGALPIAVARDVGCSVAYLPGLAMRKAADLYPGRSKTDARDAFIIADTARTMPHTLRQVDRDSDVLSALKVLAGFDEDLAHETTRALNRIRSLLTQIHPALERVFVGGTLSTGLVLDLLEKFGGPTGFKAAGRSRVLRFARAHSRRNPEVLIDQIFTALAEQTVIVPATAAVELVVPRVAGQVKELKEQRATVAREVETMLEDFPLASVLMSMPGIGIKTAAQILLAIGDGSAFETPGHLAAYAGIAPVTRRSGTSIRGEFPARSGNKRLKNALFYSAWVASHSDPISKAYYDRKRAEGKRHNAAVICLARRRCNVIFAMLRDSTYYQPPLVPTPEPAALAA

SEQ ID NO: 309435 - protein, 406 aa, unidentified
MPFLGGLDWGGASHAVCVIDHTGQAVLRIEVAHNAAGLADMLARLKRIAPPHELPIAIERPSGLIVDALVAAGHPVMPIHPNVVKACRPRYRAAGGKSDPGDAYRLADILRTDGHRFRPLTPASDDIKALRALVRGRDDLVAQRTALANQPRSLLEGFWPGAAAIFAAIDSPIALAFVSRYPTPDSASRLGEKRLASFLAQHAYCGRRSPAELLARLRAAPTGLASDAEADARGELVRALATILERIVAEIAKLSSRIDHAVSQWPDGRLPDGRIVMSFPRAGRICAAQILAELGDVRERFPTAQQLAAEAGVCPVTHASGKSRGVVFRWACNKNLRLAVTCFADNSRHASAWAAAIYQRARKRGCKHPHAVRILARSWLRVLWKAWQDRTPYDQSRHASANASAA

SEQ ID NO: 309436 - protein, 303 aa, unidentified
MNQSSTISIDLAKSVFQVAVFNRHGKRMSNQAMSQKKMLMLINQHPNSTICIEACSASHYWGRTFQDRGHTVKIIPPQKVRPYRNGNKNDANDAIAIYEASLRSDIHVVPVKTPEQQDVAMLLSLRQSYIKQRTAVSLRIRGYAAEHGITFPQGINKLREMIPLAIEDAENELTSVARFVLRELYAQLLSIDEPIERVESELIEFARQIPACQLLITLRGVRWIIASAIFARMGDASAYRNGRGASASLGLVPTHRGSGGKNKNHGISKSGDKTLRSLIVHGARAVVAIYEIKRSIKCWLETY

SEQ ID NO: 309437 - protein, 399 aa, unidentified
MLSDTTTPFTASLPNDLVGAQEIKKQILELNDSQSFERIVIGMEATSLYSFHPAMFFHEDSDLKALMVEVMVEQPNKIKKYREAFEESKNDTIDAFYIADYFRAERFSPAFLKEEKYLALQHLTRTRLQLIEQLTRTKQHFIENIYYKCNTLSTEIKNESLTTSLWSSTIISLMTEDYTLDELATVPLNDLADFIQKLGRGRFKAPEKLAKAIQSAVRGSYRLPKLQQDSVNVILGLLAREIRNLEKLIKDIDKAIEEMVEVIPEYQCLTSVPGVGKVYAAGIIAEIGQIDRFKDHPQVAKYAGLNWKQNQSGNTNSQNTELVKRGNRYLRYYLVEAANSVRRHDSEYQTFYKKKYHEVPKHQHKRAIVLTARKFVRLVDALLRNRQLYAPPRRLMEDR

SEQ ID NO: 309438 - protein, 468 aa, unidentified
MDLTLGIDLACRAAHQASLAGPDGTFVWTGRKFFTRPADLQRVWADLGLTDADTVTVVMEPTRNAWAPVASWFRRRGARIIMVPTTQSADLREYYSKHTKNDHLDSKLLARLPLLHPEGLREQTGDGPAEPLRRVVKQRSSIVKRRTAIYQRLDALLELLGPAWYDALGSNYGKAALAVLARYADPNALTRLGHARLTRFLIRHSRGAWRDDHATLFLTAARQSMDLWGGDPETGIDFAELAADIAIEAEQAQVLTEQIEDLDERIANLYAEADPEGVIASAPGVGPVTSGVIAGRIGDPHRFHSLAAVRAYSGLVPKVSQSGQSHHQHGLTKAGDPLLREALWAAADAARKTDPQLAVKYKRLMDTDRHHDSALCHIATTLLTRIVAAWRAGEHYLIRDTDGRTITAEEGRQIVRQHHQVDRKRRQQAADTRRSKRLKNRTGREQKESQSAPASRPVGTKSTNRGVA

SEQ ID NO: 309439 - protein, 407 aa, unidentified
MIFVGVDWAEAHHDVCVLDEAGVVLARKRIPDSLLGVSELHALVADHLSDDDDANDVIVGIEKDRGLIVTALVAANYQVFAVNPLAASRYRERHHVSGAKSDPGDAKVLADLVRTDRHNHRAVAGDSALSDAIKLLARTHQNTIWNRQRQVNTLRSALKDYYPGALEAFGTDLSGIDAVAILAIAPTPALGRGLSRSKITSALRRAGRKRYLEERTERIYEVLRREQLRQPTTLENAYGVTTETAIATIAQLNASLVKLEASLSEHFKQHPSAKVILSLPGMGTVLGARVLGEFGDDPNRYSDAKSRRNYAGTSPITRASGRSRVVLARHSRNKRLAGALDQWAFSSLLPSPGAHRYYNELKARDKHHRKAIRQLANKWVGILHACLESGTPYDENIAWSRRQERAA

SEQ ID NO: 309440 - protein, 464 aa, unidentified
MTAGKQLWRNRKEKKEWARRLQSEDPGLEVVHPHAAGIDVGNSTHYVAVRPDRDPEPVRRFECFTADLHRLADWLQSCGVKTVAMQSTGVYWIPLYEILEEHGLEVYLVNARHTKNLPGRKSDVQESQWLLKLHTYGLLNNSFQPVSEIRVLRTYWRQRGEHVRGAATCIQRMQKALTQMNVQLANVISDISGLTGQAIIRAIVAGERNPLKLAMLSDPRVHASHEEIAKSLEGNWRPELLFVLHQEVDMYDTYQKRIAECDQRLQKHLASFTRPLPIQPPTQKLKTKKPAAKNAPRFDLSSELQRVTGVDLTRIDGIDVMVAQTLLSEVGLDMSRWITESHFASWLGLCPDNRISGDKVLSRGTRRVVNRAATALRQAANTLMRSRSYLGAQYRRLRTKLGAPKAITAMAHRLARLVYRMLKYGQTYVDKGTEYYEERFRQQQIQLLRKRAAKLGLQVAEIHP

SEQ ID NO: 309441 - protein, 374 aa, unidentified
MSEIIVHVGLDVHKESIDVALASNQAAEVRHYGTIGGDIASLDRVVRKLSSEYSQLRIVYEAGPCGFEIYRYCRKKNIECWVVAPSRIPKQSGDRVKTDRRDAAMLARLSRAGELKGIYVPTEADEALRDMTRARETAMIHYGRSRKELLSFLLRNGIVYTGKTNWKKEHLNWLARIKLPLPAQQIVFQESLHQIEESHQRLERLSFQIEQQVETWRWKPVVLALQALRGVKLVVAAGIVAELGDMNRFPHPRALMCYLGLVPSEYSSGPHRRQGSITKTGNVQVRRLLIESAWAYIQGPRVSETIRKRQQDLPQPIIDIAWKAQLRLCRKYRRMVLRGKNNKVAAVAVARELIAFMWAIHRQVLLHERSMVAA

SEQ ID NO: 309442 - protein, 357 aa, unidentified
MFYLGIDQHAKQLTVNLRDSNGDVVLRRQVSTQPDKVLEFFERLTRRCAEHGCGFWAIVEVCGFNDWLLEMLKNFRCDRIVLVQPEETDRRKTDRRDAAKLSEQLWLLRDRIAKGKYIDKLKIVHVPSSIVQQQRRLTTLRKDARSSRSRAINQIKHILRRHNLQHEMPTKTFPSKAAMAWLPTLQLAPADALELRQHLEDLQRYTLRVAELDAVIAELSQDDEDVKLLMQTSGIAQFSAVALSSRIAGIERFKRPRSLANYFGLTPGSRNSGEKTRLGHITKAGSGMARWVLGQASKHILRTDPAMRAWFKKIKRKKGPGIARVAVMRRMACIIWHMLTKRKTYAQLRNLGIGLQE

SEQ ID NO: 309443 - protein, 341 aa, unidentified
MEKYVGLDVSMEETSVCVVDGGGNIVFEGKTSSQPDALSKLLRAKASGAARIVLETGSLACWLWHELRGRNFPVICLDARHARAALSMRVNKTDRNDARGLAELARMGWYREANVKSMESRYTHSLLAARAKLVDLRRDVENQMRGLLKGFGLPPGKGGIKALLEKIVVIMREAPHLHMLFKPMMLAHSALVTQVEFYDVQILKLAKGDETTRRLMTVPGVGPATALAFRSTIDDPNRFKSSNDVGAYLGLTPRRYQSGELDRTGRISKRGDRLTRFYLFEAASVLLTVVKRWSVLKAWGVRLAKRVGIKKAKTAVARKLAVILHCIWVDGTEFQWGKEKA

SEQ ID NO: 309444 - protein, 353 aa, unidentified
MNTIYIGVDFHARQQTVCSLKTDEGVVVTHNLKHEDKDEVRAFYQQFSGRVIVGIEASGYSPWFEQLLEELGHQVWLGDATEIRRRARWRQKNDRRDAELILDLLVHDEFPRLHRPAPQSREILRMLRYRQKLIKIRTMGKNSLQALALQSGLAKGSHLFTRAGQQELRAATMSPAMQWQREQWCQLLEPLNERLVETMLWLKQQSQDDARIKLLRTHPGIGLLTSLCVVHTLDPVSRFRNQRKVAAYAGLDPMERSSAERKHFLGISKAGSRVLRYLLVEAAHTAVKKDDDLKRFYQRLVERRGRPKAKVAAARKLLIRTYIMLRDEIDYAEFRRRAVAARLARQSSRPPCL

SEQ ID NO: 309445 - protein, 343 aa, unidentified
MTSYAGLDVSQQETQICIIDAAGAVLWTGKARSAPDALAEALRRRAPDLARAVLESGALSGWLCGGLVAAGLPAVCIDARAAHGALKQRRSKTDRGDAEGLARLAQTGWFKTVRLKSRASLERHALLAARERLVRIQRDLLNQIRGLVKPLGLVLPRTTPRRLEARVQAWLDEVPALRPAIMALLTARSRVADELERLDRLLVRQAAADPVCRRLTTIPGVGAITAACFVSVVDDPERFARADQVAAYLGLTPRRWQSGEVDRQGGISKAGNAMARHLLYEAANSLLARVKRSCPLQSWARRLQERVGGKKARTALARKLAVLMHKLWRREQEFQWSPAAQPA

SEQ ID NO: 309446 - protein, 424 aa, unidentified
MNHDEIIRHQQFCQLKAEIRGSDQYLIIGIDVAKEKHHAFMGTARGKSLLRRLIFENTIEGFSKLMTHAQALRVQNGLSECVFGLEPTGNYHKPLGSYLINSGHHVVLVSGEAVKKNRSLLDGRWDKNDTKCAANVADLICQGKCLFYDSPSPAISELRSLLSLRKRLKKQEHSLRMRIRNGLIAKHFPEMDRFYGQCPSENLAIVRWCLDPKKIAQMDFGRFFQRVTTRQRGIAQYRRLRAIWEAAGDSIGCALGRASEFEAQLLVEKILQVQKEIKQVAQRIEKVSSQFDEYPLLLTIPGFGAYVAALVLAVIADPRRFDRDKQVIRMAGYDLCADRSGKPSDDAIPVISKKGNAALRYGLYQAAFIASIRNIHFIKYYTNTLRGRERERGIKTKMRVKLAAKMLVIAWTLMKKKSRLIQIT

SEQ ID NO: 309447 - protein, 340 aa, unidentified
MNRIGLDAHSASFTMAVVNEAGKVMQCVNRPMSAENLIALVGAVPGPKELVVEESTVAQWVKETLEPYVDRLIVCDPRRNRWIAKEEFNDDRTSAIKLAQLQRGGYIKEIAHPSAQEAPLRQSFLHYTDLNQQVVRFKNKLKGTYRQAGVAVSGDGLYEADAHKEWLARLDATPALRRQAEHLFVLIDEIEQMKHETLRTMVRRARKDKAYALLLTMPGAGPVVSCGYVALIGTPHRFSRKNKLWRYAAFGNVLHISDDKVYQDRPSKTGNRALKWVVMQQFMGAVERAKKDNVFKRRYARLIAGGLGRKAARRQVCRSLLSVARAIWMKGEAYREPPLN

SEQ ID NO: 309448 - protein, 410 aa, unidentified
MEVMHQCCAGLDVHQAEIVACVRQATGAKRTYTLERFPTTTQGLVALMAWLQARGVTHAVLEATGVYWKPVWQVLEGTVDLLLAHPATVKAIPGRKSDQNDAMWLADLLAHGLIRGSYVPPVAIQELRDLTRTRQQLVRERSQHVLRLQKTLDDANIKIAGIVTHLLGASGRGILQALIAGETAPERLLLSTTGRLRKVSPEELLTRLEGRVTTHHRFLLRLHLTQVDALDATLATLDQELEQRLTPFRATLTRLTAIPGVETVLARTLLAEIGPDVTAFPTAAHLRAWACVAPRLDQSAGHRRSTRQRLGSRWLKPMLIQAAWAAVRCPRSYFRAQYYRLRARRGPKKAIGAVAASLLTTIYHLLQSPERAFHDLGPDYFTQLDPTRAVRRLTSRLEALGYTVQITPAA

SEQ ID NO: 309449 - protein, 309 aa, unidentified
MTIHQTVLGCDISKSFLDVFDPRSQRCERIANDKHAIEAFAASLAGTDCLVVFEATGVHDRLLRHALGEHGIAARRLNPVQARRFAEMRGRLAKTDRIDATSLSDFGKMVQPNPDPAPSRDRERLAALARRRDQLVELRALEKRHRADAFDASIIADIDVVIESLGNRIAAIETEIDRHTRRDVELTAELKRLTSAPGVGKITALTLVAHLPELGSLTPKKIGALAGLAPFNNDSGHRRGRKHIKGGRRRVRNALYMAALGAIRANTRFKSFFNAVTDRSGSKKVAIIAVARKLLTVLNAMQRDKKAFA

SEQ ID NO: 309450 - protein, 370 aa, unidentified
MEKYKYVGLDVHKETIVVSVAEADGGEVRFLGEVPNTADSVVKLVKRLRKEGAKLSFCYEAGPCGYGLHRQLLDLGQVCQVVAPSLIPKKAGDRVKTDRRDSLNLARLHRAGELTAVWVPDGAQEALRDLTRAREGMKHIQLQAKQRLLGFLLRHGKRFEGKDNWTQAHFRWFEEVKFGQPVQQIVFQEYVDSVQTITRRIAALDEQMESAARDSVFWPVIEGLMALRGVKLITATTIVAEIGDLRRFANAPQLMAYLGVVPSEHSSGESKVRGSITKTGNGHVRRVLVEAAWQYRYPARKTAVLQRRAERASEQVQEIAWKAQKRLCARYRLLEARGKLKVQVCIAIARELAGFIWAIGQTLPQPAARG

SEQ ID NO: 309451 - protein, 414 aa, unidentified
MESVYRCMAGIDVHKKMLAVVVRRWSDEQVEYRKRQFGTTRSEIQHVEAWLRAQGVSEVVMESTAQYWRPVWYGLEPHFKLHLTHPLKTRAPRGRKSDFRDAQRLVDRWSSGDLEDSFIPGSEQRAWRWLSRTRVQLKKKLGVIQSHVEGLLEQGGIKLSAVVSDLFGVSGWAMLEHIAQGVTDVEVLAGEARGVLRKKDAQLKEALAGHLEPIYRLLLRQHLEQVRLLRRQVEEINQALAEAMKEHLAALHRLSKIPGVDLYAAQELLSEIGPKAAAFASAEKFTSWVGVCPGSQESAGVSYSHRSAKGNRYLRRLLCQIAWAAIHTKDTFFAGLFARLKPRIEGKGAAWAVAHRIAKIVWLLLHEEVEYHERGPAAPNERTLVRKFKRMLKEFGRAGLDVRALLDQQLPAQA

SEQ ID NO: 309452 - protein, 413 aa, unidentified
MVEVVWERCCGLDVHQQTVVACLITPGPGGPPQKEIRTFGTMTADLLELADWLRAAACPAVAMEATGVYWKPVWNLLEDEFTLLLVNARHIKAVPGRKTDVKDCEWLADLLRHGLLRASFVPDRPQRELRELTRYRTALVRERAAEIQRLHKTLEGANLKLGSVTSKVLGVSARQIVDALLAGTTDPAVLADLAKGKLRAKRPQLERALVGTPGLHQHFLLACQLAHIDFLDETVEQVSTEIAERLRPFADALARLDGIPGVGPATAEVLLAEIGADMSRFPTAGHLAAWAGMCPGNYESAGKRQKGKTRKGSKWLRTALLEAARAAARKKESYLAAQYHRLVPRLGKKKAAVAVGHSILRIVYYLLQRETTYQELGASYFDERHRDRVERRLVHRLEKLGFEVTLTPKDPAA

SEQ ID NO: 309453 - protein, 445 aa, unidentified
MPAFAKVFDPTFEDLEDPYRHYDAKGEPLDDRLYLPVGFDPGKKQTEVVALHPFPGHDQIVWQRTIPTTGLTEAFWLVEKMQRVAEPFAAVPVFVFEATSIYWRPLRDLFVRLGLPTATVSAVQLKNLRGTQTRKKKSDAIDALQVAKLFKNGSSHASRIPPEPLASLRELCRAHLFFAEFLVAAQNRMIAQQFVLHPESRTPFTRINQRTPMALVTQGLIAPGRLLALSLEELSQLLRRASHGRHGVDVAMQLRQSALTTLAMPPAEAAVSYSLALLGRSYLYVADQILRPLEHRIRDLLQQVPFRHYLQEIPYFGPIVIGTILGELGQPAWFRTADDVVAWFGLDPAVFASAGKQAAGLPLTKRGSRYGRRILWLAAQNWCKYTKIGVQFFRHYRCGKGLSYDATVCAFAARLAKLSWAMSRDGTHYDARRAFRAYLPAQISA

SEQ ID NO: 309454 - protein, 336 aa, unidentified
MSRYLGVDLHRNCFTVCTIVEGGRSYLREWRLKDLERFVSQLRGTDEVAVEVTGNTRLFYDAVVGKVSRVVVVNPSEFKVISQSVNKTDCNDDRRLAVFLSKGLLPEVRMKDKGHAQLASVTQTRDKLVKLRTVLKNKINNITSAHGINLKKEELSSEKGLEKVLGMMFDPLVDLEVEVLVKQIRSLNKSISELEKAIKDEGSKLKGHGNLKSIKGIGDLGAGILLSVIGDVEDFANEGKLASYFGIVPRVSNSNGTERSGRITKRGSKLGRTTLVQCSLIAKRYSPYLNRYYERIKARRGGGKAIIALARKFLSIIYKTLKNDWVWEDFPNGVLA

SEQ ID NO: 309455 - protein, 429 aa, unidentified
MRTESTPGARGPVFCGVDTHADSHWLCVLDWRGRKVLSRQFPADAAGYEALAGAIAAAGEPACVAMEGTSSYGAGLTRHLASLGMPVREALSPARTQRRRPGQGKCDESDAERAARAAMSGSKLGTPKSQDGWVDGVRCMLAARSGAVKARTSAINTARSLLTTAPEGLRSRFRGMGGPRLMEELPSVRAEGALGAALGALADLWAAARDAALDMERAIEASLEENCPALLAMYGCGPVSAAKLAVAAGDNPGRLRSEASFAAICGACPIPASSGKTVRHRLNRGGDRQANSALHEIARQRVMRDPETAEYAERARGRGKSDREVMRCLKRYVAREAYRALMRPHEIRRPEDASELVAARRAAKVSQVRAASILGTSEKYISMLERGQRELKPIRRAYEAWVEAGLPLDWDRQAFEAERKMDSKKHLAK

SEQ ID NO: 309456 - protein, 382 aa, unidentified
MMLIGIDPHKSTHTAPAVDPASNSDLGSIRIEASFAGYRRLLAWARQWTERSWAVESAEGLGHHLALWLVAMGESVVDVAPAATARVRQLSRGGRRKNDRIDAAAAATVAALHGDARPMYAEAHANSLALLDERRKNLSSSRTRSVNQLHALLRELLPGGVPTDLTASRVATVLRGLRPVTATDRVRKTLAKDLVADIKRYDAQLAQNASAMDELLNVHGTTLREIPGIGPVMAARIIGRTGRVRRFGTAAAYANYTGTAPIEVASADSTRHRLSRHGDRELNSALHTIAMIQIRMRGSAGRNYYDKKIAQGQIIERGKTLPQTTPRRPGLANHDPRRTTHHPARIHGPRRKQLAPNPENEQFVHRHLQVGHGEDCVGVCSR

SEQ ID NO: 309457 - protein, 372 aa, unidentified
MVDKVTEAAVVGGVDTHKDLHVAAVVDQNNKVLGTQYFSTTRQGYRQMLAWMTSFGTLKRIGVECTGTYGSGLLRYFQNAGLEVLEVTAPDRMERRKRGKSDTIDAECAAHAAFSGIRTVTPKTRDGMIESLRVLKTCRKTAISARRVALQIIHSNIISAPDELREQLRNMTRMQLIRTLGSWRPDASEYRNVTNVYRISLKSLARRYLELHDEIADLDVMIAAIVDELAPELIKRNAIGYESASQLLITAGDNPQRLRSESGFAALCGVSPVPVSSGKTNRYRLNRGGDRAANSALHIIAIGRLRTDAKTKEYVARRVAEGHTKMDAIRCLKRYISREVLHVTAQSKQADQQYPDNSLTLRRASREASIPV

SEQ ID NO: 309458 - protein, 341 aa, unidentified
MKNRSFIGIDISKNVIDASIFCEGTPIKDFPHAVFNNSRKGFGEMCTWLKKNHVVLSNCLFGMEFTGSYSMELEKFLNARNYQFCMLSTHVVKHYPMGSKDKSDKIDSAKIADFLYRYNGTECVKPYKMPDKTMQRLKTLMNERKFLVEQRTCFMNRRQLCSTKEDAQLYDGYIRKLGHDIENIELEEQKLLATDDSLLATYKNLLTIPGIGFVNAINAIVITRNFTAFETARQYASYVGVAPHFRTSGTSVRWRPRPSARCDGQAKADLSMAATVAVQYDAELQSFYNRKLGGKQDSDTKRKALNAVKFKLVLRMFAIGKQNRKWEPLDSKSSNEKLAIS

SEQ ID NO: 309459 - protein, 360 aa, unidentified
MAGQVDGVIGGVDTHKHTHHAAVIDHNGQLLGDREFRADAAGESELCDWLRAHGPVLAVGIEGTGLYGAGLARHLSSAGMRVVEVNRPNRGARRAQGKSDRLDAEQAARAVLAATATAVPKSRSGPVEGVRMLRVTRASAVKARTQAFLVLHGIMIGSPTALRDELVKLSKRTLVKRCAGLRPETEDLGELIEKPERLHLAAAKRTLRDLAHRWLALDTEIKALDRQIKALVERTAPQLVDLFGVGTELAGQFLVTAGDNAHRIRNEAAFAKLCGVAPQPASSGRTTGRHRLSRSGDRAANSALYIIAITRMRHHEPTRTYFARRTAQGLTKREIIRCLKRYIAREVFNALPTPQPTPPP

SEQ ID NO: 309460 - protein, 411 aa, unidentified
MLFVGDDWSEEHHDVEIQDEAGRKLAARRLPEGAAGIARLHELIAAHLGADGDPGQVVVAIETDRGLWVQALAAAGYQVFGLNPKQVARFKERYNLSGAKSDAADAHALADMVRAERHQLRALAADTPGAQAIKVVARAHQTLIWERTRHTLRLRSALREFFPAALTAYAELGLTAADTLELLVRAPAPAPAAKLTATQISAALKRARRHDVPAKAQAIKNALRVPQLAQPAAVTAAYAAAVQATAAVLTTLNEQISRLEAQVEAHFLQHPDAETYLSQPGIGPVNGARVLAEFGDAPGRYASAKARKNYAGSSPLTRASGRSKIVLARFIRNDRLTDALHSQALSALTASPGARAYYDKQRARGLGHNAALRQLSNRLVGILHGCLKTSTRYDEATAWPSRLAHPEPLAA

SEQ ID NO: 309461 - protein, 409 aa, unidentified
MLFVGDDWAEDHHDVEIVDETGRTLARRRFPEGLAGITRLHALIAEHLPEPAGPADPAPQVVVGIETERGPWAAALVAAGYRVFAINPMSTARYRERHSTSGAKSDAADAHLLAEIVRLDRAHHRQVAGDSALAEAVKLAARTHQSLVWDRTRQILRLRSALREFFPAALKAYNDLDAADTLQLLRLAPDPDQAARLTKRQVLAALARANRRNPEVVAEQIMAVLRAGELRQAPPVQAAFAAIVAAQVEVITTLNNQIDTLGEVVADHFGRHPDAELITSLPGLGVILAARVLGEFGDDPSRYVDAKARKAYAGTAPITRASGTKKVVMARYARNKRLGDALQQWAFCSMRGSSGAKAYYKELRTRKIGHQAALRQLANRWVGILHGCLKTGQPYNETLAWNHHTSAAA

SEQ ID NO: 309462 - protein, 409 aa, unidentified
MDQLIERCCGLDVHRDTVAACVRVPGPNGKQRHEVRTFGTTAVELLALRDWLEAHGVTHVAMESTGVYWKPVFYVLEEAFTCLLVNAAHIKQVPGRKTDVKDCMWIAQCLEHGLLRGSFVPPAAIREIRDLTRHRKVLIQERTRAANRVHKLLEDAGIKLASVATNILGVSGRAMLEALGHGTTDAEGLADLARGKLRKKLPALRQALAGRFRPHHAFLVSQLLAHVDYLDEAIATVSEEVEGRLAPFAAQLTQLDTIPGINKRTAEVIIAELGVDMSCFPSDRHLASWAGICPGNNESAGKHKSGKTRKGNRWLRMTLIEAAAAATRTKDSALQARYRRVMRHRGHKKAVVAVAHAMLRAVYHLLAEGTTYREPGADYYDRRHTHRVTRRAIQLLERQGYRVVLEPAA

SEQ ID NO: 309463 - protein, 423 aa, unidentified
MKSRAYRATNVKDVDWQRLVLGRDGQEVTVGLDVGKDHVLCVLRWRSGEFERPWRIRQPTDVRLVAERLAWLAQGRRLRVAMEPTGSYGDVLRQALAAHNLEVHRVSPKMAADFAEIFDGVPSQHDGKDAAVIAELAAQGRSWLWPWQLASEADQEMEYQVAWLDAQRRQMMTWFGRLEALLSRCWPEASGIMRLRSGTLLKILAQYGGPAALAADPQALQRIRAWGRSFLAKTRAEDLLASAVATVGVLQGRWDQEKVRRCAAQVLECRQQQRAATRALSRLAQGNPVIEAQASIVGTATACVLWVHLGDPQHYHCGAAYRKAMGLNLAERSSGKYQGKVKISKRGPATVRRWLYLAAVRQVRSEPTRSWYARQKEARRGNGKPALVGIMRKLPPALYQVGARRQTFAADKLFSAEAQVQGR

SEQ ID NO: 309464 - protein, 331 aa, unidentified
MHARTMHVCVVDAEGVTRVHVNLPCVPGRFLQVIEPYRERLVVCCECLFAWYWLADLCREQGIAFVLGHALYMKAIHGGKSKSDKIDSEKIARLLRGGTLPQAYVYPKEMRATRDLLRRRMFLVRQRGQALAHVANTFTQYNVATPEKKLSYHKNRVGVVDRFQDQSVQRAVQSDLQLAEHLDEQLRGIELYLIQHAKIDDPQAFARLQTISGIGPILAMVIVYEAHDIGRFGSVQQFVSYCRLVKCSHESAGKKTAGHGNKIGNAHLKWAFSEAAVIMLRESAGAKKFVARREKKHGKAKAISILAARIGRTVYWMLKRKECFDEARFLK

SEQ ID NO: 309465 - protein, 347 aa, unidentified
MNFYNNTHPYYCGIDLHARSLYVCIIGQAGDICLHKEIPADPDKLQQLLEPYIGNIVVGVECMHCWYWVADFCEDIGVDFILGHALYMKAIHGGKAKNDRIDSFKIASLIRGGNFPLAYTYPKAMRATRDLLRRRMKIVRHGADLKAHVVNTTSQYNLPPNKVNLKNKEAREQLRSTFPERSVQKNIDLDMVILDCYAEQLSKVEWYIQQQAKQHKPNHFHLLKSVWGIGPILALTIIYEIGDIERFESVQKFASYARLVKCKAESAGKTYGTQGNKIGNAHLKWAFSEAAVLYLRGNEKAQKYLLKLQKRMSKAKALSALAHKLGRCVYFMLKNESVFDERRFLKG

SEQ ID NO: 309466 - protein, 345 aa, unidentified
METMYYIGLDVHKKTIDYCVKDGSGRIYAAGSIRATRLELDMWMKTLPQPWTAAMEATIFTAWIYDHLKPHAAAVKVAHPLMLRAIAVAKKKNDRIDAKKIADCLRCDFLPECYMASTEIRERRRTLRYRNLLVRQAVQMKNKIAVLLMEAGVSYNKQKLHKVGYFRELLATNQDIDEGLKPLLRLCRETVVRLGKTESALVRSLERDSFLVERVERLMTIPAVGPITALTWALEVGEVQRFSSIKKAISYCGLCGAERSSANITKRTPLSKQRNKHLQTVLIEAAKMAPRNSPDLAMIYDREKQKGNANRATLAVARKLVAYLVAVDRRQKEFLTVERENRTAA

SEQ ID NO: 309467 - protein, 334 aa, unidentified
MPMMTIGLDISKSWFQVHWITADGEIVRKKLARGKVLDFFSRIPSCLVGLEACGSAHHWARELINLGHKARLMPARYVRAYVKTNKHDAADAEACWEAVQRPGMRFVPVKSTEQQGLLMLHRTRDLLIRQRTGAINALRGHLGELGIVTGKGKANARELMGIVDVDDRIPQSARSALSILVDQIEDLELHIESQEKMILATAKDNEVCRRLMKVAGIGPFAATALAASVDHPQQFASARHFAAWLGLVPKQHSTGGKERLGGISKRGDGYIRKLLIHGARAAVHRVRVHQVTNTWITEMLGRRPFNVVTVALAHKTARIAWAIMANGKEYHAQV

SEQ ID NO: 309468 - protein, 343 aa, unidentified
MNVATIGLDIAKHWFQVHGIDALGQTVVRRKLRRSEVLAYFKSLPPCLVGMEACATAHHWSRELSALGHEVRLMPPAYVKAYVKRNKNDAADAEAICEAVTRPTMRFVPTKTADQQAVLMLHRARGLLVRQRTMLVNALRAHMAEFGIIAPQGLRHVEELADEIAREQAHLPELARSILQMIVDQLRDTMARVHEIETRLTRWHKESRVSRLLATIPGIGIMGATAIAATISDPSLFRSGREFAAWLGMTPRQNSSGGKERLGRTSKRGDTYIRCLLVAGAVAVLRHTRTRTTKDAAWVRGLLARRPTKVAAVALANKTARIAWAVMAHGEAYRSQDEIVQAA

SEQ ID NO: 309469 - protein, 400 aa, unidentified
MFCGWDWGSTHHGVCVIDDAGTVLRRWLIAHNGERLGELFFELAEIAPPESLPIAIERGEGLVVELIADAGHAVLMVDPAGFKAARPRWGSAGAKSDLGDAYMLADYARTDGHRLRRVQPMAHATRDLAVLVRSRTSLVEARTAASNQLWAVLAEHWPGAGAVFQKLISPIALAFLADYPTPEAAAHLGEGRMGQFCRRQAYRGAKTPAELLGRLRAAPSATNPISAPVLASVVAASVAQIRLLNGEIARLERDGRDALAAHPKAALLEELPRVANVSLAQLIAEIGPLLERCDNAEQVAAMCGAAPVTRASGKTRTVGFRYAANKPARVAITGFADNSRHSSAWAAERYRQARTRGARHPHAVRVVARGWIRVIWACWHTGTAYTPSRHRGEQLAAAMT

SEQ ID NO: 309470 - protein, 318 aa, unidentified
MLIHYIDIAKRNFVIAVSSLSKTKTETNNPKGIAHTIEYLKKHKVALVVTESTGGLEIPAAKAIRRAGIAVIIANPRQTHQFAQSQPLTKTDAKDAKMPAFFAQMTAQKEDSQTMPYQPPTEAEEVLEALVNRRNQPADMRTAEKNRLHQVHETQVGSVKQLIAHFDRLIDESDKQIDDHTRTHFDGKAQVAEQIKGIGSITTATLMAMLPELGRLSHKRIASLAGIAPHPRESGETKFKSRCFGGRSAVRKALYMATVAATRFEPLIRDFHQRPPSEGKPYKVAVTACMRKLLTISNARMRDYFAENDTAENGIRTA

SEQ ID NO: 309471 - protein, 353 aa, unidentified
MNIIYIGVDFHARQQTICYLKIETGELVFNELKHQDKELVRGFYAQFEGQVIVGLEASGYSLWFERLLEELGCEVWLGHATEIRRRARWRQKNDRRDAELILDLMVHDEFPRLHRPAVQSREVLRMLRYRQKLIKMRTMSKNSLQALALQAGVARRSRLFTREGKQELSLAVMSPAMQWQRDHWWQLLQPLNEQLLETMTWLKAESQGDVSVARLRTHPGIGLLTSLCLVHSLQPVVRFRNTRKVAAYGGFDPVERSSAERKCFLGISKAGSRLLRHLVVEAANVAVRKDEELKRFYQRLAERRGRPKAKVAVARKLLIRAYIMLRDEIDYAEFRRRAVAARLAREFTKASSA

SEQ ID NO: 309472 - protein, 347 aa, unidentified
MAHIGVDLHTNSFTACRLDADGSETISTFQLAKADLDRFRAGVSPDDEVAVEATGNSSWFRDQVTGSVGRVVVVNAKQFQVIRKSVKKTDKNDARSLAFFLSKDMLPETRVKSTTTSELASLTHTRDLLVKQRTRLLNKIHAQFTRHGIKIKKESLGSKRALEKLEIKRFSALEQFELTIIRDQALSLTAAITKVDKEIETAAAKIDGYDGLSSIKGIGPRSAAVLLTSIGNVSDFDSADKLAAYLGIVPKVSQSNDTDNRGRITKRGDKLARTTLVQCTLVAIRYSGYLHTHYRRIKERRGAGKAIIATARKLLAIIYDTLKNGWVFDDFPNFKIATKSIVSGQSS

SEQ ID NO: 309473 - protein, 413 aa, unidentified
MDVLHPRCCGLDVHKSSISACILVQVEGRVQKHQRRFGAMTQDLQELANWLRQFEVTQVAMESSGVYWKPVWNILEGQFTVVLANAQHIKNVPGRKTDQKDAEWIAQLLQHGLLRPSYVPCEVIRDLRDLTRMRASLSQEASRISSRVQKVLEDANVKLASVATNTLGKSGRAMLEEIIAGQNDPEYLASLALGHLRAKTPQLRLALEGKIRPHHRFLLQRLLDQLRFVEHEIVLLEERLEDIGRERPELAQAVARWDTIPGIDRVAGWTLLAEVGHTMAQFPTAEQLASWASLCPGNHESAGKRLGGTTRKGSPWLRRMACQCAWAAARTKNTYLSAQFRRVASRRGSKRAIIAVAHSLVIIGYYLQKNQRNYEDLGGDYFDRIDSDGLKRYFIRRLEKLGHKVTLVPIKAA

SEQ ID NO: 309474 - protein, 312 aa, unidentified
MDMRFVGIDVSKDRLDVHVLPEGQAFAVARDGKGLAELVERLSGLHPERIAIEATGGFETVAAAAVAAAGLPLVIVNPAQVRHFALAVGQRAKTDPIDAAMIARFVAATKPDLRPFADEATQLLADLVARRRQIIEMIVAERNRERRTQVKRIRKSIARLIAALEKELAEIDAEIDAGVRGSPAWREKDDLLASVPGVGAVTARALIAELPELGALDSKQIASLAGLAPFVQQSGQWKGRAMIAGGRKTVRSALFLAALAACRHNPILKAFRQRLIDAGKPKMVVAIAAARKLLTILNAILRDKQPWRSQTA

SEQ ID NO: 309475 - protein, 435 aa, unidentified
MKVLYERVAGIDVHKDMIKVAIRSPGDKPWTRKTEIFEFRTFYGVLQQMARELRKRGVTHVVMEASGVYTEPVYYALAEQDFTEVAVINPAHAKALRGHKTDAKDCARLAELFECGLLRGSYIPVPELKEVRDLTRYRIKTVQARTSEIQRLGKALESAGIKLGSVASSITGTASTAMIEALIDGERRGGVLADLAIGRMRTAGKLADLSMALAGRFTDHHALLCRLHLDRIAVFDDAVDGLDKRIAGKAARWQREQGLLTSVPGFGDVVAQAWLGEIGPAPHRHFASCEKLASWVTLCPGNNISARKRKHGRTGDAGTYIKPMLVQAAWAAIRVRGRLQARYNRLVRRFGGDKNPAAKKKAITAIAHTCSRSPTRCSRAGRPLRNNGTVSRATWSFCRSRGGSRPTYSCVRWERPIVCVSDRGSFHGVGIRPSK

SEQ ID NO: 309476 - protein, 368 aa, unidentified
MKTTVRYVGLDVHADTIVMAVAEEGRGEAKVVATLAHDWQALHGWLKRLSKKAKLMICYEAGPTGYVMYRKMNSAGFECQVIAPSLVPKKSGQNVKTDRRDAVALAHFLRSGDLTKIWVPDEACEALRDLSRAREAAKGAETAARQQLGKFLLRHGRRWSETTWTHKHVAWIRQQKFEHAAQQRVLADGLKTVEDATQRVKHLEQDLEELAPQATHLWPIIRALQAVRGIAFVSAVTLISELGDLKRFGTARQLMAYLGLVPSEHSSGLSQRRGSITKSGNTHARRILVEAAQHAHRLPTLSRDLRRRQQGIAPEVIRIANDAQKRLYKRTVHLYRQGKSRQKIVVAVARELAGFLWAIGQQRELLAA

SEQ ID NO: 309477 - protein, 369 aa, unidentified
MKKVSTAAAKQSKNFSQQNLTIGLDLGDRNSWYCVVEEAGQIQLEQRVRTNAKALQEVFGAMPRSRIALEIGTHSPWISRLLSELGHEVIVANARKVRLIGESRKKDDRLDAQTLARLARIGPELLYPVKHRSAQAQADLMMIRARAGLVRARTGLVNTARGLAKSYGERLRGCNVRNMNPEKAEGLSSELQAALEPLLNAIESLSERIVEYNERIEKLAQQSYPQVALLKQIKGVGTLIALTFLLTLEDPHRFGKSRDVGGYLGLQPGRRNSGRSEPQMHISKEGDPYLRTLLVQGAQHILGPFGVDCDLRRWGLKLAERGGKNGKKRAIVATARKLAVLLHRLWVSGEVYEPLHNSSGTTMDAAAAA

SEQ ID NO: 309478 - protein, 345 aa, unidentified
MKLIRVGVDLAKNVFQVHGVDRNEKPVWRRRLTRDNWLRVVLETLEPGCQIGMEACGGAHYWARKLQERGFTVKLIAPQFVKPYVQSNKNDANDAEAICEAMSRPKMRFVAVKTVEQQDIQAVHRIRSGLIEQRTAKGNQIRGLVSEYGLVAPRELVQLRRALPVWLEDAVNGLSERFRRLLNALWCDLQLLDERVAELDREIVLIAQSEPAARRLQQLRGVGPIIATALVAAVGDGGQFGSGRQMAAALGLTPRQHSSGGKDRQLGISKRGDAYLRTVLIHGARSAIRTSKGKSDRLSQWVMTLAARRHPNVVATALANKTARIAWAMLRRGTDYQPELIAANG

SEQ ID NO: 309479 - protein, 451 aa, unidentified
MSKRIRKARQVKFDEGLPQIRANAAGMDIGASEIWVDVGSKDREPVRKFETFTSDLKRMAEWMKACGIETVAMESTGVFWIPACQILEARGIEVFLVNARHVKNVSGRKTDMLDCQWLRLLHSYGLLSASFRPAAQIGVLRSYLRHRQMLIEYAAGHVQHLQKAMTLMNLQLHHVISDITGWTGMQIIRAIVKGERDRHRLAALRDVRTKADEETIAKSLEGDYRAEHVFALKQSLELFDAYQKHLQECDGEIEAYLRELEAKADPAEKLKAARREKKKRRNQPSFQIREEAFRITGVDLTQIDGINESAALALISEIGTDMSCWKTEKHFASWLALCPNNKISGGKVLQRSTRKTANRVRDILRLCSQSLLNSRSALGAFCRRMCSRLGKPKGIVATAHKLALLIYRLMKFGRGYVDIGQERYEQQYKDRVLKHLARKAHDLGFKLVPSE

SEQ ID NO: 309480 - protein, 424 aa, unidentified
MNLTQNDRLNQVTADTLVVGVDIGSETHFARCFDWRGYEFSKRAFRFSNTQVGFLTFVRWLEEMMKKTEKAKVIVGCEPTGCYWLTFQKFLTDRDILLVTVNPYSVKKCKELDDNSPEKSDLKDPKTIAGLVREGRYSTSYLPEGVYAEIREAQVCRDQIMKQHVRLSNQIQGWLQKYFPEYLECYKDFDTASGMMVLEHAPLPEDIIKLGAGGINELWRNAKLRAAGIKRAKTLVEAAQGSVGLSGGEAARLEIWFLINDYQTKTKQLERLDEFLAKEIMKVPHVEKLLAIKGVGMNTVIGFVADVGDIGRFTDPKQVQKLAGLEITKASSGKKKGQPCISKRGRRRLRRTMYESARSLISWNEAFSEVFMYYRYRTRNPLGGMQAKIAVACKAIRVFYAILKTGCEFDAEKLRRDIIRPEAA

SEQ ID NO: 309481 - protein, 317 aa, unidentified
MAEVTFPQLIQRACGIDVHLKVVVATIDGAGIQRETRSFKTFTSSLNELKEWLLSNGVTHVGMESTGVYWKPVYKVLEDSIPNVWIVNARHIKNVPGHKTDKMDSEWICKLLLAGLLKPSYIPPKEQRQLRDLTRYRNKLIQQIASEKNRMMRILEDCNIKLSSVVSNTSGTTATSLIDMLCEGKVLTLDDINSVYHGKLSASPEELLEACTGFVEEHHIYLLQMIRKDIDQTQTLVDDLSERIKRLLSKYENVLELLREIPGFSTKVVEDLVSEIGLDMSHFPSEKHLSSWAGLSPGNNESAGKKKAYESLTETNR

SEQ ID NO: 309482 - protein, 314 aa, unidentified
MAEEKVYIGVDVSKAWLDVAIEPSRKTMRVENNANGIDELIGSIRGLCLERIVVEATGGYESLLIQMLVGAGQPVSLVHPARVRKFAQGMNWLAKTDKIDARLLARFGEKASPRLVEMPSEQEKRLSALVKRRKQVLAIVVSERNRLETADPSVRGYIERSLQALRGQLDELDTAIQAFVEQTPDLKIKQDLLQSVPRVGKITASTLTSQLPELGKCNRKEIAALVGTAPFNHDSGYKRGKRVVKGGRADVRNVLYMATLTATRHNPVIKVFYDRLVKSGKEKKVALVACMRKLLTILNAMIRNNTTWQPSFSY

SEQ ID NO: 309483 - protein, 269 aa, unidentified
MTSLPNRPRETSTITAGIDVAKATLELALSDRAATSSHANDEAGHAQVIAQLERLRSQDLNVALIVLEATGGHEAEVAWALQLAGWPVVVVNPRQARDFARAMGQLAKTDRIDAQVLAQLGRTLLQRPDLAKLIKPLPDERQRMLQAMVTRRRQLLGMRVAEQQRAAGPDRRMRKSLDIMLKALDGELARLEREMHAFIGQHHSELLALLGSVKGVGKATISTLLAEVPELGELSGREVSALVGVAPINRDSGTLRGKRTTFGGRPQVR

SEQ ID NO: 309484 - protein, 427 aa, unidentified
MPEGRAERAVRSFGAFSAQLDEIAQWLKECAVKTVAMESTGIYWVPLYQKLEEAGFEVLLVDARQAKHVPGRKSDVQDCQWLQQLHTYGLLRAAFRPEDSICRLRTLQRHRKNLVEGAGVWVQHMQKALNEMNLHLHHVLSDISGYSGLAILDAILAGERDPRKLASLADYRVKKSRAQIEAALTGDYRPELLFVLNQSLQDYRQIQQQLAQCDLSIEKQLAQIADCANPSQDCGPRPQGPGSAGGKRVKIKPKDALEVSLAGHLKRILGVDLTTIPGLNVLAILTLVSEIGTNMAKWRNEKAFVSWLGISPNNKISGQRVLSSRTRKVVNRAATTLRLAAMVLGHTNTPLGSFYRRKRAQLGAPKAITATARKLGCLIYRLIKNGESYQEPDLHAYELKYKAQILNSLRKRANSFGFDLVEVPKAA

SEQ ID NO: 309485 - protein, 338 aa, unidentified
MHAGVDVHKASSSVALFSDRRGLIATWVQPARAEVLLERLRPIREGIAQVVYEAGSTGFGLARRLRTEGYEAQVIAPSKLLAPVGPEAKSDRLDCRRLAQLAAKGLLHPVRVPTAQEEADRQVLRLRELLVRKTHAVQSQIKSFLLQHGLDEPAGLARWSKKAVAALRGLVLLPELRFCLDLLLDELAHAQEQVQRVSVRLKELAGAERHREATAVLCSVPGIGALTAAAFRLELPEPQRFDHEGQVARMTGLAPQVRQSGETRREGGLLKSGNARLRTVLVEAAWRWVRYDETAACRYRRLVGNTGSGKKAIVAMARRLGVLLWRLSVHGEPYRPAA

SEQ ID NO: 309486 - protein, 343 aa, unidentified
MTMDTIIGVDLAKNVFQLHGASDSGEVKFRKKLTREQFRRFMADHPPAIVAMEACGSAHYWAREMEKLGHAVKLIAPRYVKPFVKRQKNDAADAEAIVIAAQRPEMRFVVPKSEEQQARAVLFRARERLVHQRTDLVNSLRSVLYEYGHVVPQGIKHLPRIAEIIEAPNSDLLELVREECRELLEQITQISDRIAAKNAKTKKLAAETDTARRLQTMPGVGPLIALAIEAFAPSMENFRRGRDFAAWLGLVPRQFSSGGKQRLGRVSKAGQADIRKLLIMGAMSRLNWAGRRGIGEGSWLARICTRKPRMVVAIALANKMARAIWAMLTKQQDYRDPTMGIAA

SEQ ID NO: 309487 - protein, 377 aa, unidentified
MSKIRFVGLDVHADTIAVAVAEPDGEVRSLGVIPNRLESIRKLVAKLGPAKQLKACYEAGPTGYVLYWQLTALGVACEVVAPSLIPVKPGDRVKTDRRDATKLARSYRAGDLTPVWVPDVAHEALRDLVRTREDARQDQQRARQRLGKFLLRHGCRPPEDVKKNWTNKHLDWIKRQVRFDQPASQAALLDYVHEVEHAADRLQRLEKSIDDVLATAPVEIQEVVRALQALRGVGQLVAVSVVAELGSLSRFSNPRQLMGYSGLVSREHSSGKHIQRGGITKTGNAHLRRLIVEAAWAYQHKPWIGGWLAKRQQGLDEETKAIAWKAQWRLCTRYKKLAARGKNKPQIVTAIGRELLGFIWAIAVRTETKFSPDRKAA

SEQ ID NO: 309488 - protein, 413 aa, unidentified
MNPEKTIIVGIDWANQDHVFHLQVDGKKPVTGSFKQDPEDIQLLIEGWRKRFPDCAFAIAIETSKGPLINALVNYQDVVIYPINPAALANYRKAFAHGGGKNDPSDAKLLADFLQHYRQQLKPLRRDEPITRELAALTEDRRRLVDQRTAIGNELKAVLKRYFPAVLELEPAKIYADFLLRLVLKYPTLAAAQRAGKVRLRKVFYGLGKAEKIEARVEQLMAATPLTDDETTLRVESRRAVALCELLQTYNQQIDKYDKSIKELVVQHQDYEIFESLPAGSHATQARLIAALGDDRSRYESAESLQAASGIAPLTTQSGQQRFVSSRWACSKFMKQTFHEFAGLSIKGCKWARAYYAMQRSKGKSSQVATRALAYKWQRILFSCWQSRTPYNDEHYMNRLRATGSPLLSFIEE

SEQ ID NO: 309489 - protein, 401 aa, unidentified
MISVGIDVAKGKSTVCILKPYGEIVSRPFDISHVEKDLGELAAMLLRFDDEVKVVMEATGIYHLPVLTYLQEKGLFVAVINPYLMKVYRSGDLRKAKTDKIDSRIIANYGIEHWFTMAEFKASGDVYGELKMLGQQYRHYMKLHIMSLHELTHLLDYTMPGLKGMLASWNEGNRKDKLSDFVERFWHYDMITCLSETEFIEQYTIWAREKKYHQSQDKAKAIYALAREGIPTLSSETPSVKMLVTEAVRVLKEVDATLSIILSRMQELAKSLPEYSVVREMGGVGEVLAPKLIAEIGDVRRFHSGKALIAYAGIDTPPYESGQFVGSNRKITKRGSAALRKVGYETMRCIKTHPRPDDPVYQYIVKKEAEGKAKKTAKIAGLNKFLRIYYARVKEVYTDKK

SEQ ID NO: 309490 - protein, 409 aa, unidentified
MQKFNAATHRIETASAQVALSAAGASGETKQHAAYIGLDVHKETIAVAVAEPGRGEPIYRGEIANTPKKVAKLIVKLSEAYDGGVLLFCYEAGPCGYGLHRQLIASGHDCQVVAPSRIPKQAGERIKTDRRDALKLARLLRSGDLTAVWVPDQEQERMRDLSRARDDLKAQERKARQQLNAFLLRHGQHWPKGKSRWTPAHENWLAALKLDDPWQQVVLQTYIDAERAAGERVAQLNDQLMRALPEWSLAPVVDALVALRGIDKLAAIVLLAELGDISRFDSPKQLMAFLGLVPSEHSSGGRRRQGAITLTGNSHARRMLIESAWSYRFPARQTKHLKAKASNASPVAKQIAWKAQVRLCGRYRTLTRAGKNTKLVCVAIARELAGFLWDIVRQEMPRLVQGQAAATSA

SEQ ID NO: 309491 - protein, 388 aa, unidentified
MIYAGIDISKYKHDCFILSDFGEVANEGFTFTNNAAGFAQLQRILADFDKENVRIGFESTGNYAVNLKLFLEKNGFSFMEINPLLVKEYIKSNSLRRTVTDKICAKHIAGYLCEKTYRPHPAEFYDRFALKQLSRFRSSLVTTRSRYLVQLTNILDCVFPEFKPFFGNKFSVTALYILAHYQSAEKIANMNSQSYDKLRRLSRGHFSLHKFVELKSLAKNTVGLFNNYYRIELETILDLLDQIESKIDEVEAEIITAVRVINPPTASIKGVSELSAAVIISEYGDFSRFLTPDKMLSFAGLEPGHFQSGTSEHNGRMVKRGSSHLRCVLMNCAGSIHIHNETFAVYYRKKRDEGKSHRVAVNHLAKKLVRIIFALETKGVMFDPNMLR

SEQ ID NO: 309492 - protein, 370 aa, unidentified
MEKYKFVGMDVHKETIAVSVADSDGGEVRYMGEIPNTTDAVLKLVRRLRKEAARLSFCYEAGPCGYGLHRQLMGLGQDCHVVAPSLIPKKAGDRVKTDRRDSLNLARLHRAGELTAVWVPDGAQEALRDLTRAREDMKHIQRQAKQRLLGFLLRHGKRFEGKDNWTRAHFRWFEEVKFEQPVQQIVFQEYVDSVLAMTRRVKAFDDQLESAAANSVFWPVIEGLMALRGVKLITATTIVAEIGDLKRFANAPQLMAYLGVVPSEHSSGESKVRGPITKTGNGHVRRVLVEAAWQYRYPARKTAVLQRRAERASEQVQEIAWKAQKRLCARYRLLEARGKLKVQVCIAVARELAGFIWAIGQTLPQPAART

SEQ ID NO: 309493 - protein, 414 aa, unidentified
MEIVHTHCAGLDVHKKTVVAAIIVPGPKPSGYQETRTFGTMTADLLTLSDWLLAHGVTCVAMESTGEYWKPVFNMLESDFQVLLVNAAHIKAVPGRKTDVNDAEWIADLLKHGLLKASFVPPLGQRELRDLTRHRSNFVRERVNLANRVQKVLESANIKLASVATDVLGVSGRAMLEALIAGQASPAEMAELAKGRLREKREPLAKALEGRGQVHHRFVLTELLCQIDNLDETIARFDAQIEAYCAPYEEAVVLLDTIPGVARQTAEIMVAEIGTDMSRFPTADHLAAWAGVAPGNHESAGKRRSGQTRKGNKPLGVALNQAAHAASRTKHTYLSAQYRRLAGRRGKKKAIVAVAHSIVVIAYHLMQRNEPYRELGGDYFDKQRPDTTAKRLVKRLECLGYAVTLQQHPITGAA

SEQ ID NO: 309494 - protein, 318 aa, unidentified
MQPTALVVGVDVAKNTLVSVFVGRVGAPRSFANTSSAVAAWLSELPAGSVVAMEATGALHRLLAQMAYAAGMQVYVLNARDVYFYAKALSGRAKTDRLDAAVIATYAAEHHARLHPWRPAVGVEQQLHELLQRRACITRLRVSLRQTLGDAASLQTACRQLDDSFECFFEQLDAQLQVLVASDAELDRNIARLRTITGFGPQASVAVGALLKRIDFANADALVAYCGLDPRPCDSGKHRGQRRLSKRGPAWLRRQMYLVAFAASHSKALKPLYEAIKARGFAPTQALVILARKLLRVAFAIWKGHATFDASRLQPHSA

SEQ ID NO: 309495 - protein, 405 aa, unidentified
MRDYIHVGADVHDRSILVKVARGSQEPEKRSFRNDPAGRVRMIRELEKRALDAKGARVVFAYEASGLGFGLCDELVAAGMTCFVLAPSCIARSSKHKREKTDERDAQRIFELVRGYTLAGNELPTVWIPDPQTRDDREIVRARLDAGEKLTRVKTQIRCLLKRTEVRPPKDLGSGWTKPYLLWLWRLSHGKETPELDLGHGARIGLETLLRQFESLRREIDELDEEIEVLSRTRRYAKPARALTNLKGVGLLAAMVFLTEIGDLERFCNRRQLASFLGLVPSANETGEAGDRKGRITRQGPGRVRKVLCQATWVRVATDPAAKKAYRQVTHGSARRKKVAIVAMMRRLAILMWHRALDSQKNVEASAPSNATATAKPKQGQRNRAKRKRATEYALARAEEACIAG

SEQ ID NO: 309496 - protein, 319 aa, unidentified
MTASAVVVGVDVAKDRLDVAVRPSGEAWSEANDDAGVRALVARLRPLAPALVLCEATGGFERAAIAALAAAGFPVVVANPRQVRDFARATGQLAKTDALDAGILALFAERVRPTPRPLPDAAAQLLDAVLTRRRQLLEMLVAEKNRLGSAPKPLHRGIQAHIRWLERQLDDVTKELAGLIEASPVWRAKDDLLQSVPGVGPIVSSTLLGELPELGTLSHKQIAALVGVAPLARDSGTLRGKRLVWGGRASVRTALFMAALCGRRWNPVLKRFYERLKAAGKPTKVALIACARKLLTILNAMVRDDKRWAVPAPSVQYSC

SEQ ID NO: 309497 - protein, 393 aa, unidentified
MICVGIDVAKDKYDCFILSSEGEVLADVFTIPNNAEGFDTLLQTIRRCARPEDKIKVGLEATGHYSYNILGFLLNEGLDTYVINPLHTNLYRKSLSLRKTKTDRVDARTIAAMLMSDVDLKSYTDTAYHNEELKSLTRYRFDKVRERAKLKQSVSRLVTILFPELEKLVSTLHMASVYALLSEFPGAKQVSEAHLTHLKAVLYDASKGRYGSDMATTLRDAARCSVGSVMPAKSLELRHTIRLIHELDAEIEDIEAAIQSMMDEIQSPITTIPGMGVRTGAMILAEIGDFSRFDSPDKILAYAGMSPSTYQSGQLSLSGTYSHMEKRGSRYLRYALYNATKYVCLWNPTFAAYLAKKRAEGKHYNVALSHAIKKLVRLIYALEKSKRPYSTAA

SEQ ID NO: 309498 - protein, 313 aa, unidentified
MSQTNPAIIYVGLDIAKDSLQLDLAGQSHSLSHDAKGLARLLKLLRAFPAVQVICEATGGYERPSLRALHAAAIPVSLVEPGRVRHFARAQGRRAKTDPIDARVLAEFGNALKPPTTPPPNPAHQALRHFTSRRQQLIDTLLAEKNRATHYLDPLSSRQSKALLRLLEKQINQCDQAILNCLKDDPSLSAKASRLDAIPGVGPTTAAVVLAEMPELGSLRDETAAALAGVAPFNRDSGSQSKLRPISGGRAAVRSALYMAALSAVRYDRIFHHIYIRLRSRGKKPKVALVAVMRKLIILMNRLLKNPNFVLAP

SEQ ID NO: 309499 - protein, 350 aa, unidentified
MKNILAIDLGKRNSVFCKLDTSSLKPEYSTVKTTPEKFHDIFADLDSGNSIVLFEVGSQAGWLSDMLRAMRLEFKVANVNHPAWKWTSNQNKSDKADALRLAMMYQQGFFPEVYIPVKAVRQKRSLIYYRQKLVTRITGIKNSIRALMTAVAVDLPVGRSCWTKKYIKELEQLALPLHEIDDPCQFWRGQLHMELQQLIALQSCLDKTDKQLDEIGSREKRIRLLQTAPGIGPRTSETIVAVLDNPHRFKSCRQVCNYVGFTPRRYQSGEMDRTGRISKRGNPHLRMLLVQASWTALRYDWARQIYNRVCRGSTKRRNIAIVAVARHMLMRCWAMLRDEKVWKYNIKKAA

SEQ ID NO: 309500 - protein, 430 aa, unidentified
MKSNTQNAKIEAITEKTLVLGIDVGSETHYARAFDYRGIEYSKKPFKFSNTEAGFATFKEWILDLKERHEKDKVVPGMEPTGHYWFNLGKFLQDNEMKPVLVNPHHVKKSKELDDNNPTKNDRKDPKVIAGLVREGRYMIPYLPDGVYADLRTASNIRFQLQAELTRIQNRISRWFNIYFPEYKTVYGKPDAKSGMLILKAAPLPEDILTLGIDGVNQIWRDAKLRAVGKARAKTLIEAAEHSVGSKEGAVSARMEIRMLLEDYESRNIRLQEVMALIEGLVKQIPMAEKLLEIKGVGIRTVSGFLAEVGDISRFNNPKELQKLAGLALVENSSGKHKGETTISRRGRKRLRYLLFEVAMSLVAKNPEFRELHNYYTTRRLNPLKKMQSLMAIAAKLIRVFFAMLTKGVDYDPKKMVSDIKRPAVYLQAA

SEQ ID NO: 309501 - protein, 406 aa, unidentified
MKLTCGVDWAEAHYDVALVDGDGVVVARARIDTGATGFNKLLALIAEHEGSAQDTPVSIETDKNLLVVALVEAGFTVYPINPRAVARYRERYGQAGGKSEPGDAAVLAHILRTDRHLHRQMPAVSEQGRAVKALARQHQEAIWALHQTVSRLRSVLLEFYPQALQAFPNLTHKAALTVLAAAPTPASSRQLTRRRVVTLLQRSGRGNHPTLVEQILTDLHTAALRQPPQVEQALGHTVVGLVGIVVAMQRAVDDLELELAREFDQHPQTAILRSAPGLGPILAARILAEIGDDPQRFANPNSLRAFAGTAPVTIASGRSHYVKARKVRNKRLADACHWWAFTALTKSAGAREHYDKRRAAGDHHNAALRNLANKLLGRLWWCLANNQTWDDTAAWPHRLKPDSVAA

SEQ ID NO: 309502 - protein, 387 aa, unidentified
MSQPNDLSRSLVALDQDSTIIAVVEMSQSSWLVGGVLPGIERQPRKKLEPSPERLLALLHRWRDESVRAGRTITRIAVAFEAGRDGFWLARWLEARGVEAHVIHPSSVAVSREHRRAKTDRLDTELLKRGFLGWLRGERGHCSMVRVPTIAEEDAKRPNRERECLVKDRTRLVNRMKGTLARLGIRNFRPTLRNAAEHLAALSTPEGSPLPPNVAAELERDIARLRLVISQIKQLEEVRRQRLEEQPERGPHAMVRLLARVVGIGIETADMLVNEVLSRPLRDRRAVARYAGLTGAPDESGARRREQGLAKAGNARVRRGMIQLAWRFLRFQKNSALAQWYQARTADHRGATRKTMIVALARKLLIALWRFVTIGEPLDGVTLRPAS

SEQ ID NO: 309503 - protein, 350 aa, unidentified
MDNPSTTVVGLDVSDRWTHVFRTKHGCPDEGERSKIRTRKSPLEEYFRSLPPVSTIILEVGPHSRWIYHLALECGMGHEIIVANARKLRFIYAGTCKTDQLDAEALARVGCLQPQLLHPVHHRSAAAQEDLNVLLARDTLIQVRTKLINTVRGLIKASGREPLASVDTAHFVRRHGAFLVGLGQEHYTCLVRTLEETQAQIEELDRRLIVLADSYPATEVLRQVFGVGPITALAFILVIEDPDRFHSTRKVGAYLGLVPKIDQSGEVNPKLGITKAGHPMLRRLLVQCAHRIMRTDGPDTSLQRHGHKIRARKDKGASKRAAVAVARKLSVVLLTLWKTGEVYDPLRQAA

SEQ ID NO: 309504 - protein, 370 aa, unidentified
MSVRRILAKTIDTDLEYEAIGIDLAKNCVSTALLTTDGEVVCIDRLDYSELEKSAQALSPTTFAMEPCTEMNYLVQKLEAWGHRCLVIGGKNVQNYVENHFSGQKTDLNDAQALAFLAQDTQLRTIKAKDIEQQKYASLTTLREQYIKQYRQTIVSLKGICQAWGLNISKGISGKAQLKDLIENHAAFPEELRESLVDMVTHAQTAQKALNKITKTLEELAKNDKLCQLIQTIPGLGPICSCRLRAMIGDIKRFKNPKDFPAYYGLVPRSIATGHNEKKGKITHRGDRTMRSLMVQGAGSVINMATKGKLKSKQLTKWILKKQKEKMPWGKLVCAVAAKLLRIVRAVLISNKPYNSKIAGVAKCSLSKGS

SEQ ID NO: 309505 - protein, 483 aa, unidentified
MKNKQPEKTKEAPCRPTQGHWHEMNRKQRREMMRKIQSDDLRLEVVHPDAAGIDIGNESHYVAVPPTRDNESVRRFGCTTAELKEMADWLKQCGIRTVAMQSTGVYWIAVYDMLEEAGLEVYLVNARETKNLPGRKSDVQESQWLMKLHTYGLLRNSFRPSQEIRRLRTYWRQRNDLVRAAGRHIQRIQKAMTQMNIQLANVLSDVSGMTGQAIIKAILAGERDPHVLAAFRDHRVKASEEEIARSLEGNWQEDLLFVLQQEQDGYEFCQKQMAECDRRLQQYLKQREDRSAGANLPEEKRKERLRKKKKGNTPQFDLRVELFRMTGADLTQIDGIDVMTATTILSEVGWDMSKWKTEHHFVSWLRLCPDNRISGDKIIGKGRLPTNNRATSALRMAASTLRVSNTYLGAQFRRLRTRLGAPIAIKAMAAKLARLVYRVLRYGMQFVDKGAEFYEAQHRKLQINYLKWKAAKMGLQIIEAPAA

SEQ ID NO: 309506 - protein, 341 aa, unidentified
MQITTIGLDIAKNVFQIHGIDAQEKVVVRKQLRRGQVLRFFEELSPCLVGLEACATSHYWARELTKLGHEVRLMPAKDVKGYLKRNKNDAADAEAICEAVRRPTMRFVQVKSAEQQAQLMQHRARDLLMHQRTQLINAMRSHLAELGIIAPQGREGVKELLAIVTKDANPGLPNDARASLLVLAAQLQALQTTIGAIEKRIVVQHRANTRSKRLQTIPGIGPIGASAIAATVTNPKIFRSGRDFAAWIGLVPRQMSTGGKPKLGPISKQGDRYLRRLLVVGAVSTLRRAKQNPQKFPWVTRLLARRPYKVVAVALANKMARIAWALLISDKTCRSAWFAAA

SEQ ID NO: 309507 - protein, 439 aa, unidentified
MTTPSLPVLDATAAAIDVGSEQLHVSVAGGPPKVFGTTTGQLHELRDWLKAQGVRSVAMEATGIYWFCPYEVLEKGGFQVVVVNGKYVKNLPGRKTDMKDCQWQATLHAHGLLKPGFVPPEHIRRLQDYLRVRTDHITMAASHEQHMQKALDRMNLKIHDVLSDLTGVSGLKMVEAILKGERNPVTLIALCDPQVQKNKVGRLRAALEGNWKEEHLFALRQAYELWQVYQQKIGECDQAIEKMLEEIAGPEDPAKPAPPALKRGGVNTPQIAGLHSLLWRLCGNKDLTVLPGVADYVLLQLVAEVGTDLSKNWKHEKYFTAWLGLAPGSHQSGKRRGSQRRGRNRAGRLFCVIARSVGRAVDKALGGFYRRLKARRGGLVANLALARKLAELFWRLMVHGRAYVEQGLKKYEQKVAQTEQRLLQKLARKYNMLLQSKAA

SEQ ID NO: 309508 - protein, 349 aa, unidentified
MDYEVYCGVDFHARQQTICSLTTEDGVMSTRELKHQNKAELKAFYAQWRGPVLVGLEASGYSPWFEQLLEELGHEVWLGDATEIRRRARGRHKNDRRDAQLILELLTHHEFPRIHRPGIRSREILRMLRYRHKLVQMRTRIKNSLQALSMQAGLSLRSKLFTRVGLEQLRQAMMSPVMQYQRDQWLQALEPLQVRINEATAWLEQQVVGDERIERLRTQPGIGPLTGLALVHTLEPVGRFSNQRKVAAYVGFDPKERSSGEKKHFLRISKAGSRVLRFLLVEAAQAACKSDPELRRFYLRLLHRHGKAKAKVAVARKLLIRGYILLRDGIDYTEFTRRAVAARLAREIT

SEQ ID NO: 309509 - protein, 380 aa, unidentified
MNAPCGRIGECRVQANHKNRGEVEMAVYVGIDVHKKYCQAALMDESGRIQRELRFDNTLEGASGLVNLARSIDAHVKAVVEPSANYWIKIYDRLEDEGVQVKLSNPSRTKAIAEARVKMDKLDAKTLAYLLRGNLVAESYVPTRKNRERRALIRHRASIMRMRVEVKNRIHMLLDKHDLSYEYTDLFGKEGLEWLRSLNLPRIDQQILQSNLQIIETVTAEIRNADIQIAKDAVNEEQAKLLMTMPGVDYYAAMILLSEIGDVKRFASREKLASWVGLAPQVHQSGDTQWTGHITRKGSKRARRILTQCAQSARQHDPKMRAFYERIEQKHGSSKAIVAVARKMLAIMYVMLTRNEPYHGENRQLTAQKHKRLERIANAA

SEQ ID NO: 309510 - protein, 423 aa, unidentified
MNTNWTTHPHFAALDWASDHHDVVVVDHTGARAAEFRFAHTAAGWAEFTEQMQPFTGAPLALETSSGPAVDQLLQHGWTLYPVNPKAAERYRERKAPSGTKFDRHDAWSLADALRTDGHGWRVLHPQDEATARLRALCRDEISLIEQRTALVNQLLAALAEYYPAALAAFNDWTKPFAWALVQQFPTPRALQDAGKRKWEKFLHTHRLWRTDTAPERLELFAHANALPASPAVVTAKSLLAQSLVKVLYTLEAQLDDYRDRIVAAFTAHPDHDVFGSLPGAAEKLAPRLLGELGAVRAVYPDADALCCQAGVSPVSFQSGKLDKARIRWACDTVLRHTVHLWADGSRKKSPWAAAYYQQKRAAGHDHASALRCLGKRWLKILWRLWTDHTTYDEARHQQNQKQHGSWVPALVAAAAKTAPATP

SEQ ID NO: 309511 - protein, 398 aa, unidentified
MVLSTFNHIQGSNGSHWNRLMRGENAEKICIVAIDAAKFVNAAMICNVYGDILVKPFEFNASSTGFHRLVKEIEEAKEGYAFEEVVVGIETTGHYYEDLVRLCEQKKFIVRIINAATTAKERETVLNYTKTDNVDLMAITQSLLHGRGQTSQEALPLLEQLKMLSRAHRALVNTHSQTINHIRLYMDHIFREFQGIVEEVDGEKVILKIFSTFDSKSSRFLMRHYPHPSDILKLGEAGLRQVSIEQNLKMRDQSIERLVRFARQSVSKPKMFLQAELLMLRLKLDELELKAAQAAQVKAEMEQVLLQTDGGILLSIPGVGVITASELTAEIGDFSLFTRPEQLIKMAGTNPIIRQSGGKKATSHRISKQGRADFRGAVYRAGKAMMGQNPTMKKRPKN

SEQ ID NO: 309512 - protein, 338 aa, unidentified
MHATTIAVDLAKSVFQVSIANQAHKIIDRKRLTRSQFQRFIAQQEPTTVVMEACATSHYWSQYAQLHGHTPKQLHAFYVRPYVRRNKTDAADADALIRANQDPHLLPIPVKQPGQQALQGLHRIRQQLSQSRTARINLARALLAEFGISLARGAAGIAGKLYEQAEHLPPSLQSSFLEIVTDINDLKSRLTQLDKRLEAIALADHTAQQLMTIPGIGVITATALIASVPNIHIFKKGRQFAAWLGVTPREHSSGNTRRLGRISKQGNEYLRTLLVHGSRSVMLQTHRQFASSKPLSTMQRWIMKLEETKKRNVVTVAIANKLARTIWATWVFDQPYSP

SEQ ID NO: 309513 - protein, 422 aa, unidentified
MAADEQIQAWIGIDWANDKHDMSLYDVATGRRQHLEVEQSPEALAEWIGQLRLRYGNRGKVAVILEQGKGPLLNVLMGCEFLVLYVINPKSLSRYREAFYGSGAKSDPVDAELMGEMVRQNPDRFRAWRADDAQTRSLRLMTEGRRNLVNQATALTNQLTALLKSYYPQALLWSGALDTQWACDFLEQWPTLQALQQSSRRQILRFYEKHPRPYLDLEQQLQQFHQALPLTADEAVLEYSTLMVQALIPQLRALLHSIEEFDRKIAEVFRKHPDRPIFESFPGAGAALAPRLLAAFGADRDRYQAASEMQQFSGIAPVTEKSGKQHWVHWRMACPKFIRQTFHEFADHSRRWCGWAKAYYQIQIERGKKHNAAVRSLAYKWIRLLFRCWKQRLPYQEEIYLRSLAKQQSPLVQKIAIAVEKL

SEQ ID NO: 309514 - protein, 356 aa, unidentified
MINSTKYIGMDVHKESISIAVRNAAGKIVIETVIETKSSMILEFVEGLHGNVHVTFEEGTWSAWLYDLLKPRVTRLVVCDPRRNALLQEGNQNDRVDARNLAELLQNNQLRSVYHGDHGLRALKELVRSYLTVTKDLSRVMTRVKAIYRGWAIPCSGKQVYSSRHRGEWLGKIQEPGVRRRAEFYYQQLDALRALRQEVRRDLLAESKKHKIWKQLCQIPSISLIRAAMLLGILQTAHRFRTKRQLWTYSGLGIEVHSSADHHAVKGQLERKKKHIEIRGLNKNCNHDLKNLFKGAAVVASTKPGPFEKFYAALLAKGMRPEMARLTLARKIATIVLIVWKRGVCFDANHLKPQTA

SEQ ID NO: 309515 - protein, 350 aa, unidentified
MMIGVDYHPSFQQIAFLMEETGEYSERRLNHSDGEAEQFYRDLQLRGVHVRVGMEATGYSRWFERLLAELGFEVWIGDPAEIKAKRVKKQKTDRKDAQLLLKLMMEDRFPRIWVPSPENRDVRQLLWHRHRLVQMRTRIMNQLQALAMNEGRRWKSKLWSEQGRAELEKLALAPWASRRRHELLELLDRMNPTIEELTAAAEQEARKRPEALRLMTHPGVGPLTALAYVLIIGTPSRFHRGKQIGNYVGMIPSEDSSGGKQRLGHISKQGNSLLRFLLVEAAQAAARNNPDWRRRYIHLGMRRHKSIAKVAMGRRLGVRLYWMWRNGCEYSPSMEFGSYAGQLGIGHGVK

SEQ ID NO: 309516 - protein, 342 aa, unidentified
MGEVSIIGVDLAKNVFQVHGAAADGSVLFRKKLSRPQFARFMADQPPCLVAMEACASAHHWAREMSRYGHEVRLIAPHYVKPFLKRQKNDAADAEAIVEAALRPTMRFVEPKSADQQARAVAFRTREQLVKQRTEAVNALRSHLYEFGHVAPEGIGYLPRLAKVIDEPGTDVPELAREICRMLLEQIAQLTARIDALKARIAAMSQEADLPRQLQTMPGVGPITALAVETFAPPMNQFRRGRDFAAWLGLVPRQHSSGGKQKLGKTSKMGQRDIRRLLVIGATAVIRWASRRGAPKGSWLARMLDRKPVPIVAIALANKMARGIWAMLTRGESYRGPVLIGA

SEQ ID NO: 309517 - protein, 339 aa, unidentified
MQVTSIGLDLAKNVFQVHGITDSGEVAFNRALRRAQVLAFFDRLDPCLIGIEACSTGHYWARELIKLGHEVKLIPPVYVKPYVKRGKSDAADAAAICEAVTRPMMRFVEVKTPDQQAILALHRTRDLVVRQRTQTINMLRGQLAEFGIVFAQGVGHATQFAKRMLDGECPDLPEVAGDVVAELCEQLLFLHGKIAGYTREMTRVAQREERVALLQTIPGVGPITASAIVATVGTGRQFGNGREFAAWLGLTPLNRSSGGKERLGRISKMGDQYIRRLLVIGMMSRMRQIIQNPERYDPWFADILARKPGKVAAVAMANKTARMVWAVLTRNEPYRVRTI

SEQ ID NO: 309518 - protein, 311 aa, unidentified
MNNTIGIDISKDTLDAHRLADGQHKQFLNGKTGHAQLVKWIGKQSDPLIIFEATGAYHRQLERVLGTHIIPFVKVNPKQARRFAQASGKLAKTDRVDCEMLAKMGAALQLMPKPFTAENLYDLKELLSARRALIKDRTAAKARKATVINALIKQQLEKRLRQIKNDIAKIDALMLDVAREDQYMSERLDILFSIPGIGVITALMILVDMPEIGALNNKQVASLAGLAPMSQSSGKWIGKARIQGGRPNLRNAIFMPALVAIRHNADLKTKYDQLVTAGKEKKVAITAVMRKLLVLANALLRDNRKWAEKAA

SEQ ID NO: 309519 - protein, 387 aa, unidentified
MRSLHVAVNAPEWALAREEDATPPAPTARSPLRSTDAVATDTVAKLGARIVSSQSPHGCRVTKTVCKEGITKMDSIIQIAGIDVSKDKLDVHILASNLDFTVSRDRRGLGELRRRLRKAGVGDVALEASGDYERIVMEALEADGFVVHQLNPARVRHFGKAMGMLAKTDPIDARLTARYCRHFPEAGLARRPEQARKTGEFLSVRAMVLSAIGEARNRLEHLREASLRALVEEDLARAMARLKTVDAGIAKAIAEDEAMQRKAGLVRSMIGAGPVLASNLLARVPELGSVDRQQAARLCGVAPADRRSGKSRRQARIDGGRDQLRPILYMVALTAMRSNPAMAAFAKRLTANGKSKRLVIAACSRKIITILNAMLRDQTPWQNPKLA

SEQ ID NO: 309520 - protein, 322 aa, unidentified
MSVSVLGIDIAKQKFDVALLVDGKTKHKTCKNSVEGFETLMIWLEKQGVQKVHACLEATGNYGEELAIYLHETGHMVSIVNPARIKGFGQSELIRTKTDKIDAALIARFCLAMKPGPWSPPSPKIRSLRALVRRVDSLIDMRTQEKNRISTAYESVIPLIKGHIDYLNKEIEKIRDQIADLIDQDPNLRNKKDLLVSIPAIGTATIPHILAELDDLGKFNNVRELVAFIGLAPRETLSGSSIKGKPRLCKIGHARLRKALYMPALVSIQCNPVMIAFYNRLKEKGKNGKVIVCAIMRKLVHLIFGILKSGKKYDPNYKPALA

SEQ ID NO: 309521 - protein, 341 aa, unidentified
MQAITVGLDIAKSIFQVHGVDADGQVVIRRQLKRRYVLAFFEKIPPCLIGIEACASSHYWSRQLQALGHTVRLMPPAYVKPYVKRQKNDATDAEAICEAVGRANMRFVPTKTPEQQSGLVLHRTRHLFIRQQTSVINAIRAHCAEFGIVAPVGRRGVEELLLGIANEQRVPELARACLLALGAQLRRIKEQILEFDRMITAWHRGCETSRRLDEIPGVGPALATALVASIADPRAFRSGRDFSAWIGLVPKQRSSGGKPKLGSISKQGDRYLRGLFTAGALAVIRYAKIHGSGHRPWLTALLARRPTKVAAIALANKIARMVWAMMARGERYREPVALVAY

SEQ ID NO: 309522 - protein, 357 aa, unidentified
MESQEVKYVGVDCGKKSIEVVRINSENSLERRQFSTTESGINNLLQWLTLNDIVGLEAGSQSFRIAKSILNKGIQVIVLNPGNLATIYQSLKKTDKEDSLKIARLIQRHPIEELPTVPIPNDEEEDNRRLCSEHENWTKQLTQGKNRLHSLFTQAGLTQITKKHLRTKANREISVALLPSRYQKEAERILKVLDLVEQNLKLIEEEIKEALKKNKAYAQTIMSMPGVGMITSLAIMSYMGNCKRFSSAKQAAYYVGLVPRVDISGDSAYYGRIINRGCHSIRRVIVQAAWSLVRCQYGGKIKEFYQRLYPKKGAKKSIIATSRKMIEILYTMIKTGDLFDSMPEKVLNRKLTQYGLM

SEQ ID NO: 309523 - protein, 337 aa, unidentified
MKFCGIDLHSNNSVVVVTDEADRVLVSRRCPNELKPILSLLEPHRDELVGVVVESTYNWYWLVDGLMVVGLDVKLANPVAMKRYDGLKHSDDKDDAAFLAHLLRLGILPTGYIHPPHERALRDLARKRIQLVRTRTQHILAVENIAARQFGHSFSCNEVKGFSATSVDRLGLSTDVALAMKANVAVIQALEVQIASLESRLLQQVKLRPEYSLLKTMPGVGEVLATVIMLETGDIGRFAQVGNFASYARCVESAHYSNGKKKGEGNAKNGNAYLIWSFIEAANFARRFSEDAKRFFEKKKAKTNGVVATKALAHKLARASYHILKEKQPFDAKRCFA

SEQ ID NO: 309524 - protein, 352 aa, unidentified
MVSVGVDIHKRSGFAVIKDDDGSVLGSFPFKNNRRGISEFVQRLGGFRDVRVAVESSGNYWVRLYEALEECGIRVVLTNPLKTRAIAEARIKTDKLDASTLADLLRAGLVAECYVPPREVRDRRALLRYRASLVRTRTMVKNRVHALLDKYEMNHGFSDLFSVRGRRWLEGLKLPGGDGLILRLALAEIEKLDALVEDVSKAIAREAVKDPRVELLLGFKGIDYYTAMIVVNEIGDINRFSSPRKLVSWAGLCPSVRQSGGRCRMGGITKQGNKWVRWALVQAAHQAARHDGRLKAFFERVAAGRGVQKAVVAVARKMLVSTYYVLKRREPYRGEDAGLRRRKLIRLRRLAC

SEQ ID NO: 309525 - protein, 342 aa, unidentified
MKITTVGIDLAKNVIQVHGVNEQGKKVFNKQLQRKCVLTHFAQLPPCLIGMEACSSAHFWARKLQSQGHTVKLMAPQFVKPYVKTNKNDAADAEAICEAVTRPTMRFVPIKNGEQQAVLSLHRARQGFVKARTGQANQIRGLLMEYGITIPQGISHITKRIPELLEDAENELPVVFRQLLQRLGNHLKALDRQATELDIQIQAWHRESEASKKLARIPGIGPLTASALVASIGDASSFRSGRQLAAWLGLVPRQHSSGGKPRLQGISKRGDTYLRTLLIHGARSVIRVATGKTTPIHCWAINLVERRNKNVAAVALANKNARIVWALMTQNREYQSDFVRTV

SEQ ID NO: 309526 - protein, 408 aa, unidentified
MRIIGLDIHRAFAEAVAWENGNLSRLGRVIMRREPLEEFAKQLSSRDVVVIEATGNAASVAAVIGPHVSRVVIANPKQVRLIAHAKIKTDKIDAGVLAQLYASGFLPEVWIADAATQALRRQVTRRNQIVRQRSRLKNIIQSILHAHLIPSCPHQDLCGPKGRAWLSEQILPGDERLAVERHLREFDRLTDDLKVIERDLAQSALADERVQRLMTIPGINMVVALALIAAIGDIERFAKPEQLVGYLGLNPSVRQSGPGPAYHGRITKQGRGHARGMLVEAGWAAARCPGPLRSFFLRIQSRRGQHVAAVATARKLAILIWHLLTKNENYLWARPALHARKLRDLELKAGHRAARGRKGTAHAYNLQSHRDQERRWVEQAEAAYARFVAGWNAKGPKARTGAAKEERQ

SEQ ID NO: 309527 - protein, 312 aa, unidentified
MNKTICGVDVSKEWLDAHVEPSGAAGRFRNDAAGISDLAVWCQGASVELVVMEASGGYERLAFLLLWELGVCCGMANARSVRYFAEAMGFLEKTDRIDATMIARYGLVKQLKAMAPPSTAQLRLKALVARLFQVGGDLTIQKQRKSATLDAETIASLDEVIALLVRQSRRLEGEIASLIDDDPLWACLDRTFRSLKGVASRTVARLMAQLPEIGIVSNRAIAKLAGLAPIANDSGRRSGRRPIRGGRAGPRGILFLVASIVAKYDPHLAAFQQRLQAAGKEKMVIRIALARKLLVILNAKARDARNEFANAT

SEQ ID NO: 309528 - protein, 349 aa, unidentified
MTDQRISYCGRIVYVGIDVHKETYTVTCVCNKQIVKTATVQADPAALAASLPRWFPGATLYSVYEAGFSAFVLHRVLTKAGITNLIVNPASVAVAANDKVKTDRRDATKLAIDLADGRLRGISVPTEAEELARLLPRTRTQIVKHRATIARQIKAKLHQFGLIAPSSRRLISSRYLREIAAWSLPPELSVSLTLLAEQWRFATRQLIEMRRLLRDQAKAQEAIEKGYRSVPGIGEVVARTLATELGDMTRFANERALFSYTGLTPSEYSSGASVRCGHISRQGSSRVRHLLVETAWRALPRDGVLKEMFDRIAATRGKKRAIVAIARRLTGRIRACFRQGTTYAVGTYA

SEQ ID NO: 309529 - protein, 372 aa, unidentified
MEKFCGLDVHKDSVFMCILSENNEKYEEVFKTLTPDLERLLDTLVDHGVGLVAMESTSIYWYPLWNILESDFDVKLVNPLFIKQVPGRKSDVKDAEWIATVLMKDLIKGSFVPPSIIQQLRLYNRKITKLNKQLRRSEQEMDEMLQRCNIRLSNYVSDIGCKSMKKVVQAIAKNHLNPDYLLSLVHARIVRKSGAETIRASLTGTFTSVDIEILRMIVEDINFHHDQLEFCKKELLKLCYQHFNLQMELLVTIPGVKEHAAACIISEIGTDMKFFTSATALVGWTGLRPRNDQSAGKIKGRKTLHGNKYLRLMLVQCAWGASRTKGSAFMARYQRFRKRMHHNKALIANARKLLVIIWNILAKKEPYFAQAI

SEQ ID NO: 309530 - protein, 418 aa, unidentified
MEVLVERGAGLDVHKKSVTVCVMTTDGRSVVKTIKRFSTFHRDLVALRDWLLEQRVTHVAMEATGEYWKPVYEILEEHFQVLVANAQHVKNVPGRKTDPEDAAWLARLLRHGLLQSSFVPCEQIRDLRDHTRMRRKTVEMTSRVENRAQKVLEASGVKIGSVVSDVFGATGRAILAQLAEHKTDPKKLAALAKGSLKNKRTEIELSLEGTFSVHDAQLLAHQLEMHRELETRREAIEKEIETMIVPYEHLIKRLDQIPGINQVAAIEILGEIGPDMSPWKHHRFFAAWSGLCPGNHESAGKRKKVSVRKGNPFLKAILVQCATAAVRQDGSYFQAKFHRLLRRRGYKRAVVAIAHSMIIAIYHMIRDDRDYYELGAAHLDKRTNESKALALAKQIEKLGFQVNLKLSAPAELSVPAAG

SEQ ID NO: 309531 - protein, 465 aa, unidentified
MKSKTSKRKKQSKKVSIDAAWEPVNARAAGVDIGSREHWACVPAEASKNNVRQFGTFTADLEAMAEWFRECGVTSVAMEATGVYWIPLFQILERRGFQVILANARQTKNVAGRKSDVQDCQWIQRLHTYGLLQGSFRPEDPYCVLRAYLRYRDELVSARSTQCQHLQKALQQMNVQLHHVLSDVTGVSGLAIIQAILDGQRDPVKLAAMVDRRVRASQETIQKALVGDYRTEHLFVLQCAFELYHTYEAKIKACDEQIARAIPLLPDTVDPTLKPIPARKEGRKAFLDKMAGRDMRQELYEKLGVDVTGIEGIGVLTGLVLLTEVGPNLSRFRSEKHFCSWLGLCPDNRISGGKVLSSRSRRVVNRASDALRMAATTLERSQSALGGFYRRMKARLGAAEAVTATAHKLARIIYRLIKHGEAYVRQGMEQYEQKFRERKLYALQKAAKTMGFELIPNQTLPSGVS

SEQ ID NO: 309532 - protein, 433 aa, unidentified
MQDVEDEPLFAERVAGLDIAKAAVEVTVRVPSDAMAGRRQQETRTFGTTRAELESLGDWLRSWGVTKAGMEATGDYWKPVFFLLEARGFDCELYNAAQVKALPGRPKTDRADSIWLAKIVERGMICSSFVPPEPIRRLRTHTRYRRHLTQARTAEKQRVEKLPEDGHLKLSSVISDIHGVSGRDMLSALAAGQRDPKALAQLARGSMRGKIRRLEEALDCSFFTSEHVAVLAMMLTVIDHYTTQIDALTARIEALIEPYLHQVAQLDAVHGIGTVCAQDIIAETGTDMTAFPTAAHLVSWAKWSPQVSQSAGKRKGSNATGRGNPYLSAALGEAVIGASRTYSFPGARYRRMVRRMPKKKALAATGNSMLTIVHALLANPDATYTDLGADYYEQRMHPRRQARSHVKNLERLGYQVTIKALNPGTGELLTPAG

SEQ ID NO: 309533 - protein, 330 aa, unidentified
MFVGMDVHRNRTQVCVLDRKGNEVRNRNVTNDRQSLRKELTGLRRGTPVAFEAAYGTGWIAELLGDLGFEPHLAHPSGCRAIADAKLKNDRVDARTLANLLRTGYLAEAWLAPKEVREQRLLLRERARLVRIRTTAKNRIRAQIADEGVGAPDHGLWTKQGAAWLDTVALSPMHRWVVADCQVLIEVLETRISLLEAEIRRQAKPDKRIDALMAIPGIGILSAMTLVAEIGDITRFATARKLCAWAGIIPSMRNSDRTVHHGHITRAGPAAVRHVLGEAAQGAIRKEPYHSDFLATKRRRGTGIALIRVSRKLLTEAFYVLSALEEEHLS

SEQ ID NO: 309534 - protein, 346 aa, unidentified
MQSTTIAVDTAKLVFEVVVSDGHRVIGNHRLNRADFQAFIVHQPPSRFVMEACGGSHHWARLMLAHGHSVRLLPVPYVRAYRRRNKTDRADCMAMLEADRNPEILSVPVKRVDAQAIQGLHRARSAWMGCRTARINTLRGLLREFGVILPLGAHAALKQMATAIDDPSVPDLLKITLLELLAEVHDLDDKIARVERQLATIARQTPAVRLLQDIPGIGLLTSTALYASAGDAKHFRSGRHLASWLGLTPKEHSSGSRRHLGGISKRGDKYVRTLLIHGARTVLLGARRNENAGRPLSPLQQWALGVQARSNHNKAACAVANKLARIAWASWANGTCFDANYQAIAA

SEQ ID NO: 309535 - protein, 344 aa, unidentified
MNVMIGVDPHKRSHTATMLDDHEVELRRIQVRAGANQVTQLLEWVDGEGPRTWAIESAGGMGYLLAQQLVAAGETVVDVPAMLASRVRLLGSGQSTKNDPNDARSVGVAAMRAPSLARVARADHTTVCRLLVKHHSDLARWRSKLCCRLHALVAELAAGGIGEEVLVNKARRVLEGIAADDVASIERHRQAVELVDEIDRVDGQLRDSRRRITAAVSASATTLTDIFGIGPIIAGMIIGHTGDPTRFTTPARFAAYNGCAPVEFSSGGRVVHRLSRRGNRRLNNAIHIAAITQIRHRHSPGRSYYERKLAEGHTPREAIRALKRRLSDVIWRHLIADARRASAG

SEQ ID NO: 309536 - protein, 368 aa, unidentified
MDTAYCTTIGADVSDRTAKICVMSKAGGKPKIVQETTIPTTPDGFREFLERQDKAAALVFETGTHCRWIDKVASGMGFKTFVANPCRLRMITESTTKNDRNDARTLARMALADIELLHPVKLRGDEHQKMVNLHEIRDQLVKERTAEVLQIRAIAKAMGFRIPDCSAECFHNVAKKELPKELSDIVWPLMKELKSKALTIKTVEKQMRKLAKSDAFKAQVERLMEIPNVGFITATCFVAVTGGDMDRFDRPRDIGPWLGVTPKQDQSGDIDRQCHITKAGSKMLRWKLTECAQRVLQKNSADIDLKVKGLRIRARGGKIAKGKSITAVARGLAVLMVAMLKKSDAPYVPLSEDKARELAQIRAAMSAA

SEQ ID NO: 309537 - protein, 391 aa, unidentified
MLICGIDIGKNKHEACVIDQEGRQLAKSLRFTNTTSGAESLLAYISSNNPEKDVVVIGMEATGHYWLSLYCFLFDTGFQVNVINPIQSDAIRNLFLRKTKNDAKDSFLIAETIRIGRFSKTDLADEDILSMRQLCRHRMDLVDYIADQKRKIIGVLDRVFPEYQTFFSDMFGKTSTELLGKAVTPEELLAIPTEDLCKLLRENSRGRFGEAKAEELRNAAQSSFGITIGTTAFTMQLRQLLEMIALLERQLTELETEIEQYLVKLNTPITTCPGVGNVLGAVILSEIGDITRFSDPKKLVAFVGIDPSVKQSGEFVGTHNKMSKRGSPHLRRAIWLAAVVAAFHDPVLSAFYQKKRAEGKHHYTAIGAVARKLTFIIYAVLRDDKPYVPNC

SEQ ID NO: 309538 - protein, 365 aa, unidentified
MQPMYYIGLDVHKRKISYCVKDSGGKVYAEGSLPATRFDLDHWMKTLPQPWTAAMEATMFTGWIYDHLKPHAAALKVAHPLMLRAIVAAKKKNDRIDANKICDCLRCDFLPECYMASTAIRERRRTLRYRNLLVRQMVQMKNKTSMLLMEAGVSYNKQRLHKAGYFRELLATNPDIDEGLVPLLRLCRETVVRLQRTESALVRSLERDSLLMDRVERLMTIPAVGPITALTWALEVGDAQRFSSIKKAISYCGLCGAEKSSANTVQRTPLSKQRNKHLQTTLIEAAKMAPRNSPELAMLYDTEKQKGNANRATLAVARKLVAYLMAVDRRQRDFQVVETSSGIAAQSAAVNKEDFFGASPARSCR

SEQ ID NO: 309539 - protein, 341 aa, unidentified
MMIIGCDFHPRFQQIAYVDLETGEFGERRLSHPEEAERFYRSLAGNQVRIGLEATGNFRWFRRLIDELGYEFLLGDPSAIRAASARRQKTDKRDARHMLRLLQEDRFPAVWQPSVENEQLRQLLLHRCRLVRLRTRITNQLDSMGKNEGLLGSKSWSAERRRRIEALPLSGWYMQRRVDLLDLLDELEKRIEPLEKAVVEAAESHQQACLLMTHPGVGPIVSLVYVLTIGDWTRFARSRELASYLGLIPAEDSSADKRRLGHISKQGNTLLRWLLVQAAMGAQRSDPSWHRLYLRLSLNKHHGVAKVAIAHKLAVRLYWMLRSGQNYKQVMERGSHAGQPV

SEQ ID NO: 309540 - protein, 320 aa, unidentified
MTILTSPTVIGVDVAKAEIVVYREDLEITQVINNDRTSVGRWLKTLPAQSSIALEATNLYHLDTAELAHGMGHRVYVVDPYRVSHYRESIGQRAKTDPCDARLLARYLTSELHRLRVWSPPPRHYTVLKSLLNKRAQLMKARVSIMLSWSNEPLLEDLLAHGLEHFKQLDQAIQELLRKVSQEAGISENIRRCKAIEGIGELTATGLATTYMRGEFASADAFIAFLGLDLKAKDSGKKHSPRHLSKKGDGELRRLAHNAAMAACRSPVWKPFYESYLARGLARTQALVILARKLCRVAFALMKNQSEYQPNLRLQGSPAT

SEQ ID NO: 309541 - protein, 411 aa, unidentified
MHNRQNYLYVGVDLHKEQHTAVIINCWQEKLGEIQFDNKPSAFSKFLLEVETYVSDGLSVVFGLEDVGGYGRALAKYLVDHKQVVKEVNPALSFLERKSHVTTQKSDSWDAECVARILVNKFNQLPDAKPNDLFWSIQQLVSRRNALVKAQSALKNQLHIQLNHHYPSYKKFFSELDGKTALAFWQQYPLSSCLEEANIKQLTAFLLDVSNNTCSVKKASEILKLVKEDGQKMKEYQETRDFLVRSIVRDIEFKKKEMKYIKRELKRLVNLLDYQLETMPGIELVTASALIAEIGDVRQFPNANKLARFAGIAPVYFGSGGKGKTHKSKQGNRALHALFYNLAVQQVQVAKGSKLARSPVFYAYYQKKLKEGKTKGQALVCIMRRLVNIIYGMMKHKTAYELPVVQEKEVV

SEQ ID NO: 309542 - protein, 386 aa, unidentified
MRGKTFIPADYHVFAGLDVDKRSISVTFTNHQGFIRSLQMPYSAEHLLNYVRKHFPDQKIAFAYEAGPTGYGLYDGIVSQDYRCLIASPSMIPKAPGQRVKTNRLDSRGLSENLRGGQLKSIHIPSAVYRELRHLTQLRDTVVSEVVATKQRIKSLLLLEGIAFPPAPAGRGQWSLVVKAKLRKLAGSKTVRFKLDQLLDSLEFNEKRILKTTKEIRRFCQNDPELSQCIEYVMTVSGIGWIVASQLLARIGDWRELKNVRQLAAFVGLVPTENSTGDRTERGSITHMGDGRLRSKLIQAAWSAIRQDDELREFYRSVCQTHPRDRAARVAIVAVARKLTTRISAVLMQQRPYVVREKVHSTPLTQEETVPQGTTRRQAEPGEKNS

SEQ ID NO: 309543 - protein, 370 aa, unidentified
MSVRRILAKTINTDLEYEAIGIDLAKNCVSAALLTTDGEVVCIDRLDYSELEKSAQALSPTTFAMEPCTEMNYLVQKLEAWGHRCLVIGGKNVQNYVENHFSGQKTDLNDAQALAFLAQDTQLRTIKAKDMEQQKYASLTTLREQYIKQYRQTIVSLKGICQAWGLNISKGISGKARLKDLIENHAAFPEELKESLVDMVTHAQTAQKALNKITKTLELLAKNDKVCQLIQTIPGLGPICSCRLRATIGDIRRFKNPKDFPAYYGLVPRSIATGHNEKKGKITHRGDKTMRSLMVQGAGSVINMATKGKLKSKQLTKWILKKQKEKMPWGKLVCAVAAKLLRIVRAVLISRKAYDPKLAGVAKCSLPKAT

SEQ ID NO: 309544 - protein, 416 aa, unidentified
MLDQQQFAAYVGLDWGDRRHCVHLQVAGGRNMESFELEQKPEALHEWIARLLERFQGQPIAIAIEQRKGAVIHALMMYAFLVLFPINPKALARYREAFHVSGAKDDPTDSELLLDLLSKHSDRLRAWVPDSQLTRKLQTLCEQRRKLVNRRVALNNRITSLLKQYFPQALDWIGDVDSVQACDFLESWSTLDAIQSVNPDQLQTFYRRHNCRKASVISERLNQIARACPLTTDSAIVEPYSLIVETAAVQLRSLIRAIQRLDKRIAELFAQHPEHNLFDSFPGAGAVCGPRLLTVFGTDRSRWMSAVELQSHSGIAPVTEQSGNTCWIHHRLACAKFVKQTFHEFADQSIRYSPWARAFYDLQRSRGKDHHAALRALAYKWIRIIFRCWKDGKPYDEAAYIASLRRHGSPVIEKLD

SEQ ID NO: 309545 - protein, 397 aa, unidentified
MIAVGIDISKAKSTVAVIDSDGTVLASPFTMAHTQPEMEAFVTYLKGLGEPTTILMEYTGHYHYPVLKKLQDEGFPVCIVNPYQMKKYGDVEIHKAKTDKKDALRIAAYALEKSYKLVPYSSMEQKYEDLKFLSRQYSQRITYVAKLKVQLIALLDQTMPGITRILPLNSRNPEKCALLLFIKRFKSFDEIQRIGKARFLASYDVLAKKASERSASSKGLSIYELAVDSITTRGEDPYIWLSQNQCVDLLSATQNAADEIISQMRNIAETIPEYKVLRAMHGVGDRLGPIILAEIGDVHRFHSGKALNSYAGNDAPPYQSGQFESRNRHISKRGSSALRKACYEVMQALKLTKPRDDPVYLFMLKKEQEGKPFNVAKMAGVNKFLRIYYARAMELYK

SEQ ID NO: 309546 - protein, 330 aa, unidentified
MKLLDPTTTTARLFAGVDVSKDRLDVCLRWSEPEKHNEEEAFVLAYDDSGIDALISRLLGERTVLVIVEATGGFERTVVGALAAVGLPVVVVNPRQVRDFARATGTLAKTDRIDAAILARFAVAVRPAPKPLPDGEIRALQAIVARRRQLLGMLTAENNRLSLAPKPVAKRIKAHLRWLEKELSRTERDLEAAIQSSPALGENEALLRSVPGVGPVLARTLLAGVPELGTLTHKRVAALVGVAPLNRDSGTLRGHRSVWGGRAEVRAALYMGALVAARRNPVVKEFYERLLAAGKPKKVALVACMRKLLSILNAVLKHRTPWRSPHYLST

SEQ ID NO: 309547 - protein, 354 aa, unidentified
MLHVGLDLSRTRLDVHVMDESGRSVLESVAPVDAEGLGGFAAEIDARFGEPVRAVVESMTGARHVYDVLSEHGWQVQVADAAKARAFAPVACKTDKADAKVLATYSWRDLVPAIWLPPLSIRQARELGRCRAHLVKHRTMLKNRIHSVLMNFGVPRAESDLFGKAGRDRLAALPVPEPWAGHITETVTLIDDLDARIDAVEAQMGTWGKDRPDVQHLRTVPGIGLVLGTMIAAEIGDIARFASPTKLVGYTGLCPKVYQSGNTDRRGPLTKHGPKFLRWALIEAAVHASQYPPFAVKYQRTVKRLGPKRGDRGRRIARVEVARHLAGVIWHMLSNDEDFGPAPGGAARDLAARA

SEQ ID NO: 309548 - protein, 331 aa, unidentified
MTNTTREAAADARPVDYIGIDMAKARFEWGVHGVRSTHSATNEPAGFEALLADLRGRRVGLIVIEATGGLEHALASLLLQLGLPVAVVNPRAAREFARSMGHLAKTDAIDALALAHYAHTLAHKANQAGVRLAPTPAHLDSLQVMVLRRKQLIDMRTAELNRRGGAMRVLRESIEAVIKTLNEQLDALDKDIGTHLDEHFNELDQHFESIKGVGPNTCAAVIAFMPELGQISNARAAKLAGLAPLNNDSGNSRGKRSIWGGRKLVRCALYMATLSAVRFNPVIKIFYERLLAAGKPKKAALTACSHKLLRILNAMARTGQPWNQELHGLTA

SEQ ID NO: 309549 - protein, 451 aa, unidentified
MATKKPIAPLNKKSRQTPRFTRPDAAGIDLGSTVHYVAVPPDRDPQPVRHFGTLTGDLNELADWLVQCRISTVAMEATGVYWIPLFQILEERGLEVCLVNARHVKNVPGRKSDVQDCQWLQYLHSVGLLSASFRPPAAICAVRSLMRHREGLMRAACQHLLRVQKALDQMNVQLHHAVTDITGQTGLAILDAILAGERNPEALARLRDYRCKKSEAEIARSLRGDWREEHVFTLRQSLEAWRFHQTQMAECDARIAEQMDSLDDQGKGPIPPSPKQGANAPDEPMRRELFEKFGVDLTAVEGVSLQTALTFLGEVGTNVGKFPTAEHFASWLGLCPDNRITGGRTHAAHTRKVNNRLATALRMAAQSLHRSKAGLGDWFRRLKSKLGTKAAVTAAAHKLARILWAMLRHRRPYNPNRLGNPELVRAKKERFLRRQAEQLGFVLTPVQGEVS

SEQ ID NO: 309550 - protein, 351 aa, unidentified
MNILAMDLGKNKTVVCIYDQTSGKHRYKTVRTCPQQIHDLFIEYRSDRVVFEICSAAGWVFDIAKCLGIEVQVANTNGQAWRWKNVRRKNDREDALKLAQLSAMNQLRTVYIPNRQVRQKRALIQYRQSLVARCVRIKNGIRAILDKKGLSMAVGKSGWTKESVEQLRVISLPLEKCDADNLWRGSLWVELEMLTKVTALLMDVEDKLDRLGEADRQVQLLRTIPGVGPRLAEAIVAYVDKPGRFTNCKQVGCYAGLTPRQYQSGDSNRVGRISGQGNKVLRALLVEVSWLGLRHNEWMRRTYQRILRGSVSRKKIAITAVARKLLIRCWAMLRDGTTWRQEKVSVSNVAA

SEQ ID NO: 309551 - protein, 355 aa, unidentified
MDSEKYIGLDVHQATIVVAVLDSTGKLVMESILETKAATILQFFAGLRGTLSVTFEEGTWSAWLYDLLNPHVDKLVVCNPRKNALLKDGNKSDRIDACKLAELLRGNQLKPVYHGETGVRMLRELSRSYLTIVKDLSRVMNRLKAVYRSWAIPCAGRDVYYTRHRAQWLAKIREAGVRRRAERLYEQLDMLQHLRQQARRELLAESRKHAITAKLRQIPYLGPIRSALAVALIQTPHRFRTKRQLWAYSGLALETRISAEYRLVEGQVRRSKKLLSIRGLNKDHNHDLKGLFKGAATMASVRPGPFQNFYQAALAKGIKPTMARLTLARKIAAITLTLWKKGENFDADKLKSQAA

SEQ ID NO: 309552 - protein, 317 aa, unidentified
MSKDTTVCAGIDTGKHKLDVAIDGGAERAQVDNNSEGHRSLLAWLRQREVERIGIEASGGYEQAVVSSLRADGFVVIIFQPVQVRAYARFVLQHAKNDTIDAVLIARCTAAATDIREPPDARLALLAQHLTMIEQLTEDVGQVKTRREACREERIREFWKREVDRLKGLLNSELKQLVAAIREHRDLSHRLDLITSVDGVGLRTAVAILVRMPEIGRVTREQAAAIAGLAPYDDDSGLRRGSRHIKGGRQRLRQSLYAAALPAVFYWNPQLKAFYRRLLVAGKPHTLALVACARKLLIFVNTVVARGTSWRSSEVTT

SEQ ID NO: 309553 - protein, 340 aa, unidentified
MNATTYGLDVAKHVFQMYWVDNQTGEIANRRFRRDDLIAFLAQRPAGRVALEACGSAHWWARKIETLGHEVVLLHAKFIRPFVQTNKTDAADARAIWTAVQQPGMRTVAAKTEDQQAMLGLHRMRALLIKFRTMQVNQLRGLLYEFGVSFRAGRAAGLAEMRARMAELEDALPGTMFSSLRDQLRRIDGIEQDIDQLEKQIGGWHRQEAACQAIAAVPGIGRLTATALVATIGDAKTFRSGREFASFLGLVPRQSGTGGKIQLGPISRRGDPYLRTLLIHGARSVMCHAKVPTPWQKAILERRPANVAAVALANKMARTAWAILAHGAAYDRHHISARPV

SEQ ID NO: 309554 - protein, 342 aa, unidentified
MNATATYGVDIAKSVIQVHWIELDTGEICRKKLTRAKVAEFFARKPAGVVAIEACGGAHHWGRALAALGHDVQLLPARQVRAFVSGNKDDAADARAIWLAAQHEDIRRVPVKSAQQQAELSVHRMRSHWVSMRTATVNTLRGLLYEFGVVLPKGRGASLKQLAEQRASVDAQLPPLMARIVDDQLLALREIEQHVLALEHELRAVQRSSQTAQRLHKVPGIGLLGATALASILGDGAAWRSAREFAACLGLTPAHSGTGGKVRIGKISKRGDSYLRTLLIHGARNLVRVANPPDWIANMLARRPFNVVATAVAHKLAKIAWAMVAHQTSYEARWSRTPQVAS

SEQ ID NO: 309555 - protein, 308 aa, unidentified
MSKAHLDAAWAERFEHVSNDADGWDALVAKFQADRVDVVVLEATGGYEKAAACALQAAGFAVVVLNPRQGREFAKAMGQLEKTDRVDAYSLRDFAAVIARHPKRERYIRELPDAQRAHLAGLVMRRRQLLNMRNEESNRLHTSHRVALKSVQAILKAIDKQLGAVDDDIDHHMQQHFKDIRTWLESVKGVADVTSSTLVGLLGELGRLPRRSIAKLVGVAPLARDSGPRKGTRAIWGGRAEVRAVLYMATVSAITHNPVIRQFHQQLIAKGKPNKVAMVACMRKLLTILNAMARDHATWDDSKHVKPA

SEQ ID NO: 309556 - protein, 419 aa, unidentified
MNTLNTTSFNAFIGIDWADAKHDICIQSADGDDREFDVIPHQVERIDEWANAMRQRFGSPIAVAVELSKGPIVYALQKHDCFVIFPINPSTLAKYREAFQPSRAKDDPTDAELAVDLILRHQERFKPLQPQSVEIRMLASLVEQRRNLVGDKIRITNRLRVALKQYYPQMLEWFDHIDTPLFCDFLTRWPTLLQVKRARKSTLRKFFHEHSMRFEHVLERRLIAIKTATPLTRDEAVVVPHRLQALVYVEQLRVMLNAIKQYDVEIESVAKQHEDYALFTALPGAGPSLAPRLLVAFGEQRERYKSAADLQKYSGVAPVTERSGKKHWVHWRWQCPTFLRQTFVEWAAQTINKSYWAGEFYHQQRAKGSTYQAAVRALAFKWIRILYRCWQTRTPYDEVVYLKALERRGSPLLTKAKVA

SEQ ID NO: 309557 - protein, 488 aa, unidentified
MAKKKSIFERLNSGRLNRKQRRELGRKLVSNDPGLSIVNPNAGGIDVGNESHFVAVPGDRDPHPVQEFGCWTDDLKRMGKWLLQCRIDTVALQATGVYWIAIYNILTELGIRVVVVNAQHTKNVPGRKSDVQECQWLMKLHAYGLLRDSFHVAANIEKIRTIWRLRDQHVKNASEAVQHMQKALTTMNIQIANVFKDISGVSGQAIIGAILKGERDPYRLADLKHERAEASREEVARSLEGNWREDLLFQLQQAVDSHQFAQKQMEQCDRKLKGYLASLPTQTIEIPNPAEQQEETGPKKKKAKKPPAKKRNKAQGKAPAWDLQAELKRICGVDLTSIDGIGVMTAQTIVAELGTDLSAFPNEDQFASWLGLTPNHDITGGKVIRRGKRKVKNRVAQALRMAATSLKNSHSYLGGRYRHLCRQLPTKPAAVKAMAHYLALLVYRLLTKGQEWVDRGAANFEQKRNERELKNLKSRAMARGFLLTPIPA

SEQ ID NO: 309558 - protein, 344 aa, unidentified
MAVALDDLGRLLGTEQFASGTAGYKKLLAWLSHFGRLEAVGVEGTGSWGAGLARYLASEGVKVLEVVRPKRQVRRRRGKSDPADAEAAARAVLAGEELGTPKAATGPVEAVRLLRIARRSAMKARIQAANQVHAVIDTAPEALRAELMGLSERARMQKAARLRPDDPSTPLGAAKLALACLAKRWTALSAEIAALDAELAKVVATTAPSLVALKGVGVETAGSLLRAVGDNPARLSSEASFAALCGTSPVAASSGRHQERHRLNRGGDREANTALYMIVLCRLAWHQPTKDYMARRTAEGKTKKEVIRCLKRYVARAAYRAIIADMAPNARPKTGTGTADQKAA

SEQ ID NO: 309559 - protein, 318 aa, unidentified
MTQPLIFVGIDVSKAQLDVALRPTGRFVVSNDDFGIAQLLEQLQATAPTLIILEATGGVELPLTGALAAAGLPVVVVNPRQILDFAKATGRLAKTDALDAQVLAHFADVVRPEPRPLPNAQTQELAALVTRRRQLIGMLTAEKNRLASARIVVRKQLRAHITWLERALDQADTDLAEAIRQSPVWREKEELLRSVPGIGPVLTTTLLANLPELGTLTHKQIAALVGVVPLNRDSGTLRGKRAVWGGRAQVRAALYMAAIVAARFNPVIRGFYQRLCAAGKAKKVALVACMRKLLTIINAMLKHRTPWRQEMKVACAGA

SEQ ID NO: 309560 - protein, 431 aa, unidentified
MNPLSVSLEPSPVAAWVGLDWADQQHVICLYEVATGQSTVSRLEQKPEALRDWLSQLRQRFGGAPVAIVLEQARGAVIYALLSADFVLLYPVNPQSLASYRKAYAPSGAKSDPADAVLLMEMVRNSPERFRPWKPDDADTRSLQLLTQNRRQLVDQKTALSNQLTSLLKTYYPQALELAGVDSLQACDFLTQWPTLAALQQARPGQIRQLYREHGHPSPEQLDRRLEQIRQARPLTTDPAALLSGSMMVQALVQQLRPLLGAIERFDRQIAVLFGKHPDRPLFDSLPGAGAVLAPRLVAAFGTDRDRFQSAQQAQQLFGIAPVTEQSGKQRWVHWRWACPKFLRQTFHEFAGHSRHWCGWAKALYQRLRRIGKGHHAALRVLAFKWIRILFHCWKTRTGYDEQIYLKSLQKRNPTLWAEIQLLPPRKKKVA

SEQ ID NO: 309561 - protein, 411 aa, unidentified
MTTPSPSPCCVLGIDYAVAADHVMCWRLPDGSTHHASVQPTPKAVADFIDHLCDSLPGDGLIYLGIEGGAHALLEQFARHPRFVVFALNPASVKAFCKALRVAGTKNDKVDAEAIGLFVSRHHDSLRRYTPMDSASAELAQLAADRRVVVDQRTRCGNALVAALRYNCPGLVEAFGGCSSPLAKLVMKWSTLGELKARRPSTLNTFLRNTCRMRSPERIQQVLDAVLDAPAEAAHPAKEFLARTQASLYLSLYRAVREYDQRILQARDAHPLDEFAESFPGLGGRLGPRIIGFLGNDRSRFPTAEDMLLASGIAPVTLQSGKGRPTVRSRWACNKFDRQTFHEFARCSLAQCTWANAYYQAQRKAGKSAHVAYRALAFKWIRIIHACWQRGELYDESKVRSQYSKQTREAA

SEQ ID NO: 309562 - protein, 359 aa, unidentified
MQAQKNELNFNGHNIYVGIDVHLKSWTVCIMTEHLEHRQFNQPPDAKTLHNYLVRNFPGANYYTVYESGFSGYWAHRQLEELGIHSIITNAADVPTGQKEKLKKTDSVDSRKLARSLRSNELDAIYIPSESTVEDRNLLRIRSALVKDLVRFKQRIKSLLYFYGISYPVQFSKSSNHWSKNFIKWLKEGVQFSEESGRQTLDIMLQAVEELRKLLLLVTRHIKALSTKEKYAANVKLLKTVPGVGLITAMTILTEMETIERFKDTDHLAGYVGLVPTRSNSGETSKEGEMTFRGQGKLKKCLIESAWVAARTDPALSLVYSKLIFRMEANKAIVRIARKLLNRIYRVLKNKEEYVKGVV

SEQ ID NO: 309563 - protein, 408 aa, unidentified
MNTLYVGIDVSSKSNVVYLMLPNGDKHSNFSVANSHDGSTQLVKRILSALTSHSLDTVLIGLEATSVYGDNLVYFLREDATLAPFNRKIHVLNPKQVKKFHDAYNDLPKNDYVDSFVIADCLRFGRINKEVYMGDYRYKALQNLTRARFFAVQNLVKEKQRFMNVLFKKYSTMTQEKVFSDTFSTTALAVYDEFESAEALANMDLHELTDFIIEKGKNRFPDPDAVAKAIQKAARSSYRLPKTVNDSVNQVLSISITSMKALESQIKEFDKAIKAQMELLPNVLISIPGIGPVYSAGIMAEIGDINRFNSQAALAKYAGLAWKQHQSGGFESEVTRLIPSGNRFLKYYLCEAAFSLVRCDKEYSDFYHLKYKEVNRCQHKRALALTARKFVRLVFRLLKDNRLYCPAK

SEQ ID NO: 309564 - protein, 366 aa, unidentified
MDAIYIGVDFHARQQTTCYLKTETGELVISELKHQDKEQVRAFYQQFPSPVIVGLEASGYSPWFEALLEQLGCEVWLGHATEIRRRARWRQKNDRRDAELIWDLMVHDEFPRLHRPAATSREVLRMLRYRQKLIKLRTMAKNSLQAIALQAGLAKGKQLFTAAGQEEFKRAALSPVLQWQREHWFALLRPLNQQLLETMVWFKAQSKDDLRIQRLRTHPGIGLLTALCLLHTLQPVERFRNPRKVAAYAGFDPVERSSAERQHFLGISKAGSRLLRYLLVEAVQTAVRYDEDLKRFYKRVAERRGRPKAKVAAARKLLIRAYIMMRDEIDYAEFRHRAVAVRLARGGQGPSNVPAVLIGQPASPGA

SEQ ID NO: 309565 - protein, 354 aa, unidentified
MNSQKYIGMDVHQATISAAVMDDQGKLIMECILETKAATILGFIEGLRGTLSLTFEEGTSAAWLHDLLKPHVSHLVVCDPRRNALLKDGNKNDRIDARKLAELLRGNQLKAVYHGENGVRTLKELGRSYLTLTQDVTRVMNRIKALYRSWAIPCQGTTVYAARHRAEWLAKIQEPGVHFRAQRLYQQLDLLQPVRQQARHDLLLESRKHQGVKLLRQIPAIGPIRAALLVGLLQTPNRFRTKRQLWAYSGFSVEIHDSGEFRYVRGKRQRNRERISVRGLNDNHNRDLKNLFKSAAISASTRPGPLCDFYAGLLAKGMRPTMARLTLARKMAAISLTLWKKGVDFDPKQLHRQA

SEQ ID NO: 309566 - protein, 331 aa, unidentified
MNKFLKFDIDSNLRNMKTQQVSFPQVVEVGCGIDVHQAVIVATVRRSDNQYETRTFEAYTSSLKELREWCKHQGVTHVAMESTGIYWKPVYNILEECFEVILVNARHVKNIPGHKTDKKDSAWLSKLLLGGLLKGSFIPPLEIRDLRDIVRYTKKQVQQISSERNRLYKILEDANIKLGTVMKEDSVSGKQIIEALIAGESNPVNLLKYVHGKTKANREEIIKALEGNLRDHHRFMLKSIQRSIEDKEELIAELEKQTDQMVEKYSVEIDLLSTIDGVGRNSAIAIISEIGTDMSRFPNEHHLSSLGGMSPGNNESAGKKKVPKPLKGTSI

SEQ ID NO: 309567 - protein, 386 aa, unidentified
MIYVGIDISKYKHDCFICKDTGEVIVENLSFTNNKKGFQQFLDLLKPYDNSNVHIGLEATGHYGLNLKLFLEKNNYSFMEFNPLLVKEFYKSLSLRKTKTDKVDAVVITQKLMSVPYKPNSKLFYHKYSIKSLTRLRENLVKQRSKYKVQLTNILDIIFPEFKPFFSNSFGVTSLYILNKYKTPNKIANMKDFDTLNKLSRGSFTYAKFVKLKDLAKNTIGESNDIFEIELSSILDLYKNINDHINELDKQISTIIKDLNPPTLSIPGVGVISCASIISEFGDISKFSNPSKMLSFAGLEPGIIESGTMSSKGKMVKRGSGYLRYSIMNVALTVIKFNPTFYDYYYKKISEGKCHRVALSHVCKKLIRVIYILETKNIQFDPSLLK

SEQ ID NO: 309568 - protein, 402 aa, unidentified
MEKFAGIDWAAEAHALCVVEEAGIVVREGLVAHDEAGIVALCRELAALDVERVAIERPDGILVERLLEAGITVLAVHPNQAKAARDRYSVSRGKSDRFDAFVLAELARTDAHRLRAIVPDSDETKALRALTRTREDLVGVRVELANQLRAQLQAFWPGALIFADVDSPISLAFLRRYPSPADAGALGPKRLGAFLARHGYCGRRAPEKLLGRMRSAPSGRAGVAEAEARRAAVLGLVAALEPIVTQIRELTSQIRGALADHPDAAIFQPLFRDRKTAICPATLIAELGDSRERYPSEAALAADAGQSPVAVESGKRRSAAFRRACDKRLRGSWSVLADSTRKWHPWARQVYADAIARGQDHPHALRTLGRAWARVLWRCWQDRVPYDPAKHGNLNRLLATGG

SEQ ID NO: 309569 - protein, 338 aa, unidentified
MKKNYFVGIDVSKQTIDVAFIIQEDQQKTQPCWKIFDNNEYGFCQMKTWLQNSDVPFTADTLFVIENTGLYHRLLVKFCNKYQLQLCIENGAQVKWSLGIARGKSDKVDSRRLAVYAVRFADRLKPSSVLHEGIQAIKDLITLRNRHIVQMSSLQTHLKELKVTTDLKAVKELIKIHAPLIKAMKGVIKKAETAIIKKIEANELTRKQYMLLLSIPCIGPVTASYLIACTNAFTTCSSGKQLACYCGVVPFEYQSGISIKGKHHVHKMANKNLKALLHLCAMSSIKYVAELRNYFNRKVKEGKNKMSIINAIRNKLALRAFSVIKNDKPFVENMCRAS

SEQ ID NO: 309570 - protein, 428 aa, unidentified
MEIKDRTRLEEFRQLKKEIRGSERHLIVGIDIAKDKHHAYFGTATGKTLLRRLVFENHKDGFEKLVTYVDAEKTKNALESVVFGLEPTANYHKPLAQYLIERSLTVVLVSPQAVKNNRQSLDGRWDKNDTKDSANVADLISQGKCLYYDYPCIELRDLRNLLSLKRRLKKQEHGAKVRIRNHLLALYFPEFDRYYARAGSEGLAIVKWCLDPSRIAGLEYDEFAHLVAPRIKTLGQAKRLKAIWELAVDSIGCEAGQAMDFEAKLMVEDLNQVKDSIGAVDDHVEEICLGFPEYNCLLTIPGFGPDVSAKVLGAIGSPFRFDNGKQVLKLAGYDLSASRSGNSSDRAVPVISKKGKASLRYALYQAAFIASIRNRRFIIYYTNKLRGREKEKGIKTKMRVKLAAKMLIIAWTLMKNKEPFNPEYLNID

SEQ ID NO: 309571 - protein, 343 aa, unidentified
MNTAYHFIGLDIHKQAVAFCTKRSDGKTIGEGKFRANRAGMEDWAAAQSTPWVGGMEATLFTGFAYDVLSPYSIELQVGHPLQLKAISCAKHKSDRIDAETLANLLRADLFPACHMASPLVRELRRVLRYRNFLVRQAVTMKNKTTGLLMEAGVEYDANRVHRQGYFYELLDHLGETPPSVRELLRTTRCGLEMFQSAQKRLLDALKKHAHLRQRVTRLMTIGGVGAITALTWALEIDEPERFSNVKKVQSYCGLCSGRNESAGKNKRAPLSKQRNPHLQTALIEAAKLAPRWNRQLAQVHAAALERGYNRNRATCAVARKLVAYLMAVDRSGQDYEDRSNAL

SEQ ID NO: 309572 - protein, 342 aa, unidentified
MLIIGCDYHPSMQQIAWCDSQSGQRGQRRLEHASGEAEKFYRELKQRFVAVRVGIEACGHTRWFERLLAELQIELWIGNPARIAAQRVRKQKTDGGDAQQLLQLLLEDRFPRLWIPSPENRDLRQLLWHRHRLVQMRTRVKNQLQALALNEGVQRHSRLWSQAGRAQLESFALPPWTARRRHDLLHLLDQLTPQIAQLSQAIEQEAERRPEVQRLLTHPGVGPITALAFVLVLGTPQRFSCGKQVGSYLGLIPGEDSSGGKQRLGHLSKQGNTLLRYLLVEAAQAAVRCDAEWRRRFVHLAMRRQRNIAIAALARKLAVSLYWLWRNAQDPPAAPQSGSHVG

SEQ ID NO: 309573 - protein, 355 aa, unidentified
MDSVRYIGLDVHRDTISAAVLDSEGKLLMQSVLATRAAAILDFIAGIKGPLHITFEAGSHSAGLYDLLVRRVAKLVVCDARKNALLKSGSKSDIIDARKLAELLRAGLLSGVYQGQSSALAVQHLARSYTLLTEDTTRVMGRLKAVLRSHAVACAGKKPYGKKHREYYLAQLSTSSLRRRAECLYQQLDALQPLRRQAKRELIVECRKHATATWLRSVPFLGPIRAALLIGRVQTPHRFRTKRQFWAYCGLALETRDSGEYRVVHGHIERRRKPTLVRGLNWNHNHELKNLFKSAATTASGCPGVFREFYLGLLAKNMRPEMARLTLARKIAAITLRIWKKGETFDPAYLKPQAA

SEQ ID NO: 309574 - protein, 377 aa, unidentified
MATTRTVLRDQLTAKPGDLYMSLELGDKHWHISIGGERRSVSHYIVEAGHTEEVADCIAKAAARLHTARVHSCYEAGRDGWWLRRWLTELGVDNIVVDPASIEVNRRARRAKTDRLDADKLLAMLVRHHRGERVWSVLREPSPSDEDARRAHRELQRLTHERIAHTNRISSLLVLHNLRPRIVIGGRDWPVWWNAHREQVPPTLRAELEREAVRLKVVKEQVRAIEAARARELAEGKQPLVAQLVRLRAIGAKGAWVLVKEVFGWRHFANRRELAGSLGLVPTPYASGDSEIEQGISKAGNRRVRALLVELAWSWSRLQPGSALTQWFNRRFAGAGKRMRRVGIVALARRLAIALWRYLQTGEIPIGARLKPAGSGI

SEQ ID NO: 309575 - protein, 360 aa, unidentified
MPNRRLWVGLDVGADETAVCGTDDGGTVIFEQLIPTKASALDGLLAAEKRRIKLIALESSSCSILLTRSLRKLGYRVAVFDTRQASKFLAIRRNKTDKNDARGLSEIARLGRDSVSEVRVKSPECQRLRSMIVTRQKLVALRVAAEGTIRSLLRLNGGRLKSCSSAAVLRRNVTNELKQIRKVGKIDLAEDIEPLLALSEALRTYLDRIDKKLSRMAEENAVCQNFLAIKSVGPLCALSFYSAVEDPTRFKRSTDIGAYLGLVPLVRQSGQTTSKRRISKMGDRITRSYLVTAAHLHLRFANSALRTWGASLIDRSGKRRAQVAVARKLAVIMISRRLCRCRGQYRRARPGRKAPPKGRA

SEQ ID NO: 309576 - protein, 361 aa, unidentified
MDDTTKMVQVATVVRVGVDSSKRYMQVHGVDAQERVVFAKAIRREEFLAFAAQLPPCVMGLEACSASHYWARKLKELGHEPRVMAAEHVAPYRKSRKGKNDANDAEAICEAAGRANMRWVTLKSEEQQSVLTLHRLRAGLVEERTGMMNRIRGILAEFGLWVAQTPDKLAAWLGKEAQSLEGLPILARQGIVIAREHWRELDRRIGELDAMIVETNKSSESAKRLQKMVGVGSMTASAVVASIVDGKQFANGRGFAASLGVVPSQHSTGGKTVLGRITHRGDGYLRHLLVQGARSALVAAQRRKPEKLTRLERWMLELNARVGYQKTLVAIANKHARIIWAVLAKGEAYDPQHGQGQPAAD

SEQ ID NO: 309577 - protein, 404 aa, unidentified
MKFCGIDWADEHHDALTIDEQGHQLGSIRVAHTPEGLSRLDSYLERIAGEQGREHVACIIETTHGLLITYLLEHHWPVYPVNPRTVDRHRAPSGAKTDTIDAYLLAKTGRADLADLHRLQPDDQLIQELKELTRDQDSLIKTQTRLFNQLTACLKAYYPAGLIAFSQVEQPCTLASLRAYPTSQQARQATVAELTTLLKQGHYPGAQRKAQDLVELLRQPHLTANEVTTRTKSRLLLALLDQLEPLMRQIADYDEEIERLFLISEDHDLFQALPGAGTRLAPRLLAEIGDDRHRYQSAASLQALAGTSPVLFQSGMYAKAHRRLGCIKPLRNALHQFAFHSTRLEGWAKQYYQRKRAEGKSHTVAVRALANVWVRILFAVWTKKEAYQTTTFEAAQLAHARRIA

SEQ ID NO: 309578 - protein, 350 aa, unidentified
MPCKTVAIAHTIGIDTGKNTLHMIGLDKKGTIVVREKVSRTRIAARLVNVPQCLIGIEAGMASHHVARELLALGHEVKQVPPAYAKPFRQGHKNDFRDAHAIAEAVQRPSTRCVPVKTADQLDLQALHRVRSRLIGNRTAVINQLRGFLLEHGIPVRQGLRFLRQQLPQILAMRTDVLSPRMIRIIEELIGDWEHLDERIERVTDEIETLARADGNCRRLMTVPGIGPIIASAMVAAIGNGAAFAKGRDFAAWLGLVPKQMSTGDRTILGRITKRGNRYLRMLFIQGARAILFRPAGWAKHSFGPWLAAAARRLHRNVLATAFANKLARIALTVLVEGRSYAARVEPRAA

SEQ ID NO: 309579 - protein, 330 aa, unidentified
MVARIHIGIDVSKDWFDACARRGRESPVRRFAQSPAGVADFLGWVKEFGARSAHVCMEHTGGYESNLALACLGENLSVSLVDGTQIKRYRDSFSKTRAKTDKNDAKLLARYCKERKPALWAPRPECYKQLTELERHRLNLVEQRKAWSCRSDSPCQNELVAQQRLSLREAAELQIEEVDKAIKKLVETSAELSRDVALLDSIEGIAFRSAVRILAEMGPVSNYKTPRDLALQAGLAPIPCESGKNTGRCFLPAYGNRQLRNALYLPVIVAMRADNEFAEFTKRVAGNRDKRKMTVVTAGMRKLSHVIHGVLSHQTPYAPDILFRDMSRGA

SEQ ID NO: 309580 - protein, 438 aa, unidentified
MSNKVIFNLDDLFISVGIDVGADFSWMSIALPNQQFVGKPYKILHNSIDSLTTAVSKIKEAEELYSLESRIFLESTGIYHYPLFCYLRDKGFNCSVINPIITKNSTNINIRKVHNDRFDSKKAALVGLKPDLKVSLIPSDLALNCRNLCREYYDLMDNRSAYVNKLQGELRMAFPQYLGIFSKVTINTSLTLLETYASPSAFLEADKQEIIDIIRSTARFGLTYAQNKYNAIIQAATDANQFGYIINSNIKRIRLYISFIRKYDEEINSILESLHELVDANEDADFVKQIHLIETIKGAGFLSAVSIMGEIGDFSAFSKPKQLFAYFGLDPAVKQSGKFEGTKVQMSKRGSAIARRVIHTLTLQSISISRNGEAKNPVLREYYLKKCDSKPKLVAMGAVSHKVCNMIFAILRDNKSFEIITPQEHIKQYNASKCDMAA

SEQ ID NO: 309581 - protein, 466 aa, unidentified
MVAKTVDIINLNIAGELIAEASVVAPAAHLYLGIDVAKSAHVGAFVSHELIAKHGRFEKCPVVVFNNSREGFEKLAGQIREHGTPEECTVLVESTGHYSKALCQYLQEIGCQIYIMHVMARPQSHDKSDRRDALALANTLYLHVEKDVRIDDKSRRIARRLPPTETALQLQGLVRRRQEITSDTTRRKNKLTAIVDEMFPELTKVYADPNTPSALALRQKYPTPQSIIEASIDDLCATRLHRRPGRASLAQLQVLAAQTIGTKSEHRLASLIVEQEQLIAELTLLNKHVEALEKQIAPLVQESREGKILLSFPAIGVLQSALLIASIGNIRNFDRLQKLRSYCGWSPQEEQTGITLDRSHLVQGGSPLLKTSLYLTTLQAIRMDTPWKVLYDRLVPRMCPYDERLGKFRGKMKVVGRVAGQMIGVIWLLLHQDAELIDSLKLGEEPPEPKLYDVEKHLKLLKRENS

SEQ ID NO: 309582 - protein, 400 aa, unidentified
MFYGTLKSICKRFRRAAVRKSAARKKFAKKIKIMKKQTSATTETGIKGKTVIDFTGKIIYVGIDVHLKDYQAAKVYNGICLGNHRMQASSEALIKHLRTHYPGARFKCVYESCAWGFELQRKLTAAGMECIVVNAADVSTTDKERRRKTDKVDALKLARSYESGELEAIHVPDETLQKERNIVRYKRSLVEDITRSKNRLKSLLKYHGIDLPEQYAKNNWSANFMQWAAQQAAKDELLGDTLLLLLEQVKLLRQLLLKTEHKLRELSRGKYAPQASLAMSVPGIGQNTAMLFLLEAGDVRRFDNFDALNDYVGLCPDTDSSGETERDRGITTRGNKQLRSAMIEAAWLAIRKDPALLESYQLLTKRMKGTQAIVRIARKLLRRLRCVLISGIPYQKGIVG

SEQ ID NO: 309583 - protein, 414 aa, unidentified
MNENPSNLFVAIDRSDQKLSVAESDTLSAPKLSEISSSPEEIHAWILDKLEQTEGLIFIAFENPAPNLICAFVQYERIIQYPLNPASTDNFRKAFAPSMAKDDGTDALSMLDMLIKHQDNLRPLKPETSEIRLLKSLVNDRRQAVDIGTMLNNILIDQMKRHFPQALNIFDDITSSMACAFLKKWPTLQQAQSARPETLRKFFYLNHSRSEKLVEKRIGIIKNSQALTHDYAILEASKIHILTLIDQINANRRSVEVYTKKTKEIFSNHQDAFIFNSLPGAGEVMAPRLLAAFGSLRENFPEAADMQKFSGIAPVMKRSGKKEYISRRWRRPKFIHQTFVEFAQWSAIHCKWAKAYAKSRKDEGMAYWSVMRTLAYKWIRIIHTLWTKRCSYDELVHVKNLIEQGSRYIPSPCE

SEQ ID NO: 309584 - protein, 364 aa, unidentified
MDELTHIGLDVHKDTIAVAVLRSGTTTCDERVIPNTPEAVRKLFARYPDRSVLRTCYEAGPTGYDTQRLISSLGIACDVIAPSLIPRRSGVRVKTDRSDARNLARLHRAGELTAVRVPMPAEEALRDLVRAREDLKNDRRIARQRIRSFLLRYGKRYPSPGARWSFRFEVWMRALRFDEPASQAAFDHLVSAYSVRDAQLAAIDKLVEEAALCDPLADAVARLRAFRGIDTLTAVTLLTETCDFQRFATAASFMAFTGLVPSEHSSGTSRHQGSITKTGNAHVRRVLVEAAWAYRHRPAVRGAHAKRLEGQSPEVAAYSWAAQCRLNSTYRKLAARKGPNKAVVAVARELSGFVWGAMTERMAV

SEQ ID NO: 309585 - protein, 410 aa, unidentified
MLFIGDDWAEAHHDIEIEDDSGKVLARKRLAEGMAGITGLHELVAEHLDPDGEPDQVQVGIETERGPWVQALLAAGYVVYALNPMQVARYRERHSTSGAKSDAADAHLLAEIVRLDRAHHRPIAGDSEIAEHVKVAARAHQTMIWSRVRQVNALRSLLREYYPAALAAFGTDLAGRDALAVLAAAPSPDQGRRLSQTRIETLLRKAGRQRNLAATAAKIKTALGSEQLTARPGVVPAYTASASALIAVLGTLTAQTEVLAGQVEQGFGRHPDAEIYRSQPGLGTILGARVLAEFGDDPNRYPDARSRKNYSGMSPITKASGTKRVVLARYARNRRLGDALFLQAYSALRTSAGARAYYDRQRARGATHYQALRALANRLVGILHGCLSHRMLYDEHRAWHTPEEKLPTAA

SEQ ID NO: 309586 - protein, 409 aa, unidentified
MQVVHPRCAALDLGKDVLVAAVRLQDATGISRKCRTYGTTGHQLVALSSWLESEGVTHVVMEATGSYWKAVWHVLESRFELTLANPAHIKNLPGHKSDVNDATWMADLHAHGLIRGSFVPPPEIGALRELTRTRKQFVREINRHTQRIQKTLDIAGIKLTGAISQVLGVSGRAILAALVAGETDPKKLATLGQPRLKASRSRLEEALEGRLTTQQRRLLGMHLNLIQNLEASIAELDAEIAKAVTPFQGIVERLHEVPGLSEINVPALLGEIGIDMSRFATHGHLLSWARVCPRLDESAGKVHSTRTMKGAVWIKELTIQAAWAAIRTKDSYLRAQFLRLRARRGGKKAIVAVAASILTIVYYIIRDGTPYRDLGINHFATRDRARAARSLVARLKQLGYNVSVTEAVA

SEQ ID NO: 309587 - protein, 373 aa, unidentified
MEESTKVHVGLDVHKDSITIGAAEPGRAPARVIGKTAHDVNKLLKVLVKLGRPEQLHIVYEAGPTGYGLQRTLQARGYLCEVIAPSQMPRRPGDRVKTDGRDCVQLAECSRAGQLRAVWVPDPADEAIRDLSRAREDAVNSRTKVRQQLKGFLLRHGVRYTGKTSWTKAFYRWLATLSFGAGASQTAFTEYWLAVQAADDRVQRLTQALQPSIAGWRFEPVVAALQALRGIDVISAIGLVAEIGDLNRFDHPRKLMGYLGLVPSERSSGERVSRGSITKTGNTHARRLLTEAAWNYRFKARIGRQAQRRQEPLSEQIRSMGWKAQLRLSRRFAALLERGVQPNKACVAVARELAGFVWAIGMRVSREQTATQQ

SEQ ID NO: 309588 - protein, 459 aa, unidentified
MPRKQTSAGQWEGLKVIHPQAAGLDIGSEEIWAAVAPERSAEPGRSFGTMTPDLLALVDWLVACGVDTVAMESTGVYWIPVYELLEARGLQPQVVNARHIKNVPGRKTDIQDCQWIQGLHSVGLLCGSFRPADEIVALRAYLRHRAAWIEHRAAHIQHMQKALQQMNVQLPLVVTDITGVTGQAIIRAIVAGQRDPQQLAALRDARCKKSAQELAKALTGNYRPEHLFALQQALALYDFYSAQIAACDAEIERQFANLKPLSADLAPLPPSVKRNSHSKNGPNYDARAQLYRITGVDLVAISGLNESTVQTIIAEVGTDLSAFPTEKHFCSWLGLAPHNDISGGKRLRSRTLPTQNRAGQAFRLAAQAVSRSLDSAFGVFYRRMKARLGPQQAIVATAHKMARAFYHILKHRTPFHDMGGAEYERRARERELKNLEKRAATLGCVVAKNPTAEALAGSF

SEQ ID NO: 309589 - protein, 392 aa, unidentified
MASMTSSTATAQPAGVLFGGIDTHKDIHVAALLDCDGGLVGSASFPTTRAGYRQLLGWMHTFGILARVGVEGTGSYGAGICRQLTAAGVEVVEVNRPDRSQRRRRGKSDVLDAAAAAEAARTGNRIAIPKSRDGQVESLRVLRLTRASAVKARTKAFQQLDQLIVTAPERLRDQLRDLPKMRLIGSCAAWRPHSTDAADPTVAARIALKSLARRYLQLDAEITELDQLLEPFVADLAAQLVAVRGVGTETAGQILVTVGDNPHRVHSEAAFAMLCGVAPLPASSGKTQRHRLNRGGDRQANRAIHVIATTRKRCDPRTQAYMEKKTAENHTRREATRSLKRLIAREIYYLLNPRPHTPPVPPSRPVSRRTGAVKVEPPTRGTTLTAPSTGTP

SEQ ID NO: 309590 - protein, 277 aa, unidentified
MEYIAFDAHKRYTLASVARPDGHVVREQRIDHDRGALRQFLERCAPGSPVAVETIGHWYWIVDEIETAGCVPKLVHARKAKLMMGQINKTDRLDARGLNLLQRNGTLPTVWIPPSQLRDQRELPRARMMLVRQRTQLKNRIHATLAKYALHDVDVTDLFGVRGRALLRERLALLPEHTAYTTGRLLEQVEQLTREVDGLEQRMTTVFKPTPAIQWLLTMPGVGLILAVVIALEVGDVTRFPTAEKLAGYAGTTPRVIASGGKVRYGHLRPDVNRYLK

SEQ ID NO: 309591 - protein, 420 aa, unidentified
MNNTILSSLFIGIDVDSTYNVVHMMNFNQKDLNHFKVKNDLNGVTAIKDNTIETTKKYNFTNVIFVLESTSIYAFHIATFLSSNEELLIYNPKVYCINPKISCNYRASFADTNKDDFTDAKLLANLARVGRCDKLTPWKGAQFLALQRLTRHRKHLADMLAREKNYILNNIFLKFSGLCTASSSESPFSDMYGATSTAILTEFLSPEDIINTSIEDLVIFVNDKSNNKISNPEETIKLLKQCATNSYRLDKVNLLPINLAITSSLNCIRSFENEIKAVSREIQALIKGFNNEEYICLTSIKGIGPVFAAGIISEIGSIDQFDDDDALAKYAGITWRKTQSGKFESEDNPLTKTGNKYLRHYLIEAANQVRKFVPEFNDYYNKKYNEAKPPKELRAQILTARKLIKVIYALMKNRLLYKSR

SEQ ID NO: 309592 - protein, 428 aa, unidentified
MNCNTQNAKIASITEKTLIVGIDVGSETHYARAFDWRNYEYTRKPLEFSNTEAGFQTFKAWMEDLAEKHGKTVVIPGMEPTGHYWFSLGKFLQDSGMKPVHVNPHHVKKSKELDDNNPNKNDRKDPKTIAALVNEGRFSYPYIPTGIYAEIRSLSNLRFQTQEELTRLKNRIARWFAIYFPEYKDVYGDLKAVSGRMVLKEAPLPEDIRKLGVDGVNQIWRNAKLRGAGMKRAKTLVSAAEHSVGSKEAPGAARMELKNLLDDMDVYSSRLKELLRNIEEKLKEIPYVDKLMEIKGIGLTTVSGFIAEVGDIGRFDNPKQLQKLAGYAIVANDSGKHNGESRISYRGRKRLRYVLYEAAISLVGKNAEFRAIHEYYRTRKENPLKKMQSVVAVACKILRVFYAILTKGVNYDAEKLKGDIRRPQMLTA

SEQ ID NO: 309593 - protein, 338 aa, unidentified
MPLYGGIDLHANNSVIVLLDDQDQVVYQKRLPNDLPSLLQQLSPYQASLQGVVVESTYNWYWLVDGLMERGYVVHLANTAAIQQYAGLKYTDDHSDARWLAHLLRLGVLPEGYIYPKEGRAVRDLLRKRSQLVQHKTTHLLSIQNLLTRNTGRAMSGNRIKQLTVADVDGLLPEPELALAVKSNLAVMRCLETQIATIAQTVTQRVKLQAEFNDLLTVSGIGQILALTIMLETGDIRRFPAVGNFASYCRCVGSQKLSNGKRKGSGNTKKGNKYLAWAFVEAAHFAVRYNPCIKRFYQRKQAKTNTVVATKAVAHKLARACFYILRDQVPFDVSKAFQ

SEQ ID NO: 309594 - protein, 338 aa, unidentified
MNNCIGFDISKSTINVHIPKGSLDLEIENSNKAIKSLYSKLKKLYKEEINNLIFIYEPTGSYSYQLTCFCSQKSIKIFMINPKQSHNYAKAIGQRGKSDKVDARMLSACLHIAKETETKVPVINSVEQEIKELISYYKFTTKRRVQTNNHLEALTIKDGSSYAIKDLQKEITNFIKKEKSIIEKIKELIKSDIQLESKFTNIKSIVGIGDVGAIALIHLFIKYPYANQREIISLCGLDPIERTSGSSIRGKSRILKAGSRLYRGTLFMSAMTAIRFNDEIKAFYDRLKENGKHTTVAQIAVIKKLIIIAHSLYKNNCAYDKEFYEKQCGKIEKIAQSA

SEQ ID NO: 309595 - protein, 567 aa, unidentified
MLPQPAPAPQPPRRIGVGIDTSRYGHYAVFLRDDLQPADAELAFAESGPGYARLRGRLGRLAQRHAPCAFCVRVDAAGQYADNLLAFPHDLAQRGPWPLTVSCGDPQRNKNYRAAVFGSQKSDPVEARAAARYALTERPKGDPPGSRELRILRQVAGRLQAVVRQRTRLLNQLHHLVAVTFPELGLLVGDLSAGWVLELLHRYPTAPRLAAAADADLATIAYLPPARRAPLLEQARTSVASLHGPLAEELVRDQVRQLRDIGARQKRLEKLLVDAYHALPQGNHLATIPGIGDVTAAVLTAFIRDIDRFATPGQLVAYFGALPIEASSGVDRQGQPRGPKRYVMSRRGNDLVRRYLWLAALAAVRCNPAVRALYARVSARHPNRKAVALGHAMRKLLHLAWALWKTGKPFDPRHYPWQPPEGSDDGLSPEDEAAGHKPDAPAGSAVTATPPAIVGDRAARGESQAVDFAHLKQQLPMARVLDQLGLPARLRGTGPQRRCACPIHRGDARGRTFGVNLDDNVFHCFDKACGKQGDVIDLWAALHHLGLREAAGSLRRLAKAFDKPWHD

SEQ ID NO: 309596 - protein, 342 aa, unidentified
MQITTIGLDIAKNVFQVHGIDASENVVVRKQLRRSQVLAFFKALSPCLIGMEACATAHYWARELTTVGHEVRLMPAKDVKAYVKRNKNDAADAEAICEAVRRPTMRFVQAKSAEQQGRLMQHRTRDLLMRQRTQLINALRAHMAELGIVAAQGREGIKQLLTIVASERDARLPVDAHASLVVLAAGLQAVQTMIGSIERRIIIQHRSNEASKRLKSIPGIGIVGATAIAATVPDPRAFRSGRDFAAWIGLVPRQDSTGGKQKLGPISKQGDQYLRRILVVGAHAVLKRARQQPEKYPWLTRLLARKPFRVAAVALANKMARVAWALLAKGGTYRAPALAAPV

SEQ ID NO: 309597 - protein, 446 aa, unidentified
MGLCCDGTGRVLKNAFPIKNTPDGIDFTLSVVEKMCRKHHINKQHVFFGGEDCGTFSLNFAYNLREQGFPVIGVNAGDAKKLRENVQASTDGLDLLGIANMLINMRGGAAGGEIGALRALRSLTRHRRKQVQLQTAGKNRIHQIVDQLFPGFLDEKNSGIPPFSETSLYLMEDRFSAADIARRRDKALLRQFHAKGLQHAEKALAKLKAYAKQVLHHPPELTGLLQTALASEIRLHRCINDNIAQMHREIAQQLAQTPAAMLTTIRGIGITLASGVAAEIGPPEAQPSLRRLSSYAGIIPRTKQTGGPEKSPVIGSVSKRCNRILKDYVVQCGNHLGQHGPADLHEDHRRRGANGQHADFGMARRFLRMAMRLMRTGESYVPPEIRDNATVEELRAWYLDLWPKLLDKWVKAGAVHTAFHPENPLGQWRERIQDIYEIELPLPKKK

SEQ ID NO: 309598 - protein, 354 aa, unidentified
MADERPEHLWALKPVGERGSSSAVPSTPNSRLGRKRSPIRQGWDRMEIVVGIDVSKDRLDVHVLPSGEAFSVGNDHAGVEELARRLAAFSPTAIGLEATGGYEQLAVATLASAGLSVVVVNPAQIRAYANALGKRAKTDPIDAAVIAAFIAATKPELRPLRDAETRTLADLVTRRRQIVQMIVAEENRARTVNARQAQKSIKRLLAALRRELESLDADLDDHIRKSPLWRVREKLLSSVPGIGPTVARTMIAEMPELGSLDRRQIAALAGLAPWTRQSGTWRGKSFIGGGRSRVRAVLFMAALVAIRHNPVLKAFRDRLVEVGKPKIVAVVAVMRKLLTILNAIIRDQKPWQTA

SEQ ID NO: 309599 - protein, 410 aa, unidentified
MEVMIQRGAGIDVHKKLLVVCLLIFSGNKSKKLKKRFGTFKADLIELRDWLVSEGCTHVVMESTSVYWMPVYEILEGHVEIVVGNAQHIKNVPGRKSDENDAAWLAKLLCFGLIRNSFVPPKPLRHLRQLTRFRQSMVKTATQQKNRIHGVLETGNIKLGSVASDIFGTSGTEMLEALVEGKLKPAAMAQFARQKMKEKIPELTLALDGTMTDHHRNLLRMEMSMHDKIDASLAEVELVMTEAASPYNKLLERLDMIPGINWLAGIGVIAEIGVDMSVWGSASRLTAWGGLCPGSHESAGKRRKVGVRKGNPHLKRLMIQIATASVKKNGAHYQYKYQQLAKRRGHRRAIVAIARLILTTIFYMISRGTDYAEVGLPVSRPVNREREANRFVSKLQQLGYNVSLSPAANG

SEQ ID NO: 309600 - protein, 438 aa, unidentified
MSNKVIFNLDELFISVGIDVGADFSWMSIALPNQQFVGKPYKILHNNMHSLTTAVSKIKEAEELYSLESRIFLESTGIYHYPLFCYLRDKGFNCSVINPIITKNSTNINIRKVHNDRFDSKKAALVGLKPDLKVSLMPSDLALNCRNLCREYYDLMDNRSAYVNKLLGELRMAFPQYLGIFSKVTINTSLTLLETYTSPSAFLEADKKEIIDVIKSTARFGLTYAENKYHAIIQAANDAHECGYIIDSNIIRIRLYIGFIRKYDEEIAGIIEALHELVGSNQDTDFVKQIHLIETFKGAGFLSAVSLMGEIGDFSAFSKPKQLFAYFGLDPAVKQSGKFEGTKVQMSKRGSAIARRVIHTLTLQSISTSRNGEPKNPVLRDYYLKKCESKPKLVAMGAVSHKVCNMIFAILRDNKPFEIITPQEHIKQYNAAKCNIAA

SEQ ID NO: 309601 - protein, 351 aa, unidentified
MGIQTNNHNEETDMELYAGIYLHSNNSVLVVLDGNDRVVYQKRLPNELDTMVTALRSCPGAITGVAVESTYNWYWLVDGLQAAGFAVHLVNTAAVKQYDGLKHSGDFSDARHLGHLLRLGILPTGYIYPREERAVRDLLRKRGQLVRTRTTQILSIQNLLSRNLGVQASGNLIKRWQSTDIDALTLLPEQKLALQTNLAVMVCLDAQIATLETAILAQAKLRADYQVLRTVSGVGEVLALTIALETGEIGRFASPGNFASYARTVNSRRESNGKKKGEGNTKCGNKYLAWAFVEAAHFAVRYDGVIRRYYQKKCAKSLSVVAIKAVAHKLARACYHIMKTGEPFNVTRAFG

SEQ ID NO: 309602 - protein, 355 aa, unidentified
MHAKKKGSIEELAVVGIDIGKESFHLVGFDRSGQLVLRKQIKRLALSATFEHLPRCVVGMEACLSAHFVSRTLRGMGFEPRIIPAIYVKPFKKGQKNDYNDAEAIAEAALRPNLRTVAEKDQDQLDLQALHRVRARLVSRRTATINQIRAFLIEQGITVRSGLRALKNSFEAILDQRREEISRRMRGILMGLYGDWLWLDRRIEDVTTEIEEISRTEENCANIMSIPGIGPMISTAMVAAIGKGEAFDRGRDFAAWVGLVPTQYSTGGRTILGRITKRGSRYLRMLFVQAAKVIMMRQHRWADFSFGPWLTGTVGRMPRNKAAIALANKLARTAWSVLHHGTRFDAKQDPALEAI

SEQ ID NO: 309603 - protein, 423 aa, unidentified
MEEMTDEPLYRDRVCGIDIGKAGMVATIRVPSDKNPARRASETRSFGTTRREVLALADWLRCWQVTAVVMEATGDYWKGPFYRLEAEGFECVLADARQVKNLPGRPKRDPADSRWLAACFERGAVTACFVATPEFRVIRLHTRYRRDLTAERTREKQRAEKLLESAAIKISSVITDLHGVTGRDIMDHLIAGERNPKVLAQLARAAARRKISQLEEALEGAEFFTADHAALLATMLARIDRVNEEIARLTEVIERLLAPYEEQLAQAESMPGWARRAAQDAVAETGVDMSRFRTGAHLASWAGRTPLDNQSGKRNGRSKSKKGNRYLGGLLGETAVAAGRTATREGARYRRLARRRGKAKAQVAVARSILIIIWHLLANPEARFTDLGYGYYQARTDKDKKIKNHIRQIEALLGHPITITKAA

SEQ ID NO: 309604 - protein, 418 aa, unidentified
MMYTYVGCDSHKNSHTFVFLNCFFEKLGEIAVSSTPSDFEKFFKEAQQYLLDGTTFAWGFEDVASYGRSIVKFLIDKKQLVKHVNASLVASERNSQNTLHKTDSVDAECCARVLLSRFDKLPLALPDDKLWILKSLVARRQSLVKVNVMLKNQLHSLIPDHYPSYHSFFSLIESKSALAFYETYPSPSLLADVTLEMLANLLKAASKGKVGDKKAKQILLAVEKDGVSVSDYQHVRDFTIQSAVRQLKSNLGEIEALEIQLEQFLKYFDSPLTTMQGMNTIMACKFISEIGDIRRFPNAKALAKYAGVSPVTYSSGSSNVQYASRRGNRQLNELFFMLAVNQSLPLGTKRNLVNPIFHNFYQKKVAEGKTKKQALKSVQRRLVNIVYRMMKDNEDFHNPPTTQAEPEIDIETKLKTSI

SEQ ID NO: 309605 - protein, 465 aa, unidentified
MKTDKRLWRNRNTRKELARRLQSENPGLEVVHPRAAGIDVGNSAHYVAVRPDCDPEPVRRFECFTADLHRLANWLQSCGVKTVAMQSTGVYWIPLYDILEEHGFEVYLVNARHTKNLPGRKSDVQESQWLLKLHTYGLLNNSFQPASKIRVLRTYWRQRAQHVSGAATCIQRMQKALTQMNIQLANVISDLSGVTGQMIVRAIVGGERDPRKLAELSHPRIQASRGQIAESLEGNWRQELIFVVQQEIEMYDTYQRRISECDQQLQKHLAAFADTVPPPAKQELPPKKKGKQNKNNPHFHLADELQRIAGVDLTRIDGVDVMVAQTLVSEVGLDMSRWKTEAHFASWLGLCPDNRISGDKVLARGTRHVVNRAATALRMGASTLLRSQTYLGAQYRRLRSKLGAPKAITAMAHRLARLVYRMLKYGQQYVDKGAEYYEQRNRQQQIEFVRKKVAQLGLQVTLAHA

SEQ ID NO: 309606 - protein, 420 aa, unidentified
MDALNEIDFVAYVGIDWADKKHDACIQEAKCDQREFVVIPHKVDLIDEWAKSLRKRFGSPIAVAVELTKGPIVSALQKYDFFVIYPINPATLAKYRETFKPSRAKDDPTDAELAVDLILRHSEHFKALKPQSVEMRTLTSLVEKRRTLVNDRVRITNRLRYALKQYYPQVLEWFEHIDTVLFCEFIERWPTLKQAKRARKNTLRTFFSAHNMRFAHVVERRVRAIKEALPLTSDEAVIIPHRLQALIFVEQLRVTLKAIKRYDEEIEKLADNHVDYGLFSPLPGAGPSLAPRLLVAFGEDRERYQNAADLQKYAAVAPVTERSGNKHWVHWRWKCSTFLRQTFIEWAGQTINKSYWAGAYYRQQRAKGSNHQAAVRSLAFKWIRILYRCWQTRVPYDESKYLKSLERRGSPLVKELAEVA

SEQ ID NO: 309607 - protein, 373 aa, unidentified
MENTITYVAMDTHKKEHKVALHYPGQQEITNLIFRNSSHEISKMVRKILKKAPGEVQFCYEAGVCGFDLKRKIESSGCRCSVIAPSLIPVKPGERIKTDRRDAVKLLAMFKAGLLTEVHAPDPQQEAARELTRLHQTVRENLMRIHHQLLKFLTRHGYIYTEGDNWTLKHLRWLRSLEFAEPLLQEVFDSYFTEMQHCMQRLDSLAKQIEQLAESEPYKEIVGFLRCFHGIDTLTAISIITEIFDFGRFSSPRALMSYLGLTPSESSSGDKQKKGPITKSGNKRVRRLLVEVAWHYRHPYHISKALKQRRKNQPQWVIDIADEAGHRLRKRYWYLIKRGKMPCKVTTAVARELAGFIWSVFREYELRNKQKAA

SEQ ID NO: 309608 - protein, 386 aa, unidentified
MHHASTISVPERTCSRGDCATLFVSLELSRSTWVATALAPGSRKMSKHTLVGGDGRKLLDLLARLKTRAEQRIAAPVKVVTIHEVGLDGFWIHRLLEANGVESHVVDPASIAVPRRHRRAKTDAIDGETLLRTLMAWQRGEPRVCAMTVPPSPSEEDRRRISRERATLLQERIRHTNRIRGLLFGQGITNYNPLHKNRRECLEELRTGDGRSMPAHLKSEILREIDRLELVIRQIGEVEAERDEMLRPAEASSPAALLMRLKGIGPEFAAVLYLEGLFRHFNNRRQLAAYAGLAPSPWKSGSIDQEQGISKAGNPRLRTTMVELAWMWVRYQPDSALSCWFRQRVGSERGRIRRISIVALARKLLIALSRYVTHGEIPAGAVLKPV

SEQ ID NO: 309609 - protein, 414 aa, unidentified
MPETAYALYVGIDWGTVTHQVAVLDAQRVLLGERAIAHEAVALHGLTEWLTQLAHGEPARVAVALEVPRGAVVDTLLERGFHVFALNPKQLDRFRDRYTVAGAKDDRRDAFVLATALATDQPAFRALAPEDPLLIELREWSRVEDELREEWGRLASRLREQLHRFYPQALALCPAADEAWFWALVGLAPTPAAALRLRHAAVVTLLRAHRIRRLTADQVLAALQSPPLRVAPGTVKAASAHVALLIPRLELVDRQRRDCARRIERLLDALATTGEHQRHRDVTILRSLPGVGRVVAATMLAEASRLLAARDYHGLRTQAGVAPVTRQSGKRLLVGMRYACNPRLRNALYYWGFISVRYDEHSRQHYQLLRGRGHSHGRALRGVVDRLLTVLMAMLAAQTTYDPARRSALLALAP

SEQ ID NO: 309610 - protein, 449 aa, unidentified
MGRYAGVDWASEKHDVLVQSEAGDELFSGTFTHDEAGITALCRTLVRLEVQLVAIERPDGLLIERMLDAGLRVMAIHPNQVHAARPRFRTSGGKSDRFDAFVLCELARTDSHRFRVLVADSDETKALRALSRAREDLVQTRVELANQLRAELERFWPGATLIFDAIDSPIGLAFLERYPSPLDAKSLGEKRLGAFLARHSYCGRKKPAEMLAKLRDAPQGRTGESEIEARRAIVLALVAALRPIVAKISELTSEIAHRIRTHPDGQIFLSLFRDPKSVLCAAALLAEIGDCRQRYPNAEALAADAGMSPVAVESGKRKVATFRWGCDKRLRQATSTLADATRHWHPWAQDRYAASRARGHDHPRAIRTLGRAWCRVLWRCWQDRAPYDPARHHGLQQHITVTIPSQSGPRPDMTATQRMASAAVTRTAAQTAEREALDGKPTSATTLGG

SEQ ID NO: 309611 - protein, 356 aa, unidentified
MTSNIKYVGMDVHKQSISIAVRNAAGKIVMECVIETKANTILQFFDGLRGELHVTFEEGTWAAWLHDLLKPHVTKLVVCDPRRNALLQDGNQNDRVDARKLSDLLYMNKLKPVYHGDHGLRTLKELVRSYLTITRDLSRVMTRVKAIYRSWAIPCSGKQVYSSRHRAEWLDKIQELGVRRRAELYYQQLDALRTLRQQVRRDLLTESKKHKAWKRLCEIPSMGPIRASELLGILQTPHRFRTKRQLWTYSGLGIETHSSADHEIANGQLRRKKKPVEIRGLNENCNHDLKNLFKGAALVASIKRGPFAEFYTALVAKGMRPEMARLTLARKIATIVLLVWKKGVCFDASHLKPQRA

SEQ ID NO: 309612 - protein, 318 aa, unidentified
MTHTTHTTALYVGIDVSKETLAVATYPDNTVQVITNDHDPCEALANELAAQPVALVLLEASGGFEKTVVQALQRAGVPVAIVPTQRARSFAKSLRGNLKTDRVDAQMLARFASCYPMPDTPETPAVQVQLKELWARREQLVQMLESEKKRLQVAMHPLVRASLERTMAQLEAECAEIEAALAALVASDEALAQQAALLQTVVGVGWAVASGVLAELPELGQVSPKVIAALAGLAPVRRESGRWRGYARIGGGRRRVRRLLYVAAVVAVTHDARWKAVYEGLLARGKPKKVALCAVARRLLVVMNAMVRDGRAYARAQE

SEQ ID NO: 309613 - protein, 377 aa, unidentified
MKRIKFVGLDVHADTIAVAVAEQEGEVRSLGIIANREECVRKLVGKLGPVEQLRFCYEAGPTGYALYWQLSKLGARCEVVAPTLVPVKAGDRVKTDRRDALKLARNYRAGELTAVWVPDAAHEALRDLVRAREAAKKDQLRARHRLSKFLLRHGRRPPAGVHSWTLQYLKWVQQEVHFPERAQEVTLLDYLHEVQHAAARIARLDQAIDEAAQSAPAAMRAVIEALQALRGIAKVTAVTVVAELGKIGRFTGAPQLMAYGGVVASEDSSGERIRRGPITKTGNAHLRRVVVEAAWAYRHRPSIGATLRKRQEPVSEKVKEIAWKAQQRLHARYMKLTLRGKNKGVVITAVARELLGFLWAIGIQAEAEQQESLSRVA

SEQ ID NO: 309614 - protein, 339 aa, unidentified
MSLYCGIDLHSNNHVITIIDENDNRLFERRMPNKLETTLNCLSEYQDDVAGIAVESTYNWYWLVDGLIDAGYSLHLVNTSAVKQYEGMKFTNDEHDAFHLAHLMRLGILPTGYIYPKEQRAIRDLLRKRGFLVRHRTAHTLSAQSLHSRLTGRQASCNVIQGDHAESIYLPGLDDANRRLEMKANLRMIQALHHQIVEIEKTVLNQMKLSPEYIGLKQVPGIGNILALTIALETGDISRFPKAGNYASYCRAVKSCRESNRKKKGEGNRKNGNKYLGWAYVEAVNHMVRFSNDGNRFFQRKLAQKNRAVAVKATANKLAKACFYIMRDKIAYDAKLLFR

SEQ ID NO: 309615 - protein, 402 aa, unidentified
MISVGIDVSKEKSMVCILKPYGEVVCKPFELQHSKKSLESLDELLRRLDGEVKIVMEATGIYNLPILTFLDEKGYFVSVINPCVMKKYARNNNFRNVKTDKMDSITIANYGIEKWFKLKRYEASESTYTELKLLGRRYRHYMEMHIQALQELTHVLDYVMPGIKNLFNSWTESNNRDKLSDFVESFWHYDLITSMSCEEFVKAYNEWASEKKYHQSESKAIQVYELASNGIPTLSSNFPSTKMLVLEAIKTLRAVDGSLYIILSRMKELAKSLPEYSTVRAMGGVGDVLAPKLIAEIGDVRRLHSAKALIAWAGIDPPPYESGQFVGSNRKISKKGSATLRKTGYEVMRVLKSHRAPEDCAVYNYILKKEAEGKSKKQAKIAGLNKFLRIYYVRVMEVYQSV

SEQ ID NO: 309616 - protein, 337 aa, unidentified
MGQLYVGLDYHKAFIQVCVVKGDGDVLGNRRCANDWRAVVECVQPLGIVHRCSIESCSGAANLAEQLVVLAGWSVDLAHPGYVSRMKMSPDKSDFSDARMLADLTRVGYLPKVWLAPEVIRELRRLVRYRQQLAQERRDAKLRLRALLREHRIIEPSGKPWTKRWLVWLAMCDGLGEQSQWLRDQYLLCLQRSEEDIRTVERRLALVTKDDAQVNRLLEQPGIGPVTAWTIRAEIGRFDRFNNGKQLARFCGLSPRNASSGQRQADAGLIKAGNAMLRATLIEAAWRLIRCDERWRTLALSMKARGKPACVIAAAIANRWVRSLYYEMRTLGQATAA

SEQ ID NO: 309617 - protein, 375 aa, unidentified
MEWTPSSRNSIAVAKWVGCRNTTLIGGGVTMNVTTVGIDLAKNIFQVHGVNEHGKPVLKKQLKRHQMVTFFANLPPCVIGMEACASAHFWARKLQALGHTVRLMAPQFVKPYVKTNKNDVADAEAICEAVARPNMRFVPIKNVDQQVVLALHRARQGFVRARTAQANQIRGLLGEFGLVIPQGISSVAQRVPELIEDADHELPGSFRLLIQRLTDHLKELDRQVEELETQIKAWHHANDASRRLAAVPGIGPITASALVASIGDARSFSNARQLAAWLGLVPRQHSSGGKPTLLGITKRGDTYLRTLMVHGARAVVRYCVNKDDAFSGWLQRLLTRRHKNVAVVAVANRNARIAWALLTQDTTFRSDYAPPRAAA

SEQ ID NO: 309618 - protein, 416 aa, unidentified
MKPWKDLTHYAGLDWAKDHHCVVIVNSEGRIVADFEFEHSVEGWKSFAEKTSAWPNLAVAIETSQGAVVDQLLQRDYTVYPVHPVAAKSYRERKAPSGTKTDHLDAWGLADGLRGDGHSWRALQPLDPMTQQLRLLCRDEVVLIEQRTALVNQLQQALLEYYPAVLEAFDDWTSPSTWEFVLAFPTPQALVTAGKRRWEKFLHSHRLWRSDTAEKRLKLFAQADQFQASDPMVRAKSQLAVSLAKLLCTLEKQLALYRSQIEALFRDHPDHDLFGSLPGAKKVLAPRLLAAIGCDPDRYGSQEVLQAIAGTAPVSYQSGRLKKVHVRWACDKFLRHTIHLWADCFRRASAWGQAYYQQKRSEGMTHACALRCLGQRLLKIVFRMITDKKPYDAELHARNQQKHGSWVLKLTNKTAA

SEQ ID NO: 309619 - protein, 415 aa, unidentified
MGKIIERCAGIDVGKRFLLCCALTGAAHEEPHSKTRRFDTTVLALEGLHKWLREEGVTHVVMESTGSYWIPIFNILEDEFVVVLANPEEVKNRKGHKTDRKDAEHLADLLRHSHIRASYIPTKPVRDLRNLTRRRVQLMEDATRERNRVQKLLEQTNVKIASVLSDIFGVSGQRMLVALLEGQSTPEQMAGLARGTAQRKIPQLIEAMQGHRMTDHERFLIRSSLRHLGCLEEELEILDTEILKRMRMTPFQHAFTLLQTMPGVGELAAAAILAETGIDMAPFPTAEQMSSWAGLCPGKRESAGIQKGSHTTHGNAYLRTALVQCAWAATRKRGSVFQARFQRIAPRRGPKRAIVAVAHQMLIVLHGMLMARVPFRVAEREPRQRRRLRRAHHHLRCLRHLGLEVQIANPAGFTP

SEQ ID NO: 309620 - protein, 453 aa, unidentified
MAHGSGLTRGDRNRNQRIAALREVVRRDRAVLAVDLGEDKQVAALVDHEGRVLARKLVKAKAYQLSGLLEWAAGKAAGAGFAGLTVACEPTGHRWKAVMGLADAAGHGFVCVQSLAVARAREGDDYTRDKTDHRDAYLIGKLVIRLECYLPERADAAWARLRHLGARRFALVADVVSCMQQVGDLLACAWPAALGTAARPLESTTWLAALGVVTDRCNGDPARLRKMGYDKFIAAIRRELPRWGAKNSYHKIARGLWEALADTSGVATQRRGALERVHLLMGDWRSALARLADVEARMTGALDELGLTELATSIDGLSAVGAAAILAETGDLTRFASARSVVKHAGLNPSEHTSATLAGKTQISHRGRPGLRAAAWRAVWGGMRHNRVLQARHGHLTGRQDNRLSDGQARAACAATLLRWLYAVVTRRQMWDPRIAAGTVPARHDVVTAPAAA

SEQ ID NO: 309621 - protein, 414 aa, unidentified
MSPPLLVGVDPHRKTNTVSTMDPAGRETGQRFTVQNNLPGTEAFAREVAQRALDGDFDAIHIAAEATGWYWWHFFQTLDQDPLLNQWPLSLYPFNPRLTRNYKKTFVDLDHEDLVDAFVVADRLRIGRDLPAPFHYEERYFPVRMLTRYRYHLVHQLAREKSYCLAILYFKYSEYSRKDKKPFSDLFGVTSRAVIQEFASIEEIAALPFDELVEFIDRTGKRRFPDPADNARKLQRVVRDSYLLPQALQQPVNLILSLSLRQITVLESLEKRINTAIAEGMSAIYHSLDTIPGFGPVFSGGIVTEVGDIARFDYNQAKVAKYAGLKWRKTQSGEFQAEETRLTRTGNRYLRYYLCEAANRVRQCDPEYRAYYDRKFHEVRKHQHKRAIVLTARKLVRLVVRLLTTNEPYRPRRL

SEQ ID NO: 309622 - protein, 412 aa, unidentified
MEQVIIGVDPHKLSATIEVVNNQEHLLGSGRFTTDQRGYTAMRSYVKAWPNRVWAVEGANGAGRPLAQRLVEDGEQVVDVPAKLAARVRLFDTGHNRKTDALDAHSIAIVAVRTKGLRVLAADGELEALRMLTDRRDELGHLRVQTVNRLQRLLSELFPGQRKKDLSALQAKAMLTTVRPRDIAGKTRRRMAAEELADLVAVDAKLKKIKAELKAMVIARGSTLLQINGIGPAGAARTLADVGDITRFADRNRFASWTGTAPLDASSGEQIRHRLSRAGNRRMNHVLHIAAIVQLRNDTEGRAYFQRKVAAGKTRMEALRALKRRLSDVLYRRLTADARTRDLDAKSRGLIDDGTGPGGHCGATQESSAADLPPHVDTSDQPLPGPARPTLPRPNRTRKTATSPSSLTRLLT

SEQ ID NO: 309623 - protein, 424 aa, unidentified
MQKLKGTRMKSWQELTHYAGFDWAKDHHVVVVVDSQGQIVADFEFEHSLEGWKSFSEKTSAWPNLAVAIETSQGAAVDQLLQREYLLYPVHPVAAQRYRERKAPTGTKTDHLDAWGLADALRVDGHGWKALQPLDPLTQQLRLLCRDEVTLIEQRTALVNQLQQALAEYYPAALEAFEDWTGAFTWEFVLAFPTPQALVSAGKRRWEKFLHTHKLWRPETVQKRLKLFAEADQFKASAPIVQAKSQLAVSLCRLLGTLGKQLALYRQQIQALFRDHPEHDLFGSLPGAKKVLAPRLLAAVGNDSKRYGSHEVLQSIAGTAPVSYQSGKLDKVRVRWACDKFLRHTVHLWADCFRKASAWGQTYYEQKRAEGMTHACALRCLGQRLLKILFRMLTDKKPYDAELHARNQQKHGSWVLKLVNQSPA

SEQ ID NO: 309624 - protein, 350 aa, unidentified
MNGLRYVGVDVGKRKCRAAVVDGDGVLIKEFSFVNDFSGIEGFVRELSEGDAVVMESTGNLWLNLYEAVEGQGVKAVLANPLKMKAIASARIKNDKVDARVLASLLRGGLVAECYVPPRDIRELRALVRHRVHLARSATIVKNRVHSLLDKYGLRHGFSDVFGKAGMEWLRRVELKPLDRLLLDSYIEQIECLERLIKNVEVEIERRASVDEDVRLLLSLTGVGVYSALLIKSEIGDVRRFPNYKKLVAWAGLAPSLYQSGSVERRGRITKQGSKLLRWVMVECARVAVVHDARLCEFYERVKRRRGEQKALVAVACKMLKIIWFMLTRREPYQSMNARLYGDKLYRLSR

SEQ ID NO: 309625 - protein, 418 aa, unidentified
MTRRDDSRIIRIVHPICCGLDVHKESVAACVIFPDDKGEEQCDVKVFGTFTDDLMRLRDWLTTHNCPVVAMESTGIYWRPVHNVLEDSVQVVLVNARDMHNVPGRKTDIGDSKWIAGLLRHGLLKSSFIPPQDVRQWRDLTRLRKKYVHTVGDYRKRTHKLFESANIKIDSVVSDLFGVTGRNLMQLLVADRELTLSAIQTCVRGKLKGKEAELFRSIQGFFTDHHRFVLKMILETIATLEGHIEALDLQISGAMKEHEALLDRMKQAPGIADVASREILAEIGPTLDSFRKDTALVAWSGLCPGNNESAGKRKSGKSPVRKHHLKTIMIEVAWAAIKKKDSYFKDKYYRLKARRGAKRAIAAIAHRILLGIYHVIKDGADFRDLGGDYLTLRNKSQKVFHLRKQALAMGFDLVPQTV

SEQ ID NO: 309626 - protein, 344 aa, unidentified
MDNHTQYSGFAGVDLAKKVMQIHFVTGDGEITDKQVKRAEFLDFFRNRTKCLIGMEACGASQDWARKLEAMGHEVHLMSPKAVKPFVSGQKNDYNDAIGIYKAMFNGVRRVPVKSTEIRDLQTLRRIRSQVTKDKVKEINHVRGLLAEYGIVMGKSITAFNKGISSALEILKERGDVSPLVAEELQTTVESIKTKIERQKRLDREIEQLARGCKNYENFLKTPGVGPFTAAMLCVLLCDPAIFANGRQFAAYIGLAPRSRGSGGKNFIIGIPSKFNCDSESRAVFVECAQALARYKNKSPWVDGILRRKPKKVAVIAIANKLARQVWAMANKGESFKQMTILTA

SEQ ID NO: 309627 - protein, 491 aa, unidentified
MLGSSIGIDLSINGAHDCTVLDATGQLAQRFSFDSSSAGLLKLEQRIRTLDPAHGAPTVVMEPTGLAWLLPCLYLRAQLPDVKIVRIKTSKVAALRRYLKQDAKSDRLDSLTLAKMPLVDPETLYAVDLPPATLRGLDRMTRQRARLVESLTARKNRLQAVVGGYLPGLMAATGKPWESTFRAVLTVSLNPVALSSQDEAVLRKALQGKPSRKEPPEAVIPRLRTACAQLTRLYGPIVKAGLVTEVFFDDLHDEVARELHLMDVEEQEVKALESAIARRYEEVAPQDHLGTMPGLGVVTAPTMLAAVGTPQRFQNQAAFRGWTGVVPHAAESADSEAKGLPMTKAGPKRVKLALYQAAETARQWDPQLAKIYFDQMVHKGKPHYKAVGAVMSHLASRIHAVLTEQRDYVLQDVDGREVSAAEARTIVKTQYQVPAEIRAARRTSNRRKRNVSTDAHRGSATRSSRRPSPSSRTHSIRSQEADQIHSAATSH

SEQ ID NO: 309628 - protein, 339 aa, unidentified
MAIIGGLDVHRSQITYDWIDTQSGQHQRGQLAPAHREHLRGWLEQFQGRSAAFALEGCTGWRYVVEELQRAGVQPHLAEPADTSTLRGPKRRAKTDRTDAAHLRELLAAGRLPESWIPPAHVLEARTRVRCYKALLDQRTAWLQRIHASLFHHGVPAQRRLLAPDQRVRLEQGCGLSPAAHQQVTVALRLLDHLDAELDLLRGELVGVARRQPGCRALDGLYGIGPLAAVAIWAELGEVRRFSSSRFAVRHTGLDVTVYASDGKRTPGRLARQGPPVLRWDLARPRLLHGGQAAPGRQPRHPGGRSQADPPLLPHPWRARRAGVRATLGRASAWAGGLR

SEQ ID NO: 309629 - protein, 415 aa, unidentified
MGLRAPCILISNSVGVHLEPAVAEVVERRDSQISRSATTSATAVANRSIAPSAGTPKSASASEPVVKQDRSRLSGFSPNSRRSRQKTSSHLQGRDTSKMNFNCFLGVDVSKLKLDFADSKNHLRGQVENSRDGVAKLIQRLPEPQSVLIVLEATGGYEKTLVNQLLDAGHLVALVNPRKVRAFAIGIGILAKTDAIDALVIANFGEKVRPRTLAQKHEKQDDLDQLVTRRRQLVELRKAENCRLQNVVHKAVRKSLLQTIKLFDKQILALEKEMTTLIESDDEWNDKAQLLSSVPGVGDVTARTLIAEVPELGQLNRQEIAALIGVAPFNRDSGKFKGKRTIFGGRAGVRSALYMAAVTAASHNPVIKAFYDRLKSQGKACNTIRIACARKLLVILNTMVKNNSHWNPHPSCQNA

SEQ ID NO: 309630 - protein, 370 aa, unidentified
MCIRDRDLSELSSMLFRLNDEVKIVMEATGIYHLPVLTYLQEKGFFVSVINPYLMKSYRNESLRKAKTDKIDSRIIANYGIDHWFKMKEFQTSGEIYEELKLLGQQYRHYMKLHLLSLAELTHLLDLTMPGIKNLLASWNETNRKDKRSDFVERFWHYDVITSMSEQEFTEEYILWAKEKKYVPSQEKAKVIYTLAQESIPTLPSETSSVKMLVTEAVRVLKEVDATLGLILSRMQEIAKTLPEYSVVREMGGVGNTLAPKLIAEIGDVRRFRNGKALVAFAGIDPPPYESGQFVGCNRKISKRGSASLRKVGYETMRSLKMRSRPEDPVYRYVVKKESEGKSKKSAKIAGLNKFLRIYYARVTELYKNI

SEQ ID NO: 309631 - protein, 407 aa, unidentified
MICVGIDVSKRKSTVCFMAPGDKIIRRPFDVKHTKEELQPLVDEIRVQAKYDEIKVVMESTGVYHLSIAYFLQQNGIFVSVVNALKVANFNKAENFRHTKTDSIDSTNIARYGIAYWAKLPQFDLNGDKYFLLKRLCDAYLNFSEERSRILLQLQSQLEQTMPGIFDLFGGFDINSGKDKLLDFLEKYCHIEDIIAKSEAEFVASYREWAEEKGYRSNESKAATIYAQAKNGIPSIPNNPIVRETIMWYVGLLRRADEALMASLTRMEDIAKDLPEYELVGEMGGVGRVTRVALIAQIGDVRRFKNKHSLICFAGLTPSIHESGKFRASQNHIVKKGPARLRKVLYQVMMSLVMHKIPKDDAVYRFIKKKEAEGKYKKVAKVAGMAKFLRIYYGRVMHLYRDLGLAA

SEQ ID NO: 309632 - protein, 346 aa, unidentified
MKILALDLGKYKTVGCEYESESGTYRFQRSVTTPAALQKLVEEVKPDRVVIEVCSIAGWVCDLMRAMGIDIQVANTSDDAWRWRKVKQKDDRRDALKAARLSAVNQLREVYIPPREVRQWRALITYRRQLVRRRTQIKNHLRDLLLREGQILPRGSQCWNQEGLALLTSLACPFSEVGLTDLWRGELYEELQQLELLQARLATVEEKLNAIGKADARVQLLRTAPGVGARLAEAIVALLHEPQRFRKVSQVSAYIGMVPKAFDSGESERRGHITRQGSRLVRSLLVEVAWAGRRHNAWVRQTYQRLNGGKKARKKIAIVAVGRKLLVRCWAMLREQRAWDWQPQIT

SEQ ID NO: 309633 - protein, 390 aa, unidentified
MQPTQVQDFTRDEEVLAVSLELASKSWKVGLDDGKRNSPAVHGVDHATPEGRLEEAIAVIEKRKQKWGLAPGVRVVVMYEAGQDGFWIQRALSGRGYETLVVDAASIPVERKSRRAKTDRLDAIRLVVTLRAWLRGERDRMKVVRVPPVEAEGQRHLVRDRGTLQKEIGQHRDRMRKLLRTVGCWGSIEGDLKGRLERGEVTGYDSSALPAWLQERLVRECTRLTLVEAQLAQLERTLPAQLPEAVRQQMVQLMQLKAVGPVGAQRLLLELFWRQFNNRREVGACVGLVPQPYDSGESRVDQGISKAGNRRVRALLIEMAWLWLRWQPHSELAQWFAQRTRGSGSNKRSKRMAIVAVARRLAILLWRYLKHGVLPAGVELKPVRVTLKAA

SEQ ID NO: 309634 - protein, 365 aa, unidentified
MEHIAIDLGAKESQICVRSAGGDILEERRFATRPEKLRRYLAGRPKSRVILETGAEAFWVAEVARECGHDVRVVASMLAPSLGVGRRGLKSDLRDARVLSETSCRVDLPSVHIPRVETRRLQSRLAIREALVRNRTQLLNVVRSYLRTIGERAPSRTANGLIVALREKLADAAEQLKPVLESIEVLNQSIETFDEELKKLASNDELAKRLQTAPGVGVVTSLRYIATLDVADRFANGAAVGSYLGLVPSDHSSGQSQRRGSITKAGSPAMRAVLVQASWAALLSRRHRNDPMMVWAREVARRRGKKIAVVALARKLSGVLFAMWRDGTNYNAMRAAKVVPADPPRRLALSEGLGRCPRPESATLA

SEQ ID NO: 309635 - protein, 338 aa, unidentified
MSVAKVIGIDLGKSTFHLIGHDYSGREIFRHKYSRAKLVDFLSVQESTVIAMEACCGAHWLARKCKQFGHEVKLIPAQYVKPYVKTHKNDYIDADAIAEAATRPNMRFVSVKTEEAQLGTVIRRVRSGYIKERTACMNRIGSILLEFGLSFPRGHHQMKNLFQWIADQNEVLPPLLIAELTTQYEYYNQLNVWIKAQEDKLLALNKENDIAKLLQTIPGVGPMTASCCISAVGSPQDFDNGRNFAAWLGLVPFQYSTGGKPRMLGISKRGNKELRELFIHAARAVMWRDKTAEKFFGTWLIDLKCRKPFNVALVALANKIARIAWSVMTKKKPFEIRV

SEQ ID NO: 309636 - protein, 366 aa, unidentified
MRKISTMALDRIEIFKDQKLTIGLDLGDRFSHYCILNGAGDVIGEHNLPTTPKGIEEVFARIPRSRIALETGTHSPWVSRQLSRLGHEVIVAHARNVRLIGDSSRKDDQLDARTLARLARIDPGLLGPVRHRSAQAQIHLTVIRARAGLVRARTALVNAARGLTKSYGERLQKCGTQKMNREMSQGLSQELRDALDPLFGEIESINERIAEYDGRIEKIGKEIYPQIALLQQVKGVGTLIALTYVLTLDDPHRFRRSRDVGCFVGLRPGRRNSGMSQPQLPISKEGDVYLRTMLVQGAHYILGPFGQDSDLRRWGLRLAERGGKNAKKRAAIAVARKLAVLLHKLWVSGEVYEPLRNNHQVVSAVA

SEQ ID NO: 309637 - protein, 452 aa, unidentified
MAKKREKRECKAVVLEPDASGIDIGAEEIYVAVPPDRDEESVRMFSSFTCDLHALADWLQKCRIGTVAMESTGVYWIPLFQILEARGLEVYLVNARYLKSVPGRKSDVSDCQWIQYLHSVGLLRASFRPGMDICAVRSLWRHRASLLQMASEHILHMQKSLSQMNLQIHHVLSDLTGASGQAILDAILAGERNPVQLAQLCNCRVKSPREKVAKALEGDYRPEHVFTLKQSLDGYRYYQKLIAELDREIQRLMQTLPSAVETEQEIPQRTKHSAFQRQGNDPGFDLRGQLYRIAGVDLTDIPGVSAVTAQVILTEVGPDLHRFRNASAFASWLGLCPENRVSGGKILSCKTRRVKNRAALALRLGANSLCRAKGYFGEFFRRMRAKLGTAQAITATAHKIARTLYHVLLTKEPYAETVFHKCDEHTRRRAEMRLRKHAALLGFQIIPVNPAT

SEQ ID NO: 309638 - protein, 367 aa, unidentified
MTTIARQTPSSQDRSTVTEVTGGVDTHLDTHTAAVVDAAGRMLGHRTFGADPVGYRQLLAWLESFGTLLLVGIEGTGAYGAGLARHLATKGVAMVEVDRPDRKARRLAGKSDPVDAEAAARAALGRVRIGVPKARDGRVEALRNLRVARRSAVDQRANCQRRIKTLIVTAPEPLRQQLRGLGNTALLTTCIALRPDTSRVAEPTQATKVALRSLARRHAALSAELADLDALIAPLVAAINPDLIALHGVGPDTAGQLLITAGDNTDRLRSEGAFAMLCGVAPIPASSGKTHRHRLNRGGDRQANAALYRAVICRMRWDPRTRAYVQRRTAEGLSTKDIIRCLKRYVARELSPLLTQRDNHHNPETKT

SEQ ID NO: 309639 - protein, 370 aa, unidentified
MQKALYVGLDVHKATISVTAAEEGRDGDIRFIGPIPNTPTDIAKMAKRLSRKGHRLEFCYEAGCCGYVIFRQLKDLGHACTVVAPSKIPRRPGDRIKTDRRDSQKLAIMHRAGDLTPVWVPDEVHESIRDLVRVRLDALNQLRQSRSQLLAFLLRHGRSYTGGATTWTYKHRQWLTGQKFEQPAHQVVFQDYLEAVWAGEERRDELGKQLIEVTPLWSLNSFVEALRGLRGIEFLSAVTILAAIGDISRFETPRHLMAYLGLVPSEHSSGDSIRRGGITKTGNNEARRVLIEAAWCYRFPARIAQRKADVVVKLPKTIREISWKAQVRLCERYRRLLRKGKKSQVVTTAIARELSGFIWAIGQEVRPGMS

SEQ ID NO: 309640 - protein, 343 aa, unidentified
MQAVTTIGFDIAKSVFQVHGVDMQGRVIIRRQLKRRQVLTFFRKLPPCLVGIEACASSHHWSRELQKLGHTVRLMPPAYVKPYVKRQKNDATDAEAICEAVTRPNMRFVATKTPEQQSCLMLHRTRHLFVRQQTAVINAIRAHLAEFGIVAPVGRHGVEELLKIVADASDQRVPEIARACVAALGAQLRVLKRQILEFDRRIMAWHRSNAVSKRLDAIPGVGPALATALVASVADPKAFRSGRDFSAWIGLVPRQHSSGGKDKLGGISKQGDRYLRSLFTAGALAVIRYAKIHGTRHRPWLTALLARRPTKVVAIALANKIARMAWAMMAKGEQYKEPVALAA

SEQ ID NO: 309641 - protein, 340 aa, unidentified
MHTTIIGLDIAKSVFQLHAEDASGKVLWKKRLRREELEPFLRKLPPGLIGMEACGSAHHWGRVISADGHEVRLMHAKYVKAYVKRGKSDVRDAEAICEAVQRPNMRFVPIKSVEQQIDRSLERARDLLVKQRTQLMNATRGLLAEFGVIARVGLRGFKTLSDKVDAGDAAIPKPLLTAVKPLLEQWRGLHASIDELEERLVKRARSDERMRRLMKIPGVGPFTAHALVTAIGDPRRFSTGRDFAAWAGLTPLTDSSAEKTRIGHISRQGDHSLRRLLVLGAANMARHAKAKPSEARAWLLGIIGRRPVKVAMVAQAAKTARIAWTLLRSGENYRGSMVAA

SEQ ID NO: 309642 - protein, 335 aa, unidentified
MSIIGCDLHTRYQVIAILEVEAGEVVTRRLEHENGEARSFYAGLAKLSLIGIEATGYTQWFERMVAELGHELWVGDPAEIRARAVRRQKTDTRDAEHLLDLLLSKKFPRVWVPTVAERDLRQLLKHRDKLVRMQTSVRNQLHFLAMSQGLCRKQRLWSSKGRAELEALSLGPWATQRRKELLELLDSLGPRIEELNQAVGTQAGRRPDCQELMKVKGVGPVTSLAYVLTIGPVSRFATSRALVSYLGLNPGEHSSGGRQRLGHISKQGNQMLRWLLVEAGHGAARFDPELRRKYQRLKFRRGGAVASVALARHLAVRLYWVLRQASTTTSAGSHA

SEQ ID NO: 309643 - protein, 430 aa, unidentified
MNSTQNKKIRQVTEKTMVVGIDVGSEKHYFRAFDWRGIELTKKPFPFTNSMEGFNSFSNEIYSLMERFHLSETLVGIEPTGHYWFNLGQYMSGKSIKFVMVNPHHVHKSKELDDNSPSKNDCKDPRVIAGLVREGRYYYTYMPQGIYAELRNASNRRFTLIEEQTRIKNRLYRWISVYFPEYKGIYTQINAKGGLLILKEAPMPEDIIKLGIDGIIEIWKKAKLRANGRKKAMVIYNAALKSIGYREGLVEARMEIRDLLEDHEQNEKRLKQINDLIENLALKIKNVEKLLEIKGIGIITIAGFIAEVGNIMRFDNAKELQKLAGLELVADSSGKHNGITRISKRGRKHLRYLLIQAAISVVGKCEEFKEIHNYYTTRNSNPLKKMQSIIAVACKLIRVFYAILAKGIDYDASKMLEDIKHPGETPNLAA

SEQ ID NO: 309644 - protein, 345 aa, unidentified
MPIVGGLDIHRKQITFDYLDTGTGQVRRGQISPADREHLRAWLARFNGRDDVAFAAEGCTGWRYVAEELAAAGVAAHVAEPADTAFARGRKRHAKTDKTDCRHLRVLLAEGRLPECWIPPAQILECRALLETYHDLRAEHTAWVQRIHAVLFHQGAPALGEGALRSEQGLAALRAAAAAHLSPAGQLQVATALEVTAALEARLHELRHQLRDAAAHLTGAKVLAARLYGVGPVTALAMTCWLAGKGRFSSSRKAVRFAGLDVTVWSSDRKGPPGRLSRQGPPVLRWAVYEAGKAHARSSAPDHAYYATVKDRCNGKRAALSEARKILRQACHILAELGDDALSAA

SEQ ID NO: 309645 - protein, 407 aa, unidentified
MEVICPRCAGLDVHKQTVVACVRIAGESAPIQEVRTFATTTSGLLALADWLESFDVQHVAMEATGVYWKPVWHVLEGHFELILANAAHVKNVPGRKTDVNDAMWLADLLAHGLIRASFVPPMAVQELRTLTRTRKQFVRERAAHVQRIDKLLEDANLKLGVVLSDILGKSGRAVLQALIDGQTDPQRLASCVTTRVKASRAELLEALRGHASAHHRFMLKLHLSHIDALDRAIADIEKEVGLGLEPFRQSAKLLSTMPGMSAVASNVVVAEIGIDMSRFATPGHLLSWACMCPRNDESAGKRRSTRLRRGGKWLKTTMVQAAWSAIKVKGSYLQAQFHRIRARRGAKKAIIAVAASMLTAAWHMLRDGTEWQDLGAAHFDRADAHKTATRLMRRLEHLGYAVQLTPV

SEQ ID NO: 309646 - protein, 488 aa, unidentified
MAATKDAKTGTDRNSAAAAAEHGGGAEVAEDRVQVVEYAAAIDVAKGSGMVCTRVPGSRPDRRRQKVWRVEATYAGVTALMDHLRCEGIQRLVLESTSDYWRIWYYLAEAAGLEVWLVNARDVKHLPGRGKSDRLDCVWHCKLNERGMLRRSFVPPEPVRDLRALTRTRARLAQDQARHQSRVEKILEDALLKISVVISDLSGASGRRFLDALVAGERSPKALAALGDTRLKATRQELEAALTGRFRDIHAFEISTHLRLIDAINDEIARLDQAIGQQLAKVPGTAPACVACGLAGGGHAPGCADQEVPLLGLAGRLDEITGVGECNARVIIAELGTDPSIFPAPGHAAAWARLTPRSRQSGETAKPGRTGKGNRYLRGALGQAAMTAARTDTRLGALYRRIARKRGKQKAIVAVSRVICEIAWTLICDPAARYQELGPDYYRPRSPARQTRDKIREIERLNPGKKVILAPSTPAPKPAQPPEAPSSP

SEQ ID NO: 309647 - protein, 449 aa, unidentified
MWLATKIQLTAKYFLKEDELVTRISAGVDVSKNRSTVCIIDQDGKVIMRPFLVWHSTEELDFLADTLKRLNGEVRVIMESTSVYQYPIALHLKEKGIFISIVNAYKVKKFANTDFRGGKTDKKDSRTIASYGISYWDKLVEWQIPKDTYFNLDLLNRTYMNAKKHRQIILQELQHYIDCAMPGMDKELHSLNLSTKKDFMLDFVEKFWHRDEIVNMTEAEFTEVFTAWAKKKGYRPVEGKAAKIYAIAKSCIPYYPANPTVKTILQCIVDKLSGVNRTLVTIVTQMIEEAKKLPEYQIVREMPGVGDPLAARFFGSAGDIRRFKNSKALVAYAGIDSPPDESGDFSSTHRHITKKGSKVFRDTGYEIMMALRAQKRTWEKVRKNPEVYDYMLRKEAEGKPPKVAKIAALNKFLRIIYARIKELYDNMALAERAKAKTKSKTKAKTKATA

SEQ ID NO: 309648 - protein, 279 aa, unidentified
MENIALIGIDLGKNSFHIHCQDHRGKAVYRKKFTRPKLIEFLATCPATTIAMEACGGSHFMARKLAELGHFPKLISPQFVRPFVKSNKNDFVDAEAICEAASRPSMRFVQPRTESQQAMRALHRVRESLVQDKVKTTNQMHAFLLEFGISVPRGAAVISRLSTLLEDSSLPLYLSQLLLKLQQHYHYLVEQIKDLESQLKRKLDEDEVGQRLLSIPCVGTLTASTISTEIGDGKQYASSRDFAAATGLVPRQYSTGGRTTLLGISKRGNKKIRTLLVQW

SEQ ID NO: 309649 - protein, 429 aa, unidentified
MTESSDYESVQIFIGVDVGKDTHHAVAINRSGKRLFDKALPNDENKLRSLISDLKQHGQILLVVDQPATIGALPVAVARSEGVLVGYLPGLAMRRIADLHAGEAKTDARDAAIIAEAARTLPHALRTLKLADEQIAELSMLCGFDDDLAAQTTQASNRIRGLLTQIHPALERVLGPRLEHPAVLDLLQRYPSPEKLASLGEKKLAAQLCKLAPRLGKRLAADIAQALAEQTVVVPGTNAAAVVLPRLALQLITLRKQRDEVALEVEQRVLAHPLYPVLTSMPGVGVRTAARLLTEVACRAFASAAHLAAYAGLAPVTRRSGSSIRGEHPSRRGNKALKRALFLSAFATLRDPLSRAYYTRKMSQGKRHNQALIALARRRCDVLFAMMRDGTFYTPQGHNMLDNLIGAPLSSLFSDHIHRINFILQCYIL

SEQ ID NO: 309650 - protein, 439 aa, unidentified
MSQELPTLDPLASFVDVGSEHMHVSVGGNKPEVFGTVTSQLHALRDWLLEQGVHSVAMEATGVYWLALYGVLESAGLEVRMVNGRQTRNLPGRKTDMADSQWGATLHMHGLLHAGFVPPADIRRLQDYLRLRASHVAAAAACVQLMQKAFDRMNIKLHDVISKLGGVSGMAVVRAIVAGERSPEALAALCDVQIRRKKERAVIEALRGTWADEHIFALDQALQSWDHYQKLIADCDRRIAAVLPPHDETQPPLPSSTKQTGVNAPEISRLREILAQMCGGRDLTKLPALSQYGVLQLIGEVGTDLSVWPTEKHFTSWAGLAPGSNDSGKRKKRVSRARNRTGQLFCMMAQSLVRSKDIALGGFYRRLAARRGGLVATKALARKLAGWFWRVMVKGDDYVEKGIARYEEQVRKTKEHALKRLANELGRQLVPVPSSSQIT

SEQ ID NO: 309651 - protein, 409 aa, unidentified
MLFIGDDWAEAHHDIEVQDVDGRRLARRRLPEGVAGIAALHALVADYLGDDDPATVVVGIETDRGPWVQALLAAGYQVFAINPLSASRYRERHVTSGAKSDPGDAKVLADLVRTDRQHHRPIAGDSDLADAVKALARAHQNLIWTRQRQTAQLRSTLREFYPGALAAFDELAGRDALAVLEIAPTPAKGRALSRSKIASALRRAGRQRGIDARAEQIQSVLREPQLTATPAVETAFGHTVTAMVAVIAQLVTQTELLEQELNAHFERHPDAQILLSQPGLGPVLAARVLAEFGDDPTRYADVKARRNYAATSPITRASGTRRIVLARVAGNKRLRDALYLQAFCALRRSPGARAYYDAHRRRGHTHHQALRAVANRLVGILHGCLRHQQPYHETTAWPTTTEHQLPTAA

SEQ ID NO: 309652 - protein, 344 aa, unidentified
MDITTVGIDLAKQVFQVHGVGSRGTVSVRKQLRRAEVAKFFATLPPCLVGMEACGSAHYWARRIQEYGHTVKLMAPQFVKPYVKGNKNDAADAAAICEAVSRPSMRFVPIKNIEQQSVLALHRARQGFIKARTAQANQIRGLLGEFGLIVPQGIGYITQRVPALLEKATNDLPGAFRQLIDRLLEHLRVLSAQVSEVDEQVKSWHRSTEASRRLEKIPGIGPITASALVATVGDAKNFDSGRQLAAWLGLVPRQHSSGGKPTLLGMSKRGDPYLRTMLIHGARSVIYRAAQKANPQNWVFRVAARRNKNVAAVALANKNARIVWALLAHDREFRDGYSTTAAVA

SEQ ID NO: 309653 - protein, 432 aa, unidentified
MKNDNRKYLSVGIDVGADFSLMAIALPSQELLGKSYRIFHNSKRSLDGAIDRIYSVMEQYDLPARIFMESTGIYHFPVYHKMREAGLDAYVLNPLVTHASKDINVRNIHNDKFDAQKIALLGLRPDLKTSIVPSDDVAAMKAILREYYAMKKETSMYICRLKDQLRQVFPQFIPVFSKVNGVAAMAVLYEYLTPDSILAAGADELERFMKTVISKGPLHIRKKAEALVEAARDAQNFGHGNTGVFYLIRHYIEMIRLLDAQTKQILTQVKVLLKEQKNSQMAKQVRLLQSIPGIGFLSAVTLVCEIGDFSAFKRPKQLFAYFGLDPAVRQSGNFSGADLKMSKRGSPYARRCIYVLAIQSVSLRVDGTTKNPVLRSFYEEKCKSKSKMTALGAVMHKVCNIIFAVLRDERPFVLITPEEHRTAYFSASVKAA

SEQ ID NO: 309654 - protein, 325 aa, unidentified
MSQVVLGIDVSKDKLDVALLDGDKVRFHQVSNNSAGYARLHKWLAPTQGRRLHACLEATGQYGEGIATYLFEQGCVVSVVNPARIKAYAASKLRRFKSDKGDAELIAVYCQKEAPALWSPPEESVRELQYLVRHLNDIKNMRQQVRNRLQSGVSSRRVCDDLAAHLAFLDEQIARLTRDIQEHIDQHPDLKEQRDLLKSIPGIGELTAAVLLGEIRDIRSFENARQLAAYAGLVPEQRNSGTSVHHKPRLSKTGNAHLRKALYMPAIVARTHNPLTAALSERMLQTGHCMMAIIGAIMRKLLHLAYGVIKTGKPFDPLHAQSVSA

SEQ ID NO: 309655 - protein, 464 aa, unidentified
MTTGRMLWRNRRERKEWGRRLQSEDPGLEVVHPHAAGIDVGNSAHYVAVRPDRDPKPVRRFECFTADLHRLADWLQSCGVKTVAMQSTGVYWIPLYEILEERGLEVYLVNARHTKNLPGRKSDVQESQWLLKLHTYGLLSNSFQPVSEIRVLRTYWRQRAEHVREAATCIQRMQKALTQMNVQLANVISDISGLTGQAIVRAIVAGRRDPRDLAELSDPRVHATKEEIAKSLEGNWRPELLFVLQQEVDMYDTYQKRITECDQRLQKHLASFKNALSLQEPKEKSKTKKPAAKNAPRFDLSNELQRVTGVDLTTIAGVDVMVAQTLLSEVGLDMSRWKTESHFASWLGLCPDNRITGDKVRGRGTRRVVNPAATALRQAANTLIRSRSYLGAQYRRLRTKLGAPKAITAMAHRLARLVYRMLKYGQAYVDKGTEYYEERFRQQQIQLLRKRAAKLGLQVAEIQA

SEQ ID NO: 309656 - protein, 412 aa, unidentified
MEVLYPHCAGLDVHKDTVVACLRHMATGSVEREVRTFKTTTKDLLALSDWLAEHGCTHVAMEATGVYWKPVWHILSDGDFVLVLANAAHVKNVPGRKTDVNDATWLADLLAHGLIRGSFVPDEQTQEMRNLLRTRKQLVRECSRHIQRLQKTLEDANIKLDSVISDIMGLSGRAMIEALIAGESDPERLAQLAHRRIKAPPEALCEALRGRVTRHHRFLLRLHLKQIDAVNVAIDDIDQEVDAQIEPFRTAIQLLITIPGVSELSACVILAEIGHDMNRFPTAAHLISWAGLCPKNDESAGKRRSTRMRKGAPWLKTTLVQCARAAARKKASYFQAQYHRLRARRGDKKAIGAVAASILTTAYHMLKYGTLYEDLGPDYFDKRGKGKHVHRLINRLQNLGFAVQITPVEAAA

SEQ ID NO: 309657 - protein, 383 aa, unidentified
MMNSKYSVGIDMSKKDFKACFILFDANQEVKIKASRAFVNTLNGFEQFKEWYTKHQKEDLSIVFILEATGAYHEQLAWFLYKNKQNINIVLPNRSKAFLISLGQKSKNDKVDAKGLAVMGAVQKLKLWQPISQAFYKLRSLTRHLEDLQNIRTSLINQQEQVNYAMYEIKDVSKSIIATLKTLDKQIAHCKKKIYSTIEKDEALNKKVAYMTSIKGVGMLTAAIVMSETNGFALINNVKQLVSYTGYDVKENQSGSKVGKTRITKKGNAHIRRAMHLPAFSTVRNKVKPFNELYNRVYEKQGIKMKAYVAVQSKLLRMMYTLWKNETMFDANYQPSGIQEHKPLFSIDPIGENNKTAESKDSAALDQLPCNQSHEALFSVTQI

SEQ ID NO: 309658 - protein, 338 aa, unidentified
MFIIGCDFHTRFQQIAMLDPETGEVIERRLEHEGGEAQAFYAGLSGARVGMEATGYARWFERMLGEQGHELWVGDAAAIRAAMVRKQKTDSRDALHILDLLLTNRFPRIWIPSAEEQDVRQLLRHRYKLVCFRTSVRNQLHAQAMGEGIRRKRKLWTSKGRQELEGLALGEWSSRRREELLEMLDRLDGSIEELDRAVIQEAQSRPLAVRLMEHPGVGPVTALAFVLIVGEIGRFRRSKQLVSYVGLNPRESSSGGKQRLGSISKQGNSMLRFLLVEAAQTASRFDPELQRDYQRLKFRRGPGVAKVAIARKLAVRLYWRLQEAAPSGAAGSHAGQPG

SEQ ID NO: 309659 - protein, 416 aa, unidentified
MNAVRIDVSSRKSTVAVLRPLGEVVCLPFDVTHDIAGLASLAEKLKTIDGETRVVMEHTGRYYEAVAKALHEAGFFVCAVNPLLIKEYGANSLRRVKTDKADAIKIARYALDNWADLRDFTPMDAIRYDLKTLNRQFQLASKQRTASANNLIALLEQSFPGIRKCFDSPVRSDGTQKWVDFAHSFWHVDCVRKQPFPAFCERYRKWCKLHAYFFKLRNAEKVYALAKSAVVLTPKSKVVKVLVQEAANQLISISRSVEVYRAEMDRLAAMLPEYPVVMAMYGVGKSYGPQLMAEIGDVRRFERKQALVAFAGIDPMPNQSGDKNVRSNKSSKRGSPYLRKTLFNVIRTYLQCAPQDEPVFQFLNRKRAEGKPFYVYMLAAANKFLRRYYAKLRDYFASLDTLQPVAPIPTILKATL

SEQ ID NO: 309660 - protein, 408 aa, unidentified
MYNAVGIDASKLKSTITIIQPAGVVIRKPFDVLHTSDELNTLVTYLKSLEGETRAVIECTGRYHEPVVKSLSEAGIFISAVNPKLIKGQKQNTLRKVKSDPADARKIAKYALDNWAELREYSSMDTIREQLKTLNSQFTFFMKQKVAAKTNLISLLDNTYPGVNKLFDSPTRDDGSEKWVDYAYSFWHVDCVRKIGLKAFTERYEAFCKKHHYNYQKNKPALLFEESKQLVAVFPKEKSYKLLIQQSIQQLRLASEHIEIIRKEMNELASTLPEYETVMSMYGVGETYGPQLIAEIGDVSRFTHREAITAFAGVDPGVNESGQFKQRSNRASKNGSTRLRKTLFQVMSTYLQNKPVNEPVYQFLDRKRAEGKPYLVYMTAGANKFLRIYYGKVKECLRNLEQSQIEES

SEQ ID NO: 309661 - protein, 462 aa, unidentified
MANEDPKGRRESSERIDKGFPVLRADVAGIDVGSQEHWVCAPGLTGKEREVAVFGATTPGVEQLVAWLKERGVTSVALESTGVYWIAPHEILEARGFEVVLVDARALGRVPGRKKTDRHDCEWIQRLHSCGLLRGAFRPVEQICMLRTLVRDKGTLIAERADWVRRMQKALDQMNVRVHRAVSEVDGATGMAILRAIVQGERDPQQLALLRDPRCRQSAAQIAEQLTGHWRADHLFSLNQGLKMYDALSEAIAAYEREILQHLEAMTSIERRDDQAPPPTSPKKAKAMKSRGEEPLRHALYRMSGVDLTAIDAVGVETVSVVLSEYGPNLSQFPTEKQFVAHVGLAPQKPTSGGKVLTRKKKPNSASARVGAALRMAATSLRHSQTALGAYYRQIARRLGADVAVFATARKLAQHIYRLLRWGHPYVDEGAAAYDKRYQLARAKRLAATAKTLGYRLIAVDA

SEQ ID NO: 309662 - protein, 386 aa, unidentified
MHYNKTVFTNDLEGFEAFVKWANAVKLKSGKSSVLVGMEPTGHYWFNLAQHIKSQSMKIVLVNSFAVKRSKELDDNNPTKNDRKDPKTIAMLVKDGRYMEPYMPEGVYAELRIAMNTRWQLVKNLNSIKNQIDRWLRIYFPEFLQVFADWEGVAALVVLHEFSTPNQVIQKGTDEIVKRWKQDKIRAVGKKRAERLVEVAKISTGITEGLVAADIELKILLDDRKMQQYQTVMELVEKLMQEIPGVSELLNIKGIGLVTAAGFIAEVGDISRFSHSKQIQKFARLNLRENSSGKHKGKTKISKRGRKRLRAILFRAMMPLVSKNKEFRAIHKYYTTRQNNPLKKIRSLILLCSKLIRVMYAIQAKKVCYEPEKLLLDMKKDELLVA

SEQ ID NO: 309663 - protein, 345 aa, unidentified
MIIGCDFHPSWQQVSWLETETGETGERKLVQASGDAEQFYRQLPVPSLIGVEATGNCHWRVDLLAEIGHELWVGDAAQIRASCVRQQKTDQRDAEHILKLLVEGRFPRIWMPSSEVRDLRQLLLHRHKLVTIRTRVKNELQHLCLNQGVQRKHKLWSKAGQQVLRELPLKPWAARRREDLLGLLAMLDQQMEPLDRAVKEEAQRDKMALLLQTQPGVGAVTALAYVLTMGDVSRFARGKQVASYLGLIPREHSSGGRQKLGAITKQGNRMLRTLLVEAAQMAVRCDPGLRREYLHRCHQKPKAVAKVAVARKLAVRLYWMLRTQKPYPEVVRIESSSTEALVSES

SEQ ID NO: 309664 - protein, 313 aa, unidentified
MKEEKTFIGIDVSKEKLDVGVRPQVHFMTFANTEDGISLMTDFVKSKQPELIVLEATGGLEMAALRSLVVARLPAVCVNPRQVRDFAKAMGVLAKTDKIDAHVIARFADSVRPEIRPLKTEETEMLDAFNTRRSQIIIMLTAEKNRLTTASKWTKKNIEKSIKGLEKALAKINREVENLIKKSPHWRHMDKILQSVPSVGPVMSLTILADLPEIGTMNRRQIAALVGVAPLNRDSGKYKGRRAIWGGRARIRSVLYMCVISGICHNPKIKAFYNRLISSGKKHKVAITACMRKLMIILNTMIKNDTCWNESGC

SEQ ID NO: 309665 - protein, 340 aa, unidentified
MDITTIGLDLAKNVFQVHAINSAGEVVVRRALRRAQMIPFFSKLAPCLVGIEACGTSHHWARELVRLGHQVRLMPPAYVKAYVKRGKTDAADAEAICEAMSRPTMRFVAIKSVDQQAALSLHRARDLLVRQRTQLVNLVRGLLAEFGVNIPRGITHALAFARRIVAGEAQEVPELAAKVVGALAAQALAVQDQVRGLERELMAWYRASALARRIATVPGVGLLGATALAATVTDPGQFRSGRQFAAWLGLTPRLNSSGGKERLGRISKMGDRYLRRLLIVGMTSLVRQAKRGPGATDPRLAQLLARKPARVATVAMANRAARVIWAIMTRGGVYRAPQAA

SEQ ID NO: 309666 - protein, 418 aa, unidentified
MSYRIAGIDVHKKMLAVVVSDVEVDGEYRFERRMFGSNPEQLRSLAAWLIEQEAEEAVMESTAQYWKPVWAALERYWKPLREKREGASRRSGTLHLAQAQSNRGRRGRKRDFPDAERLVKRLVARELILSFVPDAEQRLWRTVTRKKYQLRCDRVRLQNQLESLLEEAHIKLSSFVSDLLGLSAQRMLKALADGETNPAALAALADVRLRATPEQLCDALGACTELNAVYRRLLKMALEELRLIDEQIGELDKEMQRLAEVPGLGVDSAQQIIAEVGPTAATFPSEKCLSSWVGACPGDDESAGVNYSHRSPKGNRHMRRLLNQAANGAARTKGSIFEIVYRRSVPRLGHNQAIGAIAHRQCRLIWLILHQGVRYEERGPAVTKQSKQRRTARMIRQLRSLGYRIETPNPQPSQAQAQ

SEQ ID NO: 309667 - protein, 400 aa, unidentified
MLSIGIDVSKGKSTVCGMKPGGEIVYTPFEIQHTREGMSELVSLLRGSGEEVRAVLESTGSYHCPVVAALLENGIFVSVINSLRMKRFCSQSIRKVKTDRIDAMQIALYGLAYWQELQPTRLPEDTYRELQLLARQYYQMTSMLIKAKVDFNALCDQVLPGMQELMSDHAGRHKLSDFVLRYRHTIHILEMGETRFRKDYCKWAEKKGYRNRERMAAHIFATAQNGIPVLPNAPSTQIVITEAIRVLHTVEASRDAILTQMQALAKTLPEYSLVREMPCIGDTLAPRLIAEIGDVRRFHSKRALIAYAGIDAPPYQSGKFRANNRHISKRGNRYLRKTGYEVMQSYVMHKPANDPIFMFIEKKRSEGKCGKLAMVAGLNKFLRVYYGKVTELYRSLSAIE

SEQ ID NO: 309668 - protein, 366 aa, unidentified
MQKTSTMRRTANKIFKGRQLTIGMDLGDRWSFYCVLDESGGVLLEDKLATTPEAMKQTFAMIPRSRIALETGTHSPWVSRLLTQLGHEVIVAHAQKVDLITKSTRKDDRNDAKALARLARIDPELLGPVQHRSAKAQMYLTVIRARAELVRVRTALINGARGLTKSYGERLPKRGTQQINGEFGAELSTELREVLEPLFREIESLNERIKEYDRRIEKTARETYPETELLKQVKGVGDLIALTYVLTIDDPHRFRKSRDAGCFVGLQPGRRNSGDSEPQMHISKQGDEYLRTLLVQGAHYILGPFGEDSDLRRWGRKLAERGGKNAKKRAVVAVARKLAVLLHRLWVSGEVYEPLRNSQKVIRAAA

SEQ ID NO: 309669 - protein, 412 aa, unidentified
MKLFVGIDVSLKDFKARMFDVEGEETAKRLRAKNDDPGAESLVKYLVEICSTNAVDSLRIGMEATSVYGWHLQMHLAGEPSLVPFHPQVYVFNPKIIANFRKQYVDISKDDWFDCLVIADRLRFGRLPESCQVDFRYLPLQRLTRFRHHLIQTITREKNYFLTNLFFKFNTLCQDKVLSNTFGAASEAILTEFLSPEEIAARPLDELIDILMEKGKSHFSDPEATAKALKHAANCAYRLHGSLLEPVNLILATSLQTIRTLEQQVKSIDKAIEKELSHFQNTLQSMPGIGPVCAAGLIAEIGDIHRFDNEAALAKYAGLTWRKHQSGEFEADDTPLTKTGNSYLRSYFVLAANYVRMRDPKFAEFYHRKFKESTTHHHRRALVLTARKLVRVVDALLRSNQLYLPQGKRRAV

SEQ ID NO: 309670 - protein, 359 aa, unidentified
MSDAITKETTLTVGLDLGDRYIQVCVLDETGEVVEESRLSNRRAALERRFGVCEPLRIVLEAGTHSPWVSRLLVDLGHEVLVANPRKLRLIYKNESKSDRVDAEYLARLGRLDPSLLAPLRHRSAETQKDLAVLRSRMCLVRARTRLISHARGAVKSFGERLPSCGAEVFAKKAENHIPPELEPALAPVFSAIRELTDKIKALDALIEKTARESYPKTSLLTQVPGVGTLTAQCFLLTIEDPARFPKPRAVGSYLGLRPRQAESGSLRPQLRITKAGDDHLRWLLVTAAHYILGPFGPDSDLRRWGLALCEKGAKSGKKRAVVAVARKLAVLLLRLWQTGEIYEPLRNTNRREAARACA

SEQ ID NO: 309671 - protein, 374 aa, unidentified
MEKDSTAYVALDTSKLRNAVAIAAEGRDGEVRYLGEIDNTPTATGKLVRKLAKRHPAVTFCYEAGPTGYGLYRQIKSLGHDCMVVAPSLIPQKPGDRVKTNRRDALSMARQLRAGDLTAVWVPDPHHEAVRDLTRARGAAVRDLRSKRQQVSALLLRLGQPYPGKTTWGKTHLAWLSSRKLDHHEQRIALEEMLHAVGQATDRIGRLEQAIRAAVPDWSLASTASALMALRGIDLIAATSLLAEIGDLTRFASPRELMAWLGMVPSEHSTGPRVRRGAITKAGNRRARSMLVECAWSYRHPPRVGADKLAKVAAAPPAVRDIAWKAQTRLSARYRALRRAGKPDNVAITAVARELAAFIWSVGLAVASGATPQA

SEQ ID NO: 309672 - protein, 335 aa, unidentified
MQVYGIDLSKEKFDVNFVDVKGKEKTQEVKNAVASISRFLSLVSEDGILCAEHTGAYGDLLVYLCNQMKVPIALVPGYTIKHSLGLVKGKSDPLDSKRIRDYGERFTDKLKYVEYPDENITELKQLYTLRNQLVKNRKTLLTLDKGRGVLPMQSIDAHKHINNVLATLDEEIASIEDEIETLILADPEMNDSYGLVTSIIGIGPVIATNLIIKTGNFKIIDTQRRAASYAGVCPFPNTSGKMVGKSKTSHFADKELKALLYMGAKAAVKHNKEFKLYYQKKELEGKSYFLIMNNLSNKLLRIAYSVVKNKTPYNKEHVCLDPREKNNNSSTKKVA

SEQ ID NO: 309673 - protein, 337 aa, unidentified
MDLKTNLAILGIDISKRTFDVWLIHNGKDKQKKFDNNAEGFKRLSEFLSKNNVLKIHACMEATGRYYEALAQYLFKEDHLVSVVNPFKIKGYAISELQRSKTDGLDAGVIARFCRANCPPAWKPLPQEISDLQQAERYLENLKTNKRQELNRLESGITCTTIKSIIEKHVEELDLKIEEVENWLKQHVKKHERLNKHYELIVSIIGVGNVTAFTYLGEFGYTDNFHHTRQAESFCGLTVRKYESGSSILKKSRMTKVGNRQMRTALYMPALSAIRYNPIIRKFAEQLKKVGKPPKVIIGAVMRKLFRIIYAVVKSERPFDINYQAKSEPAQIPISLV

SEQ ID NO: 309674 - protein, 499 aa, unidentified
MPSTNVAAAPILGAMKRKSIFRNESQKLDAAFIEAGLPERVLLVPLDFAKVTHYACFCDGRGTYIRKAFTVKNNQEGIDYLVDQIERTRVARSIKSKRHVIIGGEDSASYTRNFMDRLFELGYLTVRLDSKEVHRQAESVDSSTDKTAVRAIAKTMLNRDARQVGGSDPYAQLRGLTRQRRRLVHLSTAVKNRIHTHADCLFPGFLSKDSAVAAFSMASLELMANKFSAATLARKSEKTLTRTLSRQGVRSAPEVAAKLKEQARNAICADDASVQLSSQLIESELRLFQTLQSSLSQLDRESARILLQLPEAFAVSIKGIGITLASSIFAETGSLSQIQRCDQINAYAGIAPRVKQTGGPESPARIGGKRRNFNRILKDYTLQAGNHLYLHGPEELLHDAARRKLAGKAVDTAMARRFLRITRALAKSHCIYLPSHLREGQTGTNAEAQTRAQYIVKTWSDFLLKWKRLGLHEEAFAPETPLGDWRIIVQEIYEIDLPI

SEQ ID NO: 309675 - protein, 355 aa, unidentified
MKIAKRESNTKPMHYVETAYYNHYVAIDWSTTVMSVARMSSNSNYPQISKDLPATISSIKKYIKDLKGKIILTIEETTGAQWLYVELKDFVEKIIICDPYRNSLLREGPKNDPKDATELCRLLRAGMLKEVYHSNDENYRIRKLASSYNDLIKAGVRAKNQLSAIYRGFCLNYKKDTFNIEDSTAAFIIEEKRRYIKLYEEEKKEYIKLFRKLKKNNRTITHLTGISGIDVINAVKLFSVVIDANRFPDKYKYWSYSGLVKYKMESGGKVYGKRNPNYNRILKEVYKTATLAALRGNNDIREYYEVLLKERFSEKEAKNRITRYIAKSTLAMMKNDTKYKPYSWRAKKTKSKVDN

SEQ ID NO: 309676 - protein, 348 aa, unidentified
MKIVGCDLHARQQSIAMLDRETGELTEKVIRHEGNAVREFYASLGKPVVVGIEATGAMQWFLELLEELGIESRVGDPAKIRAAETRKQKHDRRDALLILDLLERDRFPAIWMPSSEQRDLRSLLRDRHQWVKMRARLQHTLQAIALNHALRKGSSLWSGTGQEALAKLPLPAYTCQRRNELMSLYAQLQRRIQQLDKQVEEQAQHRPQARRLMTHPGVGPVTALATDVFLGDPSRFTTANEVASYIGMIPSEHTSGKRQRLGKMSKQGNSLLRYLWTEAGMHASGKDPELKRFYRRKLIQKGMGKSRIAAARKLGIRLWIMMRDEIDYEEFCRRGKLRQIGESPCRSA

SEQ ID NO: 309677 - protein, 426 aa, unidentified
MDYPYSKVAGIDVHSQIHVVTVMDRKGSRTTQQFYNSLASLAALRDWIVSEGCEVVAFESTGDYWRPLYETLSPFVDVIVAHPRDIKKKYSGKKTDKIDSEWIAYLTLHNMVPRSRIPSGKELEMRILTRERESLTNQRTRHQNKVNHILVRNGINLKKFVSKPFGKAGVSLIKLISTYGSVDKIIEHLPKKLRKHEERISSCLPTGLSVNDRLILQAELHQIDSLNNSIASIESRITSVSRKFKREISLLTTVPGIGYITAWTIIGEVGIVKDFVKAANLASWAGLTPWVNQSAGKMRMGNITKRGSTHLRRVLIQAAHAAARSGNNYMRVFFERVKKHSSYKKAIIALARKILTIAWNVLIRDEPYNDDKARGIQKKPSSKSQRNNNSQILSVHDAYRILEEAGEITKLEGDEGYLWHGPAASI

SEQ ID NO: 309678 - protein, 337 aa, unidentified
MKYSGIDLHSNNSVVTVTDEEDRVVTEKRLPNDLAKVLELLMPWREELAGVVVESTFNWYWLVDGLQAAGFKVHLAHTTVIKKYEGLKHSGDEADARYLAHLLRLGILPSGTILPPEQRAVRDLARKRMQLVRSRTTHILAVENITARQLGARISSNQVKRLTPDTVDQIPLPADVALAVKANVAVISMLSAQIDLLEKRLQERVKPRVEYGLLTSVPGIGQALATTILVETGPIDRFASVGNFASYARCVDSERTSNGKKKGVENTKNGNKYLSWAFVEVANFALRYCAEAKRFYERKKAKTNSVVAIKALAHKLARAAYHILKECKPFDVTRCFA

SEQ ID NO: 309679 - protein, 411 aa, unidentified
MYIVGIDIAKRTHVGAIIDDTGKRYGKAFKIDNSVEGFNILLGKIAEISQDISQFVFGMEATGHYWLNIYTWLCDRGFTVHIINPITSDAARRLEIRRTKTDPIDAFLIAEVIRMGKYTKTQLADDDMMSMRDLCRQRFYIVDMASDVKKKVICLLDRMFPEYQSLFSDIFGRTSRELLKEGASPDEILALDTAKLAEILRKASKGRFDKEKAEELQNQARNSFAVLLSSQTVSLLIKQMIEQIELLESQIDEIDKLIANLYSSFNVKLTKIPGIGTTLAAAIYSEIGDISRFEKPKQLVAYAGLDPELKQSGDKRGEGYHVSKRGSPYLRRALWLASSCVIIHDKSFAYAYQHKLSQGKTKMQALAFISHKLLNVFFTILKNDIDYVPVFPPDVDVSKLAQKALDSQSSN

SEQ ID NO: 309680 - protein, 315 aa, unidentified
MNERFVGLDVSKDTLDLAVRPDEKHWQTANSEEAFPELVDRLKALEPTLIVIEATGGLERAVVVAMAEAELPVAVVNPRQTREFARATGRLAKTDEIDAADLAFFGEAIEPEPRSLPDATVQTLSALNTRRQQLVKMLTAERNRLNTALPPARPSLREHIRWLEREQEKVESELQRLIDQDLSLRSKFRLLCSVKGIGPATSYALISQLPELGKVNRKEIAALVGVAPFNRDSGRWRGKRTTWGGRGGVRAQLYMAAMSASQHNPVIRAFYQRLIEAGKPKKVALTACVRKLVVILNAMIKNGTLWDPEYATRAA

SEQ ID NO: 309681 - protein, 313 aa, unidentified
MQYIGIDMSKDTFHAAFDESTVTIFPNTKLGIKQFIKLLPKDSTIGVEATGVYHLLFARTCTESGFAVMIINPLITHRAIQSSLRRVKTDKHDALAIRAVLSMGAGYLFTETPELIALKALIQERESLVRMRAETKQMVHAHKAKELAAGLKLSNPYVSVQKAFTKEINILTVQMTGFEQKTQALLQSIPGVGPVTAAACAAYIGDIERFSSPEKLTAYVGLDCRVHQSGTSIHGKGFITKRGNTYLRTILFNAAFISRQYVPELQTFFEKKLSEGKHYFSASVAVERKLVHLIYAVWKRGTPYEARAIAQIA

SEQ ID NO: 309682 - protein, 443 aa, unidentified
MSDSFSKQPPEPEWAGFTAIDWGDGKHFWRLAPVGAPLEQGELENTPEAVDVWATDLYQRFGGRPIAVCVEQCRGALVYMLAKYPHLVLFPVHPTTAARYRETFCPSGAKADPSDAASLLDLLMRHRERLRPLQPDTAEARLLQRLTEQRRRLVDEKTRQKLRLTACLKLYFPQLLDWFDDVDSPLVGALLQRWPSLQELKRAHPGTLRKFFHEHNCRGEERIQQRIQAIYAATPAVEDAAVLEGEGMSACNWAAVLATLREQIAGLEQRIGQLVAVHPDSGLWASLPGAGAALLPRLLVAFGTRRDRYDSAYQMQCLSGIAPVTQASGKSQWVHFRYACPKFLRQTFHEFAYCSLRKSVWAQAYYQLQRSKNKSHHAAVRALAYKWIRILYRCWKDGKPYDEQVYLENLQKRNSPLRAGFASTTGPAWKVVSGLHKISENFS

SEQ ID NO: 309683 - protein, 417 aa, unidentified
MKDLIMHYYVGIDIAKSFHVACVVNQDDKVIKKSLKFNNDENGFDELLLLLNSIDEVSTFTIGMEATGIFFENLYLYLSEKGFNVILLNPYQTNRFREMDSMKKVKNDNIDALMIAALIKSGRYSKAYVSEDMYQSIKSLYRHKNNLLEEMKKHKRQISTLLAVVFPEMEQVIKDPFNVTGLALLEKYPTAKHYHHASVERILKTFRGIKGNNFNEQKAGKLLELARHSVYQGNGVDERAYVIKSHIRVIKLLQEELKELENEMLKLFNEQVSLERDEEQEIMDIIDNLRTIPGVSDKTIFALISECGDLSRFKNNSHLIGYLGLYPTLEQSGNKLTYGPIAKRGAKLAKKALYQAAIAAIRHNDELNKLFRDKVSQGRAKKEAVVIVARKLAHIILAIYKNNVAYNPQRVFQAAVS

SEQ ID NO: 309684 - protein, 471 aa, unidentified
MVMTREPEEILDEPHEQIMQRVCAIDVGKDSGKVCVRLPAESGSGRRVSKVWDVPARTKAVIDLGDHLACQGIQKVTVESTSDYWRIWFYLLEARGLDVQLVNARDVKNVPGRPKTDKLDSVWLAKLTEKGLLRPSFVPPKQIRMLRDYTRLRVDLTAERTRHWQRLEKLLEDALIKISAVASRIDLRSVRDMVEALIAGQRSPRLLAGLARGRMKLKHADLVEALTGQFDEHHAELARMLLDQIDALTAQIDTLTARIDTLLAAILDGRNPDPDHPDPGPADPGSATANGPGAIAQPTPGQRSAVPSTADLVDILDEIPGVGPHIAQVIIAEIGLDMSRFPTAGHLVSWAKLCPRTIQSGAKSTAGKTGKGNRYLRAVLGDAAAGAGKTNTFLGERYRRIIKRRGKLKALVAVARSILVIIWQLLSHPGLRYHDLGADYHTRRIDTERRTRNHVRQLEALGYTVTLTAAA

SEQ ID NO: 309685 - protein, 342 aa, unidentified
MFYAALDVSLRSVAICIIDEFGKVRLERSVPSDVPDIVRCFHEFGEPIHQVGLEAGTLTQHLTYGLTEAGFDVVCMEARQVSAALSAMRNKTDKNDARGIAQLLRSGWYSRVHVKSVESHYTRALLSSRKVMQRKCLDLENEIRGLLKVFGVKLPIRLRGGAFEEAVRCTIESDPALSHALLPMLDARQMLLETFLELDRRVRKAASQDAVTTRFMSVPGVGYVTALSFKAAVDDPARFKSSRTVGAHFGLTPRRFQSGEKDNPGRISHAGDADVRATLYAAANAMLMRSIAWSSLKAWGERLMKTKGRRRAIVAVARKIAVLLHRMWIDGTEFRFGSEAAA

SEQ ID NO: 309686 - protein, 348 aa, unidentified
MKKVLAGADLHSNNVVIGIVDEDGKRVAQFRAENRLSEVVKLLAPYKKRLECIAVESTYNWYWLVDGLQGLKYPVALANPAAMQQYNGIKHADDTNDAFFLAELLRLKILPTGYIYDAQLRPVRDLLRRRLMLIHQRTALILSFKSLYTRTTGKEMALGEVKKLESQAAQALYDHPANQLIAGMQIQHIDQLTETIDKIEKVVLGDARDLPIYSRLLTLPGVGKILGMTITMEVGDISRFAGAGNFASYCRTVQAQRTSNSKKKGENNSKCGNKYLGWAFVEAANFARRYDPQCRQWYDRKAAKTGNIIATKALACKLAKAAWHVMSAQVNYDAQRVFGQPAKSTMKT

SEQ ID NO: 309687 - protein, 385 aa, unidentified
MGSQAFIARDYDVFAGLDVDKKSISVTFTDHQGLLKSMRMPYSVDHLVNHVRKHYGDKKVAFAYEAGPTGYGLYDGLVAQQYLCLIASPSMIPKAPGQRVKTNRLDSLGLAENLRGGQLKSIHVPTTLYRELRHLTQLRDALVSEVVAMKQRIKSLLLMEGLEFPPAPPGSQWSFLVKAKLRKLPCSSVVRFKLDQLLDNLEFGEKQVLKVTREIRRFCQNDPELSQCIDYLKSLPGIGWIVASQMLARIGDWRQIKNIRELPAFLGLVPTESSTGERTTRGSITHSGDPRLRSKLIQASWSAIRQDGELLKFFRTVAKKHPRHLGPRLAIVAVAHKLCMRAAVVLMKQRPYEIREKVQSAPLTQEETVPQGTTRRRRVPGEKIS

SEQ ID NO: 309688 - protein, 338 aa, unidentified
MTTKISMLAIDLAKGSFQVCAVGPEGTVLYNRSLSRTRLATLLADQPACIVAMEACATSHHWGRMAQRHGHEVRLVPAAYVKPFVKRQKNDKADAEAIAEAALRPTMRFVAVKSAETQGRAVAFRTHQCLVRQRTQLINGLRGHLAEFGLVAPRGPASLKLLENALDDEETDLPSPVREMGAIYLDQIARLTEVIEQLADELEAASKTDAQLRRLCTIPGIGPVTAGAVSAFAPDLDTFDNGRNFAAWLGLVPRQRSTGGKTKLGSVSKMGQTDIRRLLIVGAMSVIRWVVRKGGSANRWLAALVARKPKMVAAVALANKMARMIWALTTKKEDYRMA

SEQ ID NO: 309689 - protein, 337 aa, unidentified
MSLFCAIDLHSNNSVAVIIDAQDNVVFQRRLPNDIEVIKAALCPFQAELHAVAVESTFNWYWLVDGLQAAGFELMLVNPQAVQQYQGLKHTDDVSDARWLANLMRLGILPTGYIYPFEERTLRDLLRKRLLLVRERVMHLISAQSQIWRSTSQRVDSTELKRAQPELLKVFDHPNLRRALHCHLVMIRTLNEQIQMLERQISQQMRLNKAFQMLLTVDGVGPTLGLTIALETGDITRFPTVGRYASYCRCVNSQRLSNGKAKGQNNTRNGNKYLGWAFVELAHSIIRHNKTAHRFYQRKRAQRNGALATKALAHKMARACYYVMRDQVPFDQTKLFA

SEQ ID NO: 309690 - protein, 397 aa, unidentified
MTKPIPLSIDTIWRLFQLDVLLTHCAGMDIHQKEIVVCSLTSMEDGSLQKEINTFSTLTKSLYELLDWLEKRQITHIAMESTGIYWKPVFNILEGYFDITIANAQRIKNVPGRKTDVSDAEWIAKLLRHGLIEKSFVPSQDLRELRDLTRLRKKWIGNLTAEKNRISKVLECSNIKLGSVISDIFGVSGRKLLTRLVDQGYLDQVDIDACIHHSLKKKASTISESLFGTLNDHQIFMIKSSWKHIEYIEKSVQELEKRVDALLQSYQEEKEILLTIPGVKEHTVACIIAEIGTDMSQFPTSRHLASWAGVSPGNNESAGKKKGSKSVQGNPHIKAALCEVAWAISRSKKTGMASTFWALSARRGKKKALQAIAHKVLRIIYTLIINKQNYSEPHLAG

SEQ ID NO: 309691 - protein, 329 aa, unidentified
MEQEYIGIDLHKAFFQVCVVNGIGERQWEQRWPTTDEGIAGLVARCGASSRVAVEASSPTWAFVDRIVDHVGAVHVVDSRKTRLKAGYAAKTDRLDAQRLADALRRDSVVGIYYPPPPIRDLRELCRYRCQLARTQASLKQRIHALLLRQGVREPRVSKLFGKRGTQWLDTLRVDGWAGASLNGLRQLLADVRTQLVPVLATIRSTAGADPIARALDARPGFGPVFSVTLRAEVGIMTRFPDGPHLASYAGLVPRVERSGGRQWSGRITKAGSPWLRWVLIEAAIHQLRRPDDFGRWARRLAVRKGILKARVAIARALCDELFDAWPRA

SEQ ID NO: 309692 - protein, 439 aa, unidentified
MSRVIVGVDPHKKSVTIEVVDEQGQKLATGRFGTDSTGYRLMLRYVRDQWSDRRWAVEGANGVGRPLAQRLLANGEVVLDVPAKLAARVRVFDTGNARKTDATDAHAVAMVALRTPRLSRLAYDEELVALRLLTDRRDELSHRRVQTVNRLHRLLAELIPGGAKRDLSALQAKRLVASVRSRTLVGKTMRRMAVEEIGDLVAVDAKLKAIKKELRAAVRARGSHLMDLYGIGPAGAARILSDVGDVARFPDRNHFASWTGTAPLDASSGDQIRHRLSRAGNRRLNHVLHIAAIVQIRHDTEGRAYYRRKLAESKTPMEALRCLKRRLSDAVYRQLVADAVPTAAAVIEHEAGPGGHSGATTQSSAADLTPDVGSSDKPQPGPAHPTLPARQPRSNPQAASAASPSRRRAGAVKVERPTGRTTLTATSAGAPSKATRPRP

SEQ ID NO: 309693 - protein, 428 aa, unidentified
MNDNDISRIEHFRQFKNEIRGSDRFLIVGLDIGKNMHHAFFGTATGKTVKRGLRVENSASGFEHLLTMVQFYLDRDGYRDVVFGLEPTSVYHKPLAEFLIIQDHLVVYVTNEAIKKNRTLLDGRWDKNDTKDAANAADLVAQGKCQFYDLPDIQLRDLRALLSLRGRLKKQLHGSRVRIRNNLVAQYFPELDKCWNQAQEENLAIVRWCLSPHKISELSFEDFFKMVTTGNKGLRQYNRLSKIWEIAPYSIGCQSGIAMELEAKILVENIKSIQAHIASVDETIEDISISFQEYQYLLSIPGFGPYVSAVVLAAIGTAQRFDNTHQVLRFAGFDLNANRSGKKSQSAVPVISKKGKASLRYALYQAALIASSLNTQFRGYYHHLLQGREREKGIRTKMRVKLAAKLLVIAWTLMKKKQAFDPSYLKTQ

SEQ ID NO: 309694 - protein, 451 aa, unidentified
MNEKVIHAGFDVHAKTNVAHFLHPDGSLAHQPFEFEQDKKGFSRLEKALQKMAQEHPDVVFLCGIEATGPYWFPLGAFLTALPLRVKVTAINPSVVTNFKKVHLKKVKTDPIDARETAEYMRIFKPEPTDFFTSEHIALRQLARGRKFFLKQHSAAMNQLRSQLAVAFPEISGKDTNLSETILAVLDRFPSASSLKKATDKQLKKIRFPNSGKRVKCNMASALRETAKDSIGITQEPMCELYIRQLVHNIRFLHQQVQKAEKELETYYMEHFAHTRIHTIKGIGTLSAALIMGEILDAKRFESITHWIGYIGIYPEWKWSADKKDYAFKMTKKGNRYLKHIIYCCTFPAIRFNPIIRRHYHNQLSRGKKKMVAIGSCMRKLASLIFGVMKTQRDFDPLYNSGMKEKTISTKKTRQIKLKKEEAPQSNIVAGEVVNATKSFSGPEIEVASSL

SEQ ID NO: 309695 - protein, 382 aa, unidentified
MSTSTPIFWVGLDVHKDSVTCAVFRDQEPEPMRVDRLPNDHRKLRRYFERLAGMGSVRACYEASGTGSVLQRALTDWGMPCELAGPSLIPKRPGDRRKHDRRDAIELGRHYRAGQLVLIHVPSEDDERVRDLVRCRETFQSEIIKSRHYILKFLRRRGFIYREGTHWTVRHLGWIRRILQPGTLAEEDRTVLAEYFALLEYKLQRRDELDRRIEALALTPRYKPVVDLIGCFRGLGTQSAMVLATELGDVRRFDSPRKLMAYVGLVPGERSSGDRRRQGSITKAGNARVRHVLIQAAWSYRRRPTVSAALKRRQQGQDPAVVAHAWKCQHRLFKLYHRLAVKKPRQVAATAVARELVGFLWAVLRDVDVSQLQDQEVAHAAA

SEQ ID NO: 309696 - protein, 400 aa, unidentified
MRTVFGIDVSKASSEVAIVINGEKIHGYTMPNDTIGFTRLLDDLKTVQKPEIIFEATGVYSRRLKAFLEKNGYAYTQLNPLEAKEQLDSLRVRKTDKIDAETLAISQFVLNRKPTYIQEEVYQELRDLSRFYQNLTEDIVRTKNRLHKVLQVTFPEMENILSPPTREQYWNLVMTFPYKDFVLELSKDELLEGIRQSTSKRISDKRVAYLAQKLAALANQSYCAVKKNSPILEEIHYYAKELLRLSEQRQAVLEQMVELAQPLPEYEILLSIPGIAETTATSMIGELGDIRRFQSANQINAFIGIDLRHYESGNFLAKEHITKRGNPYARKILFKCIHNIAAASHTNHCHIADFYEKRKRQSQTTSTKPHTIASIHRLIRTMYYLITHNKLYDYTSTQNR

SEQ ID NO: 309697 - protein, 406 aa, unidentified
MKQIVSVGIDVSKGKSTVCAMIHPNTIIKESFEVLHTVEEMSMLADYIGSLDGEIRIVMESTGHYHLPVAQFLYQKGFFVCVENAYIIRQFSRIMLHGAKTDPLDAKKLAKYGLAYWSELKPYKFHPSCYTELSLLSKQYQTYIKLLIAAKQNVIHLMDEMLPGFKEALDTASSVQFSKVKYVDFAKEFYHVDMIKTMGKEIFRENYKQWCKEKGYRFQSEKADELFHLAEDGIPTLPTEFPSTRLCMEVATEQVSQLGYALEQILSQMQNLAKTLPEYQTIRQMGGMGEKLCVRFIADIGDVRRFHNGKALVAYAGIDAPPYQSGQYTGTKRRISKRGNSALRKTGYEVMKSLKSHPPKTDTRVYDFIIKKENEGKSKKQAKIAGLNKFLQIYYVRVMEIYKNIA

SEQ ID NO: 309698 - protein, 310 aa, unidentified
MDAIFVGIDVSKDRLDVHVRPTAEAFAVSRDGKGLEELVNRLVTLIPSLVAVEATGGFETIVAAAIAGAKLPLAVVNPAQVREFAKAIGKRAKTDPIDAAVIAHFAEAVKPEPRAVPDEAATLFAELVTRRRQIIEMIVAERHREKRVLNTRVRKSLARLIASLEKELHEIDGDIDTMVRGSPVWRAKEDLLASVPGIGKTLARTFLAELPELGQLDRRSIASLAGLAPYTRQSGRWRGKSMISGGRTAVRSAAFMGALTAISHNPVLKAFYRHLIASGKPKMVALIAVARKLLTILNAILRDQRPWQIA

SEQ ID NO: 309699 - protein, 372 aa, unidentified
MGHHTEVFVGIDTSKLRNAVAVADDGRGGEVRYLGEFSATEAAIRKLVAKLAAKCCHLTFCYEAGPTGYGLYRLLKSLGHDCLVVAPSLVPKKAGDRVKTNRRDAVSLAKLLRAGELTAVWVPDERHEAMRDLSRARQAVMKDLQGKRQQISSLMLRLGRIYPGKTTWGPAHMRWLMSQKLEHREQRIAFEELLEGIRQESERMERLEDAIREVVPEWSLAEVVAALQAMRGIDLIAAVGVLAEIGDLSRFQNPRELMGYLGLVPTENSTGDKVKRGGITKAGNGRARRILVEAAWSYRYPPRVSRDKQPKVEAAPRRAREIAWKAQTRLCGRFRSLERKGKRRTVIVTAIARELSAFIWAINRELMPPRQA

SEQ ID NO: 309700 - protein, 345 aa, unidentified
MHIASIGIDLGKTTFHLVALGERSKVLVRKKFSRAQLLAYTANLPSSRIGLEACAGAHFMGAALREQGHEVRLIPAQFVKPYRKSNKNDFIDGEAIAEAVTKQNMRFVPIKTPEQLDVQAMHRVRDRLVQRRTALINEIRGFLLERGITFPAQPIHLRKNLPTVVEDAEQNLTPRLRWLLDRLWQEWKQTEVDIETVTDEIERISNEDERCRRLRQIPGFGPLVSTATVAAIGNGAAFRRGRDFAAWVGLVPRQYSTGGKQKLFGISKRGNIYLRRMLIHGARAVLFRIKYDTAGLGQWVHRLSQRAPRNKVIVAIANKLARIAWAVLSSGKDYRHQPLPQRAAA

SEQ ID NO: 309701 - protein, 388 aa, unidentified
MQSPRFVTYSAIQSSVSFLNKASNRNLGSRPIMKVLIVFRSVNGYIIKVKANLMETVYFLGIDISKEKIQAALTLDGINMFEMEVKNTTKAMQSYFGELKKKFKFSKEQLMVCLEHTGIYSYPLLDYLTSIEIKVCVESALQIKQSQGMKRGKSDQVDARRIAQYAYKNYRELRFWKPQRGVIQRIKALLVVRERLVKTKMQLATPLDECQDYIEESIRKRMVANCKGSLQGLAKDITKIEQEIDQLIQGDDKVKEQLNCASSVPGVGKITALNVIVATNEFEKISEAKKFACHAGVAPFKHTSGTSIRGRTRVSKMANMTLKKLLTLGAMSAIRWDEEIRVYYKRKVAAGKNKMSVINAVRNKLISRIFACVENKRLYQKVYQHALA

SEQ ID NO: 309702 - protein, 369 aa, unidentified
MKKHITFVGLDVHKNSINVALADGDRNGDVRYYGAIGGTLDDLDRMVKKLSSPSRELRFVYEAGPCGYDIFRSLTEKGYACAVASPSHIGKKPADRIKTDRRDAVMLARLHRAGELTYVFVPRVEDEAMRDLTRAREDAIKAQRVARQQLGGMLLRLGFRYQGRTTWTPAHIRWLANQKMPSPSQQVVFQEYIYAIEETTKRVERLTRQIEELVPSWRMAPVVKALHALRGVSRIVAATMIAEIGDLTRFENPRKLMAFLGLVPSEHSSGQKKRQGVITKCGNGHARRVLIEAGQAYSYQARITPLLLKRQEGVSKEVKDISWKCQVRLCARFRRLSAKGKNRNTVVTAIARELAAFMWSIAKQVPISV

SEQ ID NO: 309703 - protein, 423 aa, unidentified
MQTDRANQQQYAAYIGLDWGDQQHAIALQAAGADQVEAYTVKQTPESLHDWVLSLRTRFGGRDVIIAIEQSRGAVINVLLGYRFVHVLRVPPKSLARYREAFYPSGAKDDIPDASLLLEWARDHRDKVKVWIPDKPEIRALQKLTEFRRGTVGRRIAITNMLTQSLKEYFPQALSWAGELDTPMACDFLDKWPTLEKLQKAKPAQIRKFYQEHGCRRTEVVQQRLEEIGSARPLTEDSAVISTSITVLETLVPQLRCLIDAIDRIDAQIHKLFNKHEDRDIFDSFPGAGRVMAPRLLAAMGSDRNRYDTALEVQQYSGIAPVTERSGKSKWVHRRFACPKFFRQSFHEFAGLSIRYSSWARAYYQMQINKGKNHHAAVRALAYKWIRIIYRCWQKRVPYNEEIYLEALRRKNAPLLELLEPAA

SEQ ID NO: 309704 - protein, 342 aa, unidentified
MQNDTRIAVDLAKSVFEIAVSDRPGRVGRRERLPRAQFLNFFAQQPAATVVMEACGSAHYWGRRIEGLGHRVVLLPPYHVRPYVRRNKTDRTDAKGILEASRNEDIRPVPVKTVSQQVLTSLHRLRSGWMSERTARINCLRGLLRELGFFIPVGARQVIPAVWALVEDADADVPDALRPFLAELCQEIREIEARVDRVEKQLQAMAQQLPMVGQLLTIPGVGLLTATALLAFIGDIRRFPSARHLASYIGLTPREYSSGLRRHLGRISKRGDGYLRTLLIHGARSVLLHARADQSDRLRGWAHRIGKTHVHNKAAVAVANKIARVVWAVWTHAQPYQPTLAA

SEQ ID NO: 309705 - protein, 335 aa, unidentified
MQVYGIDLSMEKFDVNFIDKNGKEKKKQVKNRLSAISKFLENVSEDAVLCVEHTGSYGDLLVYLCNQLGIDIALIPGYTIKHSLGMIKGKSDDIDAARIREYGERFFDKLKYKQYDSEEIVELKSLYTLRSQLVKARKVLRTGEHGRSNVPIQSVSAHKYADKAIFNLNKEIEEVESEIEAIITANNELNDNYELVVSVKGIGPVIATDLIIKTGNFLVIDTARKASSYVGICPFPNASGKMVGKAKISPFGDRKLKALLYMGAKSAVKHNKEYRLYYEKKKLEGKPHYLIMNNVSNKMLRTIYSVVKNKTPYSQDYICLDPREKNINSSTEIVA

SEQ ID NO: 309706 - protein, 401 aa, unidentified
MKRLSGGIDVGSGSHHITILDEDDNILYNQKVPHKLNEFTKSINLFKQIEKQEGGKISFALEGKNGYSNPLDRILLDKGFTLYNIDNFKLKRFREAFAGEWRDDERDSLMLSKMLKLKDHINSEREKVFIKIEKPSPLTESLRLLSRHQQTLIDEKVRLVNRLGKKLLEVCPQILRLAKLKNKKIIAVLAKYPDFSKYKRITLKSLLKIKGIGKKGAFFLLKRLNNIEYIPGLTDIYKTIILSYAQRILELQKEISDIDKSLDEIGEKNKEVNHLKTIPGVATKLASRLIGEIGDINRFPSEKQLAIYCGVACVNNDSGKITKARVVYKANKICKQTLINMAGCSILFSPQCKAYYLKKRAEGKAHNHTLRCLARQLIKVIYKMLTEDRDYIVRKELKKVA

SEQ ID NO: 309707 - protein, 404 aa, unidentified
MPSDTRRGRRQQETREFRAVRKDLLALADWLRCWGVTKVGMEATSDYWKPVYFLLEREGFDCVLYHAAQVKALPGRPKTDKLDSAWLAKITGRGSLPGSFVPPEDIRRLRTHTRYRRHLVQARTAEKARCEKLLEDAHLKLSSVITNIHGVSGRDMLTAVIAGERNPKVLAQMAQTRMRGKIRQLEDALDCSFFTEQHAFILQMMLANIDHLTAQVSELDAKIEVLCEPYARQIAQLDAIPGFGVITAQDIIAETGVDMTVFPTAGHLASWARQAPQVSESAGKRKGKNATGRGNPYIAGALGEAAVNAGRTQTFPGAKYRRLCNQMPKKKAQGAISRTQLVICHALLSDPDAVYTDLGTDYYERRQDIRRRARSHVRGLERLGYKVTIQAINPDTGELLAAAG

SEQ ID NO: 309708 - protein, 404 aa, unidentified
MKGPIVSIDVSKGKSDYQAFKNLNVKYTGSRSIKHTKEGFDEIVNLVREMEKKLETEVCVVYEATGVYHRVLKKVLEDNNIKQFIINPLLSAKTRKNDSLRSPKTDKLDPKSIAKTYYSHSLHNSHKPETIYHELRELSRYYEDILVHIRKDKVAFRAQLDVVFPGYDTLYDDLYGPVALAVIEKYPHPEMLQKKKINTVSKVIQSKTCHRQAASDTMADKAIEYSKTIYSGCDKDDIEVLILQRFIKKLKEDMAEAERTIGEMIKLAQELPDFSIIKSIPGIGDNLAARIIAELGDMTRFKKKNELVAFAGLDPRISESGQNDGDHMHITKKGNKRLRCLLYLAVTCSIRLKRDDNSIKDFYIKKKQQSNPMCSKAAKTACASKLVRIIYSMCKTGELYQYNK

SEQ ID NO: 309709 - protein, 413 aa, unidentified
MKSYIGIDWSEKRHNVCILNESGACLSRFQIPHTQAGFLHLEQQLSQVNQGAADCMVGIETRNNTLVDFLWSRGYTLFILPPNQVKSNRGRHRASRAKDDDSDAHLLADILRTDQGRLIPWQADGDLVQQMRSLLSWIDDLTDSIKRQRNRLRANLLRYYPQPLAAFGNMISQFSLKVVAAYPSPGHLRALNYQQFVVFSRSQGYYQVGNLPAYYAQLREAMPAAPETIWPALEQQTVYLARLLLTLMEQKQSTISQTGHLFEQHPDAAIFASLPGAGDLLRPKLLVMFGDHRTRYPRPNILPAIAGTCPVTVQSGRSRFVRFRWACNHSHRQTAQLFAKHSIRKSVWAAGYFNRAVARGMSDSHAYRCLANRWLHIIWTLWQQRVPYDEAFHMSHVARHRQPLIGSVSAVPS

SEQ ID NO: 309710 - protein, 355 aa, unidentified
MERRTAMQHYAGIDVSLELLSVCIVDAKGKIVKEAKVGSDPDTLVAFLRGLDLAIERIGLEAGPLSQWLHAGLTSAGLEAVLLETRHVKAALSAMTVKTDRKDARGIAQLIRMGWFRAVHCKSAGSQEVRALLVARKLLLSKLLDVEFSIRGILRGFGLKMGMVTRKRFEARVRELYAGHAMLEQICSAMLTARSALQTEYAKLHKALLVIVREDEVCRRLMTTPGVGPLVAITFKTGVDDPSRIHKSKAVGALFGLTPKKYQSGETDVTGGITRAGDEMVRTALYEAASVLLSRVTRFSALKRWGMDVAKRRGTKRAKVALARKIGVILHRMWVDMTSFRWTKGAPTTMRLARV

SEQ ID NO: 309711 - protein, 391 aa, unidentified
MTATHQRHCTSTKRVLYLAFELGWTEWKLAFKAERGQAPRLRGIGARDLVALHKEIAKAKQRFGLAEETPVVSCYEAGRDGFWLTRYLATQSIDNLVVDSSSIEVNRRQRRAKTDRLDAAKLVQLLVRHHEGEKVWSVVRVPSVADEDRRQLHRELEALKDERTEHVNRIKGLLASQGVAAEVDGKFGALLVRLRLWDGQPLASELQARLLREWERWRLLERQIQDLENERRKRIRRDETPRVEQVRHLLQLAGIGLNGSWLLVYELFGWRQIRNRRELAGLLGLTPTPFQSGPTAREQGISKAGNRRRRRLMVELAWGWLRFQPDSALSQWYERRFGQGNRRLRKIGIVALARKLVIALWRYLETGEVPEGAAQVDWRPKVNGLARKKAG

SEQ ID NO: 309712 - protein, 383 aa, unidentified
MDSVLYVGIDTSLGAHVVCAMAADGQVVARTTVPNDQAGAEQFVAWLHPHAAPYARLAIGVEATSVYHVPLMEWLTQTPDLQRWQPTWYVLNPKVVQKFRETYVDRGKTDRADAALIADVMRFGRVTPWTPPDPRYAALQVLTRHRRQLSHLITQEKNRALVQLFCVWGQYAHTDEPFFSNVFGVASQTVLERYTPDTLAAIPLADLVAEIAAAGRQRLKAPDDIAQTLHRLARRAFRLHPDEQDARHQSLVLHLDTIRALEHQQQALDKVIARDMQAFRQTLTTIPGIGPVYGAGLLAEIGPIERFPSENALAKYAGLTWRPHQSGNFDADIRPLTRTGNVYLRYYFIEAAERVRVRDPQFKAFYEKKYHEATHHAISGRWS

SEQ ID NO: 309713 - protein, 344 aa, unidentified
MQHYVGLDLSVKETSVCIIDKAGKVIREVKVATKPVPILAVLTEEALAIERIGLEAGPLSQWLYSALAEAGLPVICVETRHMKAALSAQINKSDRNDARGIAQMMRVGLYRPVHVKTLASQKRRMLLTSRQLLQAKALDIENDLRGTLRNFGLKVGMVGTVKFEARIRELVADHPDLAAIVEPLLIARRVLREQLDVLHHQLLEIVRHDEVCRRLMTTPGVGPVVALTFRATVDVPSRFNNSKAVGAALGLTPRRQQSGEIDRMGGISKSGDAMMREMLFEAALVLMTHSRKWSWLKAWGMKIARHRGMKRAIVAVARRLAVIMHRMWVDGTEFRWTRKEVAAT

SEQ ID NO: 309714 - protein, 387 aa, unidentified
MNTITTTASRNILAIDLGKYKSVACVHDQGTGECHFVTFDTTRAELRKLVGKEQPAVVIIEACLLAGWVNDLCAELGVRCLVANTASEAWKFKHLKRKTDKDDALRLAQLYMLGQLPTVTLPPATVRQWRSLIACRQTWVGRRVAVQNRIRALFVAQGLPAPRGAKAWSETGLAGIALQAKTLADCGPDELWRGLLELALTEYRQVCALIAQAETRLDALGKHHADVVLLQTAPGVGPRTAEVVAAYLNDAARFKTGKQVSAYSGLVPRQHQSGELDRRGRITKRGPALLRKLLVECAWCMIRYNAWARGIYQRLTGGGQRRKKQAIVALARKILVRCWAMLRDRQPWCDPQAGPKQPPPSKRRRQADAQRRRQEKAQAALASTATE

SEQ ID NO: 309715 - protein, 328 aa, unidentified
MYLRPHHHSEDTTMAAISKDIIANIGIDLGKNTFHICAMNDKGTIVMRERLTRAALPKRLANIPPCLIGMEACAGAHHIGRQLVTLGHDVRLMPAKYVKPFLKGHKNDYRDAEAIAEAVQRPTMRFVHFKSDEQLDLQALHRVRSRLVGQRTAVINQIRAFLLEHGIAVRQGPGALRQALPSILARRTDVLSPRITHLVEDLTDDWRRFDQRIADVTREVEELAKQDEHCKGLMGVPGVGPITASAMVAAIGDGAAFSKGRDFAAWLGLVPKQISTGDRTILGGISRRGNRYLRTLFIQGARSVLQRSDGWEKKSFGRWLVAASKRLP

SEQ ID NO: 309716 - protein, 323 aa, unidentified
MTVYIGIDIASKKFDAAELRDGAYRCKTFENTPTGFTALYNWLKTNSIPDIHVCLDATGSYGTALATFLYEKNLKVSVVNPARIKGFAASELTRTKTDKADSRLIARFCKAAQPDPWRPVPAPVRKLQVLVRRIGALNGMLRMECNHRENADIDAQESVERMITHLKMELKSVRRAIKEHISNVPELKKQNDLQLSIPGIGAVSASLILSFMASKDFTKAKEVTVFLGLNPRHHQSGTSVRGKTRMSKMGDAKLRCALYMPALVALQHNPDIRAFGLRLLAAGKPRMLVVGAIMRKLIHIIFGVLKAGTGFSSRVTVNAGFNQ

SEQ ID NO: 309717 - protein, 388 aa, unidentified
MQFAADRLEASTAIRTDLCAIFISLELSRSSWVITSLSPGSGEKMSKHTVRGGDVAGLLKLFAQLREKAKGRTGKVFPLIVIQEAGLDGFWIDRVLHSEGIESHVVDPASIATSRRRRRAKTDGIDGEALIRALLAYKRGEPRVCSMVRVPTPEDEDQRRLCRERKVLTIERVQHVNRIKGLLFSQGVSGYEPLRRDRRGRLDALQTGDGRPLPQHLKAQVCRELDRIELLLAQIKAVEAERDALLAAEQTKAPVPPAMLLGVKGIGPEFAAVLWSEGLSRPFENRRQVAAYAGLAPTPWQSGSVNREQGISQSGNPRLRTTMIQLAWLWLRHQPDSALALWFHDRVKRNGGRLRKTTIVAVARKLLVALWKYVTAGIVIEGAVMKTA

SEQ ID NO: 309718 - protein, 304 aa, unidentified
MSSYVGIDVAKLELVVHVLPQEQGRIFANSAVGLAELVVWLQQMPCQRIVFEASGGYEQALLKCLHHANLPAVRLSAQRPRELARALGVKAKTDALDARVLAVAAQLLPATVSEPLPETTAILREWLQLRSALVGERDSHRRRLQQLQHPQVQAFLQEWVAKLQVQIKDLDKLLAKLVRDEPSALDKAPGLGPILRATLAARLPELGRLDRRQIAALVGLAPYNRDSGRWRGQRRIAGGRADVRRVLYMATWSAIRGDAALASCYQHLVAAGKPKKLAVTACMRKYLTRLNAMKRDNAPWRTGA

SEQ ID NO: 309719 - protein, 345 aa, unidentified
MHSTRVGVDLAKDVIQVCVSKRKKVQSNIEMTPEEFLCWLNTSKPATIIFEACSTSNYWKQKALQAGHDARLISAKLVSVVRQNQKTDKNDALAIIQAALLPDVTFIGGKTVEQQQLQSIKRLRELTIKQRDASQNQIVALLSELNLRISKSRGSITRSIEDILEDADNELSTQCRAAISIAKEQLSLLIKAVKSYDECLEKSASLHPDCKKLLKLEGVGTLNAINLYLAIGCAEIGAFSKGKDASACIGLTPIQHSSGGVVKLGSIGRFSRNSALRSQLVCGAMAAIQHIVKREAKTKKEVWLKALVERRGKKCAAVALANKTVRTAYAMLTHGTEYRAELLTA

SEQ ID NO: 309720 - protein, 320 aa, unidentified
MMAQNDLVVVGIDVAKDKVDACIRPLSLRQSCPSTVQGHRKLIAWLRKHKVNKAVMEASGGYERNWAKVVREAGIEVRIVDPKRVRSFALSAGRLAKNDAIDAEMIAWFAETFSEAPSQTHDAAQEELLALVKARIGLVELKMRLQSQSEHAAPGLVQKAHAGVLKNLVTEIAKLEAAISAKIKSTPHLAERAEIIESVPGFAETTSANLVAGMPELGQVSNEIAAALLGAAPYDDDSGKRHGERHIKGGRRWVRNAIYMPCVGAATQNNPVLKAFYDRLIAKGKKPKVALVACMRKLIVILNIMIARRQKWNPSLYVPN

SEQ ID NO: 309721 - protein, 347 aa, unidentified
MLADELDFVVGVDTHRDFHALGVIEVRTGAVAFEATVPVNGSGYLHALGLAEEHAPGRRAFAIEGTATFGAGLTRFLVGHGERVFEVGRLRRERRSGGKSDALDAIRAARSVLAQERAAMPRSSGEREALRALMAAREGASIAKTAGLNQLHALLVTTPEPLRYELRGLTLSPLLHRLAATRPESRRDPELRGTLLALRTIARRVLQLTAEERQLAREIDMLVRRLAPQLLDQPGVGALSAAQLLLSWSHRGRLTNEAAFARLAGTAPVPASSGQTIRYRLDRGGDRKLNRTLHLILNTRKRTHRPTIDYIERRISEGKTRREATRCLKRYLARSLYRLLENPPAMT

SEQ ID NO: 309722 - protein, 422 aa, unidentified
MLQETYDTEELIQRVAALDIGKAELTCCVRVPSSTAPGKRSQEVTTYKTMTRSLLVLADRLAELGVTRVVMEATSDYWKSPFYLLEAHGFEVWLVNAKDVKHLPGRPKTDRLDAVWLCKVAERQMLRPSFVPPQEIRQLRDLTRYRVDLIGVRTAEKNRVEKLLEDAQIKLSVVASDIFGVSGRAMLAALVAGERDPKVLAQLARQRLRAKLSLLEEAFYGRFSDHHAFLLQTMLDRIDQTSAAIATLEAKIEQQIVPFQAAVDRLDEICGVGRAAAQVLIAEIGVDMGRFPTPGHLVSWARFAPGVKESAGKKKGKASTGRGNPYLARVLGEAAVAAGRTNTFLGERYRRIARRRGAKRAVVAVGRSILIIVWHLLSDPDARFHDLGPGFYDTRIDADRKRRNHVRQLEALGYKVTLEPAA

SEQ ID NO: 309723 - protein, 429 aa, unidentified
MRTESTPGARGPVFCGVDTHADSHWLHVLDWRGRKVLSRRFPADAAGYEALAGAIAAAGEPACVAMEGTSSYGAGLTRHLASLGMPVREALSPARMQRRRPGQGKCDEADAERAARAAMSGSKLGTPKSQDGWVDGVRCMLAARSGAVKARTSAINTARSLLATAPEGLRSRFRGMAGPRLMEELPSVRAEGALGAALGALADLWAAARDAALDMERAIEASLEENCPALLAMYGCGPVSAAKLAVAAGDNPGRLRSEASFAAICGACPIPASSGKTVRHRLNRGGDRQANSALHEIARQRVMRDPETAEYAERARGRGKSDREVMRCLKRYVAREAYRALMRPHEIRRPEDASELVAARRAARVSQVRAASILGTSEKHISMLERGQRELKPIRRAYEAWVEAGLPLDWDRQAFEAERKMNSKKHLAK

SEQ ID NO: 309724 - protein, 346 aa, unidentified
MKITTIGIDLAMVVFQIHGVDERGKVALRKQLKRAEMSGYFANLEPCLIGMEACGSAHHWARKLEGYGHTVKLMAPQFVKPYVKTNKNDMADAEAICEAVSRPNMRFVALKNVEQQAILSVHRARQGFVKARTAQGNQIRGLLSEFGIIIAQGIGAIAKRVPEILEDGENGLPGTMRNLIERLTENLKEMDRQAKELEAQIQLWHRDNAASRKLAEIPGLGPITASAIVATVGDAREFKNGRQLAAWMGLVPKQNSSGGKQNLLGISKRGDTYLRTLMIHGARSVVRVAEKKAEPGSWMRKLMDRRNKNVAAVALANKNARIVWALLAHDRMFRLDYIPAATAAGM

SEQ ID NO: 309725 - protein, 370 aa, unidentified
MLDTTTFVGLDVHARSIKAVSLDVMTGEVRCATFGYDAGAVAEWVRSVDPKARCVYESGVTGFDLQKRLSGLGVDCVVGAVSKMIKPSADRRRKNDRNDAEFLARMLSVGNVVEVWVPDDECEAARDLTRALEDARDDLSRAKQRLSKFLLRHGLAFDERTPTGRRKGNWTRAHWSWIESIRFAEGADNDVLAYYVDAVRRAAEEKARLGGLVEAEARKPRWRRRVDSLRCLKGVDTATAADLVFEAGEFSRFRNARSFAAWVGLTPSEHSSGESDRRGAITKAGNKHLRKALVEAAWHYLTCSGRPKDLAKGQAPDRGARRHAAKGVRRLVERREALLARGVHGNKANVATARELACWVWAVGLMAEEA

SEQ ID NO: 309726 - protein, 342 aa, unidentified
MKLTTIGMDLAKNVFQVHGADAKGNRVMKRQLKRAQVLPFFANLTACRIGMEACGSAHYWARKLQALGHTVQLIAPQFVKPFVKRNKNDAADAEAICEAVTRPNMPAVPIKNVEQQAILSVHRARQGFVKARTAQANQIRGLLAEYGIAIPQGISHIAKRVPEILEDGENDLPGSFRLLIQRLVDHLKELDRQVGELELDIQRWHRDNPASQRMAKMPGIGPMTASAMVASVGDARNFKNGRQLAAWLGIVPRQHSTGGKSTLLGISKRGDTYLRTLLIHGARAVIRAAERKPDTDRWLKNLLARRNKNVAAVALANKNARTIWALLANDREYDAHYGRAVA

SEQ ID NO: 309727 - protein, 362 aa, unidentified
MRIIGCDLHAGQQTVAMLDTTTGEIVNMTLLHEGNNVREFYSTLPGPVRVGIEATGSMQWFVNLMEELGIECLVGHPAEVRAAEPRKQKHDRRDADLILKLLVENRFPAIWLPSKELQDLRSLLRHRHQWVRMRTRIQNALQAIALANGLRRGPSLWSQTGQHTIASLPLAPHTAYRRSELQAVYAKFEVEIEKLNQRVEEQARGRAGARLLMTHPGVGPITALATEVFLGDPARFADSKALASYVGMIPREYSSGGRQRLGGLSKQGNPLLRFLWGEAGMHAVRRDPELKRFYHRKLIQKGLGKARVAVARKLGIRMWIMLRDQIEYNEFCRRGQKQQKSGDACAGMPETRNGAKSHRPVD

SEQ ID NO: 309728 - protein, 339 aa, unidentified
MNATTFGLDLAKRVMQVHWVETEAGEICRRQLKRGQVLEFFARRAPAVIAMEACGSAHYWGRKLEGLGHQVRLIAAQFVRPFVKTNKTDAADAQAIWEAAQRPGMRFVALKIEGQQAVLMLHRMREQLVKMRTMQVNQLRGLLYEFGAELPAGRSAGLERIPGELAKLEDVLPAMVIDTVREQMKRIEGLDQDIAAIERRLAVWKKDDAASRRLMAIPGVGLLTATAAVATIGEARAFKSGREFAAFVGLVPRQAGTGGRVKLLGISKRGDVYLRTLLIHGARAVISHGKQREPWLEQLLARRPMNVAVVALANKMARTIWALLAHERTYRRDYAARAA

SEQ ID NO: 309729 - protein, 352 aa, unidentified
MKEFIALDSHKYYSLVEREEVQSCEAKQCRIEHDRGAIRGYLSRCEPGTVVAVEATGNWYWIVQEIEDAQLCPALVHPRKAKLMMGMINKTDKLDVHGLNRLQRNQTLPTVWIPPGDLRDLRELTRTRMVLGHQRTRLKNRILATLSKYGLLLSREASDPYGATARPLMNQAVAQLPEQAQYVTRALLKQLDFIQEQIRELEQRLKQLVKVTPAMILLMTLPGIGWLLAAVVALEIGDVTRFASAERLASYAGTTPRVHSSGGKTRYGGLRPDVNRYLRWALAEAGNSVAVNHTRQPQRHVSQLYRRLRERRGHAKAVGAVARHLAEASFYVLSKNESYRDPALKEGRSMEG

SEQ ID NO: 309730 - protein, 381 aa, unidentified
MKQSSSTNDETSQPTLYLAFELSNQHWQLHFTVGQGQRPRQRTINAGDLAALTQEISLAKQRFDLPSETPVLSCYEAGRDGFWLHRFLASRHVTNLVVDSASIEVSRRSKHTKSDRLDGEKLLTMLLRYHNGDARVWSVLQVPSLAAEDQRQLHRQLLALKGERTRYVNRIKGLLVGQGIHLEVDDDFLPHLPELRLWDGTPLPTGLAARLRREYAGWQFVHQQILALETERRTAIRESQEPVMAQVRQLLRLKGIGENAAWLFVMEFFGWREFHNRREIGALAGLTPTPYQSGDDDREQGISKAGNTAVRAMAIEIAWGWLRFQPESALSQWYQERFGAGGKRLHKIGIVALARKLVIALEHYLTSGEPPAGAALKPALA

SEQ ID NO: 309731 - protein, 359 aa, unidentified
MVQGTSVGLDVHALSVVAHAIDEETGKIARARLCPEHGEVLGWLHQLRVPVRVTYEAGPTGFGLARAITEAGMQCVVAAPSKLQRPAGDRVKTDARDAAHLARLLRLGEITEVTVPEPEIEAVRDLVRAREDARADLMRVRHRLSKLLLRQGIVYYGGTPWTCVHEQWLRRQRFDDIHLKAAFDYSFDAVLAATAARDRLDEQITEVAASPRFADQVNRLGCLRGISALTGLALTVEIGDWSRFTGSSIGAYVGLVPSEHSSGTSRVQGSITKAGNTHVRRLLIESAWHHRKSYSTSGPTLRARWAKVDPALRARGHAGNRRLNKRWQTFTERGKNPLVANVAIARELAGWCWSLATMN

SEQ ID NO: 309732 - protein, 367 aa, unidentified
MLRFRLMVKRGHRIVTGPKHQKEKRSMEYFAGLDVSVKDTSVCIVDDTGKITREVRVASEPAALLAVLRNPTYCFKRIGLEAGPLSQWLFGALAEADLPVICVETRHMRAVLKAQINKTDRNDARGIAQMMRVGLYRPVHVKTLRSQKLRMLLTHRKLLQSKAIAVDNDLRATLRNFGLKVGMVGTTKFEARIKQLVENLPDLMLLVEPLLVVRRVLREQISVLHRRLLAVVRDDEVCRRLMTVPGVGPVVALTYRASIDVPARFRRSKSVGAVLTPTRDQSGETDRPGAISRCGDAMMRTMLYEAAQSMLVHSTRWSWLKAWAMKIARHRGMKRAIVALARRLAVIMHRIWVDGTEFRWTREAAAA

SEQ ID NO: 309733 - protein, 319 aa, unidentified
MALPLTIVGIDVAKDWLDLWLDPLKRFERMRNDAAGWARLLDCLTRLGPQAGITVAFEASGGYERGLRQALITAGFSVRRLNPLRVRLYARSLGRNAKNDRIDARVIARYAAAAETMPEVLDPGRERLAELVSHRRSLIDERVAIGNRTAMLQEPHPIAHNRQRLALLERQIGEVDRLIADTVGNTPQLVAKLRLLTTLKGVKQGTAATLVALLPELGQLTRRAIAALPGLAPFDHDSGRRKGTRAIAGGRAAVRTALYMAARAAARSTSPLGHYYHRLIAAGKTPKVATVALMRKILVTLNAMLRDRQPWKHATAIAA

SEQ ID NO: 309734 - protein, 349 aa, unidentified
MDSMPPTGRDVIGGVDTHQDLHTAAVVDTAGEVLATQAFATTRAGYRAMLAWFRSYGDLARVGVEATGTYGAGIARHLGAAGIPVLEVTGPDRAARRGRGKDDRLDAIAAARAALTGQRVQVAKDRSGAIEALRVLRTTRKTAVRCRRATLQQLHNTIVAAPDELREQLHHLTRMRLLRTCAAWRPDLVAYRDPAVATKIALRSLARRILDLGDEIADLDQLIAPLVAELAPGLLALPGVGTQNAGELLVTAGENPGRLRSEAGFAMLCGACPIPASSGKTNRHRLNRGGDRQANSALHMIVVYRMRRDARTKAYVSRRSAEGLGKREIMRCLKRYVAREVYHVLVAGA

SEQ ID NO: 309735 - protein, 351 aa, unidentified
MDRYIGVDVHMQSCTVAVMGATGRRLREEVVATNGRDLVEAVRKVDGQRHVCLEEGTQSEWLYELLRPHAEEVVVVSPGESRGQKSDARDAWARAEELRVGSIETKVFKAGGRYTELRAAVRAYGMLVRDSVRAKNRLKAIFRSRGISDLDAEVYDARTREKWLAKLGPSQRRSAELVNQQLDSLQDLVEEAKERLQTESKKHPIIRRLATAPGIGPIRAAQVVAVVVVPERFRTRQQFWSYSGLGIVTRSSADWVRENGRWIRAPVMQTRGLTRKRHPLLKNVFKGAALTVARQPEHPLKRAYDRLLEAGTKPNLARLTIARRIAAIVLAMWKHQEDYDPGNQQAPSDKH

SEQ ID NO: 309736 - protein, 345 aa, unidentified
MTQCNVIAIDLAKDIFQVCIMTPNGKITFNKAMSRAKLKEWLVKQKLSLVAMESCGGAHYWARFAKSLGHKVMPIPPKQVKPFRTGQKTDANDAIAIAVASRAANIKPARVLTIEEQGLQSVGKMRDLLDKQKLQLSNQVRGLLLEFGIIINKSIKSFKGRIPEILEDAENQLPMPMRHSIGKMWALYSRLEDDFKTLNNELIRLTGQDNDCKRFMKLEGVGPISSMRLKIQLGSGEHFNSGRQVSACIGLTPKQHSSGGKVQLGSVGKSSCDKPLRSCLFLGARAVVAKLKNRPAKTEKEKWLKALIERRGANCASMALANKNARTAYALLKNNTDYSPVLIVA

SEQ ID NO: 309737 - protein, 424 aa, unidentified
MHHRQVNCMKDWKDLTHYAGFDWAKEHHAVVIVDAEGHIVADFEFAHSLEGWKGFVEKTSAWPQLGVAIETSQGAAVDQLLQREYRVYPVQPVAARSYCQRKAPSGTKTDHLDAWALADALRVDGQDWKLLQPLDPMTQQLRLLCRDEVSLIEQRTALVNQLQQALAEYYPTALEAFEDWTQAFTWEFVLAFPTPPALVGAGRRRWEKFLHTHKLWRSETAPKRLQLFAQADQFQASEPIIRAKSQLAVSLSKLLCTLGQQLKLYRQQIEALFQEHPDRALFGSLPGAKKVLAPRLLGVVGNDPDRYGSPEVLQCIAGTAPVSYQTGQINKVRIRWACDKFMRHTVHLWADCFRKKSAWGQVYYQNKRKEGMSHSCALRCLGQRLLKILFRILESKTPYDAELHARNQQKHGSWVLKLIEAPAA

SEQ ID NO: 309738 - protein, 323 aa, unidentified
MLITTDPVQSTFVVAGIDTHKDTHQVAVLDLLGRVLGSNAFATTTVGYQNAVDWIAGFGVIDRVGVELTGSYGAGLTRYFTAAGITVLEVNTTDKATRARRGKSDTIDAISAAQKVLSGMATTIPKDTTTVVESIRMLMIVRDSAVKARTQALNQIKDLLVTVPAVLREQFTGKTLSASARKATQLRGDRQRIADPTQAGKVALKRLGDRVQHLTEEITDAQKQLDTLVRDTVPTLLSRPSIGTLTAAQFLVTAGANIDRIGSDAAFAHLCGAAPIPASSGKTDRFRLNRFGDRQANRAMHMVIIGRLRNDLKTDLAAPKVSP

SEQ ID NO: 309739 - protein, 405 aa, unidentified
MEIIYPRCCGLDIHKKTVVACVITPEEKEIRTFSTMTEDILAMVDWIKSKGCTHVAMESTGSYWKPIYNILEIEELNPMVVNANHIKNVPGRKTDVKDAEWIAGLLQHGLLQGSYISSREQRELRELIRYRRSLIEERAREINRIQKVLEGANIKLSSVVTDIMGKSSRAIIEAIINGEEDTVVLSELAQKRLKNKKEELKKALKGLIGPHQRLMLKTQLAHIDFLDEQIGLLDEEIKRRMLPFEEDLERLDTIPGVGRRTAEHIIAEIGTNMDQFPSAAHLCSWAGVAPGNNESAGKRKSGRTRKGNEKLRSVLVEAARAAFHTKDTYLSAQYHRIAARRGANRAAVAVAHSILTIVYYLLKRKERYNELGVNYYKERKKEAIVKQSIKKLESLGLKVIVENAV

SEQ ID NO: 309740 - protein, 386 aa, unidentified
MQRNDLSRSLVAFDQNSTLVAVVELSLKTWLIAGLVPGLTRQPLKKQGADADALLALLHRWQGEAIKAGRKIERIVVAFEAGRDGFWLARWLRARGIESYVIHPTSIPVSREHRRAKSDRLDTELLMRAVLGWLRGEVKHCSMVAIPTLAEEDARRPNREHEHLIGERTRILNRLKATMIRHGIRNFNVKLRKALERLAGLRTPEGVALPANTLEELRRDMARLRLIREQIKEIENRRLQQLRKAPQDGTHPMLLMLAKVMGIGVETADMLVHEVLTRQLRDERAVGRYAGLTGAPDESGSKRREKGLARAGNARVRRGMIQLAWRWLMFQKDSALAKWFQARTANARRNVRKTMIVALARKLLIALWRYATAGEVPAGAKLRPAI

SEQ ID NO: 309741 - protein, 339 aa, unidentified
MKLYTGLDLHSSNSYLGIIDETGKRVYKQKLPNDRERILAALEPHRNDIAGIVVESTYNWYWLVDLLMSEHYDVHLANPAAIKKYTGLKFADDQHDAFWLAEMLRLGILPEGYIYPKEDRPIRDLLRKRMHLVRLRTSLIVSLQNIISRNNGFKLKTSDVKVLTEDRVALYLSGSEDLALAGMVSKESIDFLTRQIKKIEAVIENKVELKPPYEKLQSVFGIGKILALTIMLETGPITRFAKVGNYVSYCRKVSSKWLSNDKVKGKGNKKSGNKYLAWAYSEAAEHARRSYTQARAYYNRKMQKTNFMAAHNALAHKLARAAYYVMRDEVNFMPEKIFV

SEQ ID NO: 309742 - protein, 422 aa, unidentified
MLGVGLDWAESFHDVALGVPGKGVIEQFRFDHGPAGTQRLIGRCLELEPDPAEVRVVIETRHGLLVEALSDAGFTVLPVNPDLVARRRGPAKKKDDAEDARICCLLALDAYLELRKLIPHGENGTELRAIARDDVRAARDERRLGNRLRADLLAVFGAAIDIADGDLNAPTFLKLIQRWPSADQLATATRADLEAFARSCRHGWPDAFAGRVLDALAQPRLNVRPELARAKAGSIGLAAAQLLLLRAQRREWERRMGELLLGGRRPRPGVAPKETDPGKAFPGGETYLSMPGLGDRLAARVAGEIGEHWDQFTTPNALQCYAGRAPVTRRSGRSEFTIARRLAYNRYLGEAVQQWAFCSLTRSTWAREFYDAKIAKGDNHHTALRKLANRWLEVLWNCLRLGVPYDENVHTSNRNRALKPAA

SEQ ID NO: 309743 - protein, 380 aa, unidentified
MASMHDSARFKTTVYAAIELSKKSWVVAIARPDRDQPSIHRIAGGNLADLIGRLRKAAGEKQRIVVCYEAGYDGFWLARSLAKIGIDCRVLDPASIQVNRRARRVKTDRIDSLALLRALIAIDRGERHVCAVVRVPTVEEEDARRSHRERQRLVRERTGHINRIKGLLFAQGIRGIEPKRRRARIDFGKLTTAEGRPLAERLRRELEREYQRLELVQSQLRIVEKERDTADAQDPAVERKRELLCALQGVGGASAAILAREVFARPFASRRQLGSYLGLTPSAYDSGSTTRCQGISKAGNSWARRVLIEVAWLWRKYQPGSPLSHWYARKTADQSPRIRRIMLIALARKLAISLWRYVETGLVPDGAVMAKTTPHMAAAT

SEQ ID NO: 309744 - protein, 408 aa, unidentified
MSDFKNLVFVGIDPHKEEHVAVMIDHWGEVFFELTFPNQVSGFETLLEHVDIHTPDGKTTVFGIEDTGGLGRSCAQWLTLRGQLVKGVNPIMSSNKRKRYPHRTKTDKIDAVAVAKVLITDFTQLPEVLVDDYYHGLRQLANRRDQLTRTSTRCKNQLHKLIHDHYPNYKEFFSNPFGVTALGFWNKYPHPSMLKGAGTKRLASSLNKFSRNMGSTKAEHILALVDKEQALTIDAKMTIIVIRQIIEQLQQITNHLAELDELIKEALGQSDTQLETMPGVGPVTALNVLSRVGPIEKFSSADKLARHAGIAPVDDSSGPRTRQKRSKAGDRQLNAAIHRIALNQISIDRKGVPKCPVALDYYERKIAEGKSKLSALTCLKRRLCDIIYAMLRDKTPYIEPASRPSSAA

SEQ ID NO: 309745 - protein, 263 aa, unidentified
MTDAVLGIDVSKNTFDASLGAGTKVRSKSFTNSSDGWHQLIAWLGEHKIGRVHACLEATGRYGLGIALALHEAGYVVSIVNPAQIRNFARTKLGRNKTDQVDAVHIREYAELFKPRPWTPPSPAMRRLCELQTLRAGTVAGLTEWKNRRGSGIMDDMALSFAETTIQHFASQLEAIDQAIAETIDNDVELSAKRDLLVSINGVGEVLAGIVLAELPGPDILGSSAAVAAYAGLNPQQHQSGISLNRRVQISKIGNAVLRTALY

SEQ ID NO: 309746 - protein, 406 aa, unidentified
MEGPIITVDVSKGSCHYQPFIENGHPMRKPKQLSATIDGFQKLGQTIKDLEAKTEREDIPVIFEATGVYHRPLQKYLEDHKIRYYIISPLLSATYRKTDLHSNKTDALDCAHIAKAYYCEKELRQYQAQPQEYKRLYQLSRIYESELVHLRKRKVSLRSMLDIIYPRIDKTFKGNQNLYDPIPMEILKRYPHPSLLLSHREDTIVKTVGHRTGHLKGYTERIVHKIYEKAKECYSGCDIDDIEVVKLPSLIENVQEQKKKCDSLLKEMIEIARRCPYFAPIVSIVGIGENLAARIIAELRDVNRFDNRAAIVAYAGLNPKIQQSGDIDGLHLKISKKGNKHLRCLLYLGAQCNYRLRKEDPLYEFTKKKRQQTQCPLSSKAAYTASAHKLLVIIYSLCKNGTLYHS

SEQ ID NO: 309747 - protein, 347 aa, unidentified
MRFYTNPHPFYCGIDLHARTMYVCLMNHDGEILLHRNMKAAPEPFLKAIAPYRDGLVVAVECIFTWYWLADLCADEGIAFVLGHALYMKAIHGGKAKNDKIDSQKIAALLRGGMLPQAYVYPAEMRATRDLLRRRTHLMRKRAELLAHVQNTNSQYNLPDIGKKIAYKANRSGVAERFDDAAVQKNVEVDLALITYYDDLLTDLELSIVNTAKQHDAPTFYRLRSIPGVGKILALVMLYEIHDIRRFPRVQDFVSYCRLVKCARESAGKRYGSSGTKIGNAHLKWAFSEAAVLFLRNNPPGQKYLARLEHKHGKGKALTILAHKLARAVYDMLKRDTVFDMDKFLHG

SEQ ID NO: 309748 - protein, 350 aa, unidentified
MKDLTTIGIDIAKNFIQIHGANDKGKALFKKRLPRGKFILFMANLPKCLVGMEACGGAHYWAQELTKLGFETKLMSPRKVKKFVENNKNDANDAAACAEAVARQNMLFVPIKTKAQMEIQAIHRVRSFYVKQRTALMNMIRGLLLESGIAISQGKSALIKKLNMLQDTDNAELSEQMKNMLKNLHDSLKKLDAEIDSFKASLEKLAQEDEGCMRIRTLPGIGPITATAIIAKIGNGSDFKNGRELSAYLGLVPKQHSSGEKQVLGKISKHGDRYIRQLLVHGGRSSIWAAMRKDKSTGVFEKQDVHSIWMRNLAERIGMNKASVAVANKNARMIIALLKNEAIFQAKLAH

SEQ ID NO: 309749 - protein, 314 aa, unidentified
MASIICGVDVSSETLDARIGLDGPVAHVRRTPEGIAELRSFCAEHGAELVVMEATGGYEKLPFSLLWASGVPCAIVNPRSVRRFAEALGFLEKTDRIDAGVTADYARVKRIVAQEPASEAQARLRSLVTRLRQLTELKVAQSHQRRLLEAADAQASIDELLAVIRRQIRSFEAMIAELLDSDPLWRALDEAFREIKGVADRTVARLAAELPEIGTVSNKAIAKLAGLAPLAKDSGKRKGKRSIRGGRSSVRSILVIVAAVVQRHDPDLAAFHRRLTLAGKPKMAVRIAVARKLLVRLNAKARDARKALEPPLAA

SEQ ID NO: 309750 - protein, 344 aa, unidentified
MKQYVGLDVSQRETAVCVVSETGELIFEGKAKSDPGDLTKLLRKHAPLAERIGFETGAMSSWLWHELRRVELPVVCIDARHAHAALSVRMNKSDQNDARGLAELVRVGWYREVKVKSEESQTIRALLVARARLVSMRRDIENQVRSLIKEYGLLFPRAIGQQFRNTVSDLLGEDHQLLVVVAPLLSIHEHISRQQSEFDDQVRRLAKQDETTRRLMTVPGVGVITALTFRHTIDDPSRFRSASLVGAYLGLTPRRKQSGETDTSGKISRWGDRLLRTYFVRGGDRSALSDQKVVLPQSLGDEACQADRHEEGEGRHRAQDRRHSPLHLGRRYIVRLGLRQVSLI

SEQ ID NO: 309751 - protein, 379 aa, unidentified
MDHAITGTPADPILHGALELSKNSWLLALQFPDRAQPSLHPIRGGDTEGLLAKLMAARDRWAKVSGKAPSIVLCYEAAYDAFWLARFLKARGIECLVVDAASMQVNRRARRAKTDRIDVGMLLRALIAWGQGNRHVWSVVRVPSVDEEDLRRSHRERYRLVCERTAHINRIKGLLFGQGIRGINVKSKYKTLEIDKLVTGDGRPLPPRLASEITREIARLALIQEQIVALERERDQAPTSCKATEKKRVQLMCLNGIGPAIAAVMAREVYYRQFDNQRQVAGFLGLATSPHDSGDVERSQGISRAGRGQVRGTIIQAAWLWLKHQPKSAITRWFVQRTAGQSGRIRRIMIVAVARKLAIALWRFLKQGLVPQGAMLANR

SEQ ID NO: 309752 - protein, 457 aa, unidentified
MMETKRRREQRSMLPVHPDAAAIDIGATVHVAAVGPARDPQPVRSFGTFTGDLHRLADWFAQCGIKTVVMESTGVYWIPIYEILEQRGFEVWVVNARDAKHVPGRKTDISDAAWLQRLHEFGLLRGSFRPQGAIAALRAYLRQRERLLDYAAAHIQHMQKALTQMNLQIHHVISDITGATGMRIIRAIVAGERDPDTLASYRDIRCHSSVETVRQALIGNYREEHLFALAQALELYEVYQAKVATCDEKIEVVLERLKQPCRAPAKPLRAARHKTRQPNAPAFDARGALYAVLGVDLTQIHGLGPYLALKLISECGTDLSAWPSAKHFTSWLSLAPGNKISGGKILSSRTRPSGNRAAALLRLAATTVGRTETALGAFYRRLSARIGKAKAVTATARKIAVLFYNAVRHGMDYADPGASYYEERYRQRVLTNLQRRAKAFGYVLQTTEIKVVSMAVS

SEQ ID NO: 309753 - protein, 373 aa, unidentified
MGHHIFVGCDLHDRMMLLRYAVDQGKAKQRSYRNRRTCRAAMVRWLKEEARRLGDAEVYFAYEASGAGFTVHDELVASGLRCYVLAPTKIARSPHHRRNKCDAKDAQRLLDILRAHVLAGGELPSVWVPDLETRDAREVVRGRLATADKLTATKNEIQSLLKRHGIERPAATGKGWTKAYWRWLDGLAEGGGVLGWGGAVALTSLLAQVRMVEKEQAYFEHHIEVLSRTARYASAVEATTATKGVSVLTAMAVLTELGDLGRFTNRRQVAAYVGLVPSKDESGECDDRKGHITRQGPSRVRRVLSQSAWSWVRWDPEAKAVYERLVAKNPKKKKKIALVAMMRRLLIRLWHHGLAALGGGAPQALAGAPADGS

SEQ ID NO: 309754 - protein, 412 aa, unidentified
MEGETVIAGVDTHKDVHVLCLLDGLGRKIWSGSFGADPEGYDRLAEAIGDPGSCMVVGVEGTASYGAGLTRRLVELGYNVVEVLRPKRDKARPGEGKSDPLDAERAARKAASGRGCSVPKSQDGWVEAVRQLYVARRLAVATSTSCVACAKSMLTTAPGALRERFRGRERPKDLMPLLARGRKAGDALEESVLASLRSVAAVWKEARSQVESLDERIRALLEANAPALLGVEGCGTATAAALVVAAGDNPGRLKGEAAFSMMCGASPIPASSGKTDRHRLNRGGNRQANWALYEIAIKRMAYDERTRRYVARRTSEGKSRREAVRCLKRYIAREVYRVLMDPNPDGAAPEGPELAKMRKAMRVTQKKAAAELGLSAATLGHLERGKRRSTKLERRYYELLCELKGALPQTAY

SEQ ID NO: 309755 - protein, 346 aa, unidentified
MRFYSHHHKYYCGIDLHTSKMYVCITDAAGTVLVHRNVGANPQSLTSVIDPYREDLALAVECVFVWYWIADVCAELGVHFVLGHALYMKAIHGGKVKNDRIDSQKIAQLLRAGMLPLAYAYPKHMRSTRDLIRRRIYLARKHAELQGHIQIVRHQHNLPAFEKRIHRASNRKHIGEYFSDPIVAATVEVDSVLMEAIHHQILHINRQLTEQVKCHDPVGLQLLQTVPGIGPTLALVILYEIGDIARFPRVGNFISYARLVKCAHESAGKRITGANSKVGNAHLKWAFSEATVLFLRGNPSAQTYHEKLVSKYGKAKALSIIAQKLGRTVYSILKQRSAFDPKRFYQ

SEQ ID NO: 309756 - protein, 405 aa, unidentified
MAVMIGIDPHKGSHTAVAVADDEQLLGERRVRSAAGQVEQLVAWAAPFSERTWAIEGAGGLGYLLAQQLVAAGEHVVDVQPKLAARVRLLATGATNKNDPNDARSVAVAALRSTVPEVRVEDHVKVMKVWAKRHRDLSGHRTRLACRLHAVLCELTPGGFSGEISAAQATRLLGELEPAGAVAAARHGVAVDLVADLERVDDQLRDTKRRITAAVSASKTTLTDLFGVGPIVAAIVLGDVGDVSRFASRDAFAAYNGTAPIEVSSGARRKVFRLSRRGNRRLNHAIHMAAVTQIRHRHSPGRGYYDRKIAEGHTGKAAIRALKRRISDAIYTRLRHDALQTPRATSTGPGGQPGNDTETCAAGSHPERRLFGQATPGPAATLRPAATTRRPTKPQTVTTTARETT

SEQ ID NO: 309757 - protein, 405 aa, unidentified
MDIQPIFRCAVGIDVHLALICVCVIVAEPGLEPVVHRREFGGFQRDRRAMADWIASFKPDVVVMESTGIYWKSPYAALEKVGIQAQVVNAQQVKKVPGRKTDTSDAEWLAMLARAGLLRGSFIPPAQLRNLRQVSRHHQKITAMRAMEKNRLLKVLSDAGIRITAVVSDAHGVAATAIIDCLLAGGTPEQALTHAGRLQAAPETLLASLQGELSAEHRFVAQTIRHHIHYLDAQLADLEGHLLEALQPHEAAMQFLLTIPGIDRLAAAKLIVEIGIDMAAFGTAGRLCKWAGVCPGNDESAGKRRRGNTAPGNRYVRALLCQIAWAAVRTTSQFKGRFQSLVGRRGTKRAIIAIGHKVLKTVFVLLSRQVPYQDSTVDYEALAVQRHAPRWIRQLRKFGYLPKMA

SEQ ID NO: 309758 - protein, 380 aa, unidentified
MRTVSGLDIHKDSIFMCILDEQGKKTEEKFGVTTREIKRMSSVLHTHYVSDICMESTGIYWIPIWRLLENDFSLHLVNPQFLKQLPGRKSDVKDAQWIATALLKELVRDSFVPDGNIQRLRQYGRRINEINKDLVRCEQRIDMLLQRCNIRLSNYVSRTKSKSYRKVVDALIAGETSADALVKLIHGRTVNRYGKSAVHEALEGCICESDSDLLQQYTQSFDMLQLQKQQCLDAMVRMCNQLYPEAFSFLLTVPGIKLVSAAIIISEIGDNMELFATAAALVSWAGLRPRNDESAGKIKSRQITHGNKYLRKALMECANGAARTKGSVFYFRFWHLKGMKKHHNAIIVAVAREMLTVIWTLLSRHENFDETYHLKKKTAS

SEQ ID NO: 309759 - protein, 451 aa, unidentified
MSDLPVLDARAAFVDVGSEQMHVSVAGGPPQVFGAVTAQLHALRDWLEAQGVRSVAMEATGVYWLPLYGLLEAAGFEVRMVNGRQTRNLPGRKTDMQDCQWGATLHSHGLLRAGFVPPAHIRRMQDYMRLRADHISMAATHVQHMQQALERMNVKLHDVIAKLTGVSGLAVVRAILGGERDPQRLLALCDTQIQRAKAERVKESLRGTWTEEHLFALRQALQSWEHYQAQIAECDRRVEAVLHDIDPGQPPNARALAARPSRPGVNAPDIPDLRAILAQICGGQDLTQLPAHTEYGVLQVIAEVGTDLTKWRTEKHFTSWMGLAPGSHQSGKRKRSAKRSRNRAGRLFCVIARSLARSKDIALGGFYRRMAARRGGLVANIALARKLAALFWRVMVKGMDYVELGLQQYEAKVLETKQRSLRRLARQLGQQLVPMTTPVPTRGPSTNNATS

SEQ ID NO: 309760 - protein, 323 aa, unidentified
MTGTICGVDVASKSLEARIGQHGAAGSFPNNAEGIAELGAFCRSHQAELVAMEATGGYEQQAFALLSEQGLEVAILNPRAVRQFAESMGSLEKTDRIDAGMIAWYAEVKKSRPVCLAPQSQQHLRALVTRLRQLTEIRTAQLNQQRLVIDRSVQASFTKLLTFVGRQIRDLEQRITKLIEQDPLWRELNQTFRTIKGVADRTVARLMAEMPEIGTLSNKTISKLAGVAPIARDSGKHQGKRIVRGGRPAVREILFIVASVVGRYEPDFIAFQQRLRAAGKPPKVVRIALAHKLLVRLNAKAREVRQHSAALQPPSSALLLEKI

SEQ ID NO: 309761 - protein, 335 aa, unidentified
MHYLYYVGLDVSKETFDASLVAFEDANEMAHRKFANSRKGICSCLHWVEKRHGIRLDDVIFCAEDMGSYISEMAVCASDRTLNFNFSLISPLVIKYSMGIARGKTDRVDARRIAEYAITHYRKIALYLPAEKELCQLRTWLILRAHLAKQRVAKLVLLEKLDYKEKFADVSIQRSMLQEEIAYAETHMKTIEREMKELIAADSNICRNYKLLTSIKGVGPITAIVMLCSTLNFTKITDHRKFACYCGLAPFEHSSGTSVRGGCHTSSTANRDIKVQLNRSALIAIRCDPQLKAYYERKVAEGKHKFSVLNAVRAKIAARCFAVVRRGTPYVALQI

SEQ ID NO: 309762 - protein, 428 aa, unidentified
MHSKKVTPMKPWNQITHYAGFDWARDHHLLVILDQQGQIVADFQFEHSVEGWKSFREKTAAFSNLAVAIETSQGAAVDQLLQYGYTVYPVNPAAAASYRQRKAPSGTKTDHLDGWSLADALRVDGHGWKALQPMDDLSCQLRLLCRDEVALIEQRTLLVNQLQQALVEYYPAALEAFEDWVNPSTWDFIVEFPTPEALVKAGKRRWEKFLHSHRLWRAQTMDKRLALFCQADQFKASSPVTQAKSQLAVSLCKLLRTLQQQLEHYREQIEALFEKHPDHDLFGSLPGAKKVLAPRLLAAIGSDPSRYTTFEVLQCFAGTAPISFESGQIHKAKVRWACDKFLRHTIHLWADCFRKASAWGQTYYRKKRKDGMSHACALRCLGQRLLKIVFRMITDKKPYDAELHARNQQKHGSWVLALVEKEETQSGE

SEQ ID NO: 309763 - protein, 338 aa, unidentified
MAAIFAGLDVGDYETAVCVLDASARVILEERIASDAKVIASLLKPYRRTLGGVGIEAGTTASRLYKDLERRKYPMVCLDPWHAHAALVVQRNKTDRADAKGLALLVSRGLYTKAHVKSNDAQALRFLLAARKALKRRVIELQLTLRSAGKLFGAVVDMRNRRIRGVKWSRYAKHALAIDAAAALIRACSALQTELAVIDLAMEKMAKADPVCRRLMTMPGVGPITALTFKAAVDDPSRFKSSRTVAAYFGLTPRRHQSGIIDIGGHISRRGDGTVRETLYVAASTMLNVTKKETRLRTWGLALKERRGFKFAAVACARRMAVIMHRMWVTETDFDPAR

SEQ ID NO: 309764 - protein, 402 aa, unidentified
MRYYIGVDWAEAEHMIWVENEQGVRALSRSVPHPAEGLAEWGRWLDEQRASGMEVWAAIERPDGRVVDFLPDHGVVVYPINPKALDRARDRFRMSPSKSDPFDAKVLASFLRTDRAHLHALQPSSEAAQELKLLTRDYARLVREQTRLVNQLTATLKEYYPRALEVCGDVTAKRTAAFLRAYPTPAVLAALPAEQWSQFARAHRWSAEQAAACWELLRNPQLPVPEHVVRAKSRLVHVLVTQLETVVEAVTDYRQAVIDFFGRMPAAEWASSLPASHGTLVPTIWAELGDAVGRWASGEHLQGHSGVVPVTRRSGKSHGVYFRFACNLHLRRALHQFAFCSLKSSEWVRAYYDRYRQRGHRHHAALRALAAKWLKIIFVLWRRQVAYDENYHLASMARQHLR

SEQ ID NO: 309765 - protein, 340 aa, unidentified
MQVIRFGIDLAKNVFQVHGVDATGRVVVQRQLRRAQVEKFFAAQPPALIGIEACGSAHHWGRTLRALGHEVKLMPPAYVKPYVPRNKNDARDAHGCCEAVSRPDMRFVPIKTVEQQWARALHRTRDLLVRQRTQLANAMRGMLYEMGQTSAQGAAGLEALLQRVEAADEAIPEALLICLTPLAGQWRALDGEIGKLDKQILAQVRQQKAALRLTTIPSVGPIIAHATIAAIGDGRQFTSGRDFAAWLGLTRKSHDTGGKHKLTGHISRAGDRDLRRLLILGASSWLRQVRAKPDRGSPWIRGLLARRPVKVAVVAQAAKTARIIWAMLNSGQEYRAPVAA

SEQ ID NO: 309766 - protein, 340 aa, unidentified
MKLYGAIDLHSTNSVLVVIDEEDRIVYQKRLPNDLALILKELCVYQSRLEGIVVESTYNWYWLVDGLMEQGYKVHLANTAAIQQYEGLKYSNDDSDARWLAHVLRLGILPQGYIYPREERPVRDLLRKRSQLVRQRTMNLLSIQNLMTRNTGSSMTANQIKGLDKPQVDGLLPDGDLSLAVKANWSVMCSADEQVELLEQRVTERVKLRAQFSFLKTVPGIGQILALTIMLETGDIGRFATVGNYASYCRCVGSQKISNGKRKGSGNTKNGNKYLAWAFVEAANFAIRFNSKIKSFYQRKKAKTKAVVAIKAVAHKLCRACYHIMKDRVAFDVTKAFGPK

SEQ ID NO: 309767 - protein, 411 aa, unidentified
MRRVIGMDIHRTFAEVVFWEDGKLRPAGRVSMTRSGLEGFGRSLGKEDEVVIEATGNAMAVVRVLSPYVARVIVANPLQVKAIAHAHVKTDKIDAGVLASLRAANFLPEVWLPDSDTERRRRLVARRNQVVRHRTRIKNEVHAILHAHLIPPCPHADLFGRLGRIWLAQQLIPDDEGAAIERHLRELDRLSEDLGVLDTQIAQAGNDDPAVKRLLTITGVNLIVAAGLVAAIGDVRRFTSPQQLVSYVGLNPRVRQSGLGVAQHGRISKRGRSHARAMLVEAAWAAAKAPGPLRAFFLRIRARRGHQIAAVAVARKLAVLCWHLLTKSADYQWARPALVASKLRAMELQAGQPARKGNKRGPAYAYNVKALRDREIELARHAEQAYERFVSQWQRRGTAKQRTGAANEERR

SEQ ID NO: 309768 - protein, 409 aa, unidentified
MEVLHPRCAGLDVHKETVVACVRVQENQQQSQTVRTFSTTTKALNELAEWLTTEAVTAVAMEATGVYWKPVWHVLEAHDLSLVLANAAHIKHVPGRKTDVNDAMWIADLVAHGLIRPSFVPERPIQELRDLTRTRKQFVRQSTQHVQRIHKVLEDANVKITSVITDITGKSGRAFLKAIIGGETDPVVLARLGDPRLKATPEQLVEALRGKITKHHCFMLKIFTEQFDTTNATIAALDEEASELLRPFQDAVKNVSTIPGVGETVAAAIVSEIGLDMGRFPTASHLVSWATLCPRSDESAGHHRSSRIRKGANWLKPMLVQAAWSAIKRKGTYLKSFFLRLKARRGPLKAIVAVAASMLRAIYYILRDDVPYRELGPAHFDKVAPELVAKSLVRRLKNLGYEVELKAVA

SEQ ID NO: 309769 - protein, 342 aa, unidentified
MLHRWRDEAIRAGEKITRIALAFEAGRDGFWLARWLSARGVEAHVIHPSSVAVSREHRRAKTDRLDTELLKRGFLGWLRGERGHCSMARVPTIAEEDAKRPNRERACLVGERTRIVNRMKATLARLGVRNFKPTLRKAAERLATVHTPEGMPLPPNVLDELQRDMARLGFVVSQIRQIEEARQKRLEQETETGPHAMVRLIARVVGVGIETADMLVHEVLSRPMCNRKAVARYADLTGFPDESGAKRGEQGLARAGNARVRRGMIQLAWRFLLFQKESALALWYRARTGDSRLGTRETMIFALARKLLIRAGARWSPRCLVLLSRDELIAEFVHLAVRCSQC

SEQ ID NO: 309770 - protein, 336 aa, unidentified
MLYVGLDVHSRQSSLCILNSAGGVVNRIQLKGPRAAVVDRLRTLEEPFSICYEASCGYGHLYEQLRPLAHHVAVAHPGKLRLIYGSKRKNDRVDAQKLAKLLLLLDMVPPVHVPHVDVRAWRSLIVLRQRVLQQVVRCKNQIRGVLRENDLSGVKWLWSKRRLAWLESLDGLHPAAKLRLELAVQEFRALDARITRIEKELRTYADRHPAVKALMTIPGVGIRTAETFVAWVDDITRFRNNRQIGSYFGLVPCQDASADTNRLGHITRDGPPVMRKLICEATWTAIKKDPGFKRFFERVMGGKSERRKIAVVATMHRMIRVMGAMLRSGEAYDGAR

SEQ ID NO: 309771 - protein, 326 aa, unidentified
MKSKLGVDISKAKFDVALLLDGKKYRSKVFSNTGAGFRALLEWIASNVPGGQANVHVCMEATGVYHESLALFLHEQDIDVSVVNPMLVKRFVESEGARSKTDSADAKALARYADRTQPELWQAPSPAVRKLQALVGRLETLKGMRQAEDNRLEVAHEAVRSSLLEIISQLDASIEEVRAQIRQTINDDPDLKSRRGLLETIPGLGDKTIPQLLAYIGRPERFKSVKALIAHAGLAPMIQQSGTSLNKKRGTHPMGHEALRHALYFPAMVAGKYNPVIARFWQRLKEQNKPGKVIVVACMHKLLAIAYGVLKSGKPFDPARSLATPT

SEQ ID NO: 309772 - protein, 350 aa, unidentified
MLIIGCDYHPSFQQIAFVDTDGGELGESRLLHREEAEQFYGKLREQGLEARVGMEASGHSGWFERLLRDLEFELWIGDAAEIRTKRVRKQKTDRHDAQLLLRLMLEERFPRIWVPDAENRDLRQLLWHRHRLVQMRTRVMNQLHVVALNEGLRRKKALWRPAGREELQSIALAPWTSRRRQDLLDILDQLTPKIQELTRALEAEVEKRPVAHRLMTHPGVGALTALAFELVIGTPQRFPGGKQIASYLGLVPAEESSGERRRLGHISKQGNVLLRFLLVEAAQVTVRSQQEWRNRFFHLAMRRGRKIAKVAMARKLAVHLYWMWRQDCDYGAWQKLGSHAGVPGNPDGER

SEQ ID NO: 309773 - protein, 432 aa, unidentified
MNESIPAASLEGVAAYIGIDWADQKHDVVLRSAVEPNKVEHRVIEHQPGALMEWIGQLQQRFGGHGQILVCLEQSRGALIHHLMGYEFFELYPVNPLQLARYRETFSPGGAKDDQPDAELLCELLYCHRDRLRAWKADSELTRKLAFFNEGRREGVDQRTRLSNAIKSQLKVYFPLALELLNQDTSTALAADLLLRWPSLETLQKQIPHQLRKFFYAHNCRGESRMLERLQLVQQAQALTQDSAVIEPAAFRVQMLARQLKNLLPDIARYDQKIAELFAAHPDRFLFENLPGAGRALAPRLLSALGSDLNRWESAQEIATLYGIAPVRRASGKKSGKKGEKKASVHFRQACPKFLRQSFHEFAGCSIRYCCWARAHYEAQRAQGKGHHAALRAVAFKWIRVLFACWKQRIPYDPQRYLQALQQRASPYANAC

SEQ ID NO: 309774 - protein, 411 aa, unidentified
MENIFPCCAGLDVHKESVEACVRRIEPNGRWHQQTRHWGTMTRDLLAMADWMAAQGVTQVAMESTGVFWKPIYNILESRFTMLLVNARHLKQVPGRKSDVRDCQWIAQLLQYGLLKGSFIPPRSQRELRDLTRHRTQLVEEKTRTANRIHKVLQDTNIKLSSVATDVLGVSGRAMLEALITGEEDPVKLAHLAQRKLRSKIPELEKALEGHLTEHHRFLLQLLWKQLAQQEELIAELDRKIEEQTRPFAAEIDRLDAVPGVDRRVAEVVLAEVGADMKPFSAHENLASWAGMCPGNEESAGKRRRRRITPGNPWLKPTLAQAAWAASHTKNSYLASQYRRLAGRRGRKRALIAVGHSILVIFYHMLKTGTSYTDLGGDFFDRLQPERLTRYYVKRLERLGHKVTLESRAAA

SEQ ID NO: 309775 - protein, 423 aa, unidentified
MGKTIPICCGVDVHKKFLVATILTGDYLIPQCKQKHFGTSFRNLLAFKQWLLDNNCKDVCMESTGKYWVPVWNVLEGIGNVVIANPKWVSAVKGNKDDKKDSKWIGNLFRMGLVPSSYIPGKNIRILREFTRYRSKLVSMRASEKNRYQNAFTVCNLTLDAVVSDMFGQSAMAIENYLLDTDVVDPEFCTSLLQKKLKKKSAEIIEAVEGFNMTQEQKERVRIVQGHFADIDKRISQIDEIISRLTAEYEGTISLLCTIPGIDRRLAITIISEIGTDMSEFGSSRRLCSWAGLVPGNNQSAGKKKSVKITRAGVYLKPALVEAAHAAVKATEKSPYFRIKYEKIMKRRGKKRAIIAIARMILTSIYAMVSTGEVFNPSDLLKYDMPEDLQKKRTLAEAKDAVKLLVSLGLVAEGSISLEALAS

SEQ ID NO: 309776 - protein, 482 aa, unidentified
MKKHNIYQNQSQQLLGLFEQAANNAKVMCVPIDYAKKDHVVMFCNGYGDILRKPFSVKNSPEGVDYLTDQVMRSCRQRAISEKHVFFGGEQVGSFADNFVSTLRNQGWLVAGVNAHEAKIQRENLQASTDRLDLLGIAKSLLNRRADCSPAQSGIYLNMRTVVRHRRKLVGITTEVRNRIHTVVDRLFPGFLNESKSGITPFSKSSLWLMKERFSASQIRRRRRSTLIEALRRLGTKKPEDTADMLQQYASQVLKPPQDYVHMLQLSLAQHVKHFCCLQESIGQLETEIALNLAQTQGAFLTSVRGIGIVLAAGVSAEIGNPFEQKPLNNLVSYCGIIPRIKQTGGPQGNTKTGKVAKRCNRILKDYVVKSASHLGLHGPADLKSDYQRRDAAGQHADFGMARRYLRMAMCLMRTSQIYLPNRLRKADSQIQDRADYYVMSWPLLRDKWQKSGALETVFNADQPLGQWRKIVQQFYGIKLTL

SEQ ID NO: 309777 - protein, 361 aa, unidentified
MAHTIICGIDAHEKTLVTRIGVNQEPAETKRFNNTRSGRQALFGYLKKLSCGHAGGKMVMAYEASTLGFGIYDESVASGIECHILAPTKMPTARKDRKKKTDERDAQRVFEIVRAYALAGNELPRIWIPDHQTRDDREVVRGRLDAAQKLTGLKCQVQTLLKRTGVVKPAEAGDSWTQRYRLWLKQLCIQPGAQIALQSLLRQIEGMEEEIKILDQEVEQLAEGERYKAVVGALVREVKGVGLLTAMVYVTEMGDLSRFNNRKQVGSYLGLVPSSNESGEVADHKGHITREGSARVRKVLCQATWARVAHDKEEAVVYQRLVKKNPKHKKIAVVASMRRLGVLLWHIGLAAQKAAVKEQAA

SEQ ID NO: 309778 - protein, 350 aa, unidentified
MSRKIDAIASTIGIDTGKNTLHLIGLDQRGTIVLREKVARGRIGTRLANIPPCLIGIEAGMATHFVARELLALGHDVRQVPPAYAKPFRQAHKNDFRDAYAVAEAVQRPSTRCVPVKTDDQLDLQALHRVRARLVGQRTAVINQIRGFLLERNIVVRQGLRFLRHQLPEILAKRVDVLSPRMIRTIEDLSGDWRRLDERIEHVTEEIEELAHGSESCRQLMTVPGIGPLIASAMVAAIANGTAFATGRDFAAWLGLVPKQMSTGDRTILGRISKRGNRYLRTLFMQGARVILLRPANWAKHSFGTWLAAAAKRLHHNVLATALANKLARIAWTVLAQRRNYETRVVAQAA

SEQ ID NO: 309779 - protein, 369 aa, unidentified
MNDITYVGLDVHKATVCVAIAESGRGGEVREVGIFENRPDVLRKMVARLGKQRHRLNFCYEAGPCGYGLHRLLTGLGHDCVVVAPSLIPMKAGDRVKTDRRDALMLARLHRAGELTPIWIPDAAHEAMRDLVRARATAVRALSKARQHLQGFLLRHDRICHGARAWTLAYRRWLTTVRFDHPAQQIVLQDYIHTVEDAECRRDQLTRQIEELMPTWSMAPVAAALQAMRGVALVVAVTVVAEVGDFRRFTNARQLMAYLGLVPSEHSSGSTVRRAGITKAGNALARRVLIEGAWTYRMSARVSRKLHDRLEPLSAAIRDIAWKAQVRLCARYRRLAATGKPKVVVTTAIAREMVGFIWAIACVAQPELT

SEQ ID NO: 309780 - protein, 336 aa, unidentified
MFHYIGIDVSKATLQVYIPFKEENISIGNNKKSITQLYSKLKKYYKKEVTNIVFIFEPTGSYSHLIKDFCMNKNIYAFIVNPRQSSNFAKALDHRSKTDIIDAKMLYMFHVMAKDGDIKVPIIDTTQKVLGELLSYYKLLIKQRTGFSNHLEALTFQDGNNYLIKRLEKEIKSLKEEEKLTLEKMIELLESDKDLCERFQNIKSFKGIGDRAGIALIHLFITYPQANRQELTALSGLDAIEITSGTSINRRSRISKKGSSIYRSMLFMPVLSAIRSNPYMQVFYDRLKENNKHSTVAQIAVMRKMMLIAHSLYKNNIAFDDKKYEKSISYKSKKEC

SEQ ID NO: 309781 - protein, 408 aa, unidentified
MEVVYPCCCGLDVHKKSITACVLWAEAKGKSRKQKKRFGTCTHDLLQLADWLVQCGVTHVAMESTGVYRKPVWNVLAALLVNAQHIKAVPGRKTDQKDSEWIADLLQHGLLRGSFVPPRPTSELRDLTRYRVSLVQEINRIANRIQKVLEDANIKLASVATDALGASGRAILEAMLAGEQDAARLAEMAPGKLRNKIPELQLALEGRMTEHHRFLLRQLFDHLRFTESKRSEIEKEIDKRMLPFEDKVTRLCTIPGVDRVTAWGMLAEIGLNMDQFPSAAHLASWACLCPGSFESAGKRLSGKMRKGNVSLRRCLSQAAWAISMMKNNYLSALYRRIAARRGAKRAVMAVAHALLVIAYHMLKRKEDYWELGADHFDRIDVNRIRRSLVNRLERLGHKVTLEPLAQTA

SEQ ID NO: 309782 - protein, 344 aa, unidentified
MGEVSTVGLDIAKSVFQVHGVDGGGAVLIRKRVGRAKVLEFFSALPPCLIGIEACPTAHHWSRKLQALGHTVKLMPPSYVKAYVKRSKNDANDAAAICEAVTRPSMRFVPTKSEQQQSGLMLHRSRQLLVRQRTMLSNAIRGHMAELGIVSAKGRNGTAELLTIIANTEDDRIPRDARFSLDVLARQYAALAMEIGAIEKRIHAWHRSCESSRRLEEIPGIGPIVATALIAEVGDWKTFSSGRNLAAWIGLVPKQHSTGGKERFGGISKQGNRYLRWLLVAGAMAVIRYARQHGTKRLWIARIMERRPIKVAAVALANKIARMAWAMMVSGERFKEPTLLPAAA

SEQ ID NO: 309783 - protein, 408 aa, unidentified
MQVTFGIDVSKSTSTVCELIGESKNELTITNNRPVFIQLLHELTAFSKHPQIIFEATGVYSRRLQAFLEDYGYEYVVINPLKAKKEMNMGLRHNKTDKTDAYHLALIQRLYHHPINQLQSQTYKQLNALSRFYDQLTADLVMAKNRLHQALQSTFPEIENLFSSAKGKNYWQIVARYPHCDLVKKDDKKQIINWLMKLKGIAFNHAQRTTDKLIELAHLAYPVVSCSDIEVQQAKYYARRLLNLSNQRQRIITKMVKLAKTLPNHDLENLESIPGFAQTTAVRVLAELGDLRRFSNPNKINAFIGIDPGRYQSGEMDSNLSITKHGNAVARKLLYRAIGQIDNAAKTNPCHIADYYESKKLSSQTKGFKKIAIASIHKLIRTIYALIINDQPYDYNVATHNQKDFSRN

SEQ ID NO: 309784 - protein, 373 aa, unidentified
MPRYSTAFGMDVHLRSTTVCALDAETGEAVTRRFRGNPWGEVAEWMSGFPGPSLAAYESGYLGFAPQRELSGLGVDCVVAAVSKVPRSAADLSSKNDRNDAARMAKAILSHDVTPVWVPSPEIEGLRDLAAAHDAATARLAAAKQRLLAFLARRGYVYGGTTPAGNPRKYWTYGFLRWLDGIHPADDGGIRALAALRDEVEAADETREALLAEYRAAVAAGPLSAEVEALQSIKGCGFALAAAFASEVGDFSRFRSGRQVTAYFGLAPKQRSSADSVRLGGISGAGNALVRKLAVEGSWCYAQAGHQPKLMPKGSGVPLEIRMHGRKGSERLLRRREEMVARGMPQAKANAATAAELVRWLWALGTMCREGAE

SEQ ID NO: 309785 - protein, 313 aa, unidentified
MHTIGIDMSKDTFHAAFDDIRVEIFDNTVSGIKQFISVIMKEGSTRDTTVIGTESTGVYHLLLSQQLKQDNWNIKVINPIHTHRMIDSSLRRVKTDKHDALSIRRTLLTGVGYTYTDTPDILALKTLVQERESLCKMRASTKQRMHAHKIREKASLLNLHDSFSGPLKLLSYEIREIEKMMNGYLPDTQGLLRSIPGVGKVTAGTLVATIGDIHRFSNPEKLVAYVGLDPRVHQSGTSIHGKGYISKRGNRYLRYILFNAAFIAKRRNPLLKKYFEKKIGEGKHYFSALVATERKLIHLIYAVWTRGTPFEVR

SEQ ID NO: 309786 - protein, 349 aa, unidentified
MIARPDAACFVGIDLHKDTLTACVLRGRDREVSYVKLACKCRDQIRSFFASLPQPSAVAIETVGFYRWLWTELEPLAGQLVLCDARGARALAGRRIKTDREDALNVALLLADGRLPLAWAPPENVQLLRNWTRHRNGLTRQHAKVLHHVKSTLNRLNFPGPVRLDAAALQRYLLAGVERFSTDDLTMLWQHQRRLIEIEQDRAQSERRLSELMRAPEFSRLRTILESVPGVGLVTSATVIAEIGDFSRFADSKAIGRYAGLAPTVYASGNSSRLGHISKTGAPDLRWVLQQAAWTAIRCDAGFKKTWLRIAKTAGKKAAAVAIARKILVLMWTLQRKDEPYKSRDPVAA

SEQ ID NO: 309787 - protein, 389 aa, unidentified
MRFAGIDIASETHVVAVVDVEGKILVRATEFTEDAGGYAKLLELLGSSSDCKIAMEATGHYWQNLFAALAGAGFEIALLNPLRTRRFAEEDLARTKTDAIDAVGIARFAQQKRPLPTLLPDSVTQELRELVRLRDRVVQDLGDAVRRLHRVVDLGFPEFTRYVKTLDSELATTVLHEYPTAAAFPVVPRPLAKLVYDGRHKIGPDLARKLVDAAKASVGRHHGDAYCVQARYACEDVSLARQRLRELERRINTTLHDHEVGTLLTTIVGIGPQTAARLVAEIGKFERFSGPEKLAAFVGSIPGLYHSGKSKPKGVMSFGNARIRSALWMPLLTAVRKNAWLRIYYQRLLSNGKPHKLALIASMRKLLHAIYSVAINRRPFVARIPEIAS

SEQ ID NO: 309788 - protein, 350 aa, unidentified
MTTIARTITGGVDTHLDVHVAAALDERGAQLGVESFAATAAGYRELLDWLEDFGTLELVGVEGTGSYGAGLTRHLLSHQIAVVEVDRPNRQRRRRTGKSDPHDAVAAARAAQGGDATGSAKTRDGNVEAMRVLRVARSSARRSRTQAINQMRSLISTAPEELRAELRDLSIYKVLTVSSAFRHTGRTDVTAVTKLTLRTLARRALSLEEEVKEIDRLLKTLVAETAPELNAIDGVGTDVASAILVAAGDNPERLKNESTFAKLCGVSPLDASSGKNQRHRLNRGGDRQANSALWHIVFTRMVSDPRTKHYIERRMKDGRTKKEAIRCLKRYVAREVFAALPRSQFALDSP

SEQ ID NO: 309789 - protein, 406 aa, unidentified
MSVEVALTEKVWAGIDVGKEHHHCVVINSEGQRLLSRRVFNNEPELASLLDEVIELAGGQVLWAIDLNHGAAALLIGLLVAREQPLAYLTGLAIHRASASYRSEGKTDARDAFVIADQARLRRDISLLRPGDEIAVDLRILTTRRVDVVFDRTRQINRLRAQLLEISPALERALTLTNKGPLVLLTAYQTPAAIRRAGVARLDAWLRKQGARNATALAQTAVEAARSQSVVLPGERLAAQMVARLAKGVIALGDEIAELDELIEARFRDHRHAEVIISLPGIGPRLGAEFLAATGGDMTAFTGADQLAGFAGLAPQPRDSGRIHGNLRRPKRYHRGLLRSMYLSAQISITTSPASRTFYQRKRAEGKSHKQAVLALARRRISVLWAMLRDHTTYHDLPPIPITTAA

SEQ ID NO: 309790 - protein, 410 aa, unidentified
MKTPTSTKNLIDIFVGVDIGKSFHCAAAINGRGTVLLKPLKVMVSTEGFMAFEGRLRQLGDKTTVLVGLEASGHYWMSLWRFLLERDWQVEVFNPVLSSKSARTHLRGRKTDADDALFIARTVRDGDFTPLQPGNQETEQLKVLCRQRRFVSHELSNAKRRLTGLIDRNFPELGRHFEDNHSKAAHAVLKVAPSAVAIARFPLRRLERLLIDASRGRLGAEKAKALRESAQKSLAGGRQDPALDLLVRTMIAQLEFFEGQLAELDTHIEKLFSHMEHPIKTIPGIGSITGPMIAAELGDLRRFEGRRPVHAILAYAGMDPRVRNSGQWSGKIKMSKRGSTALRTALYQAASMARLHEPRLAEIYSRHKQQMNKHHGVAISHVARKLLGIIYAVCARGQSYDSTKICAQPT

SEQ ID NO: 309791 - protein, 370 aa, unidentified
MDDTIFVGLDVHKATVSVAVAEGSRGGEVRHIGVVANRPDHIGKLVERLAKGGRRLSFCYEAGPCGYGLYRQLTGLGHTCLVVAPSLIPMKAGDRVKTDRRDAVMLAKLHRAGELSAVWVPDDAHEAMRDLIRARATAARVLAKARQHLQGFLLRHGRVFAGKKSWTLAYRRWLTTVRFGHPAQQLVLQDYIHAVADAEARVARLTKQIEELLPSWSMAPVIAALQAMRGVAFVVAVTVVAEVGDFSRFENPRQLMAYLGLVPSEHSSGRTVRRGGITKAGNMLARRALIEGAWTYRMQARVSRKLYDRIENVSEAVRDIAWKAQLRLCARYRRLAAAGREKVVIVTAIAREMVGFLWAIARQVQVVAMA

SEQ ID NO: 309792 - protein, 353 aa, unidentified
MTDCRDRVVAGVDAHTDEHHVAVVDAQGRLLGAAGFPTTAEGYAGLIGWVRGHGDVDRVGVESTGAYAAALVRALHAGGIRVVEVNQPHPHARQRRGKSDPIDAELAARAALSGTATAVPKQTSGIVEAIRQLRVVRVGALKARTAALQQLDDLVITAPEQLRQELRNGRTLKAKAALCLKLRPDIERIDEPAQAAKLALRSLARRIRALDTEILELDRQLEQLVNAAAPRTLQLFGVGTQGASQLLVTAGQNIQRLRNEAAFAKICGAAPIQASSGRTKRHRLDFGGDRQANRALHMIAVCRLRHCKRTRAYATTRTADGLNRREILRCLKRYIARETYHTLRADLEALNST

SEQ ID NO: 309793 - protein, 453 aa, unidentified
MAQRNRLPIPKSPKSRQVFSLLYPNAAGIDIGSASHYVAVPPDRDDEPVREFASFTSDLNALADWLEACGVDSVAMESTGVYWIALYELLDARGFTVMLVNARHVKNVSGRKSDVLDCQWLQQLMSFGLLRGAFRPADGVCALRALSRQREMLLKSQARHVQHMQKALTQMNIQLANVISDVVGETGQKILRAIVAGERDGRVLAAMKNVRIHASAEEIAKSLHGNWRAEHLFALKQALALFDFYATQLAECDREIEAQLQRLRAHEGEPAKGKKRSRTRNAPRFDLRTQLFSMCGVDLTRIDGIDVTTALAVLSEVGADLSRFPSVKHFTSWLGLCPGTKITGGKLIGGKTKRCANRAAHALKLAAAALRSSHSALGAYFRRMASHMDKPKAITAAAHKLARLIYTMLTKGEQYTDQGQDYFEQRYQQRVLRQLALRAEKIGMKLVALEQPA

SEQ ID NO: 309794 - protein, 417 aa, unidentified
MNESAKLLPQKYMEGDKVHVLGIDVSRGKSNCALLHDHTVIKEFQIIHNKSGLAKLKSIITRDLPVMAVFETTGIYSRVLTRFFIDEEMNYLEINPLESSIRMAGLRRQKTDRSDAVKLALLGIDQKSLIHGRRPYSRPYEQLHLMAHRYLEITKERSRIINHLHAALDQTFPELNDIFNPIRSVLGLTFVSLFPHPDFLTGYIPGTMAKQIIGLVSPKIHSDLIVRRCNEVWQAGQLSYPAQPANSFLTNQIHSYCEEIQRYNQAHDLLKRQLITYAKTFPEFKLIASIPGAGEISTALLLGFTGKIARFPSYKQLNAYVGIDLRRTQSGGLKEADRINRRGQSSARYIMFEMIRSMLRNKARIDNHIVDYYYKLKKGPHPKPDMVAMIACVNRLDRTIMNLVRTDQIYNYARTSH

SEQ ID NO: 309795 - protein, 442 aa, unidentified
MSKNLSKLEPNGEPYLSVGLDVGADFTFMSIALPNGTFVGKPFKITHANPESRELAVKKIKEAQEQFSLKSRCFLESTGIYHIPLMRFLSDKGFVCETINPIITKNSTNIGIRKVHNDKFDSKKIATIGLMSSVKTSITPSDEVVNLRNLVRDYFYFKDLQSAIIMKLTAELKVSFPQYKGIFSKITTKTSLKLLEKYPLAKNILEADKDNIVELIRSTARFGEKYAKTKYDALIAAAQDATIFGRSIDSNATRIQLYVRQINFYQTQIAELLIALHKTVDNLNEPLIRERINLLQTLQGVGFLSAVVLIAEMGSFELFSSPKKLFAYFGLDPAVKQSGKFTGDKVHMSKRGSKLARRVLHMIAINNLKVSGKEKIPVNHVIHDYYVAKCSSKKKNVAVGAVMHKVCNIIFAMLRDNRPFEIITPVEHCKHFLDTKSTKNVA

SEQ ID NO: 309796 - protein, 329 aa, unidentified
MQNKVIIGTDVSKLSLDNAIKTAQAHCRVANTSKGFKQWLTWALSFGTKEELHVVMEHTGYYSYQFELFLQAQKIVYTKVNALEIKRSSGLVRGKNDKTDAMMISLYGWLRKEDLKAEKIPAAVITELKDFISLRDKLVRDRSGYKARVKEQNATRKYAKSHLQNKIQKRKIKELTEDIKQVEKAMKQLIKQHAELQKNYDLLVTIKGIGFVIAAYMLACTDNFTKFTHSSKFNCYAGLVPFEHTSGTSIRGKSRVSHFANKKAKRLLNLAASVAIQHNQELKQYYQRRVAEGKSKIGTLNIIRKKLVDRMFAIIKRQTPYQENLNIAA

SEQ ID NO: 309797 - protein, 394 aa, unidentified
MKLIGIDIEKNKHFFCVMDQQTGEIISQPVSFSNDKEGFDFLVQKIKSYPKDSILIGMEDTGHYHFALLKYLLDLQYTVALINPKTTDFNRKMQGGITKNDKLDTINICDVLDTPERKKQYRITKVNSFDLYEQKQLTRHHHNLKEEENVYKNRLQKCIDIVFPEFNKLFNSKYGTVYMNILKTFGSAENIANTDIRTIRKCFEIEGRGNRISLTPERLKECARSSIGISSSAEVIQIKHLTAQIELIEEQLTEIDKKIEEFSIQNNSPILSIPGISHFSGTSILAELGDISNYSKPSQIIRFAGVAPLHYESSQFNAQHTAITKKGSKYLRKTLYQIILPVIRHNPVFNKYYQLKISQVKGHLCAQGHCVRKLLRIIHHLLKTNQQFDPQLLR

SEQ ID NO: 309798 - protein, 338 aa, unidentified
MKFKRIAIDTSKHVFTLHGVDEQDRPVLRREFRRGQVEGFFRKLPETEVVLEACGGSHHWGRVFQAMGHRVRLIPPQYVKPFVKRSKNDRNDAEAISEAAARPSMRSVVIKTVDQQAKAIIVKHREMLVGQRTQAINALRGHATEFGVVAAKGAANVEPLLAVLAADTSIPATARAMFVQMGGHIAALAERISGLDAELAALHKVHPVSRLLAAVPGIGPMIATTAALTVQPENFASGRHFAAWLGLTPREHSTGGKQRLGGISKAGNERLRSLLVVGAMSVIRAAKPGSKSASAWLLKLLERKPRKLAAVALANKMARIIWAMMSTGEAYRGPFRQA

SEQ ID NO: 309799 - protein, 383 aa, unidentified
MSISSSLILYVGLDVHKETIVIAVLPQHADKCTRVDRVANTPKALRRYFQRLAEEGEIRACYEASGAGYVLQRAMREWGYSCEVIAPSLIPQQPGHRRKHDRYDAKQLARYYRSGELTPVRIPTEAEERVRDLVRCRTTFQRQLLRARHFVLKFLTRRGLRYEAGKCHWTRTHHRWLEQLARTGVLVAEDALVFAEYLALMHYAQQRRDALDHEVEKLALAPALAAGVGRLTCFRGLNTAAAVTLMTEIVDWRRFSKPTQLMAYLGLVPCENSSADTERRFAITKAGNSHCRHVLIQAAWAYRHAPRVGAALRRRQHGQPPEVISHAWKAQHRLHKLYQHLAFRKGAQVAVTAVARELVGFVWAVMQDCPVAEHLIAPAEQAA

SEQ ID NO: 309800 - protein, 415 aa, unidentified
MDQRTTTCSGGIDWAKDEHALCVLDEAGHKIFEGRFAHDEDGLAELCGSLVQMGVFRVAIERPEGLIVERLLEAGLVVLPIHPNQLKAARPRFRASGSRAKSDPFDAFCLAELARTDHHRFRALSPDSDETKALRVLTRAREEMVGKRVALANQLRAELEAFWAGAAMVFSEIDSEISLAFLERYPSPRDARRLAEKRLSGFLSGKHYSGGKSAKELLERLRDAPEGRAGEAEMRARREAVLGLVKTLKTLRKQIRLLEERIAKAVRAHPDGEVFLSLFRGKDTTLTAACLLAEIGDRRERYPTNDAMAADAGMSPVALQSGRKKVAGFRRACDKRLRRAVGTLAESTRHHNAWAKDVYGRARGRGCDHAHAIRILGRAWIRVIFRMWQDALPYDEAKHGNLRRLQTAEGLTQGV

SEQ ID NO: 309801 - protein, 418 aa, unidentified
MKKHSKSSQRSEPSLKRTKARGPVQRDAKEVLAEVLEKLTGKLNAPAELTRAKENRRGNTVGPNRDRLTVGVDLGDRWSQYCILGLEGETLAEGQLRTTQEDVREFFQALTVARVVIEVGTHSAWMQDVITEWGHEVLVANPRLMEGSKRRKRKSDRIDANKLARLGRVDPQSLHPIRHRSREVRQDLVVLRARDALVSVRTELINTTRGLVKSMGTRLPRCSSPSFADKVKDAVPVEVREALLPLVQLTEAVNDCIARYDQKIEELGQKKYGHTTLLRQVKGVGPITSLAYVLTLEDPRRFSSSREVGPYLGLVPKQEDSGDSQPQLGISKTGDRMLRRLLVGSSQYMLGAFGPDTDLRRYGLRLCERGGKNAKKRAVVAVARKLAVLLHHLWVTGDVYEPLHHTGAETRTAQATAA

SEQ ID NO: 309802 - protein, 544 aa, unidentified
MQPSTRTRRRRPDRGEHLGKPHGRLAPRVQAVGPEHFGIVAIDPAKARSYWLLADFYGRVLIPLTAVEHTRSGFDAAIDHLKRAIAEHDLRDTIVAIEQTGRYHRPVKRAFAAAGFDTRIVHPAISRHYRQAADYDTETDATDTEAGIFRAAINGFGLQEPPRDPTYAALQFWARHRRDLVREETLLRCQILEHVEACLPGYARCFNDIFEAQFAMLVPRHYASPAAVAAAGVEGLTRLARLGRARVQRPTLLRILGWARDAASADPDAELHRARAITLGDDRIHKRKQIHSCERDLAAQLVQTPYVRLLALPGLHVVTAGELAGEAGPMAHYATARVITGRAGLFPRRYQSDRVDLSSGRLARRGNRRLRQAPLQAADTLVRCNDHFGALAARWRAAGKDPREVHVRVAGRLARIAFRMVADGGYDHPACRGPEHALKKLTDFHVKRKIDEDMMRTNLERAAAFLSRAEPAPAAAAPREAAGGGPRCAAPAGSSPASGDVPPPARPGRGHGPKALSTILPELLKRPGGEAAKVLESAMSGETP

SEQ ID NO: 309803 - protein, 394 aa, unidentified
MSATTSHCNISQKVLYMAMELSTKKWMLAFSTGPARDPRIREVSACDILGLKREIRSALKRFELPEDSLVVSCYEAGRDGFWIHRCLQHNGIENVIIDSASIEQNRRRKKIKTDRIDAKKMVRILCRWHGGETDVLRTVCVPSEEDEDRRHLHRELKTLKGDRTRIINRIRAILAELGLNSQVRLDARFPDWLAGVTLWDGNPVPPNARVRLEQQFVRLQNLDAEIIDLEKERRDRIRTEESPQADKVRKLLGLKAIGTTSSWLLVHEVFGWRRFKSRRQLASFTGLVGAPFDSGGMSREQGITKAGNKWVRSVIVEVAWMWLRYQPQSALSQWYRRRFGGPGKRMKKIGIVALARKLVIALWRYLEKGIPPEGAILVPWYTKIHLRKPPAVGE

SEQ ID NO: 309804 - protein, 346 aa, unidentified
MEQISRVGMDTSKRFFQLHGVNAAEEVVLRKKLRRKEMVEFFQALAPTVIGIEACGSSHHWARLLRSFGREVKLIAPQLVKPYVKRGKNDGADAEALCEAMSRPTMRFVPVKTAEQQAALMLIGLRERLIGNCTQLSNAIRGYAAEFGFTAAKGMAHLDPLLERIQADESLPLAARELFAVQSKEYAQLRGQINEVEAKLKAWHKSDECSQRLIKIPGVGPIGAVLLKMKTPAPEQFRTGRQFAAWIGLTPQDHSTAGKVRHGGITRAGDEALRAVLVAGATAVIQQAVRYGGRASPWLDALLKRKPPKLAAVALANKMARVAWKLMVTGDSYSTKSAPAALASRI

SEQ ID NO: 309805 - protein, 343 aa, unidentified
MQTIRTIGLDIAKSVFQVHGVDASGEVFIRRQLKRRYVLAFFQKLPPCLIGIEACASSHYWSRELQALGHTVRLMPPAYVKPYVKRQKNDAADAEAICEAVTRANMRFVPIKTPEQQSCLMLHRTRHLFIRQQTAVINSIRAHLAEFGIVAPVGRKGVAELLHVVADPSDKRVPEVGRACLAALGDQLLSLKQQILEFDRMIMAWHRSNQTSKRLHYIPGVGPMLATALVASVADPRTFRSGRNFSAWIGLVPKQHSSGGKDRLGSISKQGDRYLRSLFVAGALAVIRYAKIHGTGHRPWLTALLGRRPTKVAAIALANKIARMAWAMMAKGERYRNPVALAR

SEQ ID NO: 309806 - protein, 366 aa, unidentified
MKKNSTVATGRKQIFKQARLTIGLDLGDRSSHFCMLDEAGNVIVEDNLPTMPNQVRQVFSKIPRCRIALETGTHSPWVSRQLSQMGHEVIVAHARNVRLIGESSRKDDQLDARMLARLARFDPGLLGPVRHRSAKAQIDLTVIRARAALVSTRTALVNAARGLTKSYGERLRKCGTGQMDREIAKGLSQELRDALDPLLGEIESLNVRIAEYDRRIEHIATEVHPEVARLKQVKGVGTLIALTYVLTLDDPHRFRRSRDVGCFVGLRPGRRNSGQSEPQLHISKEGDRYLRTLMVQGAHYILGPFGQDSDLRRWGLKLAERGGKNAKKRAVVAVARKLAVLLHKLWVSGEVYEPLRNNPKGVSAVA

SEQ ID NO: 309807 - protein, 468 aa, unidentified
MNEVRLGIDVACRADHRASLADERGEFIWSSWKFRTTTVDLERLWAKIPDGASVTVILEPTRNAWVPLSAWLQARGATVILVPPEQSADLRDYYNKHTKTDRLDSRVLARLPLLHPEGLRGIDNLGPAESLRRAVRHRFSLVKRRSAASLRLDALVELLGPGWADSLGSATASKTALVVLEKYADPRALKRLGRARLAALLIRSSAGLWREDKADELLAMASETLALWSGGGIDFTELAYDIASEVRVLRQLDDEIAAADKRIAVLYDEADPKGIVASAPGLGPVLSAAILGNAGDFNRFANLAGVRSFTGFVPKIDQSGLVAGHKGITKAGDAGLRQALYLAADHARHIDPTLAQRYYRLVMVEGKHHNSALCSVSAVLITRIAACWRKGELYQLRDEEGEEITEAEGKAACADRFKIDPKVRAARRRNTPAKVLKNRVAGRGRKESARKVAPATDPPREEASENVA

SEQ ID NO: 309808 - protein, 388 aa, unidentified
MPQLNDLSRSVTPFVQSNTLVGVIELSLSSWLVGGIVPGIARQPLKKLDPDELKLLRLLHRWRDEAVRGGSTIERIVVAYEAGRDGFWLARWLLAHGIEVHVIHSTSVAVSREHRRAKTDRLDTAMLLRVFMGWLRGERGHCGMVAVPTMDEEDAKRPHRERENLVGEQTRIINRMKAAMTRLGIRGFKPELRRAPKKLDGLRTPEGLSIPTNTLDEIRRDMARLAMVREQIDLIEQARLARIEQAPDTGPNAMVRLLASIVGVGIETADMLVQEVLSRNLRDRRAVARYAGLTGSPDESGAKRREKGLAKAGNARVRRSLIQLAWRFLMFQKDSALAQWYRGRTGGTNGARKTTMIVALARKLLIAMWRMVTTGEVPDGVIMRQAAA

SEQ ID NO: 309809 - protein, 354 aa, unidentified
MSNQSNSTVATMGIDIGKNSFHVVGLDQRGAIVLRQKWSRGQVEARLANMPPCLIGMKACVGAHHLSRKLQSLGHDARLMPARYVRAYLKGQKNDFRDGEAIAEAVQRPTMKFVATKTAEQLDLQALHRVRARLVSQRTGIVNQIRAFLLDRGVAVRKGPRFLRTELPRILSTRCDVLSPRMVHVIEELAGDWHRLDERIKSMSSEIEALADQDPSCERLMTVPGIGPIISSATVAAIGNGAAFSKGRDFGAWLGLVPRQISTGDRTILGKISKQGNRYLRVLFVQAARVVLVRPNSWERYGLKSWIEAAKKRLHHNVLAIALANKLARIAWAVLNKERKFECVRTSAMASRSA

SEQ ID NO: 309810 - protein, 364 aa, unidentified
MIEHTFIGLDVHATDIVACALVPETGEIVRETMASDPVAVLEWTRRFTPPVKAVYESGPTGYVLARSLRAGGVDCVVAASSKLLRAPGDRVKNDRRDSRLLAEMLALGSVTEVRVPDEETEALRDLSRLRTGAARDLAHARQHVNAILLRHGLRYPKDTKWTQEHQRWLHRQHFQDPLLQFTYENDIEQAELLAARLKRIDKQVTAAAAACPYTHVINALMCLRGISITTGFGLAVEIGDWTRFTGSSIGSYLGLVPSEHSSGQTRHQGSITKAGSTYARKLLVEAAWQHRRPYSRPGNRLQRQFILVEPATRIRALEGNHRLHSKWEHFDARAKMPVKANTAIARELAGWCWSLAAPLQREGP

SEQ ID NO: 309811 - protein, 406 aa, unidentified
MRFYIGLDWADAEHAVWVEDENATKIVGRIVPHTAEGLSEWGRWLDERRAEGIELWAAIEKPEGRIVDLLLDHGVLVFPVNPKALDRARDRFRISGAKSDPFDARVLATFLRTDHGHLAPLRPSSEAAQELKGLTRDHARQVRQQTRLLNQLTATLKAYYPRALEVCDDLKSQWARAFLREYSTPAALAALTARQWQRWTREHRLGAERTAKLWAILQGPQLPVPAHVVRVNARLVGALLAQLEATVTAVEAYREAITDFFASMPAAEWATSLPGGRSGTTVPQLYAELGDAAGRWQTFRHLQGHAGSVPVTDRSGKQVSVQFRFACNMHLRQAVHQFAFQSLGKSEWARAYYDRGRKRGHSHHHAVRALAAKWLKIIFVLWTRQVAYDETYHLATMARQHLRQTA

SEQ ID NO: 309812 - protein, 324 aa, unidentified
MTDAVLGIDVSKNTFDTNLGAGTKARSKSFANSPAGWHHLIAWLGEHKIGQVHACLEATGRHGLGIALALHEAGHVVSIVNPAQIRDFARTKLGRNKTDQVDAVHIREYAELFKPRPWTPPSPAMRRLCELQTIRAGTVAGLTEWKNRRHSGIMDDLAQSLAKTTIQHFTSQLEAVDQAIAETIDNDVELSAKRDLLVSVNGVGEALAGIVLAELPGPDILGSSAAVTAYAGLNPQQHQSGISVNRPVRISKIGNAVLRTALYMPALSAMRYNPAVAALVDRLKAQGRLKGKQIVIAAMRKLLVLCFGVLKTGKEFDPTMAMGK

SEQ ID NO: 309813 - protein, 344 aa, unidentified
MSVQTIGIDLGKTVFHLVGMDSRGGIVVKKRLSRLQLVRYTANLPVCLIGMESCSGAHHLAAVLSAQGHDVRLIPGQFVRPYVKSNKNDYVDAEAIAEAVQRPTMRFVPIKTGDQLDLQAIHRVRDRLIVRRTSVINQLRAFLLERGITVSQGRAVLRRQMPELLAQAAQSLSPCIQRLLQQLWREWLDLESQIEATTKEIDAVAAQDAACQRLPDVPGVGPLIATALVAAVGNGSAFARGRDFAAWLGLVPRQASTGGKPRLLGISKRGNPYLRRLFVHGARSVLRNANRERNPLAQWISGLESRGAHPNVVVVGLANKLARIAWAVLASGEPYRVAAQSAVH

SEQ ID NO: 309814 - protein, 340 aa, unidentified
MEEYDGREFVGIDLHRRRSVIVRMTPDGQRIGPAVRIDNDPFDLARQVASWGESPEVVLEATYGWYWAADVLADAGANVHLAHPLGVKGFAYRRVKNDERDAADLADLLRMGRLPEGWVAPPEIRGQREAIRHRSKLVALRSGLKAQVHAVLAKQGVRVPMSDLFGVGGQKLLDELRLDAPFNARVASLRRLIDAFTFEIDILTKRISAQLKTHPGFQAIQAIRGVGPVLAAIFVAEIGDVTRFARPQQLCSWAGLTPKHRESDTKVHRGRITKQGNPLVRWAAVEAVQTLREGPLGLARVRIGERRGANIGKVAAARKLLTLVFYGLRDGHIRCLAPAA

SEQ ID NO: 309815 - protein, 310 aa, unidentified
MEPLFVGIDVAKDELAIHIHPTAEAFGVPYDEAGLARLLARLHELAPMLIVCEATGGYEIPLAAALASAGLPLAIVNPRQVRDLARALGQLAKTDTVDAKLIALFAEKVRPPAQPLADETARRLGELVTRRRQLLEILAGESNRRPLVRDRTVRRRLDAHIAWLRREIRDLETDLGSTIRGSAAWRETDDLLRSVPGVGPITSASLIAELPELGQLGRRQIAALAGLAPINRDSGQWRGRRCIGGGRRVVRSALYMATVVAVRYNPVLAAFYARLRAAGRPSKVALTASMRKLLTILNAMLRDRRSWQPA

SEQ ID NO: 309816 - protein, 340 aa, unidentified
MKKISIIGLDLAKRIFQVHGIDEDHQVVIQKSLQRSELLAWFGQLEPCLVGMEACATAHYWAREIGKLGHDVKLIPPVYVKPYVRRQKNDRADAAAICEAVSRPSMRFAGTKTIGQQTVQVLHRSRELLIKQRVQLSNALRAHLAEFGWIFPQGNAGLDQAIDFVRDTHDADLPAALWDVFRYQVAQLTNLRAAIAGLNKRMVAWHRADGDSKRLATIPGVGVVTASAILASIGNGKQFKSGREFSAWIGLVPRQNSSGGKEKLGRISKQGNRYLRHLLVAGATAYLRGKRCENAAGGIWFSQLLHRKPGRVASVALANKMARIAWAVLTTGEYYRSTAA

SEQ ID NO: 309817 - protein, 364 aa, unidentified
MKKLNDPVRKVNAYCAGLDVHKGITVYTLFDPKGAVAETGDFRSTRADFEDFIKRVLKNGETHFTFEASRSSLWVHGLIREFVDDEYVHVAQSKRIKAIANSNSKNDDNDSWWLGYLTYEGRLPEAHVPEHEILELRIATRERAAAVQHRTKIICRLKAHFAQVGLIVPGSSIRTKQAQLFMAEQALQIKGVRGRALRSCLDELNYQDFAIQEWNDVIGEVSALIPAVETIEGHIPGIGSVLAATIVAEAGDLKRFHSQKAFGRTTGLTPSDRSSSGKTIHGGITREGNPHLRWALTQAAIGCLRARKGAGLAVGNWIRAREKRMGNKSKARAAGGRKLAESIWRLFHLGECFDAAHSFGGVPK

SEQ ID NO: 309818 - protein, 359 aa, unidentified
MDASKQQPRMTAGLDLGDKYSYLCLIDQHSGEVIEEGRLRTTPEALRRRFVSEHPLRIAIETGTHSPWVSRLLEECGHEVLVANARKLRLIYANKRKTDEIDAENLARLARLDPRLLYPVEHRSEDSQAHLALIRSRQALVGCRTQLVNHVRGAVKSFGARLPKCPARSFHKRAAEHIPEALLPALGPILEQIGSLTQRIQEYDRQLETVSEEHYPETELLRQVEGIGPLTALSFVLTLEEPYRFEKSRSVGAYLGLVPARDQSGDRDPQKRISKEGDEMLRKFLVGSAHYILGPFGSDSDLRRHGEKIASRGGKNAKKRAAVAVARKLSVLLHRLWVSAELYDPLYNTHRRAEQGEAA

SEQ ID NO: 309819 - protein, 387 aa, unidentified
MDVLMECCCGLDVHRDMVEACIIKGMLETPEMIREQFKTTRQDLIRLTKWLVENECYHIAMESTGVYWRPVYESIEEHSEKYYCMMVVNAHHMRNLPGRKSDVKDAEWIATLMRHGMLEASFVPDRLIRDMREFSRLRRNLVKEKCRHSNHLEKFLQTHGFKLSSVLSDILCVSGRNLLNTLAQNGTLTPEDVYTAVRGKTKFSREEIAIAVCGSVNSAEQKLLQLLLKRIDEDNANLKEVEQAMEELFAPYAKEVDIVDSIPGIDKITAMTILSEISLAPKNSFPTSGHLTKWAGLVPRNDESAEKMKSRKILPGNQYIKTILCQAAWSAVRVRNSSFANWFWSHQGHKGQKKAIIAISRKLLEMVYILLEREQYYDPLYPTRIQR

SEQ ID NO: 309820 - protein, 310 aa, unidentified
MQTICGVDVSKARLDAWIEAAGHRRFANDPEGVALLAAWSGEHDVSLVVMEASGGIEQPAFLALWRQGCPCAIANPKSVRRFAEAMGRLEKTDRIDAELIAGYAAAKRLKPTAPPSNEQRQLTALATRLRQVAADLGVQRQRLHSTSDPEALASLKEAIAFFDRQAKALNRRIAALIEADPLWQALDKTLRSVKGVADRTVATLLTELPDIGIVSNKAAAKVAGLAPIANDSGKRNGPRSIRGGKPALRTILFLVADVVRKYDPSLADFRDRLLAQGKPKMVVRVALARKLLVRLNAKARETRAELAYAL

SEQ ID NO: 309821 - protein, 405 aa, unidentified
MVRYIGMDVHREFAQVAVAEDGLVRDEGRIGVTPEALRQWAAGLRADDQVALEATGNSDAIANLLMPLVGRVVVSNPSKTRAIAEAKVKTDKVDARILAQLLAADFLPPVWLPDERTRSLRRQVMRRAHVVRQRTRIKNQVHAILARNLAPTPPVSDLFGMTGRHWLSRQDLPADERSAVAALLRQLDFHGAELAAVDKDLAAEALADPVVARLMTIPGVDAIAAISIVAAVGDFSRFDGPDKLVAYVGLNPKVRQSGNSAPVHGRISKAGRAQVRGVLVEAAWSASHAPGPLRAFYQRIKGRRGFQTAIVATARKMIVLAWHLITKDQDYAFARPALIAHKRRKLELTAGAPSRRGNYRQPGAAYNDKQRRNAEAAAAERAEHAYQVLVAHWQSRKPAGQRHKA

SEQ ID NO: 309822 - protein, 336 aa, unidentified
MQMKYVGIDVSRDHLDFAMVNGDGTHEASTQVANETKAIKTLVRSWMKKHGLDPAASLFCLEPTGHYSHLLLEVLVDMKVAVWLAHPMDIKQGMGIARGKNDKVDALRIAQFARRYRDQARLFTADHLRMGKLKQLLMKRRQLVDSKVRLKIQLKDVNRRMHADLRKTFDQIDQANMRTIDRLIKKVELMIDQEISADPVIKQQYDLIASVPGVGPVLASNMLALTDAFTRFSTPRQLACHVGVAPFEHSSGSSVRGRTRTSQKAHAGLKSLLHMAALVAIRNDQELGDYYRRKVAEGKPKLCAINAVRGKIVHRILAVLRRNEPYVPYARFMQAV

SEQ ID NO: 309823 - protein, 322 aa, unidentified
MATPIVAGIDVGKSTLVAALSTSTRSRSFPNAEAGWQRLITWVREQQGTLVIMEATGRYHLGIWEALEGAGIAVAVGNPQQLHYWIKSQGQRAKTDGLDAMQLARYGVARQPKPTPLPSKPKRTIAALVDRRQQLIKDQTRLGNQLELADAAVVDDLADQLADVQRRIRAMEAKLETATAADAETDQRVRQLQTAPGVAHLTAARLVADLPELGQVSGKQIAALVGVAPFDRQSGRVNGPARIGGGRATLRHALYPPIVTTIRCDPTFAAFYARLRAKGKSVNQARIACLRRFLGVLNAMVRLGLTWAETKVGQRQFLPLAA

SEQ ID NO: 309824 - protein, 337 aa, unidentified
MGGRYVGIDLHRRRSVIYTMDADGEKVDCVRIVNDALGLLEQVSRAGTDCEVVIEATYGWYWAVDLLRDAGFSVHLSHPSGNDWGNRRVKNDERDARDLADLLRLGRLAEAWIAPPHIREARELVRYRAKLVQLRSGLKAQVHAVMAKEGVLPQLVDMFGPGGQQLLDEMELADAYVVRVESLRDLIEVYDREVVMLERTIHERLRDDTGYQAIQALEGIGRTMAAIFVTEIGDVSRFRSPEALCSWAGLTPRHRESDTKVTRGRITKQGPKIVRWAALEAVVRYHGGSRLRQDFHRIAERRGKNKARVAVARKLLTLVYYGLRDGEIRCLRESVAA

SEQ ID NO: 309825 - protein, 375 aa, unidentified
MAKNTRFVGLDVHAETIAVAVAEGRGKVQSLGTIPNRPEAVRRLLGKVGKPGELRVCYEAGPTGYALYWQLTAMGIACEVIAPSLAPSKPGDRVKTDRRDAERLASSYQAGTLTVVWVPDPKHEALRDLVRAREAAKQDMKRAKHRLGKYLLRYGQRPGNGAKAWTAVWWQWVRKLELPHAEQNTTLVELILEVDHQSQRVARHDGAIDRAVASAPEHLRAIVAALQALRGVAQETAVTVALEFGSFSRFERAPQAMGYTGLVASEYTSGSKKRQGAITKTGNSHLRRALVEAAWHYRHRPRLNQRQKQLQGTLPPKVAEIAWAAQERLHRRYWALTNRSKPSPKVIAALARELVGFVWAIGKETEQSLAAQRAA

SEQ ID NO: 309826 - protein, 342 aa, unidentified
MDTMIGVDLAKNVFQVHGALMSGQVQFRKKLTRLQFQRFMAGREPCVVVMEACGGSHYWAREMARLGHEVRLIAPRYVKPFLKRHKNDAVDAEAIVEAAQRPGMRFVEVKTEDQQARAILFRTREQLVRQRTDLINALRAHLYEYGYIVPQGIGHQGRLKEILDEPKSELPELVREVGRTILEQIAGKNDAILSMDRKMRHLAAQSDNARRLQTIPGVGPVTALAVEAFAPSLQAFRCGRDFAAWLGLVPKQYSSGGKQRLGRMSKAGQRDIRRLLIIGAMSRLNWLGRKSIAEGSWLDRLARRKPRMLVAVALANKMARTIWAMVTKQQDYRDPARAAAAY

SEQ ID NO: 309827 - protein, 359 aa, unidentified
MFKDSTTYIGVDLGDKQSHVVILDSNGEMVEEARLPTTRASFQRKFSSLPGCRVAMEVGTHSRWASHLLENLGHDVLVANARKLRAIYSNPRKGDRADAETLARLGRLDPELLSPIHHRSPQAQADLAVLRSRDAVVRSRSLLINHARSIVKSCGARLPSCSADSFAHKVASDIPESLRPALAPILDTIACLTQQIRAYDRKIEELCSECYPETKQLRRINGVGPLTALAFVLTLENPDRFRKSREVGPALGLVPRTDQSGDRDPQLRITKTGDSYLRRLLVGSAQYILGPFGPDCDLRRWGLRLAERGGKNAKKRAVVGVARKLAILLHHIWKNGEIYDPFYQSDTNALEPLPASKAA

SEQ ID NO: 309828 - protein, 355 aa, unidentified
MQVPKLDFSGYNIYAGIDVHKKSWSVHIVGDSVEHGAFTQPPEPSLLVHYLRKNFPGAAYHCAYEAGFCGFWIHDQLRKEGVNCIVVNAADIPTTAKEKSQKRDKVDCKKIARALRSQQLRPIYVPSRDNLEDRMLVRNRFKLVENRTRCKNRIKATLCYYGINIPPELDSGKWSKKLTGWLKALPMSNASGKTALDILIKELEALEALIKELTIRIQVLSQTDTYKRNMELLRSIPGIGGIAAITLLTELGDINRFKTLDRLNSFIGLVPCVYASGDTEKLGHMTYRGHDVLKCLLVEASWMAVRRDPALMLQYQVLTKRMKGNKAIIRIVRKLINRVRYVLKNQKPYELGVVA

SEQ ID NO: 309829 - protein, 454 aa, unidentified
MARPVLAVGIDPAKRVHHAAAVLYPDRLILDTAFANDRHAIQDFDAKVAALAIQHEAELIYGIEDHRGYGRAVTQTLHQAGRQIRVVNPLWTHRQKDFYGQDKDDRIDARSVAAVVLRRADKLPDAGDVSALSAAIREAERTLEDLGRQRTRALNRLHRHLSDVYLASYETFFDRLKRPWVLRFFSRFPLPQDLHGQSTEDLARTLQELAGRHLGSARKSLGKRAHHILAATAALQTQPRDRSLALKAELIHQLCEEILANLERTRRLERLLHDQLLPATGQKLESVPGIGTLTAATILGEIGDVQRFPNRHAFAKYNGTAPASKSTGGRQRHTARRGCNHRLKRALWLIALTAVRHDPLARAYYQRRAEGGLSKVDAIKRVARRMSDIVYAMLRTGAAYDRKRLEQAIANRQVAASKAGGTSSKDRQDGSAVGPALPAFDDASLPKSRHGTNR

SEQ ID NO: 309830 - protein, 369 aa, unidentified
MEERIKFFVGLDVHADTIEVAVAEAGRQPARCVGRIAHDVPKLLKVLKRYGDSQQVHVVYEAGPTGYGLQRALAKGGYPCQVIAPSLIPKRAGDRVKTDRRDGLRLAELARAGELRAVWVPDPADEAIRDVARAREDAVKARMQARQQLKAFVLRHDLRYPQRTSWTKTFYRWLATLSFQSEGAQTAFTEYWQAVTAADERVGRLSDALVRSIEGWRFEPVVKALLALRGIDQISAIGLVAEIGDLSRFGHPRQLMAYLGLVPSEHSSGERVVRGSITKTGNTHARRLLTEAAWSYRFRARIGYAAQRRAENLPQLIRDLGWKAQLRLSGRFARLQARGVHQNKVCVAVARELAGFVWAIGRQAQLEQH

SEQ ID NO: 309831 - protein, 403 aa, unidentified
MSQRFAGLDWASQTHAACVIDEHGSVAVQFEVKHDAAGLAELCRRLRGAGITAVAIERPSGLIVDALLEAGFTVVPIHPNVVKATRPRYRSHGGKSDASDAYLLADLLRTDGQRFKPLAPQNDDIRALRALVRGRDELIATRVQLANQLRSLLESFWPGAADVFADVDSPVALAFIQRYPTPESASRLGPKRMAAFCAQHAYSGRRSADELLARLHQAPAVALGELEIEAKGELTLSLARTLHRLVAQIRLLTSRIEHHVGSIDDGRILMSFPRAGRVCAAQILSELGSVRERFDSDEHLAAEAGVAPVTYASGKSRAVTFRWACNHRLRAALTCLADNSRHANAWAAHVYAKARARGCDHPHAVRILSRAWLRVIWRAWTDRKPYDPMLHGSAQLLLKTARG

SEQ ID NO: 309832 - protein, 379 aa, unidentified
MYRILKIGMDVHTTNFTLCALESKFGEEDQILANITVGPDHKNVLDFIRRIKEKMDPKGHDEIDVECGYEAGCLGYSLFHTLTGCKLICRILAPTTMLSEQGPRIKTDRRDAKLIAQCLSSGGYHAVHIPTAEDNTVKEYVRMRDDHKLALKKVKQQTNALCLRFGFFCDGTHWTGKHLQWLRALKLPELIRETLNEYLATYDELTAKIDRYDKRIQEIADQSEYQEKVRKLECFLGIKTHTALSLIVETGDFIRFRKGNVYAAYLGLAPGEHSSAESGGRLGITKAGNSHLRRLLIEAAGGICKGQIGKKSKDLISRQKGNSADVIAYADKANVRLRSKYYRLTRHGKKRNVAVAAVARELACFVWGMMTENIHGNAA

SEQ ID NO: 309833 - protein, 320 aa, unidentified
MSSATLGIDIAKATFQAALLHNRKLHQHRFDNTPTGFAQLQAWLVKHRCKRLHACLEATGPYGDELADFLYQAGHTLSVVNPARIKGFAQSELQRNKTDQLDAALIARFCAEKQPEAWIPPPLEIKQLRGLVRRLEAVQEMRQQEVNRLAQVGKQPLVGESLNKIIAALDQEIGRLRQLIKAHIDEHPDLKRHRDLLVSIPGIGETTAAWLLSEVQVEAYSSARQVAAHAGLTPRHHQSGTSVQRRTKLSKTGNRRLRRALYMPALSAKHYNPIIQAFCQRLAKRGKRPMEIVGAAMRKLLHIAYGVLKSGKAFDPSFAS

SEQ ID NO: 309834 - protein, 422 aa, unidentified
MTQQQNTSILRVMHEVCCGLDVHKELINACLITTDENGLEDSELRVFQTFTDDLCRLRDWLLDHNCPIIAMESTGIYWRPVHNILEGFFEVILVNARHFKNLPGKKTDMSDCLWICGLLRVGLLKGSFIPQKHVRHWRDLTRYRRSKTEDLGDVKRQVHKLFESANIKIDSVASHLFSRSGRNLMELLLEKDRELTLEDVRKCLKGTLKSKSQELYRAVQGFFEEHHRWLLEKMLAHADHLEHLITDIQVRLRSLLEAHEDTIDRLIEIPGISFISAHAIISETGPTLSTFPNTASLCSWAGVCPGNNESAGKRHSGRSPVRRGNLKTILIEVAWGAVRTKRSYFRAKFFSLRSRLGPKKAIMAIAHRILKAIYHVIKHGEKFKDLGEDYLNDLHKKSKIDYLIRQAGKFGFKLMPCAILEK

SEQ ID NO: 309835 - protein, 411 aa, unidentified
MFSPLYVGIDVSAKDHKVQFLKSDGNEVLKFSVPNNLPGAKILSDKVVNVMSGGSYDSLVVGLEATSVYGDHLVYFMKEDASINKFKPKLHVLNPKQVANFKKAYPDLPKNDWVDAWVIADNLRFGRITKEVYMGDYRYDALQNLTRARFLSVQNLSREKSRFLNYLFMKFSSLAQEDIFSNTFGATSTAIIEEFHSVDEIAYMDIEDLANFISNKGKGHFADPKQVAEAVRAAARSSYRLPKTVNDSVNQVLAISMTSIRALMEQIKLFDKAIEQQIQLIPNTLTSVKGIGPVYSAGIIAEIGDIHRFKNQAALAKYAGLAWTQHQSGQFTSDNTRLIRSGNRFLKYYLFEAANSLRVHDQEFKRFYTLKYRQTPKTPHKRALALTARKLVRLVDALLRSNRLYIPPTGR

SEQ ID NO: 309836 - protein, 321 aa, unidentified
MTYVGIDVSKVTFVVAYSSVKTNKTRTFKNTVNGVHEFVQTISASEHNCVLEATGNYSALLVYLLSEAGITISLENPLKIKNFARVMLTVTKTDEIDARLIALYGEKMQPAPYKLRSDAILVLKQKRTVLRQLKKQLVATRNLKGSMEVLPFFDPKCKKTIEKTITFLEKQIKEMEEELASLAQGEYKKQMDLLTSIKGIGVTLAAPLIVATGRFSYFDNAKQLTRYLGLSPTYQQSGTSVNVKGHINRNGDSSLRSQLYVAAFSSLRCNTECKACLDRLRSNGKPGKVVVIAVANKLVRQAFAVVTQGKPYVDGFKSEKP

SEQ ID NO: 309837 - protein, 405 aa, unidentified
MISVGIDVSKGKSTICILKPFGEILMSPRDFEHTQSDLKQLVNKLSKYEEELHITMEATGIYHLPIAQYLKSSGYTVYIINPLEMKRYRCQGIRNPKTDRIDAAIIAQYGIDYWFRPCHESDIESIRNELKLLGNQYRSFMKARQERCLALCNILDRTNPGIYGIIDDFSRYTGKDKLCDFTHDFYHSSCITKYSEKKFVERYKSWTEKKGYRFSDTEARQLYQIAKESIPTLESTESTKLVVQQTTNTLKEVNTSLFAILTRMNELAKQTPEYETVMAMKGVGDSIGPRLIAEIGDPRRFHSAKALIAYAGIDAPPYQSGKFTGTERHMSKRGSKIMRKLGFEIMDAINKHQRSYAGDPVCEYFLKKRAEGKLYKVAMFAAYNKFLRIYHSRVSSLLNKAEISV

SEQ ID NO: 309838 - protein, 342 aa, unidentified
MVYYAGIDVSLEYSSVCVVDGSGKVIREAKVASEPEALIDRLTSLGLEFARIGLEAGPLSQWLYAQMKLAGLAVELLETRHVSDAFKAMPVKSDRNDARNIAQLMRLGWFRPVHCKSLAAQEVRAMLTARKLVQSKLLDVENSLRGILRGFGLKVGKTTRARFADRVAGLVKGHPSLEVLAASLLRARAVLLAEFNGFEKRMRQTSLLDAKAKLLMSTPAVGPIISLTFASAIDDPSRFTSSKQAGPLFGLTPKKYQSGETDYSGRISKLGDASVREALYEAAHIILTKPIKGCAQLKSWATRIARRAGMNKAKVALARKLAVIMLCMLKNNMPFNPAAKAA

SEQ ID NO: 309839 - protein, 402 aa, unidentified
MNAVGIDVSKGKSMVAIMRPFGEIVSAPFEIKHTASDIHSLVELINSVEGESRIVMEHTGRYYEVLAHQLSKANLFVSAINPKLIKDFDNDSLRKVKSDKADSVKIARYALDKWQNLKQYNVMDELRNQLKTMNRQFGFYMKHKTAMKNNLIGILDQTYPGVNTYFDSPARSDGSQKWVDFASTYWHVDCVRKMSLNAFIDHYQNWCKRKKYNFSQSKAEEIYGKAKELVPVLPKDDITKLIIKQAVNQLNSASTTVESLRTLMNETASKLPEYPIVMAMKGVGASLGPQLMAEIGDVSRFTHKGAITAFAGVDPGVNESGSYEQKSVPTSKRGSSDLRKTLFQVMDVLIKTHPQDDPVYQFIDKKREQGKPYYVYMTAGANKFLRIYYGRVKEYLSSLPES

SEQ ID NO: 309840 - protein, 315 aa, unidentified
MATSNETYAGIDVSKDKLDVAVLGEERVEQVDNMQKGIASLVARMQELQPELIVVEATGGYQRAVVDALFWAGLPVAVVNPARVRQFARAFGLLAKTDKLDARMLAVFGQRMQPRRYEAKSEAGKELSALLVRRKQLEEMLKAEKNRLRTISPSLQSSLERSIAFLKEEKKSLDASIQQFIQAQPAWQEETEILDSAPGVGKVTTATLLAELPELGKMDRRKIAALVGVAPMNFDTGKKRGYRKTKGGRGVVRSVLYMATLVATRRNPVIRAHYQQLLKRGKEKKVALTACMRKFLTILNAMLRDKQPFRCAANA

SEQ ID NO: 309841 - protein, 397 aa, unidentified
MEVYNKFVGMDVHKETIAVSVAEAFGGEIRFLGVFPNTSGAVGKLIRQLRKGEAKVSCCYEAGPCGYGLHRQLVNMGVANQVVAPSLIPKKPGERVKTDRRDSLSLARLLRAGELTSVWVPDATEEALRDLTRAREDLKRLELQAKQRLSAFLLRHGKTYDGSKQRWTRMHLRWLEKVKFDLQVHQIIFQEYLDTILMLSRRAEALDKQIESVGPASALGPLIGALMALRGIDRLAATSLMAEIGDLRRFPTAPQLMAYLGLVPSEYSSGPSQNRGGITKTGNGHARRVLVEAAWSYRHPARKTAHMQRKAKGTTEAAQEIAWKAQTRLCARYRLLESRGKLNVKIATAIARELVGFIWAMGQTFPPPKGGEPAPEARAQCVGSRTGHGRRILGGSM

SEQ ID NO: 309842 - protein, 414 aa, unidentified
MSLALREAKFFTGIDWAAEIHAVCVMDATGKIVAQFTIAHSADGIATLIRRLARFGDPAEMQVAIERPNGRLVDLLPEAGHPVVPVKPNAIKAWREGEVLPGAKSDAGDAAVIAEYLRLRQHKLTVAVPYSGRTRALRTVVRTRGDLVQTRVATANQLTALLEDSWPGAAVIFADIDSPIALGFLARYPTPASAAHLGEKRMAAFCSGHGYTGRRTAAELLERLRSAPAGTTDQAVTIGLADAVLALVTVLTALGAAIKNLDRPAAARLGEHPDGEIFTSLPRSGQISAAQMLAEWGDCRQAYEHPDPVAALAGVTPVTKESGKHRSVQFRWACNKRFRQAVTAFADNSRHASPWAAQIYHDAIAGGKDHSHATRILARAWIRVIYRCWLDGVPYDPAKHGAAATLANQIAARG

SEQ ID NO: 309843 - protein, 352 aa, unidentified
MQHFIGCDVHTRNQVVAWIEAETGEIKTRRLEHAGEEVRKFYAQFPRGTVVGIEATFPVYWFERLLGELGHELWVGDAARIRASEVRYQKTDPRDAEGILDLLRTGRFPRIWVPSLEERDLRQLLVHRMKQVRARTQVKNQLHALAISQGVCRGRKLWSAKGRKELESLVLLPWAARRRKELLESLDRLDAQVRELDRAVEEAGGARPEVALLRTHPGVGMVVGLAFVLSVGPIERFPHSRKLVSYWGMNPREDSSAGRQRLGSISKQGNTMMRWLLVEAAQTAARLDPQLRRTYQRLKKQKASGVAKVAVARRLAVRLFWMLRTRHNYAQLVHMSGSPSSAVVPPQGGPNV

SEQ ID NO: 309844 - protein, 427 aa, unidentified
MDNNKTGNRKQVNILEASIGVDIGKYQHVAVAQSWDGRRLKPLLFDNNLQGFNKLWEYRSKAKECLGVSDVRFALEPTGQYWKALAEWLERKPAEVRMVQPAHTHKAKELEDNSPGKHDIKDAGVISDLDIQRKSLNLVRPQGVFAELRYLTICRQGLVKDLNREVNRLHRLMDVLFPELIGLFKNHIGKGLLELVKTAACPDQMVRLGEQAIKDLLKKKSKGTLGLERARAIMNAAGNSIGIREGREALELELRQLLVRMELVRQQLSEIELTINGVIKKVPYIEILSSIPQVGQITLAAILGEAGDFRQYQNARQIIKLAGLNLYEISSGQHHGRKRITKRGRPLLRQMLYLAGLRLIKQKGAFYQFYKRLVEKGKAKPQAIVAMGCKLLRVLFAMVRSNSKFKEQDESPLLIVNQIRALPLIGA

SEQ ID NO: 309845 - protein, 344 aa, unidentified
MITIGIDPHKSSHTAVAVDAAGHQLAQRRFVVNSGTVRQLMRWCEKWPERRFAVEGAKGLGRSLAQQLAAAGEHVVDVPSTLSARARLLATGGDRKTDAADALHVAQVALFRQDLHAVEPEDQSTILRLLTERHDDLVNERTRIINRLHAVLRDLLPGGAPTRLSAEKAAALMKGLRPTTATDCCRRDLARDLLADLRRIDRQVRDNEAQMRDALAAAHTALTALPGLGTVLAAKLLGHVGDVTRFPSEHHFASYTGTAPLDASSGKNTRHRLNTGGNRALNSVLHIIAVCQIRDGGRGQEYYLRKIAEGKTPAEARRALKRRLSNVVYRTLKRDHHTALTAAA

SEQ ID NO: 309846 - protein, 344 aa, unidentified
MEKLIRIGIDTSKSVFQLHGVDAGERPALRKRIRRKELVAFLAGLEPTVIGMEACGGSHYWARVIEGLGHRVKLIAPQLVKPYVKRGKNDAADAEAVCEAMSRPGMRFVAAKSAEQQAGLMLIGVRDRMVQNRTQLTNAIRGYAAEFGLIAAKGLEKIDLLLARVQADETLPDLARALFAAQAREYAGLQARLREVEERVMAWHRGNECSRRLAEIPSIGPIGAVMLAMKAPDPMVFRSGRHFAAWIGLTPRDHSTAGKVRLGSITRAGDPALRSVLVVGAMAVIRQASKGRASPWLLDLLTRKPRKLAAVALANKTARIAWKMMMTGQSYDARRGGATIAAAA

SEQ ID NO: 309847 - protein, 423 aa, unidentified
MEVIHPRCAGLDVHKETVMACVRLALGGKVTREVRTFETTTSGLLLLLAWLTEQGCTHVAMEATGVYWKPVWNILSDGDFELVLANAAHIKNVPGRKTDVSDAAWIADLLAHGLIRSSFVPDQEIQELRELLRTRKQLIRQQTRHIQRLQKTLEGANIKLDSVIADIVGMSGRAMIEALIAGETDPAKLAALANYRIKASPQQLREALRGRVTDHHRFLLRLHLQQIDFADAAISDIDRQVAALIARMDEEVEAGQASFQTLISLLMTIPGISLLAAQVILSEIGLDMSRFPSAGHLLSWAGLCPHNDESAGKRRSTRLRKGDPWLKTMLVQCAFAAKRKKGSYFNAQFHRLASRRGPKKAVCAVAASILTTIYQMIKDGTQFEDLGADHFDRRSKDVRAKRLVTQLAKLGFDAKLTPLAKAA

SEQ ID NO: 309848 - protein, 390 aa, unidentified
MRYVGIDIGSDSHVVAAVTADGTVAFKPTKIPEDAAGYAKLFALLGQAPVVLVTMEATGHYWRNLFAALVAHGYAVALLNPLRTRRFAGEGLERTKTDSIDALGIARFGAEKRPAVTRLPDAATDDLRELVRHRDRLVADFGDRVRQLHRLVDLGFPEFRRHVKSLDSMLACTLLAEYPNAQAFAGAPPRRLARLVYDGVHKVGPELAAALIEVAKVSVGQHHGPAYRIQVRHTCLDLLRRRIRELDGDITRQLDDHEVGSLLTSIDGIGPHTAARLIAELGDLGRFHNAAALAAYIGVVPGLKQSGKRRGQRAGLCPIGHSRLPAALWMPLLAAVRRNPWLKAFYDRLISRGKLPKVALVAALRKLLGAVFAVVRDRKPFVPRLLAVVA

SEQ ID NO: 309849 - protein, 344 aa, unidentified
MAIVGGLDIHRRQITYDILDTDTGETRRGQLSPATRTELRAWLARFTGQQTDFAFEGTTGWRFVAEEVMGAGFRAHLAEPADTRALRGPKRRAKTDRTDAHHLRELLRAGTLPESWMPPAHIADARTQVRLRRVLVGERTGWQQRIHAILFHHGLPERSQLLTADGRAWLARVELPAVARQAVELALRMIDQLDTELDLLDTQLARIARAQPGCTALQRRYGIGWLTAVAIWAEFGDVRRFANSRQAVRFCGLDITISESDGKRARGHLARQGSPVLRWALHEAAMCAARPSSPDHAYYLQVRQRLGGKRAALSVARKLAREAYHTLRELGDQALVPVELATAA

SEQ ID NO: 309850 - protein, 341 aa, unidentified
MDIAVLGIDLGKNSCSVVGLDASGRVVLRRRLQRKTIVTVAAKLPPCIIAMEACCGAHHLGRVLAAQGHTLRLMSPEYVRPYVKAQKNDDRDAEAIAEAATRPTMRFVTLKSEDQLDMQTLHRVRDRIVAERTSLMNQLRAILLERGIIVPKGRAKLRLRISELILQPCEELSPRIRLLIEDMLTRWQALDDRIAAFDAEFAAEARQNEAARRLTAIPGIGALNATALVAAIGDAQTFGRGRDLAAWLGLVPRQATTGGKPRLLGISKRGSRYLRKMLIQGARSALPTLSRSQTLLGQWLRGLLARAHVNTVVVALAAKMARTAWALLRHGRVFEARAITG

SEQ ID NO: 309851 - protein, 344 aa, unidentified
MSEVITIGLDIAKYVFHAHGVDGRGRALFSKRISRGKVLEFFAAQPSCTVALEACGGAHHWARQLTQLGHQVRLIPPAYVKPFVKRQKNDAIDAEAICEAAQRPSMRFVAVKSEEQQAAGLLFRTRDLLVRQRTQLINAIRGHLTEYGWIAPKGPSHMARLADLIEEEEMVSSLPEAAHAMFRLMLDLLAGLNGKIADLDKEIARRAREDEVSRRLMTIPGVGPISATAIAALAPPAETFAKGRDFAAWLGLTPLQRSTGGKQKLGGTSKMGERTLRRLLIIGSSAVVQQASKRGAPEGSWLEQMLARKPRMLVTVALANKMARVVWALLLKQENYRAPVVAKA

SEQ ID NO: 309852 - protein, 402 aa, unidentified
MNAVGIDVSKGKSMVAIMRPFGEIVSAPFEIKHTASGINSLVELINSVEGESRIVMEHTGRYYEVLAHQLSEANLFVSAINPKLIKDFDNDSLRKVKSDKADAVKIARYTLDKWQNLKQYNVMDELRNQLKTMNRQFGFYMKHKTAMKNNLIGILDQTYPGVNTYFDSPARSDGSQKWVDFASTYWHVDCVRKMSLNAFIDHYQNWCKRKKYNFSQSKAEEIYGKAKELVPVLPKDAITKLIIKQAVDQLNSASTTVESLRTLMNETASKLPEYPVVMAMKGVGASLGSQLMAEIGDVSRFTHKSAITAFAGVDPGVNESGSYEQKSVPTSKRGSSDLRKTLFQVMDVLIKTHPEDDPVYQFLDKKRAQGKPYYVYMTAGANKFLRIYYGRVKEYLSSLPES

SEQ ID NO: 309853 - protein, 424 aa, unidentified
MNLTQNDRLKQVTFDTLIVGVDVGSKTHFCRAFDWRGFELSRRVFKFSNTGLGFLTFLRWTEELMNKTEMKKVIVGCEPTGCYWLTFQKFLKEHGVQLVTVNPFTVNRSMELDDNSPEKSDLKDPKTIAHLVKDGRFSTSYLPSGVYAEIREASVCRDQIMKQHVRLSNQIQGWLQKFFPEYFECYADWDSTSGLLLLKEAPLPQDILKIGAGGINQIWRDAKVRAAGIKRAQTLIEAAQNSVGLEAGEAARLEIWVLVNDYILKAEQLKRLDEYLEEKVKEVPNVEKLLAIKGVGMSTVIGFIAEVGDIGRFTDPKQIQKLAGLEIVKKSSGKKKGQPRISKRGRRKLRRTMYESAKALMLWNPAFQDVFLYYRNRTRNPLGGMQAKIAVACKAIRVFYVVLQTGCDFDEEKFRKDIIRPEAA

SEQ ID NO: 309854 - protein, 419 aa, unidentified
MAPLSNQQFTAYVGIDWADTKHDICLQATGNARREFDCIPHQVARIDEWAKSLHQRFGGPIAVALELARGPIVAALQKYDFFVLFPINPSTLAKYREAFRPSRAKDDPTDAELALELLLRHPERFAPLRPQSVAMRSLFSLVEQRRELVGDKTRFTNRLCDTLKQYYPQALEWFEQRDTVLFCDFLTCWPTLLTVRRARRTTLEAFFHAHKCRIRLIAARLESIRAATPLTEDPGIITACRLHVLALVAQLRTVLWAIDVFDREIAAVARAQPDFALFDCLPGAGPQMAPRLLAAFGEQRERFHGADELQKYTGIAPVTERSGKKSWVHWRWQCPKFLRQTFVEWAAQTINKSFWAGAYYRQQRAKGSTHQAAVRALAFKWIRILYRCWQTRTRYDETTYLNALRKRGSPLLRHLELPG

SEQ ID NO: 309855 - protein, 390 aa, unidentified
MQALYPRPDEHAAVRTDLKAIFVSLELSRSTWVITSLSPGGGEKMSKHAVPSGDVAALLARLSKLKEKARLRTGQVFPIIVIQEAGLDGFWIHRVLQQEGIESHVVDPASIATSRRRRRAKTDRIDGEAQVRALLAYKRGEPRVCAMVQAPTPQEEDRRRISRERETLTAERVRHVNRIKGLLFAQGIGDYEPLHRNRRERLEALITGDGRPLPECLKAQIRRELDRLELLIEQIKAVEAERDAVLAQAQASPGVPAPAAQLLALRGLGPEAAITLWAEGLFRRFSNRKQVAAYAGLAPTPWQSGSVHRDQGVSKAGNPRLRTIMIQIAWLWLRHQPQSALTLWFRARIKRTGGRLGKTMIVALARKLLVALWKYATAGVLIEGAVLKPA

SEQ ID NO: 309856 - protein, 347 aa, unidentified
MRFYTKQHQFYCGIDLHARTMYVCILNHDGEIVVHRNMPTSPEALLKTIAPYREQIVIAVECIFTWYWLADLCAQEGIPFVLGHALYMKAIHGGKAKNDKIDAQKIAVLLRGGMLPQAYVYPAKMRATRDLLRRRMHLMRKRAELLTHVQQTNCQYNLPEIGKKIAYKANRAGVAERFPDPAVQKSIEVDLALIDYYDQLLQDLALAIVTTAKQHDANTLYLLQTVPGIGKILSLVLLYEMHDIARFPRVQDFVSYCRLVKCAKESAGKRYGTSGTKIGNAYLKWAFSEAAVLFLRNNPAGQKYLARLEKKPGKGKALTVLAHKLARAVSDMLKRGVVFDRDTFLHS

SEQ ID NO: 309857 - protein, 429 aa, unidentified
MNTPNIPESEIAAWVGLDWADQQHVICLQAADWAAVETSVVKQRPESIQAWVAQLQARFPQGKVAIALEQSRGMVLYALMAYECLVLYPIPPKTLAKYREAFHSSGAKGDLSDAALLLDLVRRHRERFQAWVPDDPSSRQLRLLVEERRKLVAQKTRLTNELTSRLKSYFPQALDWVGELDTRLACDFLPRWPRLDSLQKARPAQLEQFYRRHHCYRSALIQQRLEQIRQAQPLTRDPAVIAATSLMVQALVRLLGPLLESILQFDQQIEALFAQHPDQALWASFPGAGPVLAPRLQAAFGSDRARFQQALELQQLSGIAPITQQSGKSRHVERRWARPKFLHQTFYEYAAQSRLACGWARAYYEQQRARGSKHPAAVRALAYKWIRLLFRCWQNRVPYNEETYLKALARHNPALRLAAEAAQIFIICR

SEQ ID NO: 309858 - protein, 407 aa, unidentified
MDVVHPKCAGLDVHQQTVVACARVVSGASVHHEVRTFGTTTQDLLALSDWLTAHGCTHVAMESSGVYWKPVWHVLGGHFELVLANAMHIRNIPGRKSDVSDATWIADLLAHGLIRGSFVPPEPIQELRDLTRTRKQLVREIAQHTLRVQKTLEHANIKLTACLADILGVSGRAILQALVAGERDPERLADLASERVKASRAELVAALHGHVTPHHRFMLTLHLTQIEALEAAVREVEARLGNALAPFRAAVDRLITMPGVSETVARVIVAEIGFDMTHFPTAGHLVSWAGLCPRLHESAGKRLSNRTRSSNPWLKTTLVQAAWSAARKKDSYFRAQFLRIKSRRGPKKAVLAVAASMLTAAYHMLKHGVDYRDLGADHFDRRDKAKLAKRLIARLHDLGLTVEVRAA

SEQ ID NO: 309859 - protein, 325 aa, unidentified
MKNFIIGIDISSKTLDICVKEQQELSHFEIENSQKAILKFFRTYKENQVIVAMENTGRYNWKLFEVLPKFNFKIYVLNPLHLSKSLGLVRGKDDKTDAYRICLFIQKNKEDLSIWKPTSKAIKKLGILITERSSRVKMKIRLLKQQHDYKLMKDVGLDKELTKLSKQFIAQIEKQRKNIEQKIEAIINEDPALKQQAKLIRSVPGVGKVLSWVMIAKTEGFTKITDPRKMACYSGVVPFEHQSGTSVYRKPKVSNFADKSTKAVLHLGAMSAIRLNNDLRVYYQRKVNEGKNKMLVLNNVRNKIIHRIFAVIKNQELYKNPLVLS

SEQ ID NO: 309860 - protein, 414 aa, unidentified
MEQIHDRVAGLDVHRDVVVACARVPGVRGGTVTEKERFQTTTGALARLAGWLADRYVTLVAMEATGVYWKPVYYALEDSFEVWLCNAHHVKNVPGRKTDMSDAEWLADVAAHGMIRPSFVPPPAIRELRELTRYRKTQTDARVAEIQRLEKVLQDAGVKLTSVASKVLTQSGRLMVEALIDGQRDPAELANLAKGKLRPKIPELSEALNAHFGAHHAVAAARILAHVDFLDATIKALTEQIDVRTKPYQAARELLMHVPGFDRLTIDTVIAETGADMSKFPGPGHLAKWAGVCPGNHESAGKRRRVGVTPGNPWLRRALVEAARAAARTKGSYFGAQYRQIAKRRGPNKAAVAVAHSLSDLIWHMLSTGEVYHDVGDGYFQRRHDPERETRRLVAQLEQLGFQVALTTLQDPAA

SEQ ID NO: 309861 - protein, 310 aa, unidentified
MNDTIGIDISKDTLDIHRLSDGTRSQFGNDSSGLGTLRRWIGKVPVRVVYEATGRYHRDLEAALEPGGHALVKVNPARARRFAQAIGQGAKTDRVDAAMLARMGAVLDLEAKPVRSCSMHEIRELHVARIGLVKDRTACRNRLHGARNKVVLGQLRARLKQVERQIEQIDAELLRLIAGDPQLARRLEILTSVPGIGRVAAAAMIVEKPELGSMDGKEAASLAGLAPIPRESGVWKGKSRIGGGRHQLRRALYMPALVAIRHNRQLGQVYQTLCDAGKPAKVAITAVMRKLIILANALIRDDRKWAETAP

SEQ ID NO: 309862 - protein, 368 aa, unidentified
MKNVTTYVGIDAHKKDLFVAMLMGNEKTPVTWQLSNEPRAVHRLVRKLERETPGPIRVFYEAGPCGYALQRQVKTSRVSCDVVAPALIPRKPGERVKTNRRDARKLVELGRAGLLTAVRPPTAADEAVRDLARARDDAREDLQRCRHRLGKLLLRRGLHFAGKNWSRAHRRWIDTLGWAHAAERAVVDDYLLAIDQLEARLTELDERLAEIAQAAPYREPVAWLRCFRGIDTLTAMLILAELHDFRRFASAPALMAYLGLVPGEDSSGEKHRRGRITRTGNALVRRLLVETAWHYQHRPSVGIALTRRRKGQPGRVIAIADKAQQRLCRRFRKMVAEHKPAPKIVVAIARELAGFLWAALQPAPVSVS

SEQ ID NO: 309863 - protein, 354 aa, unidentified
MNHLGIDVGKRKCRAALKDDKGKILDEFFFSNEGNGIHNLLSRIQSHGKCVAVLESTGNMWMRIHDMLEEIGIDTKLANPNKTRIIAEAKIKSDKLDARILSDLLLRTDLIYESYVPKRENRDKRSLVRHRITLSRTKTKLVNKVHSILDKYDYRTELTDIFGKSGIEWLKALSSQVTPVDRIILDTSIESIEAINRQIDTVSKEISKYARDNNDIKILLSITGIDIFSAMLISTEIVDIKRFSTPWWKLVSYAGLAPSIRESSGKIKTGGITKQGSPWLRWILVQCALIAIKYDTHLRIFYDRIKNRRGHATAIVATAKELLVIIWYMLTRNELYRYMDKQRYERKIKKLEQR

SEQ ID NO: 309864 - protein, 380 aa, unidentified
MCTESFGTTSSDLLALRDWLLAHQVTHVAMESTGVYWKCVYYMLEDDFELLLVNARHIKHVPGRKTDTIDAAWIAQLLACGLLRPSLVAPRPIRELRDLTRYRKALIYERGRAVNRLHKLLEDAGVKLSCVATDVMGVSGRQMMRALIDGQADAEALAQLAKGKLRAKLPALRKALEGRFTAHHAFLLERILAHIEALEDDIEAISARVEEQIAPFEPAVQLLRTIPGVERRSAEVIIAETGGDMSRFPSAAHLASWAGVCPGQNESAGKRKPARTRKGSPWLRATLIESARAASRSKGTYLGERYRRLARRRGDKKAIVAIAHEILTATWQMLSTGELYREPGTTVISQREADHARRRAIRQLEQLGHKVTLEPLPEAA

SEQ ID NO: 309865 - protein, 309 aa, unidentified
MDTTIVGIDVAKDRLDVAVRPSGELFVVERNAGGLELLVERLKPLAPTLVVLEATGGFETVAAAALAAAGLPVVVVNPAQVRAFAKAIGQRAKTDPIDAAVIAHFAEATKPEPRPLPDEATRLLADLVARRRQIVEMIGSERQREKRATARIKKSIARLIKALEKELASVNGDIDDAVHGSPAWRDKEDLLASVPGIGPIIARTLIADLPELRRLDRKKIAALAGLAPFTRQSGQWRGRSFIGGGRSKVRTALFMGAMTARRHNPILKAFFARLVAAGKPRMVALIAVARKLLTILNAVLRDQKPWQTA

SEQ ID NO: 309866 - protein, 375 aa, unidentified
MKQFIKYVGLDTHKDTIAVAIADIAGGKPRYYGEIANTPRALTKLMKDVSPNGEVTSYCYEAGPCGYGIYRQISGSGHDCSVVAPSLIPTRPGDRVKTDRRDSENLARLHRAGELTPVWVPDEEQEAIRDLTRAREDMKHLERQARQRLSAFLLRHGQGYDSKKSKWTQAYWRWLEGIKFAHPVQQVVLQEYIDSVKQQQQRVADLEQEMTKALSNWSLAPVVEGLMALRGCRLITAMTIMAELGDISRFDSPRQLMSYLGLVPSESSSGPKTRRGGITKAGNGHVRRLLIESAWCYRFPARKTAAIQRRAEQTTDKVQGIAWKAQKRLCGRYQALNKRGLLPQKTCVAVARELTGFIWAIACEVMGKQPSEALV

SEQ ID NO: 309867 - protein, 331 aa, unidentified
MFPVGIDVSKNTLDLCMLYDGIKGRIKTRNIQNNRHSVENILRWLRLQHCGPEDVHVVMEATGVYHERLATELHDAGFRISLANPHRSREFARGMGIMTKTDKVDAYMLACYAFLKKPHRWEPPAPEIRYLGALLRRRDVLLGDALREENRLEKYLSTDTPADIISSCRRMAQLLREEVSNIERQIKAHIKASPALRRDYTLLTSIKSVGPQLGMHMLVVLRSHNFVSAEQAAAFLGVVPIEKRSGTSVRSRPRMSKIGPPQLRAKLYMSALCGKIYNKQMRNIYDEMCLRGKPKMVAIGALMRKLVHWCYGVLKTGTVFNDEGLKQVLST

SEQ ID NO: 309868 - protein, 395 aa, unidentified
MEQVIIGVDPHKLSATIEVVDHLEQMLGSGRFTTDRAGYFAMRNYAKSWSERVWAVEGANGVGRPLAQRLLESGEQVVDVPAKLAARVRLFDTGHNRKTDAHDAHAVAVLAVRTPNLRILRVDGELEALRMLTDRREALTRRRVQTVCRLQALLTELLPGQAKRDITALQAKRLLATVRPRDIAGKTRRRIAAEELAELIVVDTKIKRATAELKAVVLARDSRLMDIDGVGAVVAARILADVGDVARFADRNRFASWTGTAPLDASSGEQDRHRLSRAGNRRVNHMIHIAAVTQIRLDTEGRAYYRRKRAEGKKPMEAMRCLKRRISDAIYRQLVADAQRVESADPGGHCGASQESSAVDLPPLIDTSDQPLPDPQPRRYAAPRRPRKSRPARTS

SEQ ID NO: 309869 - protein, 341 aa, unidentified
MNYIGIDHHKQYSHMTVMDEKGKVIKTSKVGNFRCEVEGFLEGLGSEMEAVIEAGHSSYTMIDVLEELGVKVRIAHPLQVKAIAKARIKTDKRDSKILAHLLRSDLIPEVYHRDRENRGFQRILRQRVFFVATRTRVKNRITSLIAQQNDEIRGRACQLKDLFNKAEMEFLQSIKLSSSDQKLLDELLKLNRHLERRIKESNNLVESLYTRMEEARLIRTIPGFGRFFSVLAATEIGDVSRFERAEKLHSYAGVIPSTYTSGERSYHGKMIKQGNKWLRWAAVEAVWPAIRSDFDLKLFYQRQIRRKSANSAKMATAKRLLTIVYRVLKERREYIPYKRKK

SEQ ID NO: 309870 - protein, 357 aa, unidentified
MGKSISNYSSVTTIGLDIAKNVFQVHGVDAKGAAVVARSVRRGGLLKFFASLPRCLVGMEACSSAHHWARSLIELGHEVKLIPPAYVKPYVRRSKNDAVDAAAICEAVGRPNMRFTPVRSVENQAELMRHRARELLAGNRVAMLNALRGHLAEAGIVAAQGAQHAYGLKRLLTDGCDENGEIVVPDCVRKALAPLVRQIDAIDEEIAAIDDEIAARVKTDDTARRLMTIPGVGPVTAQAIVATVRDTSAFSSGREFAAFLGLTPRQSSSGGKERLGRITKMGDRYLRKLLVVGACATLSHREGHHDALRVWASSLLARKAVKYKFKLTAVALANKVARIVFALMTRGGEYDERSVAA

SEQ ID NO: 309871 - protein, 376 aa, unidentified
MSDHIAAFVAFDTSKLRNAVAIAEEGREGEVRFFGEIDNTAEATAKLVKKLAAKYERLTFCYEAGPTGYGLQRQISHLGHECTVVAPSLIPKRPGDRVKTNRRDALDLAKLMRAGQLTAVWVPDPRHEAMRDLTRARGAAAQDVRQKGQQVSAFLLRLGRHYDADKKTWTKAHLNWLASQKFEHPEQRIAFEEMLLAVRQAQDRVGRLEEAIRAAVPDWSLAEVVTALMAMRGIDMVTATAFLAEIGDLSRFRTPRQLMAYLGMVPSERSTGDTVVRGPITKAGNRRARRLLVESAWSYRHAPRIGRDKQAKVAATTPAVAEIAWKAQHRLYRRYRALIRKGKLKTVAITAVARELAAFIWAVARAIANTDRAEAQ

SEQ ID NO: 309872 - protein, 440 aa, unidentified
MPETSLPVLDPTAAAIDVGSEQLHVSIAGGPPKIFGTTTGQLHEMRDWLKAQGVRSVALEATGVYWLCPYEVLEQAGLAIVVVNGKYVKNLPGRKTDMKDCQWQATLHAHGLLKPGFVPPEHIRRLQDYIRLRTDHITMAGSHEQHMQKALDRMNLKIHEVISDLTGMSGLKMVQAILAGERSADRLLGLCDPQVQRNKAGRLRAALAGHWKQEHLFALRQAYELWKFYQEKIKECDQAIEQVLREIAGPEDPAQPPPPPALKRGGVNSPQIQGLHGLLFRICGGKDPTALPGVADYVLVQLLAETGTELDKNWKTEKHFTAWLGLAPGSRQSGKRHGSQRRQRNRAGRLFCIIARSVGRSVDKALGGFYRRLKGRRGGLVANLALARKLAELFWRLMVHGRAYVEQGLKKYEEKVAQTEQYLLRKLARKYKMTLQPLAA

SEQ ID NO: 309873 - protein, 434 aa, unidentified
MERRHIGIDLHRNNFPCCVRLENGRNYLSTWKLEALPQFVKKLRPSDEVAVEVTGNTRLFYEAVAPRVVAVDPHQFRVISHSVKKTDPNDARNLALYLSKGLLPEVRMKEKTQAQIASLTQTRDTLVKLRTALKNKGNHILSAHGINLEKEALSSEKKLGEVLAMRFDPMVRIELRVIVDQIRSWNESIAELEKTITAEGQKLPGHKNLTSIKGIGPRTGSILLSVIGNIHDFPAEGKLAAYFGIVPRVSNSNETERSGRITKRGSKLGRTALVQCALIAQRYSPYRKKFYEKTKAKLLGQRMTGGGSVLVDSRSRLRMTHGFELHCNISILPNNLEINWDRGNSWHKEQSTSGVCSDDPNIRPQPPSVGFDTYVGTGIGRYNGQSGYTAEWTFKDAGEPGTSDTATYRIYETANPIHVVLNVTVPKNLEHGNH

SEQ ID NO: 309874 - protein, 339 aa, unidentified
MGEISTVGLDLAKTVFQVHGVDANGAVVVRRTLRRSQALAWFSKLPRCVVGMEACATAHHWARELTKLGHEARLIPPAYAKAYVRRNKNDAADAAAICEAASRPSMRLVAVKSVEQQGAAGIHRVRDLLMKQHTMLRNQLRGLMAEFGVAAAKGNRGLQELLAVLADREDGRIPALLRDGLRMIAETLREIDGKLAAIDRRLVAAGRENATYRRLITAPGYGPILSSAMAAMVVNPQAFRRAADFAASLGLTPRQEGTGGKVWLGRISKRGNGYLRRLLVNGATALINSKRAKQDPWLAKLLAAKPRKVAAVALANKLARIGWALMTRQEDFRARPAAA

SEQ ID NO: 309875 - protein, 421 aa, unidentified
MTQTSHDTFAAFVGIDWADAKHDICLQAAGTAKREYFQLDHTPEAIDAWVTTLRTRFNGQPVAICLELTKGPLVSALRKYDFLVLFPINPLMLARYREAFTPSRAKDDPTDAALQLALLLTHRDKLQPLQPQSPTMRALAQLVEHRRRVVGDKVRTTNRLTSTLKNYFPQVLQWFQDKDTRIFCDFLSRWPTLKAAQLARRSTLEAFFRDHHVRVEDVLAKRIHAIKTATPLTTDEGVIAPHPLLVQALTSQLRVTLDAIEAFDHAIAQRAQRHPDFPLFQALPGAGPVFASRLLVAFGEQRERYTSAAALQKYAGVAPVTERSGKKAWVHWRLQCPKFLRQTFVEWAAESIRHSFWAQVYYQQQRDKGNTHQAAVRALAFKWLRILYRCWQERTPYEESVYLQALTRRGSALLQHLAKAS

SEQ ID NO: 309876 - protein, 345 aa, unidentified
MEPMYYIGLDVHKRKISYCVKDSGGKVYAEGSLPATRADLDLWIKTLPQPWSAAMEATMFTGWIYDHLKPHAAALKVAHPLMLRAIAAAKKKNDRIDAGKICDCLRCDFLPECYMASTAIRERRRTLRYRNLLVRQMVQMKIKISSLLMEAGVSYNKQRLHKAGYFRELLATNPDIDEGLCALLRLCRETVVRLQKTESAMVRSLERDSLLIDRVERLMTIPAVGPITALTWALEVGDVQRFSSIKKAISYCGLCGAEKSSGNTVQRTPLSKQRNKHLQTTLIEAAKMAPRNSADLAMLYDKEKQKGNANRATLAVARKLVAYLVAVDRRQKEFLTVERENRTAA

SEQ ID NO: 309877 - protein, 328 aa, unidentified
MTMSAAQKTFNHIVAFDVGKESLAVHILPGDERSTIANKPKAIRKLLIRQMHRNANLNIGPLLVVCEATGGYERDLLEICVELELAAHKAHGSRVRHFANYRGLIAKNDPLDARVLALYGLKTEDLQLYAPRTPGQEALIDLRARRDQIQAMLLAETNRLEHVRHAIVSRSLEQHIAMLRKALAAIEARIAAHIQASKELACKAELMRTLKSIGPGTATVLLAYMPELGTFTRAGAASMAGVAPFDNDSGKKSLPRHIEAGRAAVRKALYMAALTAIRYNPIMKSFAENLRRRGKPAKVVITAVMRKLIVTLNAMLKAGEPWKHAQTA

SEQ ID NO: 309878 - protein, 315 aa, unidentified
MSDVPCFIGIDVAKAQLDIALRPSGERWAVPNDASGVAMLVERLQPLHPTLIVLEATGGLERAATSALAAAGLPVVVVNPRQARDFARATGQLAKTDALDARALAHFADVIRPTPRPLPDAQTQELRALLGRRQQLIGIRTAEQHRLAGASERLTKDITAHILWLNAAIATLDDDLETMLRASPLWRENDDLLQSAKGIGPVSAHTFLLELPELGTLTRQQIAALVGVAPLNCDSGTLRGKRTIWGGRAHVRTVLYMSTLVATRFNPQMKVFYERLLAAGKVKKVALTACMHKFLTILNAMLKHRTPWQPQEVQS

SEQ ID NO: 309879 - protein, 410 aa, unidentified
MSLFCGIDWATAHHDVAVVDADGRVVVRGRVGNDAAGFAQLLTLLAEAGDSAKQPIPVAMETDRGLWLAALRETGRVIYPINPLAASRYRARYAVSGAKSDATDAVLLANIIRTDPDAHRPLPADTELAQVIRVLARAQQDAVWARQQIGNQIRDLLKEFYPAALVAFDQLPSGGLARADARTILAAAPTPAQAAKLTPARLRRLLVKAGRRRDLDRDVERLRQVFTDTYLHQPPTVENAMGIQLGALLRQFDAACAATEELAEAAIAHFEQHPDAAIITSFPGLGKLTGARVLAEIGDDRTRFADARGLKAFAGSAPITRASGKKTVVTHRHIKNRRLAAVGSIWALTSLRASPGARQHFDTRRAAGDWNRQAQRHLFNKFLGQLHHCLQTGQLYNEHRAFPPPLPLAA

SEQ ID NO: 309880 - protein, 408 aa, unidentified
MDVVYQTCCGIDVHKMKLVACLCKGHKQEIKEFSAKTKDIKAMVDWLEGNKCEMVAMESTSVYWKPLVNIFEMRGLKYMVVNAKDFKAVPGRKTDVLDSAWLADLLRHGLLKSSFIPSREQRELREATRYRKAITEERARALNRLQKLLEGANIKISSVLSTMTGKTTMNLLDYVLNNDEMMDEKTAETLIISRISASVKEVPEAMEGIMTPFQKTMMKQVLTHLNELSERIEEMDIIIDTYMAEYWEAIKKLEQIPGIGKKSAEIILAEIGLDMNQFPSAGHLASWAGVAPGNNESAGKRKSGRTRKGNKILKSTLAQVAKSASKNKNSFFHAQYQRIAVKRGKNRATLAVAHSILIAIYHMLKDGQEFIDLGSDYYNQFNTEKKINSYLKKLAALGYRVDEHSTVK

SEQ ID NO: 309881 - protein, 355 aa, unidentified
MKNQAIQYLALDVHQATTVATVRDESGSVRMRATVATEAGAILGLVRGLGPRVHVVFEEGTQAQWLHDLLHPHAERVIVCNVRGRSETTNKSDRIDADWLSEQLRLGALHSVYHGSPGVATLKELVRCYLNLVEDSTRVMLRVKAIYRGRAIGTAGEAVYRPSQRRAWLAKLEARGARTRAESLLKQLDLLIELRTKARAAMLAEGRRQPGWKILKSIPFFGPVRVAVLLAIIGTPFRFRGKRQLWPYVGLAVVTRSSADQEMVDGKLCRRKRAPLTRGLNRNHNRVLKNVFKGAANAAAAKTGPLKELYDRCVAGGVREEMAKLTLARKLAAVVLRLWKKGELWDPTKLTMQAT

SEQ ID NO: 309882 - protein, 318 aa, unidentified
MVDTSIITAGIDTAKDKLDVAVRGTSSVRTFENSPAGFKQLAEHLTALGVGRVGIEATGGYERGVTQHLRQAGLEVVVLQPLQVRAFAKMRLQRAKNDGIDAKLIAECTHLLDAHNKMPPDPRFDGFADHLTFIEQIEADIVRIQTRLEHVHDARLRRIYADDIKRLEKRATAERRGLEAAVRAHADLATRLDLVRSVPGIGAPTALAVVVRMPELGRVSREEAASIAGLAPFVRQSGTFAGQMHIGGGRGKLRRPLYQAALPAASRWNPALVALYDRLRARGRCHQAALVACARKLLIYANTVVARGTPWEVRTDAA

SEQ ID NO: 309883 - protein, 341 aa, unidentified
MNINTVGIDLAKNLFAVHGVNESGKPALVKPKVSRADLLPLIAQLPPCLIGMEACSGAHHWARLFRQYGHTVKLMAPKFVAPYRMTGKRGKNDAADAAAICEAVTRPTMLFVPVKEEHQQIILCLHRTRQGFVEERTASYNRLRGLIAEFGIVLPQKVVCLRREIGAHLEDLPGYANLCVGDLLAHADALDKKIEEYDRAIAKAAREDARSKRLMKLPGIGPVTASAMLASIGSGHDFDNGRQVAAWIGLVPGQYSSGGKARLGRITKAGDSYLRSLLVMGARAVLNSIGDKQDRFSRWARSLEERRGYWRAVIAIAAKNARLAWAVLKYGEDFKLELIKE

SEQ ID NO: 309884 - protein, 391 aa, unidentified
MTMYFVGIDISKYKHDCCIISAANQKVVSKFTFKNDKSGFEQLNLILNSLSTPEDIKIGFESTAHYALNLELFLENANHSFMEINPVLIKDFKKSQTLRRTKTDSIDCELIARWLMTVEYKPHSKGFYHAYSLKSLTRLRDKLIRQRSFYLIKITNVLDHTFPEFKPFFNERLSKTALYLLENYGSAEKMARMNSASYEKLRSLSRGRFSPQQFLRLKELAANTVGVNNSIFDVELNSLLSLYKSLVKEINTIEKEINKLIEEVHPHYMSVPGIGPLSAAVIYSEYGDISNFTNPGQMLAFAGIEPGINESGTESHGGKMVKRGSSQLRYTLINCCLPLIRFDMTFATYYAKKRGEGKPHRVAITHVAKKLIRVIYALERQDIDFNAQKLR

SEQ ID NO: 309885 - protein, 392 aa, unidentified
MIFVGIDVAKNKHDCCILASAGDVCTAFSFSNDRDGFDKLMSSIKQFSHRKDLSDVKIGLESTGHYSTNIANFLSQKRLCVMIFNPLQVSFARKASTLRKTKTDKSDAKFLATMLFSVESKPHLPTVSAVSELKILTRNRFRLIEQRSRLKVSLSRQITVLFPELPGCVYSVNQKSCYAMLLEFPTAEAIADAHITRLTNVLADNSKGHYGKDRALQVRAAAQKSIGLDSRAAGLELQQTIRLIQCLQTEIDAVDAEIRKIMDELDSPIMSVPGIGYVLGAIILAEIGNIENFASPAKLLSFAGLEPSVSESGEYVAGNTPMVKRGSKYLRWALLQAARLVAYRDETFHAYQQKKLSEGKHFFVVQGHLAKKLVRVLFHLLKHYATFNRDVA

SEQ ID NO: 309886 - protein, 350 aa, unidentified
MNLFSIGIDLGKTVFHLVGLSQFGEVIVRKKFSRTQLLRFTANVQVGLIGMEACGGCHFLGRALREQGHEVRLMPAQYVKAFVKTNKNDFIDAEAIAEAVSRPSMRFVPIKTDEQLDMQSLHRVRERWIMRRTAVVNQIRGLLLERGITVRTGRCHLYAALPKILEDGSISLSGALRFLLVELKQELEQLANHIEQAETLIQRAAQQSETCQRLDAIPGIGPLTATALIAAIGNGGAFRKGREFAAWVGLVPREHSTGGKQKLLGISKRGNSYLRKLFVQGARAVLKYRDKQCSGLRHWLAELSSRSHYNVVGVALANKLARTAWAVLASGEVYRPPVLPVMTDLQMTAV

SEQ ID NO: 309887 - protein, 326 aa, unidentified
MTQPATSPTRFIGADVGKAEIVLHDSRGNARHTIPNKPKDLAAFAAKADLDATCLVICEATGGYEDALLAALLAVGCPAHRADARKVKAFIHSYGTLAKTDALDAKALAAYGRERHTSLARWQAPDPDQENLQSLVLTRADFVAQRTANRNRLAAPGSGPVQAYLETLITALSEQIEAIEEAMAETLRKAAALSRAKKALTSIKGIGDTSAIILLALMPELGRIDRRQATSLAGLAPHPNQSGTTERYRRTKGGRPEIKQALFLPALTATRFNPVLKDTYQRLIAAGKKPIVAIVAIMRRLLVIANARLRDAYAEEQKIALATEAN

SEQ ID NO: 309888 - protein, 419 aa, unidentified
MTQKQNTTAISIMHPVCCGLDVHKMKISACLITVDSDGNEQSEIKEFGAFTDDLLFLRTWLTSNNCPIIAMESTGIYWRPVHNVLEHHLEIILVNARHMKNVPGRKTDISDSKWLASLLKHGLLRGSFIPEKDIRHWRELTRQRRKITESLSDYKKRVHKVFETANIKIDSVVSDLFGKTGMNLIEKLCNEKISLAAADIAECACGSLKSKCTELHRSLQGFFEDHHRFELCSLMRIISILESEIGIISDRIAWLMSCHDEVIGRLEEVPGIGTRSAQIILSEIGYDLTTFPNTASFASWAGLCPGNNESAGKRKSGKTAVQKHPFKTIMVEIAWAAVRTKGCYYKDKYYRLKSRRGAKKAIVAIAHRIAKAIFYIVKHGEVYRELGEDYLKQKRQHKKIKSLREQAGAMGLQLIPVES

SEQ ID NO: 309889 - protein, 450 aa, unidentified
MWRKGKIKKTGTPTFQCMNPNAAGVDVGAMEIYIAVPADRDPQPVRCFSTFTEDLHAAADWLKASKIETVAMESTGVYWIPLFQILEDRGFTVLLVNARHVKNVPGRKSDVSDCQWLQYLHSVGLLRGSFRPDQEVCTVRSILRHRDSLVQMAATHVQHMQKALDQMNLQLHHVIADITGFTGLAIIEAILAGERDPHALAALRDGRIKASADTIAKSLVGDYRREHLFTLGQSLKAFRHYQELIGACDREIEKSLQTFESKVDPESPLPKSLTDVKRLKGDPRFELRTHLYRVFGVDLTQIPGVNVLTAQTLLAEIGPDLSRFASAPTFTSWLGLCPDNRVSGGKVLSVKTRKVKNRAATALRIAATGLYRSQSYLGHYFRRMRAKLGAPKAITAAAHKIARIVYLMLTTRRPYEETIWVKNEAANRVRVEARVRKQARDLGFQLVAAS

SEQ ID NO: 309890 - protein, 402 aa, unidentified
MNAVGIDVSKGKSMVAIMRPFGEIVSAPFEIKHTASDINSLVELINSVEGESRIVMEHTGRYYEALAHQLSEANLFVSAINPKLIKDFDNDSLRKVKSDKADAIKIARYALDKWQNLKQYNVMDELRNQLKTMNRQFGFYMKHKTAMKNNLIGILDQTYPGVNTYFDSPARSDGSQKWVDFASTYWHVDCVRKMSLNSFIDHYQNWCKRKKYNFSQSKAEEIYGKAKELVPVLPKDDITKLIIKQAVNQLNSASTTVESLRTLMNETASKLPEYPIVMAMKGVGASLGPQLMAEIGDVSRFTHKGAITAFAGVDPGVNESGSYEQKSVPTSKRGSSDLRKTLFQVMDVLIKTHPQDDPVYQFIDKKRAQGKPYYVYMTAGANKFLRIYYGRVKEYLSSLPES

SEQ ID NO: 309891 - protein, 346 aa, unidentified
MMIIGCDFHPSWQQVSWLDSETGEVGEQKLVHARGDAKRFYEQLAAPVLIGMEATGNSQWFVELVEDLGHEIWIGDAAQIRASYVRKQKTDKRDAAHILQLVVQGRFPRLWAPDREQRDLRQLVLHRHKLVEIRSRVKNELQHLAMNKGMQKKRTLWSQAGQQRLRALPLKPWASCRREDLLGLLTMLNQQVGQLDVAVQQAAEQNPQANLLMTQPGVGPNTALAFVLTIGDVNRFRRGKQVASYLGLIPREESSGGRQKLGAISKQGNRMLRSLLVEAAQIAVRFDPGFRQQYLHRCHQKPKGVAKVAAARKLAVRLYWMLRSQVGYPEIVRIESSPRVPLVGAS

SEQ ID NO: 309892 - protein, 345 aa, unidentified
MKNTLVGVDLAKDVIQVCVYANKKVQSNTEMAHHEFLEWLFMSASTTVVFEACGTSNYWKQKAIEAGHTAHLISAELVSSIRQNQKTDKNDALAIVQASLLPDIEFIKGKTVEQQQLQFILRLRELAVKQKTATGNQLKALLLEFNIRVSSRNGGLGGVIESVLENAENEFSMAFREALHAAWQHHLEIIKSIATYDRSLEELVDQHEECKRLLKLEGVGVINAVNLYIALGCTDLGTFMKGKDASACIGLTPIQHTSGGKVKLGSIGKYVKNSVLRSQLITGAMAVVAQVCKRTAITCKELWIQQLVARRGKKCAAVALANKTVRTAFAMLTHGTEYKAELVAA

SEQ ID NO: 309893 - protein, 365 aa, unidentified
MPGMQHTREAGHTHAGDEEIIVGVDTHKDTHVAAVITVQGVALANAEFPTTATGYRSLLAWARDFGVLHRAGVEGTGSYGAALTRYLRRHDVTVVEVNRPDRAARRRQGKTDAVDATAAAYAVLSTRATTTPKTGDGPVEMLRMFKLARTSAVKARTQAVNQLNAVIVGADPALRDTLGGLTTPALIRHCASLPDTAPHDVATATTYTLRRLARRIQELTAEERELQQQITAVIDAYAPHLLQRHGIGPDSAAALLITAGDNPDRMTSEGSFAALCGVNPIEASSGKTRRRRLNRGGDRRANAALYRIALTRTRSDQRTRDYLNRRATQGMTRREAIRCLKRYIAREIYQMIQQINPSTACFRTA

SEQ ID NO: 309894 - protein, 376 aa, unidentified
MQRFWPLFLGVKGPNRNSGLRPIIKDLVNALFVEANKKITMNQKYFIGIDISKGKLDCAVILSDYSVVTECIVPNNVKKINSVLKAFMKKHKAEPDQLLVCCENTGIYNCPLRQSSTDLKFGLWEEHALRIKRASTDMRGKSDRKDAMRIAEYALRYQEKAVLYKQPSEVLETMDSLSKVRETLVAQKVVLQNQLGEAKSHNPELYKILFESYKPVIAIIERQLKTIDVKIQDLLKQNEDIQQNIELMKGIPGVGKQTALQFIIYTQNFTLFKSAKHLACYAGVVPFQNESGTIVKRARISKMASQKLKSLLHLAAMSAVRSKSELKAYYIRKVAEGKNKMSVLNAVRNKIVHRIWAVIERQSPFLPQENFRPIWK

SEQ ID NO: 309895 - protein, 367 aa, unidentified
MTIVAQTHPFVIGVDTHARNHALSVLATTHGEVVGDGEFPATSTGMARAIEWVGRRTGGDLQVLWVIECAATYGAQLARAVTAAGYQVVEAARMNAKANRGIGKSDPLDARRIAAAVLPLRVDRQRHLRKDTGVRAGLRTLMAARDHMTSERTATINALIALLRVLDLGIDARKPLTRKQINEVAKWRTRTEDIAAVIARAEAVRLAKRIVDLDDELAENVKRATALLKQSPARVLLDKPGIGPVTAAVALTAWSHDGRLHSEAAFASLAGVNPIPASSGNTVRHRLNRGGDRRLNKALHMAVIVRMTHDANTKAYVERRLAEGLTKREIRRILKRYLARQIHRALTAASRADNTTQDTIAGTPLSD

SEQ ID NO: 309896 - protein, 428 aa, unidentified
MIKINPLSTLYVGIDVSSKSNYVCALDFYKNKYINSSFANNQPGAEELAQKILECLKEHPDLNTVVAALESTSVYSIHIANYLSSCEELMPFKPFIFVLNPKCTANYKKSYIGLGKSDPIDAFVIADYARAGNIETEPWRGSQFLALKRITRHRLHLVECITREKAYLVSNLYLKFSELQMLEKDNQPFCDIYGATSSSVLTEYLSPEEIIESSEEELVSFLADKSRNRIKDISKTADLLKKAARDSYRLDKALYEPLNVSIASSFNCIETFKKEIKAIDIAIEREIKGLNPNAFIILQSIDGIGPVFAGGIVAEIGDISAFTSSDALAKYAGLCWRSNQSGDFDGEDTPMTKAGNRYLRYYLGEAANSMRKHNVEYGAYYRKKYNEVSKHQHKRALALTSRKFVRLVYGLLARNQLYSGVSLDTSNE

SEQ ID NO: 309897 - protein, 445 aa, unidentified
MHYKRLLTWIDGSSSYLSVGLDVGADFTWMSIALPNGAFIGKPFKVVHSDPRSRDLAVTKIKEAQETYSLKSRCFLESTGIYHIPLLCFLRDKGFDCSVINPIITKNSTNINIRKLHNDKFDSKKAALVGLNVSLKASIIPEDSVVDLRKLVRDYYYFKDLQSAVALKLTAELKVSFPAYAKVFSKVTTQSSLKLLSSYPLAGDMLEASKDDIVETIRSTARFGEAYALRKYDAVIAAAQDASVFGRALPSNAVRIRLYIDTYQEYQKHLDALLKALHETVERLQDTLIYDQICLLQSLRGIGFLSAVVLIAEMGDFKLFPSPKKLYAYFGLDPAVKQSGKLNGDKVHMSKRGSSLARRVLHMVALNNVKVDKGSGTPVNPVIYDYYTRKCSGKKKPVAMGAVMHKICNIIFAMLRDNKPFEIITPEEHCQRFAAEYPDKIRKAA

SEQ ID NO: 309898 - protein, 323 aa, unidentified
MRKSIGIDVSKTKLDVSIFDGDEHRQISSGNTESGLKELLGRMGRLQGQELVITMEATGTYHLRAAMGLHEAGYTVSVVNPLIIKRYSEMKMLRAKTDPVDARLIAEYGYYERPAEYIPNNRECQELIYLLKTIEGLYRVRGQNRNRIEAFTQSPVCVSVAIESIQRINTAIDDEIKLLERRIRQLIGETYQEEYRRLLGIPGIGKRLGAAIIGYFQEFEHFEKAKQVASYIGVNPAPRNSGSSVRGRGAISRKGNTYLRKLFYMASLAASRHNHECSKLYNRLLSEGKKKKVALIAVSNKLIRQVFAIVKNQREYSPLYQAV

SEQ ID NO: 309899 - protein, 347 aa, unidentified
MKKFIRIGIDLGKRYFQVHALLGEDGRAVTRKLRRDGFLAFFAEAAPCLIGMEACGSAHYWGRELRAMGHDVRLIPPIYVKPYVKRGKNDAVDAAAVCEAVSRPDMRFVPIKSAENQASLMLHKTRELLVKQRTMSVNALRGHLAEFGVVAAKGIGHAGELLEKAKNDATLPEIAKATVKIFVQQLEAISAAIVALDKEIAAVHAQSEISKLLAGVPGVGKIVATAIVASVPDPSVFKSARDFSAWLGLTPRQNSSGGKEKLGAITKQGNRYLRKLLTLGATSLLRVAGKRNGVLRDWLVALLARKPARLATVALANKLARIIWAMMTTGEAFRTQIMARTKEPSMA

SEQ ID NO: 309900 - protein, 391 aa, unidentified
MIYVGIDVAKDKHDCIIKNSVGEVVFKTFTIKNNLDGFNDLYQKIESVMEDVSKVKVGLEATGHYSYNLLGYLIDKGLPTFVINPLHTNLYRKSLSLRQTKTDKVDASTIASMLMSDVNLKSYSDTSYHNEELKSLTRYRFDKVKERAKLKTSISRLVCILFPELEKLVPTIHMNSVYSLLYEFPGAKQVANAHLTRLSNLLNEASKGHYDKDVAIAFRDAARASIGSNMPAKSLELKHTIKLIRELDSEIDEIEGEINAIMDTINSPILSIPGISYRMGAMIIAEIGDFDRFDSADKILAYAGLSPSTYQSGQLDNCHPRMEKRGSRYLRYALFNATIYVCHWDSTFNAYLAKKRAEGKHYYVAVSHATKKLVRLIYQLEKSHQSYNKAA

SEQ ID NO: 309901 - protein, 342 aa, unidentified
MQVTTIGLDIAKRVFQVHGVDCTGAVVIRKKLRRSELAQFFAHLAPCLIGIEACATAHHWARELMALGHQVRLVPPSYVKAYLKRGKNDAADAEAICEAVTRPTMRFVPVKSEEQQGVLVLHRGRELLVRQRTMLVNGLRAHMAEFGIIVPQGIQRVPELVAMLKDETTGIPQIAREVRAAMVVQINNLTTSIRQMEKRIIAWCRASDAARRLATIPGVGPITASALAATITDPTLFRSGRHLAAWLGLVPRQHSTGGKAKLGRITKMGDQYLRKLLIVGMTAVIRSARRTKAPAFAWVNALLERRAARLVSVALANKAARIAWAILIRGETYRAPTMKVAA

SEQ ID NO: 309902 - protein, 343 aa, unidentified
MDYFAGLDVSVKETSVGIVDDAGKIVREVKVASEPDALLTLLKNRAYHFKRIGLEAGPLSQWLYSALAEAELPVVCVETRHMQAVLKAQINKTDRNDARGIAQMMRVGLYRPVHVKTLRSQKLRMLLTHRKLMLSKAIAIENDLRGTLRNFGLKVGMVGTVKFEARIKELIENLPDLAVLVEPLLVVRRVLREQIGILHRRLLVIVRDDAVCRRLMTVPGVGPVVALTYRATVDVPARFRNSKAVGAVFGLTPSKYQSGEINRTGAISKCGDEMMRVMLYEAAQVMLTRTNKWSWLKAWAMKIARHRGMRKAIVALARRLAVILHRIWVDGTDFRWTRKVAAA

SEQ ID NO: 309903 - protein, 408 aa, unidentified
MDVFHERCAGMDVHKEVISICVLIGRGSGYQKFKFKFGTFHHHLLEMRQKLVELGVTHVLMESTGVYWMPVYDVLEGFVEIVVGNAQHIMNVPGRKTDESDAEWLAKLLRYGLVKPSFVPPREFRELRQLTRYRRAVVQTRASEQNRVEKHLQIAGVKLSSVASHVFGVSGTDMLNHIAKGTTDPGELAGLARGRLRKKMPELRDAFAGSISEHTQNLIALQMEQMNRLECTIAQAELKIEKKVEPYAEILARIDGMPGIDLRTAIDVLAETGIDMSVWETHRQFAAMSGLCPGNYISAGKRLKNRSRQGNPYLKSIMVQAASSAINVDGSYYQAKYKWLKQRRGHKRAVVAIGHAMLVAIYHMIKKGESYKELGAKSVSDHEHGRKKDNLVKQLQKLGYSVSLTQTA

SEQ ID NO: 309904 - protein, 346 aa, unidentified
MYYVGVDYHKRYSVATVLNSDGEMLARKRLDNRLEAFRELLEPYDKDEIEAVVEATRSWGIPVDMLEQLAGRVILANTGEVKLIAKGRIKTDKVDSLALAKLLQVNWVPEAYLRPRANREHQLILRVRCFLVQLRTRVKNRIHDLIDRQDEPIRETAAGFSDLFGKKGMVWLKGLDLSHPGGTLLCRLLAAYDALDAEVRQSDRLVTELFTADEDCQRLAKTPGIGTFFSVLIKTEVGTIERFANSARFCSYAGVVPSTESSGGKVWHGRIIKQSNRWLRWALVEAVIPATRADAGLRAHYEYYRRTKGSKVAKVVTARRLGCIVYRVLKEKQPFYEQKVTNQQAG

SEQ ID NO: 309905 - protein, 327 aa, unidentified
MQNDRQSSETVILGVDTHLDIHVGAVISQAGKLLGTHIIQTNQAGYLELLDWARSFGSLERAGIEGTGTYGAALTRYLIKNSIYVVEVNRPDRSKRRLEGKSDPLDAENAARTVLSGSSKAIPKMQSGACEALRIISVARRSAVKACTQAINQLRALLVSAPQDVRDKLWKSKPHECVTACINSEVSEHSPLRIALCSTLRSLAKRWMALTEELNELDESLDKLTRKYASNLRSQFGVGPQTAATLLAVAGDNPERLKNEAALASLCGVNPLPASSGKTVRHRLNRGGSREANNALWTIALVRMRSDPRTRIYVDRRTVKGYRLKRS

SEQ ID NO: 309906 - protein, 359 aa, unidentified
MDSPTSPNAEVSVTPGVDTHKDAHVAVALDELGKHLGALSVPTTVTGYKRLLGWARGFGTVEHAGVEGTGSFGAGLARFLRVEGIEVFEVIRSKRRDQYRSGKSDPIDAEAAARAVLAGTATGQPKGANGKVEMIRTLRSARRSALKARTQAVNQLRALLITAPEELRSELRGLSTARLVARASRLRPGANPPDVEAATKFALRSVARRYHQLSEEISELDEQLDRLIAQAAPELLALESVSTDTAASLMITAGDNPERLKSEAAFAHLCGVAPIPASSGKIVRHRLNRHGNRDANRALYVIALGRMSRDERTRAYVARRTKEGKTKKEIIRCLKRYIARELYRILTSSSTSVCPITVP

SEQ ID NO: 309907 - protein, 419 aa, unidentified
MKSSKTKKGKIINEKTMIAALDIGKGAHYAYFRAPNGKDIKPFFFHNVKKGFDTFWMKLCQFKRKEGLEGTVIGFESTGPYAEPLLHYLRKKPVILVQINPVHSKRLKELTGNSPNKTDTKDPRVIADIISLGHALTLVVPEGSAAQLRRLTQARERAIRSRTAMVNQLHHLLFVIFPEFFKVFKDISTKSALYVIKNHPTPESITSVGLESLTVMVRKVSRGKLTHGRIKELFKAAQQSIGIDEGKESILMEMEHLVSAMDHESRFIDDLEKQMSYHLDHIPYSHCILSIKGIALITVAGLIGEVGDFKKFHTISEMMKLAGLDLFEISSGKHRGKRRISKRGRSLMRKLLYFAAINVVKSHGIMHEQYQEMLNRGMVKMKALVAISRKLLMLIFALARDNTVYVENYSNIHHLKLAA

SEQ ID NO: 309908 - protein, 323 aa, unidentified
MIYIGIDISKLTFDVAILSNNQTTDHHFDNNIKGFKAFKKTLSSLGDDVISCMEATGIYGLALAKELYHSNHLIIVTNPLRTHAFAKMQMLRNKTDQADAGSIAKFCKHLDEQGEVEKNLFTPKGESYERLQFLFTRLQQLKKQHTQESNRLGVSIDTMATASIKAMLKFIDKQIAKIESEIQTCVDNDDELAQQVDLLTSINSIGTITAWAILAYLGDVNLFKNSRQVTCYAGLNPRIEQSGTSVNKSRLSKMGHHHLRRALYLPAVVASHHNQVAITLYQRLLTKGKPKKVAITAVMRKLLVLAFGVLKSQTKFNPDYQTK

SEQ ID NO: 309909 - protein, 337 aa, unidentified
MSYIGVDLHTNSFTVCCRTKQNRQRIAGYTIKQIADFRKTLRKSDYIAVEATGNTAWFIEQVRSRVRKVIAVDPNQFKVIRKSVKKTDKHDAKMLALFLSKDMLPEARMKKKENTQLHSLATTRDKLVKHRTALVNKIHNVLNSYGLKWKKETLTTEKGLKSIMAFDWDTIVKVELEVLSDQIRSLTKNIKRLDDDIVEHGQNLKGHKNLCSIKGIGKRSATVMLSVIGNVKDFANEDKLSSYFGIVPIVRDSNDSVRHGRITKHGSTLARTTLVQCTLCAKRYSPYLRDYYERIKRTRGSGKAIIATSRKLLGIIYKTLINDWVFEDFPNFVIADS

SEQ ID NO: 309910 - protein, 336 aa, unidentified
MGNFKIEKQFMESVGIDVSKLTLDVFVYNGKQHQQFANSRKGFIAMQKWINSLVNGTQIIYCFEHTGWYCVLLSHFLFEQSVYYCCINPLELKRSMGFVRGKSDKTDSYQIARFAWLRREELEPSVPMPVKLIELQRMMSLREQLVKQSTAMKNLEKGMLVTIENAKGDISIRIIRQSIKQMEVQIKKIEKGMNDLIKSESKLQSNYKLSRSVKGVGNVLAIQMILHTHNFSRFEDWRQFSAYCGLVPYPHQSGTSIHGRKKIHSISDKKMKSLLSMSAISAIQHDAELKMYYHKRVEEGKHKMVALNIIRNKIVSRIFATVKRGTPYVELSKFAA

SEQ ID NO: 309911 - protein, 366 aa, unidentified
MARYVGLDAHSKNCVYAIQDEQGTMQGEGSVTTTPMGLSVMCARHDLAPGTPVALESGTMAFYVARQLTAVGMAPVVIDAHEVRSKALRPNQKSDRRDAIELCEGLRRDLYRTIVHVPSEAIERLRETLGRRRHFVRLKTMQVNAVKRLLRTAGLRHLSRSLQVASAWTKLREAVAFDPSLHGFVLAHDAVWHCAHEQILRLEHDLDRQAEELRPPLDRLQTVPGVGRIVALTALAVFSDVRRFPSAKHAASYAGLVASSYDSGDRVRRGRITRRGSSELRSMLCEAAHHAWRPSNPFHPYFSSLCARRGYKMAVVALAHRLCRILYAMLRHGVDFDLHRLAIEEGRFEQVRVRRYRLKGNRTPSA

SEQ ID NO: 309912 - protein, 399 aa, unidentified
MISVGVDVSKGKSMVCFMKPYGEVLISPYNVQHCENDLMQLVEQIHRLNDEVRVVMESTGAYHYPILAFLKQHGVFVSVVNAYLMKKYAMIAIRKGKTDPLDAIKIASYGIDYWYKLVDFEPTLDVYQELTDLNRQYLGYLSMRIKAKVSMTNLTDRTMPGIKTVLWNRSDVPDRDKLCDFIREYWHYDNITCMPECDFIASYNAWAKEKGYHASTQKAKTIYTLALDGIPTMSSKTPSTKMLVLESVWVLQMIDKTLASILAQMRNLVSGLKEYEVVMAMPGVGNILGPRIIAEVGDVRRFHSGSALVAYAGLDAPPYQSGTFIGTNRHISKRGSSSLRKTGYEIIRFVKQAKPTTDTAVYDFLLKKEAEGKPLRVAKIAALNKFLRIYYARVKELYC

SEQ ID NO: 309913 - protein, 413 aa, unidentified
MDVVHPRCAGIDISKRDAKVCVRIQGQGNRRTTSTVTTWGAMTGQILALREHLLEQNVTCVVMEATGDYWKPFFYLFEDALTVMLVNAHDARNMPGRKTDVSDAAWLADLGAHGLLRGSLVPPEPIRRLRDLTRARTALTRDRARQVQRIEKVLEDAGIKLSTVATDIMGVSGRAMLEALIQGRDEPAALADLAKRRLRSKIGALTEALTGGFTAHHGFLIRMHLNLIDEYAKALDELDARIEEAMAPLRAARELLCSIPGFSTTVAEVFLAETGADMTVFPTAGHLASWAGTAPGSNESAGRVKSTKTRPGNRYLKGALGIAALAASRSKRTYFSAKYKRIASHRGPMKALVAVEHAMVVAAWNMLTNGEFYRDPGPDYYTRRVPAKTKAGAVRQLESLGYRVTLEPITHTA

SEQ ID NO: 309914 - protein, 340 aa, unidentified
MEKRYIGIDLHRNRFTCCIRLENERTYVTEWELEDLGKFVKKLRSGDEVAVEITGNTRLFFDAVTPHVARVVVVNTTQFRVIRQSVKKTDPNDARTLALYLSKNLLPEVRMKDKEHGQLASLTQTRDTLVKLRTALKNKINNILSARGLNLAKEALSSEKKLAEVLELPFDEIVRIELRVIVEQIRSLNQSIAELEKTIGEEGSKLEGHKNLASVKGIGKTTGAILLSVIGDVNDFADEGRLASYFGIVPRVSNSNETEHSGRIHKRGTKLGRTALVQSALIAARYSPYLKRFFEQVKARRGAGKAIIALARKFLGIIYRTLKNKWVFEDFPNFVLSEQS

SEQ ID NO: 309915 - protein, 403 aa, unidentified
MLDTGDIAVFLGLDVGKGEHHGHAMTPAGKTVYDKRLPNSEPKLRALFDKLRSKFGPVLVIVDQPASIGALPLTVARDAGCHVAYLPGLAMRRIADLYPGEAKTDAKDARVIADAARTMPHTLRALSLADETAAQLTMLVGFDEDLTGEATRSSNRLRGLLTQFHPSLERVLGPRLDHPAVTLLLERFGSPAALRKAGRRQLVSLMRPMAPRMAERLVDDIFDALDEQTVVVPGTSTLDVIVPSLARSLTAVHEQRRALEARISKLLEAHPLSKVLTSMPGVGVRTAAVLLVTVGDGTSFPTAAHLASYAGLAPATKSSGSSIHGEHAPRTGNRQLKRAMFLSAFAALHDPASRTYYDRQRDRGKTHTQALLRLARHRISVIFAMLRDGAFYEPRLPEETTAA

SEQ ID NO: 309916 - protein, 312 aa, unidentified
MEKISHGGIDVSKDRLDVMLLPDRRCFSVPNNASGWVELIERLRDLTIVAMGIEPSGGYERGIIRALLAAGLSVRRINPNKLRQFARARGVLAKNDRLDAQLIAEYVAIMPTRAVQRDVAAERLAEIVTMRRQLCDEHVTVQNQAAHIEDALLRRINKRRLTRLKADIALLDKRLAEMVRTDPALAHRYELLTSMPGVGPVLAFTLIALLPELGQMNRKQIAALVGLAPYDFDSGKLRGHRSIYGGRLPVRNVLYMAALSAARYNPALKAFHKRLAAADKSSKVVIVAVMRKMIVTLNAMLRENVAWQHGAT

SEQ ID NO: 309917 - protein, 496 aa, unidentified
MGCCALEGGDAVSAIPIRNLMNCAAQPFRWHQQEELEMNPKRSKSRHGRKMPMVHPNAAAIDVGATMHMAAVRADRTPEPVRSFGTFTADLHRLVDWFTQCGVETVVMESTSVYWIPVFELLDARGFTVFLVNARDAKHVPGRKTDVSDAQWLQRLHSYGLLRASFRPKGQIAELRSYVRQRERLLEYAASHIQHMQKALTEMNLQLHHVVADITGATGLRIIRAILAGERDPEALAALRHYSCHSSAETIAKALTGSYRAEHLFALEQALALYTAYREKASACDVRIEAVLKELSIHRGRDHGAVPPPRRRHRTDQVNALAFDVRAALFALLGKDITAIDGLGAYLSLKLIAECGDDLSSWPSAKHFTSWLGLAPSNKVSGGKMLSSRTRRSGGRAAALLRLAAVAVGRTDTALGAFYRRLSSRIGKAKAVTATARKVAVLFYNAVRHGMEYVDPGASSYETRYRTRVVNNLHRRAKAFGFLLQPLEPKAGAAVS

SEQ ID NO: 309918 - protein, 301 aa, unidentified
MEHYVGLDVSLKRTSICVVNHTGSVVRGGVVDSDPEAIASFVRSNAPGAVRIGLETGATATWLWNELKRLGLPVICIDARHAKAVLKMQINKSDRNDAAGIARIMQTGWFKEVRVKDLDSHAVRALLASRALLVKIKRDLENQVRGLLKNLGLVIGRATFNVFSARAGELIEDRPDLVAAIGPLLEARKAIEQQVRDLDRKVLKLARHDVQVRRFMTATGVGPITALCFKATIDDPTRFRRSRSVGAYVGLTTRRHASGEVDWSGRISKCGDAMLRTYLFEAANVLLTRVPKWSALKAWGA

SEQ ID NO: 309919 - protein, 423 aa, unidentified
MTNYLSTPTNNVLVAIDMSKHRQEVLIEQPEGGRRRRMTVLATRDDYDHLVKELASMARPIVVGFEATGNYHRTLAHRLLSAGFQLRLISSVALARTREALHNGWDKNDPKDAQVILHMLRIGATQVYVDPLEAGINDLQELSKTHEVISKAKTQTWHRILNHYLPLYFPEIGHFAGNSRSDWFLALIERFPTPTSITSLGREAFVAEAWSLVGRKVSKARLINDIFETARSSVALPIAEDAVAISMFRMIIGQGRSLIRERNRIEQIAQSLLADNQDYQLLCKIPGIGPINALTILAEAGDLRRFRHHRQFLKFCGLDLATSQSGTFRGRTKLSKYGNARLRRTFWMAAQVASRQRDNSFRDKLGRYMAGNANDADRRRKAMTALTAKMARVAHAVIKTQTEYRPFVERPETRWKDPSLQVP

SEQ ID NO: 309920 - protein, 354 aa, unidentified
MIIIGCDYPGFQQIAFVDTETGDCGEQRLEHGEGAQKFYRDLATHGKKMRVGMEASGHARWFEQLLGGLNIELWTGDAAVIRAKRGRKPKTDRQDALHILNLLLTGDFPQIWVASWENRDVRQLLWHRHRMVQARTRVMNQLQAVALNEGLRCKKKLWREHGRKQLEAFRLAPWTSRRREDLLELLDRLNPTIAELTQAIEQEAEKCPQAQRLMTHPGVGALTALAFVLIIGKAERFQCGKQAGCYLGLVPLEDSSGDKRRLGHITKQGNSLLRFLLVEAAQATSRTIPEWRRKYLHLTMRRGRKIAKVAMARKLAIRLFWMMRQGWNYQQVMNSVRTWDSPEQAMVCSRTSTL

SEQ ID NO: 309921 - protein, 344 aa, unidentified
MTIVTLGIDLGKNLNSVVGLDADGQVVLRRRVRRATLAELAGTLSPCTVAMEACCGAHHVGRLFAARGHKVSLMSPEYVRPYVRAQKNDDNDAAGIAEAATRPTMRFVELKSQDRLDLQTLHRARSRLVAARKALLNQLRAILLERGHTFRQGRKVLEREIDPFLAEPPSDLSTRILTLIGDMRAEWRSLDERIDALNDDLSEHARADEAASRLTSIPGIGILGATALVAAVGDGEAFRRARDVPAWLGLVPKQMTTGGKPRLLNITKRGNTYLRMLLIHGARAALPSLSKQATPLGEWLRGLLSRAHRNVVIVALAAKLARIAWATLRRGMGFDPEMGATVTT

SEQ ID NO: 309922 - protein, 351 aa, unidentified
MNNDITRVVGMDVSDRYSHLCVLGLDGAVEEESRVPTTSQGIRRRFGQMDRVRVALEVGTHSPWMGRLLEELGHEVILANPRRVRSIYQSNDKSDRVDAEMLARLARSDPKLLCPVQIRSEERHAGLVVIRSRRILVETRTKLVNHVRGVCKSLGFRLPKCTAASFHRRMILLIPEEILPSLEPVLRQLGEIEGGIRDCDGRIKDMASKIDGVEILTSVFGVGDLTAVTYVLTLGDPSRFRRSREVGSYVGLRPKRDQSGEVDKQLRVTRAGDKYLRSLLVGCAQYILGPFGPDSALRRWGLGLAERGGKAAKKRAVVAVARKLSVLMHSMWITGQMYQAFPESKTEAKAA

SEQ ID NO: 309923 - protein, 363 aa, unidentified
MYKTTTPDISLAQAKEKRIVKFGLDVHADQITVCRMQEGSLPQPAQKMSPQKALSWIIGHVEDGFEVHSCYEAGPCGFWLHRALTARGVVNVVVAPQRWDAQGKRVKTDKRDARELADRLERYLRGNRTVFSLVRVPTPQQEQRRSLARQRGALMKERNRCILRGRSMMLLEGIKAPLSWWQPTQWSRFAPTLPVWLREQAALWQTKAVQFAKELERLDDQLEASLAGKLIPKGLGALSAALLEAEILDWSRFKNRRAVSSFTGLCPSERSSGATRIQGSVNKHGNPRVRHYLVEAVWRLERWQPQYPPLGMLERTSGNRSRKRAAVAVARRLAVDLWRIATGQCSAQKLGLKLVAAGAPSLG

SEQ ID NO: 309924 - protein, 431 aa, unidentified
MKNRANQRLEEITITTLIVGIDIAKTTHYARFCDYRGMEIGKAVSFKSNHEGFEAIVARIEQIRNNKITRQPFKEVIIGMEPTGHYWKTLAHYLLESGYRVVGVNPYHTKKAKELDDNSPTKNDKKDALTVARLVKDGRYFNPYLPTDIYAELRALANGRENVMKRNNAVKNTITAILDEYFPEIWQVFKKPLMGKASRQVLKSCPFPMMLLELGESGLLEEIKKAVKRSVGIKKVRELIIAAEKSVGVTYGAESAKLRMGHLLDELDMIERQLAEIETAMEKMLHATGYAESMLSIKGVGIVTAARFLGEVGDPLRFNDARQISNYAGYNLTEDSSGKNKSGTVISKRGRSQLRGLLYQMAFTMVNCNPEMKALHEYLTSRTKNPLKKKQSLVVVSKKIITVIYSLLKKQTTYDPALALGAVRRELMNAA

SEQ ID NO: 309925 - protein, 333 aa, unidentified
MNSSSSSASLPRLGIDVSKLTLDVHLCMPEGRTHSAKIPNNVDGFAQLDAWLAKHHATQTCAGLESTGPYGALLLWHLHAQGHRVFLINALRVKNYARSQGRRVKTDATDAVIIAAFLKASDELKPWLPPAQAVADLQALARRRAQVMDSLQAERNRQEKSLSKVVAASLQRQIKILKGEILQLDNDIQAHVLKHSALERSVRLLCSIDGVGFKVAVTILAEIPQISAFTRARDVAAFAGLTPALAQSGTSVWRKGRMTKEGSALLRKMLYMAALQAVKRKTNAFHATYMAFVERGKAKMCALGAIMHKIIRVAFGVLKHDTPFVPNFAKLQA

SEQ ID NO: 309926 - protein, 323 aa, unidentified
MSQPNPLCVGIDVSKTTLDIATANNEFAQFTAGNDTDGFELIIAELRKHSVALVLMEATGGLEAAVACSLQAEGFDIAVINPRQARNFSRAMGYLAKTDRIDAKVLSQMAEVINRHPERERFIKAIPDAERQILAAMVVRRRQLITMLVAERNRLHPAHPQNRKSINTIIKALEDELSRINEAMNNHIKTHFKELAARLSSIKGVGAMTVATLLSEVPELGSLSRREISALIGVAPVNRDSGTMRGRRTIFGGRAGVRTALYMAALVATRFNPVIKDFYTRLITAGKVRKVALVACMRKLLTILNAMIRKNEEWSDSYHKFSL

SEQ ID NO: 309927 - protein, 410 aa, unidentified
MDAILERCAGLDVHQDNIVACFLSGPLDQRPSKEIESFGTTTKELLRLQDWLQDRECTHVAMESTGVYWKPVWNILENTCELTLANPTRIKNVPGKKTDYSDAEWIARLHRSGLIEKSFVPNEEIRDLRDLTRYRRKLLQNVTQEKNRVHKILQDANLKLTTYMSDVFGVSGRALLESIVNGEVLDAEQVRDMVKSTLKRKVPELIEALNGRLRLHHRKMIRRHLEHIAFLEREIQELEAEIERLIAPYQREKELLETIPGIKQDAAASILAESGPDMSHFPSDAHLASWAGVCPANHESNGKKKRKKNQRGNKGLKSVLCQCSWAAIRVKDSRMSAVYARLVKRMGKQKAIMAVAHLLLRIIYVVLRDKVPYQELGADYLGSREKTIEYWIRKINQMGYEVELHEMKSA

SEQ ID NO: 309928 - protein, 366 aa, unidentified
MKDQAIQYLAFDVHRSAIVATARDHWGAIVMRATVPTEASAVLRLVRSAGPRVHVAFEEGTQAQWLHDVVAPHAERVVVCDIRGERKQGNKGDRLDADRLSERLRTGSLRGVFHGAKTLLTLKELVRNYNNLVEDGTRVMQRIKALFRARAIDTPGVSVYRATKRDQWLARLNGGARLRAGTLLAQLDVLLALRPKAKAAMIAEARRQPGWRSLRSIPFLGPVRVAEILAIIGTPFRFRTKRNLWPYVGLAVVTHGSAEQEFKDGKLRRRKKATVTRGLNRNHNPILKSVFKAAANTASAKPGPLCDLYNGSLARGVREELAKLTLTRKICFGRPATVEERRTLGSKQTDDASDIAPDAVTVDECG

SEQ ID NO: 309929 - protein, 411 aa, unidentified
MPKIVYPVCCGIDVHKSFVVACIATTDETLVTTYKRKRFSTFTGDLRRLSDWLTEYGCRDVCMESTGKYWIPVYNILEKTCNLVLAHPKYLKAIKGKKTDKRDAKWIADLFKHDLLNGSFIPPEDIRQLRDLVRYHVKLTSYTTGEKNRAQNCLTVSNIKLDDVFSDVFGKSAKAITAQLIEHPGEYIDVAPFVDGRCKTPIEEIQAAVDGMMCANQAEKLRIIRSHMDNIELCKMNLESEILTLAEKYLPQVNLISTVPGIQLFSAIATIGEIGVDMSVFPTSRNLCSWAGLAPQNDQSAGKKKTTRISRAGVYIKPLLVQCALAAIKSNKHPEIKNRYQSIKKRRGHKKAIIAIARMLLTAIYNILKKNEPYNAELYRNSVAPPTQREVSVEQAIFILQRQGYLVSVSP

SEQ ID NO: 309930 - protein, 417 aa, unidentified
MNNIYPVHPRMTRTYCGVDSHRDTHTIIFLNCFHEVLGEVTIGSAPSEFPKFIKRAKKYLQSNTTFAFGFEDVSAYGRSFVKFLVEKGYLVKHVDASKVATERGQVLHKTDSFDAECCARVLINQFDKLPDANPQDKYWILTNLVTRRNFIVKINVMAKNSLHGAIAESYPHYKKFFSRLTTDSALAFYEAFPSPHHLENVTVEELTTFLHTASKGRLSTTKVELILTTVKRDQVQQVEYQDTKDFTVRSLVRQVKNNLSELDAIDVEIEKILTHFNYPLTSIKGIDSLTAAKLISEIGDINRFKNAKALAKYSGVAPVTFASGMSKLEMANARGNRKLNEIFYRIALTSVMPIGINKALINPIFYDYYNKKISEGKLKNQALKAVQRRLVNIIYSVMKYRRPYDNPAMGYIPAESA

SEQ ID NO: 309931 - protein, 434 aa, unidentified
MLRPKDKACGADIHKKTVVATILSADGTKVEGEFGTTVPELIRFKEWLKENDCNSVAVESTGTFWQPIYSVLEGSVEVIVANPYMIKHMPGRKTDKVDSNWIAQLCLKGMIEPSRIFPKADRELRRLTRARESLGKIRTQFKNSIHKDLDSSHIKLSSVISDIFGKSGMHIIRGLLDGQSLGAIIEGIPSGRVRKKADQIKEAVHNNLELTQVILIESSLSLIRSVEQQIDMIESEVASRIVSRQEDLEIARSIPGIDFISGATVLAEIGNYRDFSSPEKMAAYFGIVPSVSQSAGTLHTGRITKHGSKHMRWILVQIANAASKKIGSKLRRFYLRIKAKSGHNVAIVALARKILCLLHHLLMNREKYVEDDGSKKSKSKKNYRTSSPRVMDIQEMIDVIRQSGYEVQRVDTSGGAGLKRRRNSERNLKRGACG

SEQ ID NO: 309932 - protein, 338 aa, unidentified
MSKFSGIDLHSNNSVVVVSDEADRIVYQQRMPNELPVILQALEPHRSELVGVVVESTYNWYWLVDGLQAAGYRVHLANTVAIKKYDGLKYSGDFADAAYLAQLLRLGILPQGYICPPARRVVRDLARRRMQLVRLRTMQVLSIENVLSRQTGHRLKSNEIKRLTPEAVAGLGFSADVALSVQANVAVMRALQEQIDTLERRLLERVKLEPAFVLLKSVPGIGVTLATVIMLEVCDITRFASVGDFSSYCRCVGSVHESNNKKKGAGNTRNGNEYLSWAFVEAAHGALRSCPQAKCFYERKKCQRNATVASKALAHKLARACFHILRTGKPFEVQRCFH

SEQ ID NO: 309933 - protein, 387 aa, unidentified
MPQPNDLGRSLVALDQDSTLIAVIEMGQASWLIAAIVPGLNRHPLKKIAADEEQLLQVLRRWKKEAETAGRMIKRTAVAYEAGRDGFWLARWLGARGIEAYVIHPSSVPVSREHRRAKTDRLDTELLKRAFLGWLRGEPDHCSMAAIPTLTEEDAKRPGRERESLVSERTRIVNRIKGALARLGIRNFRPMLRNASQRLETVRTPEGVALPPNTLAELRRDMARLSFIKQQIKEVETARLERLQRAPGEGANAMVQLLTRVVGVGVETADMLVHEVFSRNLRDRKAVARYAGLTGAPDESGKRRRERGLAKSGNARVRRGMLQIAWGFLVHQKDSALAAWYRTRTADARGTTRKTMIVALARKLLIALWRLATTGEVPEGLVLRAAP

SEQ ID NO: 309934 - protein, 410 aa, unidentified
MEVLHPRCCGLDVHKETVVACVRLVIHGKPVKEVRTFSTTSASLIELSEWLTETKCTHVAMEATGVYWKPVWHILADDGFQLVLANAAHIKNVPGRKSDVKDSDWISDLLAHGLIRPSFVPDGPTQEMRTFLRTRKQFVHEKGSHILRIQKTLEDANIKLDSVITDIIGVSGRKMIEALIAGERDPAKLASFADRRLKASQQTLRQVLRGRVTAQHRFLLRLHLDQIDALDAAIARIDREVEASIAPFRTAVEQVRTVPGIKSLAAQTILSEIGIDMSRFPSSGHLISWACICPRSDESAGKRRSTRIRKGSPWLKTTLVQCAWAATRKKGSYLQAQYYRLRARRGPKKAIVAVAASILTAIYHMLKDGTMYQDLGPNHFDARAKERQKNRLIKRLADLGYAVELAPLPN

SEQ ID NO: 309935 - protein, 356 aa, unidentified
MSHEVKYIGMDVHKEAIVIAVLNGSGKLVMETIVETKASSILQFLHGLRGELHVTWEEGTWAAWLYDLLQPQVQEVVVCNPRRNALLKEGSKSDKVDARKLADLLRTGMLRPVYHGENGLRTLRELGRSYQTISKDLTRVMNRLKALYRGWGIPCAGTQVYAPRYREEWLSKIVQAGVRRRAELLYQQLDGLQGLRRNLRPEFLAESRKHKAAKLLRQIPCIGPIRAARLIALMQTPHRFRSKRQLWTYSGLGIETHDSAQFRFVRGQLQRSKKPQQLRGLNRNHNHEMKEIFKSTATRASCGTGPFHDFYAALLAKGMKPEMARLTLARKIAAITLTLWKKEEGFDAEQLKTQAA

SEQ ID NO: 309936 - protein, 397 aa, unidentified
MYIVGIDIAKRKHEAAVIDGEGTVIIKPFSFTNNCSGYNRLLAMLAKAKLPLDEVSFAMEATGHYWLALFTRLQKEGFRVQVINPVQTNSIRSFYIRQAKTDPRDALLIAEVIRFGHFSESTLHPENIYELRELCRGRHAIVSMQADVKRKVVALLDQVFPEYETAFTNLFSDTSMAILQTCPTPKELSEMPLEELCHLIEVSSHKRFRMVKAQELQELARNSFGFAMAGDVFSTMIRLYAKHLVFLKQQVQEMDRKIAEIMDTLDTPITTITGIGPTLGAYILSEIGDISRFSSAAKLAAYAGIDPTMRQSGEYNGVRNRMSKRGSPYLRHAIWLAASSAVLHDPALKLYFQKKRDEGKPYMASVGHACRKMVSIIYAVMRGNKAYTPCIPNEISA

SEQ ID NO: 309937 - protein, 340 aa, unidentified
MNHYAGIDVSLEDSCICVIDANGKVVREGKVSSEPTALIAWLSEVGVSLTRIGLEAGPLSQWLYAAMRQAGLAVELLETRHVRNAFKIMPVKTDRKDARGIAELMRLGWFRPVHCKSMEAQETRAMLTARKLVQKELLETESSLRGILRGFGLKVGKTTRVQFEGRIRELVAGHPTLEVITSALLSVRAVLRRQFDGFEKRLRAIARTDTRTRLLMTTPGVGVIVALTFACAIDDPSRFKSSKAVGAYFGMTPTRYQSGETDYSGRISKHGDGSVRAVLYEAGHVILTRPLKGCTALKSWAMRIAKRAGMKKAAVALARKLAVIMHRMLADGTPFTTQPA

SEQ ID NO: 309938 - protein, 421 aa, unidentified
MGKIIERCAGIDVGKRFLLCCVLTGAANEEPHGETLRFDTTVPALERLRAWLQEEQVTHVAMESTGTYWIPIFNILEEQFAIILANPEEVKNRKGHKTDRNDAKHIADLLRHNHIRSSYIPPKPVRQLRDLTRRRVQLTQDATRERNRVQKLLEQSNVKIGNVLTDVFGVSGQEMILALLDGQSTPEQIGALARGQAQHKLPKLIEALQGHRMSDHCRLVIRSSLRHLGCLQEEVELLDEEILRRMRMPPFEQPFALLQTVPGIGRLSAAAILAEIGTDLEPFPSAEQLVSWAGLCPGNRESAGIQKGRQTTHGNPYLRTSLVQCAWAATRKQGSVFAARFRQLAPRRGEKRAIVAVAHLMLTILYCMVKRRLEFQGAGCVHQQRRRERRAHHHMRALRRLGLDIRVMPEAAIVAAGQEVP

SEQ ID NO: 309939 - protein, 359 aa, unidentified
MGVQINKLDFKGQNLFIGIDVHLKSWSVTILSDHSVLKKFRQNPDAAALCKFLFVNYPNADYHSVYEAGFSGFWLHHQLVGFGINNIVVNPADVPTMVKEKLRKTDAVDSSKLARELRSGTLKGIYVPSVESLEIRSLIRLRKTIVKDSTREKNRIKSLLHFHGIAIPEEFTKHSVGNWSKRFLAWLRTAELSTEYGKKALDMHIEQFVRLRAMLLEKTRLIRVLSRTETFIEPLRLITSVPGIGVTTGISLLTEIDDVSRFKNAEHLASYIGLVPMCHSSGDNENTGGITIRKHATLRCYLIEAAWVAIRKDPAMTMAYAEYRKRMNSQKSIVKIARKLVNRIYFVMKHKQEYVPCIV

SEQ ID NO: 309940 - protein, 351 aa, unidentified
MQVSTIGVDLAKNVFQVHGVDSVGKVVITRQLRRKQVIDFFSKIPACLVGMEACGTAHHWAREISKLGHTVRLMPPSYVKGYVKRSKNDAADAAAICEAVTRPSMRFVPIKSADQQALLMLHRTRDLLIRQRTQLINALRAHLAESGLVAETGREGLAQLAEIITDESNREALPSAMKQALQAIVDQLAALELPIGALDRAIHAHHRANDMSCRIETVPGIGVIAATAIASTVTDPSNFKSGRDFAAWIGLVPRQHSTGGKERLGGISKQGDRYLRRLLVIGATAVVQHARRHPQKHPWIIRLLARKPAKLVAVAVANKMARIAWAIMARGGYYRAPELAAVTSRGSAMGA

SEQ ID NO: 309941 - protein, 450 aa, unidentified
MRTTRLRYEVVAGIDVAKEPAVVCVRLPPAEGRKHRRSHLQAVPATVPAITDLAAELTALGVQMVSMEATSGYWRVWFAVLEEAGLAVQLVSSSQARNLPGRPKTDKEDARQLARMGEMGMLRSSFVPPPEIRALRVCTRHVFDLTADRTRYWQRREKLLEDALCKLSSVVSRLAGHQTARAVIEKMIEGERDPRVLAALGQGKMRNARLPALAQALTGMRFGPEHAHAAASLLRAIGLLEAGLRELQEQVTAHLAAIPASWGVDADGVTGPQAGRAAGAAALPAAERLDEIPGLGREAAAALIAGIGLDMSRFPTPQALVSRAGLTPTARQSGPVKGRGKKGRGSTCAKRIAVLAAYAAANTDTFLGERFRRLSARPGGGGRKKAGCAVARSVLIIVWHLLNDPAARYRDLGPGWHARHTDRSRRARNARRQLEALGYEVVITLREDAA

SEQ ID NO: 309942 - protein, 323 aa, unidentified
MNDKDGINDEPRSFVGFDVSKATVDALSLPDGEHRRFENTDLGLQQCLAWVQAKPACLCVVEASGGFETALASLLAGAGVRIAVVNPKHVRDFAKGLGILAKTDRVHARVLALFADKRRPPLRALPDETQRKFVDLVDRRRQLVAMRAQEQTRLGQAKGPARQSIKAHIEWLSVAIADVDRALTATVRGSELWLVKSQLLDSVPGVGKVTLCTLLARLPELGHLDRAAIAALAGVAPFACDSGQFRGRRFIRGGRAEVRAVLYMAVISAIRCNPVIKAFYQRLLAAGKAPKLAITACMRKLLTILNCMMRTQTPWNPTFAQNT

SEQ ID NO: 309943 - protein, 406 aa, unidentified
MSERKSLELRVSVDVGCRRHSVAIGWPDGQVLEEFEIAHRPEGFEEFFSRIEKHQKANGCGVAVAMEGYNGYARPLDSLVRSRGYRLYNINNLKLARFKEIFPGAAKKDRIDARKGLELFQLRDHLPLAKEVLQEVTGTPQENEILKRLTRRRRRLVNERVRVVNNLQADLQAVCPGLLEITTEASNRWFLNFLLSADTLPQLARLRKSTLLKIPAVGRKYASLIQEWQKRAHFSEEAQWVGEMIHEDAQRCLELEEKIKALETKIKEVAKNSKIAKILLSIPGFGTVCTSELAGEIGTVERFGKEGGLALYLGLSTLDNSSGNYQGTKQPKHVNTRAKAAMMTALDRHRKYVPESQRYYEKKRSQGKKHNQAIRALGRHLCRIIYKMLKEERPYQIRSKKGGYPS

SEQ ID NO: 309944 - protein, 373 aa, unidentified
MPKYSTAFGMDVHLRSTTVCALDADTGEAVTRRFPGNPWGEIAGWMDGFPGPSLAAYESGYLGFAPQRELAGLGVECVVAAVSKIPRSAADSASKNDRNDAARMAKAILAHDISPVWIPSPEVEGIRDLAGAYDGATARLATAKQRLLAFLAKRGFAYGGTTPAGNPRKYWTYDFLRWLDKVRPEDDGGVRTLAALRNEVEAAAEARADLLSEYRAAVDASPIAAEVAALQSIKGCAFALAAAFSAEVGDFTRFRSGRQVTAYFGLAPSQRSSGDSVRLGGISGAGNALVRKLAVEGSWCYAAARHQPKLMPRDTGVPLEIRMHGRKGSDRLLRRREEMLARGMPAAKANAATAAELVRWLWALGMMCREGAE

SEQ ID NO: 309945 - protein, 404 aa, unidentified
MWYTGIDWANDHHDVLVIDEKGRQVGSLRVDHNPQGLSKLNTFLEQIIGSESKEQMACIIETTHGLLIAHLLEMGWPVYPVNPRTVDRRRSASGAKTDAIDAYLLAKTGRADLADLHRLTPDSEKIVELKLLTRDQDALIQMQTRLVNQLTACLKAYYPVALDLFSKLQQKSSLLFLQACPTPQAAMAASVEQIQTMLRQTRHPTPTTVAPKIFERLHQPHLQADVVTTRTKSRLMLVLVSQLLPLIEQIAQYDKEIDTLFLTHEDHELFESLPRAGQRLAPRLLAEIGDDRKRYQDASSLQALGGTSPVLFQSGMYSKAHRRLGCIKPLRNALHQFAWQTTQSEPWARDYYQRKRSEGKSHTVAVRALANVWVRILFAMWFHHTSYEATTFEQAQRQHACRAA

SEQ ID NO: 309946 - protein, 392 aa, unidentified
MVVSVGIDVSKDKHDCFILSSEGEVLADAFTIPNTMDGFNCLLQRIQDCTTPQDKMKVGLEATGHYSYNLLGFLLDNGLATYVLNPLRTNIYRKSLSLRKTKTDRVDARTIASMLLSDVGLKPYTDTAYHSEELKSLTRYRFDKVKERAKLKSSIARLVCILFPELEKLVPSLHIASVYALLEEFPGAKQIAAAHLTKLQTLLETASKGHYKRDMALEIRDAARNSIGSWMPARSLELQHTVRLIRELDHEIAEIEGQIQAIMDELHSPITSIPGLGFRMAAMILAEVGDFTRFDSPDKLLAYAGMSPSTYQSGQLKNCYPHMEKRGSRYLRYALYNATKYVCHWDPTFAAYLAKKRAEGKHYNVALSHAAKKLVRLIFAMEKSRQPYCVAA

SEQ ID NO: 309947 - protein, 402 aa, unidentified
MNAVGIDVSKGKSMVAIMRPFGEVVASPFEVTHTDSELSKLANSLLSLNGETKVIMEYTGNYYLPIAYALHKAGLFVSTVHAKLIHDYGNNTIRKVKTDKADAIKIANYGLSNWLELPEYIPDEDVRRMLKAYSRQYTKYIKLKTMLKNNFIALSDQTFPGVNELFTSPPRKSDGHEKWMDFAFKFWHCQCVCSLTPNAFADRYRKWCKREGYNFSRDKADDIYVSACGHVCVVPMNDSTKQLVTLAINQINAVAESLAVVACEMKRLAKLLPEYPIVSAFRGVGDILGPQLMAEIGDVTRFRHKGSLVCFAGLEPPEYQSGKFESTERPISKTGSPHLRKTLFQVMDCLLKTSPQDDPIYQFLDRKRTEGKHYYSYMTAGCAKFLRIYYARINEFIDTMED

SEQ ID NO: 309948 - protein, 399 aa, unidentified
MVNVGIDLHKTQFTVCVRGRKENRFAKYPTTEEGYQSFLAEAALWQKKGEEVRVGVESTGNTRYFKSRMEEAGIVVIVINTLKMKVVNESVKKTDKHDAATIAEFLEKDMLPESTLCSRESEQLRRLLKARSALVRAEVAMKNQIHALLTAEGMEDVKGSLQSKRGRKQVLDALKEWKNGLVAQPLFDTIEHLEENIKGIEKELRNLTAGDRVVQLLMSIPGCGEIGAWTIRAWTDEINRFSSAKKYCAYAGLAPWVQNSNETIHHGKITKRGPKELRTALVQVVMGIRRMKAKTLSWRLMERYEGLKKGKGSGRAIIATARKIAVIIWHMLSEDVEFDLGEMVDRKLAKKSEVMKGTERAVKEALEEKPVKTGGEKKGESVRKKAKTGVARKKEKKAG

SEQ ID NO: 309949 - protein, 338 aa, unidentified
MTEITTVGLDLAKQVFHVVCCDARGKVVGKRMLRRAQVLNYFANLTPVLVGLEACAGAHYWARELKALGHRVKVLPPRAVKAFVQGNKNDYNDALAIAEAAVRPEMRGVAVKTVAQQDVQALHRLRSQCVASRTALGNQLRGLLAEYGLILPQGLSTLRRRIPDFLEDAENGLSDAFRRLLAQGYRQLVELDEHIAAHTAEVKRHGQQADGCQRLQTIPGFGPIVASVFYNAVGDGRAYRRGRDVSAALGLVPRQHSSGGKSVLLGISKRGDAYLRSLLVHGARAVVRQAAGKEDRLSRWINQVRAQRGYNKATVALANKLARIGWAVLYHRTVYQAA

SEQ ID NO: 309950 - protein, 425 aa, unidentified
MNYKQNEKINQVKESTLVVGIDIGSTTQYARAFDWRGIELGKVFTFSNSREGFEAFKAWMQRLQDKYRKSDVIVGIEPTGHYWFDLGAYLEDEGILLVMVNTYAVTQTKELDDNSQSKNDRKDPKVIAKLVTEGRYSAPYTPDGVYADLRIMVTNRKRLIREMTQIKNRFARWFAIYFPEYTDVFGDYEAQSSMLLLKKVCTPEAIVELGAEKINQIWRDAKLRAVGMKRATTLCETAKRSIGLKKGSSAAQYEMKLLLEDYEYKKAQLDAVIEEIEKLCRKIPESEQMLAIKGIGVITVAGFLAEVGDVRRFESPRQIQKLAGLSLRENSSGKHKGQTTISKRGRSKLRAVLFNAAIPLIGTNPEFKSLHEYYTTRANNPLKKKQSVIAISCKLIRVFYAILANGVTYDAQKMLSDIHRQPQAA

SEQ ID NO: 309951 - protein, 313 aa, unidentified
MSKSALIGIDLGKHSFHLHGQDTAGREVFHKKLSRPQMMQFFGNLSACTVVMEACAGAHFVARQLIAMGHQAKLISPQFVRPFVKGNKNDFVDAEAICEAASRPSMRFVTPKTEAQQTLSVLHRMRESLVHERTKTANQMHGFLLEFGISLSKGLAVMKRLASILAEHELPARLTVLLQRLHEHFSYLDEQIKALDKELAGQLAELGDLRKYDDPRKLVAAAGLNPKLHDSGLLKGRSTISKIGSVRVRAGLYMPGLVALQHNEAIKAMKDRLKANGKAPKQIICAAMRKLLHFVYGVLKSGQPYDSKLALAQ

SEQ ID NO: 309952 - protein, 384 aa, unidentified
MAHGNLPLIIEVTTNLNERKEITMSTQNSNTISFKGKHFFVGFDVHKTRWVVTIRHSGMHLKTFSMDPYPEGLKNYLEKNYPEGIYHLVYEVGFCGFWIFRRFKQLSVDCIVINPADVPTGHKEKERKSDPVDSHKLARELENGSLQGIYVPTEDEQHLRTLCRLYTTSVQSSTRVKNRIKGLLNFNGIEYPINSSSWPAKFISYLQSLPLDNGPAKKTLSIHLDELRLHRMHTLVILKELRKHVRTTHGGTIIKLLISVSGIGFKSSVILYTEIMDMKRFSNFNKLRTYIGLVPSTHDSGETQSSSGLTVRKNKFLRRIIIESAWVAIRKDPALLAYYNKQRSRMKSQRAIIRVAVKLLSRIRYVWLNERAYVTGIVEGTTVS

SEQ ID NO: 309953 - protein, 342 aa, unidentified
MREKRSIGIDLHRRRFTCCVRLEKGRNYLSEWSLEQLPQFIRKLRATDEIAVEVTGNTRLFYEAVAPYVARVVVVDPHQFRVISHSVKKTDPHDARNLALYLAKGLLPEVRMKAKRQAEAASLTQTRDRLVKLRTALKNKVNNLLSARGIELDKESLSSEKGLAWVLEQKLEELAHLELEVIVEQIRSLNRSIARLERVIEEASQKLPGYRNLTSIKGIGSLGAGILLSVIGEVSDFAHEGKLAAYFGIVPRVQDSNETEHRGRITKRGSKLGRTTLVQCALIAKRYSPYLDRYYERIRARRGTGKAIIALARKFLSIVYYTLKNNWIFEDFPNFVLAEAKT

SEQ ID NO: 309954 - protein, 390 aa, unidentified
MRFAGIDIASETHYVAVVDEEGTPLVKPTPFREDANGYQSLLALLGPVGDCKVAMEATGHYWQNLFAALATAGLEISLLNPTRTHNFAKEDLARTKTDAIDALGIARFAQQKRPVPTRLPDSLTQELKELVRLRDRVVQDLGDATRRLHRLVDLGFPELTRFVKTLDSELATALLHEYPTAAAFPTVPRPVAKLVYDGRHKVGAELAQQLVDAAKVSVGRHHGDAYRVQVRYACEDIDVARRRLRELEGRIETALRNHEVGSLLTTITGIGPQTAARLVAEVGDFERFTGPEKLAAYVGAIPGIKHSGKGTPKGAMTTIGNARLRAALWMPLLTAVTRNPWLRAYYQRLVDGGKLKKVALVAAMRKLLHAIYSVATNRRPFVPRLQEARS

SEQ ID NO: 309955 - protein, 418 aa, unidentified
MSIYCGMDWAEGHHDIAIVDRDGRLLAKKRIADNPTGFAELNQLLADTGDTQDDPIPVAIETPRGLMVASLRATGRPVFAINPMAVARYRERHSVARAKSDHADVMTLANILRVDAHLHRRLPADSELAQAIAVLARAQQDAVWRRTKASNELRSLLREYYPAFLDTFAGRSATNLAKPEARAILAIAPIPAAAAKLTKTRVTAALRRAGRQRGIDQLASAIIASMRLPQLRHPGPIEHAMGQQALALLGMLNAACTGASELEQAAAEQFRTHPDYAIITSFPGLADLTGARMLAEIGDDRRRFANARALEAYAGSAPVTRASGKSISITHRRIKNDRLAAVGWIWATTMVVLPGPAQQHYRRRRDHGDRHAPAVRHLFKKMVGQLHHCLQTRQTYDPVKAFADQPPHPPAPESATAA

SEQ ID NO: 309956 - protein, 359 aa, unidentified
MANNEDGTRHVVGGVDTHKDLHVAAVVDGQDRVLGTACFATTRQGYRQMLVWMRSFGDLRRIGIESTGSYGAGLLRFMQQAGIDVLEVTAPDKHDRRRRGKNDDLDAQNAAHAALAGRRTVTPRSRDGMVESLRVLTVCRKTAVAARRVAIQIIQTTIVSAPDGLRDTLRSMTRMQLVRTLAAWRPDLTAYREVEAAYRISLKSLARRYLELHDEIADLDAMISAIVDDLAPELIARNSIGYTGAAQLLLTAGDNPERLRSEASFAALCGVSPVPASSGKTIRHRLNRGGDRAANSALHIIAIGRIRTDSATKAYVARRTSGGHSKLDAIRALKRYIAREVFHIITRRHREINQTRIAA

SEQ ID NO: 309957 - protein, 370 aa, unidentified
MDELDRNRLEEFRQLRQEVRHSEEYLIVGIDVAKERHHAFFGTATGGTLLKRLVFSNDYEGFTKLLDQAEVLRVRHDLKKVVYGMEPTANYHKPLGEYLIHLGRSVVLVSGVTVKRNRESLDGRWDKHDVKDSANVADLISQGKCLYYEYPSAQLRGLRGLLSLKRRLKKQEHGYRVRIRNNLIAQYFPEMDRDYDRLGAEGLSVMRWCFPPSQMTVLDVEPFIERVTSGRIRVEKRQRLEGIWEKAGESIGCDGVPGVEHEAKVMVEGVRQIREMIKETEDKIQELCKEFSEYPYVLTIPGFGPDLSARVLGAIGEADRFQNGKQVLKLAGLDLSADRSGKDSDKAIPEISKRGKADLRYALYQAALIA

SEQ ID NO: 309958 - protein, 420 aa, unidentified
MKPEQADYAAWIGMDWGSEQHAVSLQTAESSQSERYVLEQKPEFLHTWFLSLRARFGGRKVAVAIEQSKGAVINFLLGLDFVHIFRVHPNSLKNYRKALYPSGAKDDPTDADLLVQFVRFHQDRIRPWVPDDVESRLLLRLVEGRRKVVNKRVRATNELTQVLKEYFPQALEWAGDLDRVMACDFLRRWPILQKLQKSKPEVVRQFYRDHGCRNSELIDHRIEEIRSACCLTSDRAIVESSVMMLKSIVPQLKALIGAVDAFDDSIAEVYRKQPDSEIFSSFPGAGKTLAPRLEAAMGADRNRFDDAQQVSEYSGIAPVTERSGKTSWVHRRLACSKFVKQSFHEFAGQSIQQCAWARAYYDSKRAHEMGHHAAIRALAYKWIRIIFRCWKDHVPYDEQKHMQSLKQRQPAWLAFLPASA

SEQ ID NO: 309959 - protein, 449 aa, unidentified
MTRSTTKQPGLPVVHERAAGIDIGSRFHVVAVPPDCAEEPVQTYQAFTGDLQRMADWLVRTGVKTVAMESTGVYWVPVFEILEERGLEVILANAREARAVPGRKSDVNDAQWLQRLHACGLLRASFRPARDIAALRVYLRQRERLLDFTAAHIQHMQKALTLMNLQLHHVVSDVTGVTGMKIVRAIVGGQRDPQVLANMRDVRCKASLETICAALVGNYQPEHVFTLAQALALYDFYQERIEACDRQIEHALAILNVDKVCPEAPMPKAKHRTKQPNDVSFDVRSVLYQLTGRDLTQIHGLGPYLALRLIAECGTDLSKWRSAKHFTSWLTLSPGCKISGGKVLSAHTKKTTNRLTAHLRLAAVTVGRTHTALGAFYRRLAARIGKAKAVTATARKIAVLFYNAMRFGMAYQDPGADHYEKQYRDRVVKNLHRRAAEFGYTLAQAEGVS

SEQ ID NO: 309960 - protein, 405 aa, unidentified
MKHYCGIDWASDHHDISIVNESGKKVNKFRIDDDLNGYHTLSNTLKSFEVEIPIAIEAKDNLLINFLIAEGYEVYSINPKSAERYKDRYNVAGNKTDEIDSFALADMLRTDMHKYRPLEYSSEEIRKLKILCGEYSKLMKDKNMLESQLYDVLSKYYPIALTLFSSYNCKTLYKLILKYSTYEELRKVSYEDLEKFLKENRYRKAHYIKKVYNKIQGNDYYALAIFDETFSHTARALVKMLLILEAEIKEIKNKMTEITTTHTLGTIFYSLPGSGEILAPKLLSIMGDNKKVYLSSSEIQAYSGVAPVTKRSGKSSRVKFRFACNKEYRNTLTTFAFCSLNWSPWARGYYDKSRQKGKRHYESLRLLAYKWTRIIFKLWQTGELYSEEYHTKNLERFSKNILKIA

SEQ ID NO: 309961 - protein, 413 aa, unidentified
MDVLHSRCCGLDVHKSSISACILLREAGRVQKHQRRFGAMTQELQELAEWLRQFGVTQVAMESSGVYWKPVWNILEGQFTVVLANAQHIKNVPGRKTDQKDAEWIAQLLQYGLLRASYVPCEIIRDLRDLTRMRASLSQEASRISSRIQKVLEDANVKLASVATNVLGKSGRAMLEDIITGEDNPEHLASHALGHLRVKIPQLRLALEGKIRPHHRFLLRRLVDQIQFVEQEIALLDERLDDIGRQRPDFAQAVDRWDSIPGIDRVAAWALLAEIGDNMGQFPTADHLASWTALCPGNHESAGKRLRGTTRQGSPWLCRMACQCAWAAARTKNTYLSSQFRRLAARRGKKRAIIAVAHTLIVIGYHLHKNQSNYEDLGGNYFDRIHSDGLKRYLVKRLQQLGHKVTLEPMEAA

SEQ ID NO: 309962 - protein, 340 aa, unidentified
MKKNEKIIRQSLGIDISMETFDVAIIHLLEGFDIKTISTKKFKNDLKGFELFYQWVEKLRNQNIEINFTMEATGVYYERLAYFLNEKDETVHVVLPNKSKKFAESLGLRAKTDKIDAKMLGQMGVERKLRKWSPISPIFLKLRSYTRERESLIHDRTRAKNQLHALNHSRAAEQNTINRLCSKIKFLDEQIEQAEHDIEELIESDTILNKKVKKVLTVPGIRLKTLAPIIAETNGFAAIVNIKQLTSYAGYDIRIRESGKWKGKNKISKKGNSHIRAVLFFPACTASVHNKHLKKCYTRIKEAKKIPMIANTAIQRKLLALIFTLWKNDTIYHYENAKVA

SEQ ID NO: 309963 - protein, 344 aa, unidentified
MDHFAGLDVSVKETSICIVDDTGRIVREVKVASDPEDLLKVLGNPVYRFKRIGLEAGPLSQWLFSALAEAGLPVVCVETRHMRAVLKAQINKTDRNDARGIAQMMRVGLYRLVHVKTLRSQKLRMLLTHRKLLQSKAIAIENDLRGTLRNFGLKVGMVGKVRFEARIQELVEKQPDLAVLVEPLLIVRRTLREQLVILHRRLMAIVRDDEVCRRLMTIPGVGPVVSLTYRATVDVPARFRKSKSVGAVFGLTSARYQSGEVDWSGEISRCGDEMMRTMLYEAAQSMMHSKKWSWLKAWAMQIARRRGMKKAIVALARRLAVIMHRIWIDGTEFQWTREQTAAAA

SEQ ID NO: 309964 - protein, 424 aa, unidentified
MLSAFSRKKHLNRSFRIFDKELIFIKMKTSGLDVHKDSIFCAIYDGKSYSAVKEFSTTTVSIRELGSYLQSEKVKKVAMESTSTYWVPVWDILWEMGFDLKLVNPLHIKQMPGRKSDAKDAQWIAELLHKNMLRGSLVPSPLIQELRTYTREYRILVNQRTKVLTQMERVLVMCGIRLSSCISNIDSKSFMQVVEALIRGETNPNVLVRLVYANRKNKESGKLKECLTGNMKAHHRLKLSTCKQQFDLFESQIQLYLNEMQKLCGEHFSEEISNLTTLPGVSQISAMIIVAETGGDMSAFENSGKFTGWTGLRPRNDESAGKFKSTATTKGNKHLRAIIVQVAWAASRTKGSFFMNKFTKLAIRKSRKKALVAIARKMLVIMWHILSEKTPYNPQLVHIYDPVKVEHKIKYHEREIEKAKKLIA

SEQ ID NO: 309965 - protein, 496 aa, unidentified
MSAFLRRSGQNPHRWATKGMKSKKELLAIKKHIKRKSAKAKHNRVLGIHNPHAAGADIGATEIYIAVPPDRLEMNVRCFGTFTQDLRAIVQWLREYKVTSVAMESTGVYWIPLYELLEQEGFEVYLVNARHVKNVPGRKSDVQDCQWLQYLHSVGLLRGSYRPAQDICAMRAISRYRDNLLHFGAQHLQHMQAALDQMNLRLHHVIADLSGLTGMAIIEAILAGERDPRQLAKLRDPRIKASQETIAKALEGNWRVEHLFVLGQALQSWKQVQQQLGQCDQKLEELSSQLEGKIDLANSPLPPSAKYCGREPRSKNQPNGPWREELYRHFGVDLTEVPGLSLGVVQTLFVELGADLSAFPTPRHFAAWMGLCPDNAITGGKVIRRGTRRNRQRIRLALRLAATSLHHNKTHLGECFRRLRARLGAPKAITAMAHKLARIIWHLVTHRVGYDESIFAEREEQLLRRKQRQLRNLAHSLGFTLVPNPRPAATSNAEVS

SEQ ID NO: 309966 - protein, 325 aa, unidentified
MRQPQSAVKPKTQVALDVSSQMLDVHVWVDKKAFSVPNTDEGFEQLSDVLFAYDVTMILMESTGGYEDNAACYLQLQGYDVVVINPRHARRFAQSMGKLAKTDRIDAAVLAHMAFMIDSGPDRDRYIKPVTNEQRKQLSRMSSRRRQIVDLITTEKQRLTHSDAYTRASINAIVSLLRAELKRIEADIIRYVKKNFSELATRLLAIPGVGMQAVTVLIADLAELGYVNRRRISVLLGVAPFNHDSGKFKGQRRIRDGRQSVRNVLYMGIISATRFNPVIKTFYDRLIGRGKPKKVALIACMHKLVNIINAMMRTGKPFDMTLHGV

SEQ ID NO: 309967 - protein, 418 aa, unidentified
MKPWTEITHYAGFDWARDHHDVVIVDRQGQIVADFRIEHSLAGWQEFRDQVKPYPVLGVAIETNQGTAVDHLLSLDGTIYPVNPLSAKSYRERKAPSGHKTDRLDAWSLAEALRQDGQQWKALQPLDPLTQQLQLLCRDEIGLIEQRTALINQLQQAMVEYYPAALAAFEDWTQPFCWDFIIQFPTPEKLADAGRRRWEKFLHTQKLWRPETASKRMEIFQNARQFCGSAAVTSAKSLLALSLAKLLNALQLQLDQYRQQIEALFKQHPDHDLFGSLPGAAQTLALRLLGEIGGDLQRFEDTEALQCVAGTAPVSFQSGQIHRVHVRYQCNKMLRHTVHLWAQCSLRVCPWADVYYRQKRAEGKSHACALRCLGQRWLKILWRMIQTRQPYDADLHARNQKQHGSWVLTLMKPAPQAG

SEQ ID NO: 309968 - protein, 429 aa, unidentified
MNRYFLSIGIDIGADFSLMAAALPTQEIIGRPYKILHSSLNSIQGAVSSIRVLEKQHGLKAKVFMESTGIYHYPLYYRLKDEGLDVFILNPIITHANSNIDVRGVHNDKFDAKKIALLGLKPKLKTSVIPSDDVAAVKTLIREYHSMKKECTQYICRLTSQLRQTFPQYLPLFSKVNGKASLEILCRYPTPDDILAAGSGELITLILKIAGKGRTMAEQKSERLIQAASDAALFGHSNAGNVYLIRHFVEMIRLIDAQTDKLLMQIREVLNSSPDSLLSRQVKLLQTIPGIGFLSAVTLICEIGDFSAFCRPKQLYAYFGLDPKVRQSGNFIGNELKMSKRGSPYARRCIYMLALQSVSLRKNGEPKNPVLRSYYQEKCKTKAKMTALGAVMHKVCNIVFAVLRDEKPFVFITPEEHRELFTATIADAA

SEQ ID NO: 309969 - protein, 397 aa, unidentified
MFYVGVDVSKDSFNFCIVEQNKSVLKQGSFPMCMEGFSSFISVISPFSPCTVVFESSGRYHIPLAIFLSTKGFSVSVVNPKTIHSFIKFFSANNPSKSDKKDAFYIAVFSASQPELISKHFSDSSLPSVKFLARELEKIKQEIATCKTQIKYCLSVLFPEAEKNFNVFSSTFLSILKVFPSSSQISQAGIEGVRNCIVKTKGRNPSFSAKDVVATARSSIGISNEGMETALVYYIEKLEFLLAQAKKIGASFVREVERFFSREVEIVSSVPGISVTLACRFIAEVGNIERFDNWKKVVKYAGTDPVVKESGKWRVECGISKQGNPHLRNVLFQMAVGVVKWCQVFRDYFNHKFSQFGSYKKAMIAVVNKLIRVLFAMISRGQSFKHPDHAPASISHS

SEQ ID NO: 309970 - protein, 341 aa, unidentified
MSEVSIIGIDLAKRVFQLHGTCANGAVIFRKKLTRVQLLAFMSKQPECTVAMEACATAHCWGREIEKLGHTVRLIAPNYVKPFVKRQKNDVADAEAIVEAVSRPTMRFVELKSEAQQARAMLFRTRQMFIGQRTQTINALRGHLAEHGVVAPKGAIHVKRLADAVEDETIGLLEDVRELAQVYLAQIEGLNVQVAALDQRMKGAAKEAEAARRAQTMPGVGPITALAIETFAPGLNCFRRGRDFAAWLGLVPKQNSTGGKPRLGKTSKMGQRDIRRLLISGAMAVLQAVERFGTPHNTWLIATLERKPRMLVAVALANKMARSLWAMVTKQEDYRIPVAMA

SEQ ID NO: 309971 - protein, 341 aa, unidentified
MKQAITIGLDIAKHVFQAHGADAAGHVLFRKRLTRAKLLGFLAAQAPCVVAMEACAGSHYWGREISKLGHTVRLIPPAYVKPFVKRQKNDAADAEAICEAAQRPSMRFVPVKDEEQQANGVVFRARDLLVRQRTQCINALRGHLSEYGYVFRQGITHAATLIAHVEDPNSFLPESARVILRLLVDTFSALEAQIKELDAEINRRSRADAVAQRLMTIPGVGPIAATAITALVPAAGSFRAGRDFAAWLGLTPLQKSTGGKQKLGAISKRGERTIRRLLILGASAVIRQACRRGAPAGSWLAQMLPRKPKMLVTVALANKMARVVWALLVKGGVYRAPAAAA

SEQ ID NO: 309972 - protein, 401 aa, unidentified
MVSDFMKGRYNLMKIFVGIDIAKLNHFAAAISSDGEILIEPFKFTNDADGFQLLVSKLESFDKNSIIIGLESTAHYGDNLVRYLVTELYQVCVLNPIKTCQMRKNNVRKTKTDKVDTFVIAKTLMMQDDLRFITFFDLDMMDLKALGRFRQKTIKQRTRLKIQLTTYVDQVFPEIQYFFKSGLHQNAVYALLKEAPSPKEIASMHMTHLANLLKVNSHGHFTKEQAKELRVLAQKSVGANDSAISIQITQTIQQIELLDSQLQKIEAEMTDIMKFNDSVIMTIPGIGYINGGMILGEIGDIHRFSNPNKLLAFAGLDPSVYQSGNFQAKTTRMSKRGSRVLRYALVNAAWNVVRNNATFKAYYDAKRAEGRSHYNALGHCAGKLVRVIWKMLTDEVEFNLE

SEQ ID NO: 309973 - protein, 398 aa, unidentified
MNAVGIDVAKGKSKVAVIRAYGEVVCKPFDITHYPDQLAELCEYIHSLEGESRVVMEYTGKYSEPIAKFLCDAGIFVCMVNAKLIHDYGGDTIRRDKTDKIDALKIAGYCLDKWAKLSRYESAPDNRKMLKTYNRQLSEYTKIKTMLKNNLISLLDQTFPGVNELFSSPAREKDGHEKWIDFVAAFPHCFCVTSISKRAFATKYVKWCRKNGYNFCPDKAEWVYSASLNCLPTLPNNEFAQTLVIQTVNQLNNLSQTVAAVKSEMTKLASALPEYDTVLAMHGVGKTLAPQLIAEIGDIRNFPKRSSLARFAGIEPPENQSGTYSQHSRRISKQGSPHLRKTLFQVMCCVLKNSNFDEPTFQFIDRKRSEGKPYKVYMIAGANKFLRIYYARVNECFA

SEQ ID NO: 309974 - protein, 385 aa, unidentified
MGEYILVGCDLHDENMVLRIAADKGPVEKRVFPNTRSGHKAMLTELERRSIAEGGAKVIVVYEAGPHGFVLYDAVKKAGMDCRVLAPTNLPQSPKSRRRKSDGRDSRRLLRQLRSHLFANEELHDIWVPDPTLRDERELVRLRADSTRELTRTKNRIQSLLKRYGVRKPAHVGASWTKPHRGWLQRMAGDASPLAFHTRLTLAYQLDHLTWLEGRIAAMDDDVADLARAPRYAEPVRVAMEDKGVGMLTAMVYLTEMGDLRRFANRADVGDFVGLAPSRNQSGACEDGFGHITHQGPARVRWVLNQSVWMWIRTDPKAKAFYDRLADEHPKYGKRIAVVALMRRRAVRLWHRCLRAQLRAGSYGPPVDPASDPRAAEPACGDTKR

SEQ ID NO: 309975 - protein, 414 aa, unidentified
MSEVKFAAQIGLDWADKKHDYFLSDSANQTTEHGEFKHHPASIDKWARDLQHRFNNEAVAICLELKSGPIVAGLKKYDFMTLFFVPPQALANYRKAFYSSGAKDDPTDAYLQFDYLNKHRSKLRKVTTEREDTRIIQQLTFHRRAFVEQRKELTNKISASLKEYYPLVLQLFTNLNTDVFCDFMTTWPDLSKLQNTRRTTLEKFFKTNHCNRPGLINERLQTIAEAVPLTNDTAIINPCQRYTLGLVRQLRTLRETIKEYDDEITARFSQHEDSDIFASFPGAGPTMAPRLLAAFGSDRERFDSADEVNRTTGVAPVFEGSGDYRWLHWRFKCSKFLRQTFVEWAGQSIKQSFWARTFYDEKRGQGKSHQGTLRALAFKWIRIMYRCWKEHSKYDESTYLFALKRREEKLKKVA

SEQ ID NO: 309976 - protein, 320 aa, unidentified
MEASLGIDIAKATFAVALLTADGRVRHKSCANTPAGFRDLATWLQRQHVTTVHACLEATGTYGDALATWLHDAGHVVSVVNPAIMHAYARTQLTRSKTDRIDAELIARFTATQPPPAWTPPAPEIRQLQALVRRLDALQGMRTQELNRLEAGVAVAEVRASIEAVLAQLDAQIAHVKQLIRDHLDRHPRLRAQRALLVTIPGIGETTAAVLIAELFDKPYTRARQAAAFAGLVPRIVESGTLRGRSRLSKIGPGRLRKALYLPAVAALRCNPTIRAVRARLQAAGKPPMVIIGAAMRKLVHLAFGVLKSGKAYQSTYAHS

SEQ ID NO: 309977 - protein, 348 aa, unidentified
MLADQVDYVVGVDPHRDSHALAIVHVLSGAVVFETTIAASSQGYAEVLQLVDAHAPGRRAFAVEGSGSFGAGLTRFLTSRGERVLEVSRLRRERRSGGKTDALDAVRAARSVLGQERPATPRAGGERQALQALVAAREGAVNAKCAGLAQIRDLLITTPEPLRSELRPLTQAPLLRRLAATRPEGRRDPELRGSMLALRSVARRVLQLQAEERELGRQIEALTRKLAPQLLDQPGVGPHAAAQLVLSWSHHGRIRSEAAFARLAGAAPIPASSGQTVRHRLDRSGDRKLNRALHMILITRKRAHPPTIAYIERRMHEGKTRREANRCLKRYLARSLYRLLEHGPPIAT

SEQ ID NO: 309978 - protein, 425 aa, unidentified
MNYKQNEKINQVKESTLVVGIDIGSTTQYARAFDWRGIELGKVFPFSNSREGFESFKAWMQHLQDKYKKSDVIVGIEPTGHYWFDLGAYLEDEGILLVMVNPYAVKQTKELDDNSQSKNDRKDPKVIAKLVTEGRYSAPYTPDGVYADLRIMVTNRKRLIREITQIKNRFARWFAIYFPEYTDVFGDYEAQSSMLLLKKVCTPEAIVELGAEKINQIWRDAKLRAVGMKRATTLCETAKRSIGLKKGSSAAQYEMKLLLEDYEYKKAQLDSVMEEIESLCKKIPESEQMLAIKGIGVITVAGFLAEVGDVRRFESPRQIQKLAGLSLRENSSGKHKGQTTISKRGRSKLRAVLFNAAIPLIAKNPEFRSLHEYYTTRANNPLKKKQSVIAISCKLVRVFYAILSNGVTYDPQKMLSDIHRPSQAA

SEQ ID NO: 309979 - protein, 348 aa, unidentified
MAHFVGLDVSVKETSVCVIDDTGKVILEQKVPTEPADIITLLSSLGVSYGRIGIEAGPLSQWLVNALTVAELPVICVETRHMKALLTAQQINKTDRNDARGIAQMMRVGLFKPVHVKTLVAQEQRMLLTSRKLLQRKLLDLESDLRGTLRNFGLKVGVVSGGRYEARVRELIAGFPRLAAIAEPLLKVRQVMRQQLAVLHKMLLDTVRDDPVCRRLMTAPGVGAVVALTYRATVDQPQRFVHSRAVGAHVGLTPKRYQSGEIDYDGGVSKCGDALLRTMLYEAAQVLLTHGSKWSWLKAWGVRVVQRRGMRRAIVAVARRLAVVLHRMWVDGSEFRWSKDSAAVPTAA

SEQ ID NO: 309980 - protein, 357 aa, unidentified
MGKSISNFSSVTTIGLDIAKNVFQVHGVDAKGAAIVARSVRRGQLLRFFASLPPCLVGMEACSSAHHWARSLIELGHDVKLIPPAYVKPYVRRNKNDVVDAAAICEAVGRPNMRFVPVRSLENQAELMRHRARELLAANRTRMLNALRGHLAEIGVVAAQGVQHAYALKRLVADGFDDDGEVVVADGVRRALAPLVRQIDAIDEEIAAIDEEIEALVKADETARRLMTIPGVGPVTASAIVATVRDTSAFSGGREFAAFLGLTPRQSSTGGKARLGRITKMGDRYLRKLLVVGACATLSHRKGHDDALRVWASSLLARKAVKYKFKLTAVALANKVARIVFALMTRGGEYDERPIAA

SEQ ID NO: 309981 - protein, 374 aa, unidentified
MKFIGIDLHTNRFTCCYRNEQSSVENPTKDRVIKTFELNHLGFDAFFQTLTSETYVLVEATITTFSFIRLFKDRVKEAIIANTYELKQVSLARCNTDKLDADKLCRILKAQVLSGELLVSPVTMPSKEIQELRGLFTTYRLYQKQNVQLKNRIHSLLKEQLYGFTQEEIFSKSDREKIRAISPGSVLNFQMNQLLDRLERDEADVETLKDQVLLHASPFMAQIEILTSMKGISVFTAVAIIADIIDVSRFRNSKAFTSYLRSAPRVANSNTSVSIRGTNKKGRKLSATLLTQSLNHVLNSSRKLNRWYNRLCEYKKPGLVRTGLRRRVLAEIFQMLKKGEYHYGREAEKHELKMSQYRRFLEKQKNNAVLKKTA

SEQ ID NO: 309982 - protein, 316 aa, unidentified
MKNPDTKSSPAFAGVDIGKASLDLSLAGQPPCRHTNDAAGIAALLKALKNLPQPAQVICEPSGGYERDLLEALWAAGLAVSLVHAARVRAFARAQGRLAKTDPIDAVVLREFGELLRPGTLAAPSPERERLAALVQRREQLVNLLATEDQRLTQTREAVVRKMSARLLKELQTQIAQMDGLIEAQIMADATLKSQSERLQQVQGIGPVTATTLLAELPELGTLSRNESGALAGVAPYNCDSGEHRGRRTIRGGRVKVRRVLYMAALVAARYNPILKAFYDRLVAAGKPKKVALVALMRKLIVLLNHLLKNPQFKLA

SEQ ID NO: 309983 - protein, 408 aa, unidentified
MNAVGIDVSKGKSMIAVVRPFGEVIATPYEVRHTASELRELAKSLKSLGGETRVVLEHTGRYYEPVAQMLSNAGVFVSAVNPLLIKEYGNNSIRKVKTDKADALKIARYGLDNWSELREHTAMDKLREQLKILNRQHSLYGKNKTAFKNNLIALLDQSFPGANAYFGSPVREDGSQKWVDFAASFWHVDCVRGLSLNAFTERYRKWCKRHSYNFSAEMVAEIYEDAKELVPTLLKNESTKVLLTEAVSQLNAISRTTEVLRSEMNRIAKALPEYEVVMGMYGVGTSLGPQLMAEIGDVRRFTHRGSLTAFAGVDPMPNQSGKSERQSNPSSKRGSPYLRKSLFLVMSCLLQNSPPDDAVYQFLNKKRGEGKPYYVYMTAGANKFLRIYYGKVNEYLRSLDDTAEVPLN

SEQ ID NO: 309984 - protein, 349 aa, unidentified
MRFYTKTHQNYCGIDLHARTMYVCILNATGEILVHRNIRTDQTRFLALIEPYREDLVVSVECIFTWYWIADVCAREQIAFVLGHALYMKAIHGGKAKNDKLDSHKIALLLKGGMLPQAYAYPAAMRATRDLLRRRLHLARQRAHLIAHIQNTVHQYNLPALGVRLGKPTERDGVAACFPDPVVRRMMQLDLDLIAYYDQQLAELEWQLVKQAKGHDAQMYHLLSSVRGIGKILTLVLIYEIQDIQRFPTCGQFLSYARLVRCPKESAGKIVGKSNKKIGNSYLRWAFGEAAVLFLKGNPEAQRWIEKQASRHGKGKALAILAKKLGQTVYAMLTKKRCFDEAKFMAHLQ

SEQ ID NO: 309985 - protein, 372 aa, unidentified
MKHAITYVGLDAHKKDIYVAMVVGHERVPVTWQLANEPQAIRRLVRKLEREAAGPVQCCYEAGPCGYALQRQLTTERVSCQVVAPALIPRKPGDHIKTNRRDARKLAELLRAGLLTEVAPPTAADEAVRDLARARDDAREDLVRARHRLSKLLLRRGVYFPGRQRAWSEPHRRWLRSLMWEHAADRRVADDYLLAIEQLEARRRELDAALQEIAQTAPYREPVAWLRCFRGIDTLTAMIIVAELHDFRRFHSARALMAYLGLVPSEHSSGEHPRRGRITKAGNAFVRRVLIEAAWHYQHRPGVGGALQRRRAGQPARVIAIADRAQQRLCRRFRRLVLERKPTPKVAVAVARELAGFIWAALQDTRARAVAA

SEQ ID NO: 309986 - protein, 332 aa, unidentified
MAWTVAIGVDTHKDIHVAVACNRLGAQLDVCEIEAGSRGYARLLAWAQELGEPAFAIEGCGSYGSGLARFLTAAGYAVWECERPRRRDRRRGKSDLIDAALAARRLLSGDGLSLPRSGERHDGLRLLLLERRGIVQAQTAALNQLQAAVLTPTLPERLRSLGGERLVRACLTLRAGSTERAVARRLARRIRQLDHELAEVDTQLRAAITSCAQPLLDECGVGVICAAQMIVSTGDARRMRSEAAFAALAGTSPVDASSGRQQRHRLNRGGDRQLNRALHIIALSRTRHHEQTRAYHQRLLASGKTSREARRCVKRALARHFYRQLRALPITT

SEQ ID NO: 309987 - protein, 402 aa, unidentified
MNSVGIDISKGRSTVAVMRPFGEVVISPFEVHHTDSELSALARRLKSLNGETRVVMEATGNYHAPVAKLLHDAGLYVSVVNAKLLHGYGNNELRRVKTDKKDAVKLANYGLDRWLTLPRYVPEEGARLLLKNCYRQYRQYSKVQTVLKNNLISLLDTVFPNVNRLFSSPIRGDGSEKWVDFVAEFWHCRCVSEKSEKAFANKYQRWCKKHGYNFSVAKAHTIHAEASGHIGVMPKSETTKLLVEQAVAQLRATSVALTALKREMLTLAAQLPEYPVVMGMFGVGPTLGPQLIAEIGDVRRFYSKKALVAYAGLDAPPNDSGDVTGKHKSMSKIGASSLRRTLFLVMSVYLRSAPLEEPVYQFMDRKRAEGKPYHVYMMASANKFLRIYYATVKAYLESLEQV

SEQ ID NO: 309988 - protein, 402 aa, unidentified
MISVGVDVSKGKSTVCILKPYGEIVCSPFEVKHVEKELEDLAGLLNKLDGEIRVVMEATGVYHLPILTFLQEKGYFVSVINPYSMKKYAKDNSLRRAKTDRLDSIMIANYGIDRWFKLQKYEGDENTYAELKLLGRRYRYYMELHVKSLQELTHILDYVMPGIKAMFNSWDEASNKDKLSDFVERYWHYDLITSMSREEFTEDYLAWAKEKKYHQSSAKAEAVYEMASDGIPTLSSDTPSTKMLVQEAIAVLRAVDSSLFRIISRMQELAKTLPEYSTVRSMGGVGDVLAPKLIAEIGDVRRLHNAKALIAWAGIDPPPYESGQFVGSQRRITKRGSSTLRKVGYEVMRVLKSHREPEDNVVYNYILKKEAEGKNKKAAKIAGLNKFLRIYYARVMAVYQQQ

SEQ ID NO: 309989 - protein, 375 aa, unidentified
MLQYSKYVGLDVHKDSIVIGVAERSGEPPQFHGRIANTAEAVKRLVKKLSPHGEVVAFCYEAGPCGYGIYRQIVALGHECAVVAPSLIPKKAGDRVKTDRRDSLSLARLHRVGELTAVWVPDEEQEAIRDLTRAREDMKALERQSRQRLGGFLLRHDRIYQGKSKWTQAHFRWLETVKFGAPVQQIVFQEYVDMVKQCQKRVADLELQMQIAVEGWSLGPVVQALMALRGVKLVTALTVVAELGDISRFDSPPQLMAYLGLVPSENSTGLRPRRGRITKTGNGHVRRVLIEAAWSYRFPARKTAHLERHAQKCSQAVQAIAWEAQKRLCQRYRHLVLDRKKLTVVATTAVARELAGFIWAIACEVMGRTTRTEST

SEQ ID NO: 309990 - protein, 373 aa, unidentified
MNNSITYVAMDTHKKQHRVAIAYPNDEVIVEFSVKNTPSEIRKMVRKIKRNAPGEIKFCYEAGVCGFTLQRRIEALGCKCSVIAPSLTPRKPGERKKTDRRDAKKLLGLFMADMLTEVYPPNEQQEAARELTRCREAAQENLKRIRHQLQKMLVRHGYVFTDGQHWTQKHYRWLEAIQFDQPLLQEVFDCYFTEMRHCLQRVQTLDKELEKLAQSEDYREVVGILCCFYGIKTLTAISIIAEVFDFSRFASARDFMSYLGLTPSESSSGEKEHKGPITKTGNKRVRRLLTEVAWHHRHAYGVSNVLRKRREGQPQWAIDIAERAGIRLRRRYRRLIHRGKLPCKAVTAVARELAGFIWSALIEYEARKKRKAA

SEQ ID NO: 309991 - protein, 338 aa, unidentified
MTYIGFDHHKKWTQAAAIDDQAKIIREMRVLNDRNSLKGFLKGLPKPLMGVVEAGPTWGWIYDTLSELGVKMIVANPNAVRAIAEAKIKTDKIDARMLAALLRVGLIPEVYVPSEEIRAQKMLWRERIWLVRMYVRLKNRIHRLLNHYHVEVPEFSDLFGSAGRRFLEELELPDPGNRILKAQLKLLESYRSQIQEVQRWAVQATRNHPYRVYLESLPGFGKVFAPIVALEIDDPKRFANPGKLASYCGLVPSLYSSGGKSWQGGIGREGNHWLKWAFIEAAWAAIRASAYFRVLYQRLRERKTAQVAIVACARRLCEIAYHLMKERRCYQERQVSYG

SEQ ID NO: 309992 - protein, 349 aa, unidentified
MRFYHGTHQHWCGIDLHAKSMYVCILDHDGQVLVHRNLRTNPADFLAVIEPYREGLVVAVECIFTWYWLADLCAAEGIDFVLGHALYMKAIHGGKAKNDRIDSLKIATLLRGGMLPQAYAYPTGMRATRDLLRRRLHLVRKRGQLLAHIQMTSHQYNLPPLGKRIAYPANREGVAEHFEERAVRKSIAVDLALLERYDALLHDLELYLVRQAKQHDPQAFHRLRTIPGVGKVLALTLLYEIHDIHRFERVQEFASYARLVRCAKESAGKKQGTGGAKMGNVHLKWVFSEAAVLFVRHSSEGKRLLARLEKRHGKGKALSILAHKLGRAVYFMLRRGKAFDRARFAATVN

SEQ ID NO: 309993 - protein, 428 aa, unidentified
MHGRDYNKQIAKRQRIKRTTLVIGMDIGNEFNAMCLMNKEGEVLGKYPRIYNTRKGFDYFAKVVEETKAKKGFGNVLIGMEPTGHYWRKIAYFAKEKGYEVRFIRTTALRHQRELDESSSAKSDVRDAVTIANITREGKYIDTVIEDGVLRQLRTLAHVRERIQRYNTGSKHALKAVLDDYFPELKGIFWSMKSKGLWAVLGNCPFPKDVIDLGLKRLTELIAKSTRRKGSAVKKAEGLYQAARETVGLKQIGIADRYRAKMYLEEVKRSEEQLKGIEEQMKRLLEEVPYAKNILSIPGVGVVSCAVFLGELGNPFNFKHPKQIIKYAGYDPQENDSGQNIGRKRISKKGRWLLRKYLFFMSMRVLYRSKFFGEYYQGKLKSSNRFGQPLKKKEAICAVAIKLIKVIFALLRDERTFTAKAPELSLVA

SEQ ID NO: 309994 - protein, 357 aa, unidentified
MPSIAEHVRPVTGGVDTHAEVHVAAVVDQVGRVLGTETFAATAPGYQAALAWMGGFGELGTVGIEGTGSYGAGLARHLAAQGVAVVEVIRPNRQARRRRGKSDTADAIAAAVAALNGDASGIPKSQAGDVEAIRALQVARRSAVKASTQAANQLRDLIVTGPQVLRAQLGALSTRQRVARAARFRARDRAEPLRGTMQAMAVLARRYQRLQAEISELDTALDELVARAAPALLDRQGIATHGAAALLTTVGDNPDRLGREASFAALCGASPVDASSGKQRRHRLNRGGDRQANSALWRVVFVRMSHDPRTKAYVAKRTAEGKTTKEIMRCLKRYVAREVYKILVRPARNAATVSTAA

SEQ ID NO: 309995 - protein, 409 aa, unidentified
MLFVGDDWAEDHHDVELQDPAGRRLARARLPEGVVGIARLHELVAAQLGADDGPEQVVVGIETDRGPWVQALLAAGYQVFPVNPRQVARYRERHGTSGAKSDAGDAHTLADMVRTDRHQLRAAAGDSDLAEAIKLLARAHQTLIWDRHRHLLRLRAALVEFFPAALTAFPDLAAADALELLAAAPEPTSAARLSRTRVAAALTRASRRGVPAKANQIQQALRAEQLPQPETVVAAYAATVRAAVAVIGTLNAQIAALAGQVEAHFGGHPDAEIYRSQPGLGGVLGARVLGEFGDDPGRYRDARARRNYAGSSPVTKQSGKKKVVVARFVRNDRLADPLHQQAFCALTASLGARAYYDQLRARGTGHHAALRQLSNRLVGILHGCLKTRTLYSEETAWSHRTSDAATAAA

SEQ ID NO: 309996 - protein, 445 aa, unidentified
MRRCIGLDVHREFAQVAIWEAGVVRQAGRIQTTPEALREFAASLCISDEVAIEATGNSYAIARLLERHVGRVVISNPQKTRAIAEAKVKTDKVDAAVLAGLLQANYLPAVWLPDDATFALRRQVARRAHIVRQRTRLKNQVQSILHRNLVPRCQAADLFGRKGRTWLATQDLPQDEQQAVQALLRQLDFHAAELRIVDAELGRVALEHPEVRRLMTIPGVDATVALAIVAAVGDFGRFSSPQRLVSYLGLNPRVRQSGGQPAQHGRITKQGRAHARGMLVEAAWAAAKTPGPLRAFYERVRARRGMQVAVVATARKLVTLCWHLAVKGEDYAFARPSLTDKKLRALELRAGLPPRRGRKGTAAAYSLKEVRRRERALAEQAEVAYRQLVVGFKPKPPPREPTRKGVAAATGARRSGPRRDQAARQDSQPHGPALRSGVDHAQHRA

SEQ ID NO: 309997 - protein, 458 aa, unidentified
MRPRPNKHLRPIVPQALKTVNPNTAGIDVGSAEIYVAVPVDRDKEPVRVFKTFTCDLHALARWLGSCGIISVAMESTGVYWIPLYDMLERYSIEVCLINARQLKFIKKKTDVLDCQWIQQLHSYGLLNASFRPTEEIRRFRTISRQRDMLLRYRAAHIQHMQKCLHEMNLQLDNVISDITGTTGLAILRSIVAGERNPVVLAQYRDPHCRCSEEEIVKSLEGSYLDEHLFVLEQALELYDFYTKEILNCDNRLFALYQTVEPHSERALPPHRKSKKRSRQDPPYDLRACLFRLCGVDLSQVDGLNVVTAQMILSETGTDFSKWKTCKHFASWLGLSPNNKVSGGKVLHQRPTSTANRATQAFRLAARSLHHSKSSLGAYYRRVMAKNGRQVAIKACAHKLARIVYAMVSTQAEFHDLGEHYYEERFRNRTLRHLKRKAANLGFQLIALPQPAGLAGVS

SEQ ID NO: 309998 - protein, 389 aa, unidentified
MLLDDPSLGLAAIRTQFGAIFVSLELSRSNWLITSLSPGKGEKMSKHVVPAGDVAGLMKLFAELKRKAQARTGKSYPIITIHEAGLDGFWIHRVLLQEGIESHVVDPASIATPRRRRRAKTDRLDGETLLRALLAYKRGEPRVCAMVVAPSPEEEDRRRLCRERRSLIAERVTHVNRIKGLLFAQGISDYAPLRRDRRARLEGLRTGDGRALPGHVKAQISRELDRLELLLDQITAVEAEQDALLAEVSKPAGDERAAPTPVTMLLALKGMGANFAAVLWSEAFYRRFANRRQLAAYAGLAPTPWRSGGIEQEQGVSKAGNPRLRTTMIQLAWLWLRHQRQSALARWFKAHSARGRKTAIVALARKLLVALWKYVAHGVMIEGAAMKSV

SEQ ID NO: 309999 - protein, 312 aa, unidentified
MTLKMTVPPFAGIDVGAETLVLVIRRNAIAMKAQTFANTAADRKRLVKKLAAFPGITVCLEATGVYHLDVAIVLHDAGLRVMVLNPKAAHHFAKILLRHSKTDAVDADTLAQYAERMPYRPWVRPTHEALALRALARRIHALTRAKASAKNQRHALTFGGDTPKAVLRDVRLAIAQLEKRIDVLTREALAFIEAEASLKAPFALLLDVKGIGKTSAIALLGELLLLPAGLTHKQWVKFAGLDPRHVESGKSIHKQPRLSKAGNRYIRSALYMPALSAKAHDPYVKGYFEPPFLIEKLRATKNNGEFFDSMKR

SEQ ID NO: 310000 - protein, 386 aa, unidentified
MGRRVKKPTAVVGFDVGKSFHRAFGVGAGGEAALSERVDNRPAAIDRVLAEAGAGALVVVDQRRNIGALVLSRARGAGMRVACLPGKAEKRAREMFPATGKTDELDAEVIARTALGMPWTLREAPEEDERRASLRMLSSQRAFCVKGRTESLNRLRAVLLEADPALEAALDPSRRWQLEALAALGSAHGCAAAGVERYRELAGARGGREDALWEAPSASAASRPEVRAEGALASMLAGRVLARDAEVSALDAAIGELLEGDATYEALLTVPGIGPRTAAALVTSVDVTMFRSHDELASYCGIAPADSQSGTSARSTKPKRGGSKPLKNLLIFSCSSPIGTKNEFGRYYEECRGRGMRHNKALKAVARKRLKVIYAIMRDRVPYRAA

SEQ ID NO: 310001 - protein, 352 aa, unidentified
MQYVGIDWAYRRAAWCALSDGGAISGEGMVPADEDGLARLVLTVGREVRACVEMMSGAVWVRDRLAAAGWKVEVAHARKVRDIAPLACKTDKVDARVLAELCRRDLVPALWLPSLEDRALRERLRRRMHLVRLRTSARNRIFGLLTQWGLRLSLKRLRAPDAMDVLAACGVEEAWRRSIAEALEVIDLLDARIAPLDAELRPLAAADPRVLLLRTIPGLGDLLGLTFTAEIGDISRFSAPRKLIGYAGLAPKISQSGDRSRTGALSKAGSRTLRWAAVEAAHQSWRPTNPWHELYADVTRRAGKNPAKSAVARKVLIAAWHVLSREQPFNPARPRNTDSTTVPASSRCFLAA

SEQ ID NO: 310002 - protein, 432 aa, unidentified
MKHKQYSTQTEKIKRITPETLVIGVDIASQKHCARGFNFRKMELGPQLYFQNDLAGFRTFIKWLERLTKANNCLDVIVGMEPTGHYYFALDHYLKEKGIEVVLVNPRDVKRQWEVENNASIKSDPRDAGIIGKLLTDGRYSPSIRYEGVKAELREVIKTRDMLIEEKTRLVNQIHQWLSTYFPEYRQVFKTGIGKWLITLLKEAPTPAEIARLKPDGIHRLMQTCRRSMSRSKVNKLYELARQSIGIQAGVQEAKERLKMLLKRLEQNQDDLRKKEKKIKTLTEQIKEAKLLTDITGIGNLTAATFLSEVGDIDQYETPKQIEKLAGLTLTSKSSGNKKGRGHISKMGRKKLRTVLYHIALTLSSKNDAFKKLYHYYKDIRKKPGTKALIKLCCKLIRVLFTILKKGEPFDPEKMLADIQWPENMTPGYSLS

SEQ ID NO: 310003 - protein, 397 aa, unidentified
MYIVGIDIAKRKHEAAVIDGEGAVIIKPFSFTNNCSGYNRLLAMLAKAKLPLDEVSFAMEATGHYWLALFTRLQKEGFRVQVINPVQTNSIRSFYIRQAKTDPRDALLIAEVIRFGHFSESTLHPENIYELRELCRGRHAIVSMQADVKRKVVALLDQVFPEYETAFTNMFSDTSMAILQTCPTPKELSEMPFEELCHLIEVSSHKRFRMAKAQELQELARNSFGFAMAGDVFSTMIRLYAKHLDFLKQQVREMDRKIAEIMDTLDTPITTITGIGPTLGAYILSEIGDISRFSSAAKLAAYAGIDPTMRQSGEYNGVRNRMSKRGSPYLRHAIWLAASSAVLHDPALKLYFQKKRDEGKPYMASVGHACRKMVSIIYAVMRDNKAYTPYIPNEISA

SEQ ID NO: 310004 - protein, 338 aa, unidentified
MGTYAGIDLHSSNSYIGIMDQDYQRLFGRRLPNDLDKILMVLEPFTSDLKGVIVESTYNWYWLVDGLQEHGHRVHLANPSAIKQYEGIKHTDDKWDSFWLAQMKHLNILPEGYIYPKEQRAVRDLLRRRLFFVRHRTANILSLQSTITRNLGIKMSSNEIKKLDMDNVCGLFDSSNLVFMAQNNISTIKHLEKIIKGIEKEIKSQVKLRKEFVMLTTIPGIGLILGLTIMLEVGDIGRFFKVGNYSSYCRCVSSKRLSNGKKKGENNKKNGNKYLAWAYVEAAHFAKRYIPKAQRFYQQKMAKANGAVATKALANKLARASYFIMRDQVSFDEDMLFR

SEQ ID NO: 310005 - protein, 377 aa, unidentified
MSSESATARPIISLGMDVHKDSITIAVLPAGAKTPTRLERLPNDLAKLKKWLARVAREGEIRACYEASGAGYVLHRALREWGYACDVIAPSLIPKRPGVQRKHDKRDATDLARLHRAGELVAVHIPTEAEERVRDVVRCRETFQREILKSRHYILKFLARRGFVFREGTNWCTPHLKWLQHLTTDGSALASHDRLVFREYHALLMYKLQRREELDRQIEELALLPALAPMVNRLQCFRGISLHSAMVLATEIVDWRRFERPAQLACYLGLVSREDSSGDRTRLGSITKAGNTHCRHVLVQAAWSYRHRPQTSVDLKRRQHGQPPAVITHAWKAQQRLHQRFTYLSDRKRSQIAVVAVARELVGFLWAVMRDLEPLRA

SEQ ID NO: 310006 - protein, 334 aa, unidentified
MKNYCFHIGIDVSKLKLDVNLLNSQTLESEHYVLENNVKSIKLFIKALIKRKIDLDQVLFCCENTGIYTNHLINVSTDLKLDLWVVPAIEINRAKGISRGKNDKTDAKDISYYSFRNIDKLALYTLADLDVQKLKLLFTEREKALKSLMIMQASKENVDFVSQEVYREISKINKGLVTAIKKSIKSIEDKMKQIIKSNQELQQQATLIKSVPGIGDQTSLYLIIATKAFKAFPNWRKFACYCGVAPFEYSSGSSIKGRTKVNHLADKKMKSLLQMCAMTSIKYDAQLRHYYLRKKEEGKNSMLILNNIRCKLISRVFAVIKRGTPYIDTHKFAV

SEQ ID NO: 310007 - protein, 341 aa, unidentified
MKNKSFIGIDISKNVIDVSIFCEGTPIKDFPHDVFNNSRKGFGEMCTWLKKNHVVLSNCLFGMEFTGSYSMELEKFLNARKYQFCMLSTHVIKHYPMGPKDKSDKIDSAKIADFLYRYNGTECVKPYKMPDKTMQRLKALMNERKFLVEQRTCFMNRRQLCTTKEDAQLYDSYIKKLSHDIENIESEEQKLLVTDERLFTTYWNLLTIPGIGFVNAINVIVITRNFTAFETARQYASYVGVAPHFRTSGTSVRWRPRPSARSDGQAKADLSMAATVAVQYDAELQSFYNRKLGGKQDSDTKRKALNAVKFKLVLRMFAIGKQNRKWEPLDSKSSNEKLAIS

SEQ ID NO: 310008 - protein, 330 aa, unidentified
MAYAGVDLHKNFCQTIICTREGELIKEGRIRTEKEDIEEFFSDLEDLEIAFEASGNYEYFYDLLESLGHKVVLAHPLKTRMIAESRVKTDKVDAKTLAELLRANLLPTSHVPPKEIRELRHLVRHRIALGRFRARVKTQIKTELRRKNIKYPDGGGIFTGKGKKWLRSLKNTVIDSYLAIYEVLEKEIKEAESRIEKAGKEYEEVKLLTGIKGIGVYSALIIFSEIGDGSRFPTEEKAFSYAGLVPRVHQSGEESYYGRITKEGSKYLRWILVEAARVHVQWCPDSKITKHYNKIKRKRGENIAAVAAARKLLQVIYHMLKNNEEFRIEG

SEQ ID NO: 310009 - protein, 356 aa, unidentified
MSQNLDSKVAVIGIDIGKNSFHIVGQDRRGALVLRQKWSRGQLEARLANLPPCLIGMEACTGAHHLSRKLQALGHDARLMPAKYVRPYSKGEKNDYRDAEAIAEAVQRPTMKFVAIKTADQLDLQALHRVRERLVSQRTGIINQIRAFLLERGIAVRQGLNLLRAELPGILGTRTDVLSPRMLRVIEDLAGDWRRLDERIEGLSGEIDALAHQDKGCERLMTVPGVGPIISSAIVAAIGTGDAFSKGRDFGAWLGLVPKQMSTGDRTILGSISRRGNRYLRKLFVQAAWVVLVKLGPEQWERYGLKSWIEAAKKRLHHNVLAIALANKLARIAWAVLHKGRAFEYVKTNATASRSA

SEQ ID NO: 310010 - protein, 298 aa, unidentified
MPRYSTAFGMDVHLRSTTVCALDAETGEAVTRRFRGNPWGEVAEWMSGFPGPSLAAYESGYLGFAPQRELSGLGVDCVVAAVSKVPRSAADLSSKNDRNDAARMAKAILSHDVTPVWVPSPEIEGLRDLAAAHDAATARLAAAKQRLLAFLARRGYVYGGTTPAGNPRKYWTYGFLRWLDGIHPADDGGIRALAALRNEVEAADETREALLAEYRAAVAAGPLSAEVEALQSIKGCGFALAAAFASEVGDFSRFRSGRQVTAYFGLAPKQRSSADSVRLGGISGAGNALVRKLAVEGC

SEQ ID NO: 310011 - protein, 314 aa, unidentified
MIIPPRCVGIDVSKRMLDIFDDAFGVPERIANAPQAITEQVARWRCGNVFIVFEATGVYDRELAGALRQSGIRFARINPARARDFARADGRLAKTDAIDARMLASFARAMAPAADQASDPVRNALALLAKRRDQLVHMRAQEKNRRSEAYDRAMIERITGHLVFLDDEIKAIEAEIKTLIKAEPEIFEQARLMRSTPGIGPVACMQLIAQMPELGRIGPKQVAALAGLAPLNVDSGSYRGKRTIGGGRKRVRDALYMAALNAVRRNGPFKTFYQKLRSAGKPAKLALIAVARKLLTTLNAMLRDRKTYLRSQPS

SEQ ID NO: 310012 - protein, 434 aa, unidentified
MAKTVSFEEANTGGAGIDIGSKEIFVSIDGEQVVTFKTFTRDYHACCKYLKDNNIVSVAMEATGVYWMSLYSMLEDSGIKVCLVHPREVQQVKGRKTDVKDSRWIQKLYSAGLLRESIVAEGELKDLRVLTRERLDLIEMGSTYVNKMQKYLELMNIKLRNVISQIHGASGLSIIRAILEGERDPKKLANLCHVSILKKKYEDVVKSLEGNYHQSYLMLLKENLRLWEEHQASITNIEHLIENLLEKLNKNNTHIEVTTPANPARHHNPDIKELHRTMVQMYNGVDLSSIAGINDSTMLRLLGEIGNDLSRFPSKKHFVSWVGLSPKNKQSGKMKKRLKCPSNNAGLIFRQAAQSLSTSKYNAIGVFINRLKGRKGAKVAIKAGARKIAEAFYDAIEKGIDYVEQGAIKYKEQLQKRELYILNKLAKKYNYKIA

SEQ ID NO: 310013 - protein, 259 aa, unidentified
MSQPNLQCMGIDVAKLSLDIATTDTIEPFTVGNDEDGFAVITDKLKHTKINLILMEATGGLEAAIACKLQSEGYDVVVINPRQARDFARSMGYLAKTDKLDAAMLAQLALVIDRHPDRSRYIRHLPDEARAVLAAMVVRRRQLNHMLVAERNRLYPSHPQSRKSIDNIIDALQNELDRINEQMKQHMTAFFQEQARLIGSVKGVGDITVASLIAELPEQGKLNRREISALTGVAPLNRDSGKMRGKRTTFGGRAGVRAT

SEQ ID NO: 310014 - protein, 309 aa, unidentified
MSGAVVGIDIAKRKFDVALFLKGKFKHKACMNNKQGFEDLSRWLKKQGVEHVRVCMEATGTYGDELATYLYDAGHLVSIVNPVRIKGFAQSELLRTKNDKVDAGLIARFCVAMNPGTWTPPPPEIRRLQSLVRRADALIDMRTQEQNRLGTTHETIEPSIKEHIGYLDQEIEKLKRQIAEVIDHDPNLRGKRDLLDSIPGIGETTIAVILSALHVFEGVKCVQKTVAFIGLAPKETLSGSSLKGKSRICKIGHARLRKALFMPALVAMRYNPVMIDFYRRLKEKGKNGKVIVCAIMRKLVHLIYGILLP

SEQ ID NO: 310015 - protein, 472 aa, unidentified
MTDSKNSKKQATKKRKARRRKKGFCFQDRPIVEPNAAGVDVGAREMYVAIPPDRDAEPVRVFQTFTADLEALADWLIDRGITTVAMESTGVYWIPLYQILEDRGLRPCLVDARHMRNVPGRRTDWHECQWLQYLHTSGLLRAAFRPQQDVCAVRTLVRHRHEMVQMACQHIQHMQKALTQMNFQVQHVIDDITGVTGTAILDAILAGERDPGKLAKLRHGRIKADEDTLRKSLEGDWRAEHLFTLRQSREMYDAYRKQIEACDQELIQYLGDFEAKVDVVEKPLPKPSGPSRKRRTKRTGDYRFDARQQAYRLYGVDVTRIPGIDGMALSLFSELGSNLTIKFPNSGEFSSWLGLCPDNDKTGGKVVWRGVRKIKNRAGQMFRQAASALHRSRSPLGDLLRRMKAKLGPEAGIIATAHKIAIIFYTLVTKQVEYDDSAWAERDRQRQQRFEQKLKRQARYLGYQLVPIQASA

SEQ ID NO: 310016 - protein, 386 aa, unidentified
MHDHEPEGQTAIRTDLGAIFVSLELSRSSWLITSLSPGGGEKMSKHSVPSGDISGLSLLFLRFRERARKRTGKDFPIIVIQEAGLDGFWVHRVLEQEGIESHVVDAASVMTSRRRRRAKTDRIDGEALLRALMAYKRGEPRVCAMVRVPTAEEEDRRRISRERKILTAERVAHVNRIKGLLFSQGIAYEPLHGNRRARLEQLRTGDGRALPEHMKRQISRELDRLELLLEQIKAVEAERNTMLAVSEGEKIPTPAKMLMQLRGIGSESAMVLWSEGLFRHFDNRRQVAAYAGLAPTPWQSGTIDREQGIGKSGNHRLRTTMIQLAWLWLRHQPDSALSRWFHQRVERSGGRFRKTMITALARKLLVALWKYATAGVVIEQATMKTA

SEQ ID NO: 310017 - protein, 345 aa, unidentified
MNSTQVGVDLAKSIFEVAISRAPGRVEERRRLSRTAVTRFLADQAPAEILMEACGSAHHWGRALQRMGHTVALFHPGDVARYRDGNKTDRADAKALLEAARNEALDPVPVKSLEQQAVMALHRLRQGYLQTRTAQINALRGHLREFGCVIPTGPRHVPSQAAAALASDAVPGMLRLPLTTVLEEIGELAAKAEGLRTQLSELVDRMPDAQLLLTVPGVGILTATALVAFVAPIHRFRSGRDFAAYLGLTPRESSTGSTRRLGSITKRGNSYVRMLLVHGARSALRAGLVAREPDDLRAWARSIAARKGHNVAAVALANKLARVCWRVWHDQRPFERRECRRGGPT

SEQ ID NO: 310018 - protein, 396 aa, unidentified
MAQIWAGTDIGKTYHHCVVLDAEGRRLLSRRVLNDEPELLALLADVLALDEDVVWAVDVADGMAALWINILLNHGQQLVYIPGLAVNRASAGYRGTGKTDAKDATVIADQARMRHDLTVLRPDDEHAVELRILTGRRADLSADRTRRINRLRGQLTGIFPALERALDLDNLGPLILLTGYQTPAALRRTGRTRLTTWLRNRKVRGAEALAQAATEAAERQHTAVPGEKIAAQVVHTLAKEVMGLNEQIGEIDKLIAARFREHELAEVIASMPGIGPLLDAEFLAATAGDMSRYGSADRLASLAGVAPVPRDSGHVSGNLHRPRRYHRGLQRVFYTSALISIRSCEASRRFYERKRNEGKRHTQAVLALARRRVNVLWALIRDGKCYQRELPVTSAA

SEQ ID NO: 310019 - protein, 326 aa, unidentified
MEHELHYIGIDTAKEKLDVDVLRPDGRHRTKKFANTTKGHDELVSWLKGHKIDHAHICIEATGTYMEPVAECLYDAGYIVSVINPALGKAFAQSEGLRNKTDTVDARMLAEFCRQKRPAAWEAPHPLERALRALVVRHQALTDMHTQELNRTETAREVQRPSIDAHHLWLEAELKRLEKQIKDLTDDDPDMKHRRKLLESIPGIGEKTSAVLLAYIGLKDRFAHARQFAAFAGLTPRRYESGSSVRGASRMSKAGHVSLRRALYMPAMVATSKTEWGRAFRDRLAANGKKGKVILGAMMRKLAQVAYGVLKSGVPFDASRHNPVAA

SEQ ID NO: 310020 - protein, 342 aa, unidentified
MEHYAGIDVSLECSSVCVVDANGKILREARVASEPEALIGWFRSVGFGLERIGLEAGPLSQWLFAAMRQAGLAVELLETRHVRKAFEAMPVKSDRNDARGIAQLMRLGWFRPVHCKSMSAQEARSLLTARKLVQSKLRDVENSLRGILRGFGLKVGKTTELKFAGRIEELVANHPHLQVITKALLSVRAVLRTEFAAFEKQTRKMAQSDARTRLLMSTPAVGPIVALTYASAIDDPARFKSSKQAGAHFGLTPKKYQSGETDYTGRISKIGDSSVRTALYEAAHIMLTKPLKGCTQLKSWAMRIARRAGMSKAKVALARRLAVIMHRMLADRTPFNPDAAVT

SEQ ID NO: 310021 - protein, 360 aa, unidentified
MAKARTLVGLDVHATKIVAAVLDGETGELQCFRMSGESVAAAAFCAGLPGPVRAAYEAGPTGYGLARDLAKRGVECVVAAPSKIPRAAGDRVKTDRRDAEHLVRLLLAGKLHAVRVPGDEEEALRDLVRAREAVRVDLMRCRHRLSKLLLRHGIRFEDGRAWTDRHRQWLARIALEWPAAQSTLQDAIGAVDALEHRRGQLEREIIALLPDSPWALQVGRLRCLRGVDTLTAVGLCAEIGDFARFAKPAQLMHYLGLTPSEDTTGESRRLGSITKTGSGHARRLLVEAAWHYRPRPSIGRALSDRQGGQPPEAIAIAWSAQRRLHRVWTRLEQRAKRRTIIAVAAARELAGFCWAITQIE

SEQ ID NO: 310022 - protein, 352 aa, unidentified
MYSQTINAKYFCGIDLHKDNMFICLVDNMNKIYVHKKIQATYLDLHQEISPFYPDVVVGVESTFNYYWLQDACQNDNVQFCLGHALYMRVGVHKKKDDKLDSYHIAQLMRNGTFPFAYAFPPQLRGLRELLRERLKAARHRGSLYTRFYIKLLQHFGWSPAIALNPAHNSSLREEYIRSTTDPALKLVFQQLHDGILFMESSIDKLEKTSLEITRLYMSPQLNLVTSIPGIGFVLGMTILCETEDIKRFKSIQNYSSYCRVVHTQRSSSGKTVDGRNQKSGNTFLKWAYSQGACLAIRHSPQISAYYKKLTKKKGAPVARAILAHKLAVAVFQMLKNNTPFDIILFTKSVRF

SEQ ID NO: 310023 - protein, 346 aa, unidentified
MKKIFIGIDFSKEKFDATVIKAEGVEERAERLHEVFDNKVSGFRRLLRWVKSVADEPDAGLWLFCGENTGGYSKALCNHLYGSGYDMWLENALSIRRSSALQRVKSDKADSGVIAEYAMRNYDQMRLYKPLGKNLERLREVFLYRHNLVKMKASMTVRKGEKKLTQEKSDISRFMAQSSKHLISEFNKKIAECDMKIEKIISEDEELRRNFEIITSVPGVGTQNAVCLMVYTDNFSRFDYDSRKIACYYGVAPFGRQSGTSVNTPPHVSPFANKLIKALLTQAALASINFCPQMAVYYRRLVEAGKKKPVAVNNVKNKLLHVITAMVRNGEMYNPDHDYYAALKVA

SEQ ID NO: 310024 - protein, 459 aa, unidentified
MSRKHKKAKRAGQGGAVPSLSCIEPNAAGIDVGATEIFVAVPQDRDPGPVRSFETFTEDLHRLKSWLQHCGITTVAMESTGVYWIPLFQILERAGLEVCLVNAQHVKHVPGRKSDVIDCQWLQYLHSVGLLRASFRPEERICAIRSLLRHRDSLVQMAAAHVQHMQKALTQMNLQLHHVLSDITGQSGLAILDAILAGERNPAVLAQLRHARVQASQEVITKSLVGDYQREHLFTLRQSLQAYRYYQSLITTCDQEIAEQLQNLDSRTPPDASPLPAEPYPHRPRKNEFRFDMRSELYRIYGTDLTAIPSINAITGYTVLAEVGTDWSKFRNGDAFASWTCLCPQNKKSGGKILSAHTRRSANRVNRALRLAAQTLERSTSYLGTYYRKMRARHGAPAAITAAAHKLARIIFHLVTTGQAYDESLFAAEEQRQRKRLENKLKRSAQQLGYQLIPLGQTA

SEQ ID NO: 310025 - protein, 334 aa, unidentified
MNYIGMDIHKQFTVAVAKDRDGNKLSEEKFDNNKCNFEKFLKDFCHEETKIVIESSSIWEYIYEILEGMKFEVKLANPTKTRAIAEARIKTDSIDADTLCDLLRANLICESYIPPKEIRNLRNIMRQRKAIVKGRTQIKNKIHAILLMNGIKLPYKTLGKTAMKWIIDEINITTIKTILVSYINLLEQYDFELEKIEERINQIANHNNEAKLLTTIYGIASVRALELVSEIGDIKRFNSSQKLCSYCGLIPSIKQSGSTLRFGRLVKQSNRSLKSTLIESSWNLIRLQGENPFREFYKKLSKKKGKQKAICAVARKLCCTVYAMLSKNQEFMLL

SEQ ID NO: 310026 - protein, 359 aa, unidentified
MAKRAIKCVIGVDLGDKHSDLVAIASPSGERSRIQMPTTKTAFAEFFENRQRARIAIEAGTHSPWVTEMLRGFGHEVFVANPRRLKLIYGDTNKHDHADAQKLAELAEFNPELLRPIQTRPAELQADMAAVRARMACVRSRTELVNHVRGVLKSFGHRVRKCSTKAFPDAAKEAMPKELREAVAPLLDCIRAQTESIQRYDRMIDELGGKYESVSRLRKIAGIGPITALAFVLVIGDPLRFKHSRDVGPYLGLVPRRSQSGEFDPQLRITKTGNPMLRAYLVQAAHYVLGRFGPDSDIRRFGLAIAKRGGKAAKKRAVVAVARKLAVVMHRLWVTRKPYRPLRDAPLEPDPAEPKVTAA

SEQ ID NO: 310027 - protein, 438 aa, unidentified
MAAVMIGVDPHKGSHTAVAVSAAEEPLGQLRVRACAAQAERLLAWAQAWPQRTWAVEGAGGTGHLLAQQLLAAGERVLDVQPKLGARVRLLAAGNVNKNDPNDARSVAVAALRSAGVREARADDHAAVLKIWSKRHRDLSRTRTQVACRLHAVLCELVPGGIARHITAGQATRILGSFTPPDAVAAARCELAAAFTDDLRRIDAQLRETRKKLATAVQAAGTTVTQVFGVGPVVAAAIIGDVRDVSRFADRDHFAAYNGTAPVEVSSGQRKVYRLPRRGNRRVNHAIHMAAVTQVSHRHSQGRVYYDKKLAEGKTPKEALRALKRQVSDAVFACLQADARRAAARAGGPGGQPGNDSVASAAGLHPERRLFGQATPGPAPTLRAAPCQDHARAPAGPGAAGLSGAGPGLPALPAPRGRRGSGVKAGRQAVAAGDAQQP

SEQ ID NO: 310028 - protein, 320 aa, unidentified
MSKKKSTSFIGIDVSKRLLEVAAHQSDYQFRCANKASAFGELIVELIALRPARIVLEATGGLEIPVVAALHAAGLPVVVINARQVRDFAKALGQLAKTDRLDARVLAHFAAAIKPPLRPIKSKDELELDALAGRRGQLIEMLTAEKNRRVSAATETVRKEIKEHIDWLEDRIAELDEQLQTLLKSSKLWRVKDEVLQSVPGIGPVVSFSMIADLPELGTLNRQQISKLVGVAPLNRDSGQQRGTRHIYGGRARVRSMLYMAALTATRCNPVIKEFYERLLANKKLFKVAITACMRKLLAIINVMVRDCTRWKTKDDPVST

SEQ ID NO: 310029 - protein, 406 aa, unidentified
MNYIGIDVSKSTSRYVLLDNDGEHSVKPFSLNNDNQGFEKLLTRIKELNLTPENVLLGIEATGIWWENLYCLLTGKHFKVIVLNPHQTNKYREALRFKAKTDDIDAYVIAGLLRSGKYAASYIPEETIQILREITKLRFQLVKDRQNYERQTCSLLALLFPEYPSTALKNPFAVASLAILKVYPTAKHLAEAKPKHIEKIVRSIKGNNFNIAEIQSLINIAQRSIYSGRAKHDRGLNLNILLTQVETTANAIALLDERTNSILSPSDPDDANSFPGANLLTIPGVGPKTLAAVLSAVGSNGQAFPDGKHLIGHIGFFPQIYESGETRHDNAISHRGPKYLRRALYIAAVACLKHNDEFKALYDRKVSQGKTAKQALVYVAKKLAHLCLSMLKSGESYNPSRVFMPA

SEQ ID NO: 310030 - protein, 416 aa, unidentified
MAEDLQKSCGLDIHKLFVIATILSRGTEVKIQKRFERDDDGILSLKRFVLSENCDVVACESTNDFWMPIYDSMCDYVTVIVGNARDIKGQTHKKTDKVDSEYIALLALNGMIKPSRVFPRELRQIRSHVRLRHKIVKKRTDFKNIISSILSSEQFNLKSKLTDIFGKTGKTILEGIIRGLPVDAIIQKFPACMTGRGDEFRELLQKEFSQEAILRLKECMEIISQLNGSIKNLEDQIFKWAHTNCKRKMDILMSVPGIGEIGAITLIAEIGDFNDFSDSDRLSSWLGIVPNVYQSANKHYNSCITKRGSKVARWILIQIAQVVASRTKDNILRDFFHRKKVTIGFNKAIVALAHKIARTIWHLVVNDEFYSDNLGYEKKNKKFSHPIGFKEIPVDECISIIFQANAILRQKDPDIL

SEQ ID NO: 310031 - protein, 330 aa, unidentified
MKNYADVIGIDVSKLTIDAHIHKKDVHRLFSNDTKGFKKLLSWAEKQLGLILYFYCFENTGNYSLNLSIYLDERSIDYVEENPLLIKRSAGIVRSKTDKLDSAMIARYAWLHREELGLSSVRDTRHQELGRILAFRDQLVRNRTGMKSSLKELKSLLSSSSTDLCCKSIHRSITYITKQILTLENRMKELIKSEDCLERNFTLLNSIKGVGLILSCQLLYHTSNFNRFNSWRQFSNYCGTAPFEYSSGTSIKRAHKCHHIGDRKMKTLLSLASVSAIQCDSELKLYYKRKIAEGKPKLIALNNVRNKILARVFSVIKRGTPYVELHQYAA

SEQ ID NO: 310032 - protein, 369 aa, unidentified
MLYLAIDQHAKQITVCVRNEEGDTVLRRQVSTRPEKIQAFFQQLTEMDGQFMAILEVCGFNDWLIEYLRKWSCQEIVLIHPEKPGKRKTDRRDAHKLADLLWLNRERLAEGQTVHGLRRVYMVSQKEREDRQLTSLRKTLGQRRTRTLNKIHRIINRHNLIWNYPTKTFQTQAGRRWLEKIKLPEIDRLEMDMLLEEWKTGDEQIAQVDEQIAERARQVEPGKTLSATQILMTAPGVSHYSGLTLASRIGPIERFPSPRSLANYFGLTPSCHNSGNVQDRLGSITKQGSKIARFILGQLVLHFLKQDPKMRKWYRNIKLRRGSKIARVAVMRRITTIFWQMLNHEEAYCIGGPPTRLPSSPAATGSDAA

SEQ ID NO: 310033 - protein, 422 aa, unidentified
MAAKKNKASSRVVIGVDPHKRIDAVVVLDELGAVLAREIVPHTSAGFKTLMALARQFPNRVWAIEGCNGVGKNLAHRLVAGGETVLDVSTRKSSLVRALATNSGRKTDDTDAYSIALVGLRSPDLPVVVRDQQTELLRLLSHRRRELVGLRTQAVCRLHRELVILIPGGASRRLSATRTRALLNGIRPRDEVDRLRKQLARDQLADLVAIDKRLAAINIEIRDAVRATGTTLTEVFGIGSVNAAMILGEVGQVARFATRHHFAAYNGTAPAQWGSGGDPHDRVNLGGNRRLNHAVHMAAITQARYPGPGREFYQRKLADAKTTKEALRALKRRISDSIYRQLLADVKAREGEGTGPGGQVGAALSSSAANRSPVVSTSDKPQPGPVTTDPTPTIPSPGNRSSGASRRPSNAPTRRHRQAQSA

SEQ ID NO: 310034 - protein, 407 aa, unidentified
MEVVYRCCCGIDVHKKMIVACLNKDGKMELREFGTTTCEIRVLANWLTEANCEMIAMESTGVFWKPLYNLFELTGLEAIIVNASHMKALPGRKTDVKDAEWIADLLHHGLLRASYIPDREQRELREIARYRKSLIEERSREVCRLQKILEGANIKLDSVVKDINGKSARKLLDKIVADETPDADEVAKLIHGSMRPKLEQIMQSIEGITTPLQRKLIAQIVDHIDDMTKRVADMDDLIKEYMARYETAIAAIDELPGIAHRSAEVIIAEIGSDMGRFPSADHLCSWAGVCPGNYQSAGKRSHGKTTKGDKALKTILTQCAKSARNCKDSYFSAQYQRIAARRGRNRATIAVAHSMLIAIYHVLKNGVAFKDLGSDYYDNFNKEHKIKGYLKRLQALGWAPDLTTVTV

SEQ ID NO: 310035 - protein, 340 aa, unidentified
MTIVMGLDQHRAQVSAEWLDTVTGEVCRARVAPADREAVRRFLGRFAGDELEVALEATTGWRFVVEELRGMGAVVHLAEPAQASALRGNKRRPKSDWSDARHLRELLVIGRLPESWIPPDHLLDLRSKVRLRHTLVDQRGEWQQRIRAVLYHHGLPHRAELHLLRREGLAWLEQVDVPDAAREQITVALAMSEALDAQIAPLDRQLRAYARRQSGCRALMRHYGIGELTSVAILAELGDCQRFSSSRQAVRYSGLDVTVYQSDQRRSPGQLSRQGPPVLRWALYEAAQAARRPGSPDRDYYDQAAQRLGSNRACVAIARKLLLRAFHTLRSLGEEALQPA

SEQ ID NO: 310036 - protein, 350 aa, unidentified
MSQKLDTSPAVIGIDIGKNSFHIVGQNQRGAVVLRQKWSRGQVEARLANLPPCRIGMEACVGAHHLSRTLRGLGHDARLMPAKYVRPYSKGQKNDYRDAEAIAEAVQRPTMKFVATKTADQLDLQALHRVRERFVGQRTGIINQIRAFMLERGIAVRQGLRFLRAELPGILATRTNALSPRMLRILEDLSADWRRLDARIADLSGEIEALARQDKGCERLMSVPGIGPIISSAMVAAIGTGDAFSKGRDFGAWLGLVPKQLSTGDRTILGSISKRGLFVQAAWVVLVKIGPKRWDRYGLKSWIEAAKKRLHHNVLAVALANKLARIAWAVLHKGRAFECVKTNEAAYQPA

SEQ ID NO: 310037 - protein, 343 aa, unidentified
MDQFAGLDVSVNETSVCIVDETGKIVREVKVASEPDALLTVLKNRTYHFKRIGLEAGPLSQWLYSALAEAELPVVCVETRHMQAVLKAQINKTDRNDARGIAQMMRVGLYRPVHVKTLRSQKLRMLLTHRKLMLSKAIALENDLRGTLRNFGLKVGMVGTVKFEARIKELIENLPDLAVLVEPLLVVRRVLREQIGILHRRLLVIVRDDAVCRRLMTVPGVGPVVALTYRATVDVPARFRNSKAVGAVFGLTPSKYQSGEINRTGAISKCGDEMMRVMLYEAAQVMLTRTNKWSWLKAWAMKIARHRGMRKAIVALARRLAVILHRIWVDGTDFRWTREVAAA

SEQ ID NO: 310038 - protein, 319 aa, unidentified
MKMTNPTTLTAGIDTGKEKLDIAVHGRPGVLTVTNDARGWKKLTEHFAAVGVGRVGIEATGGYERGVVRHLRAAGLTVIVLQPLQVKAFAQLHLRRAKNDRLDAALIAACTSMLPDPKTAPDPRLQALTDQLTFIEQQEEDIARLKTRLEHVEEPRLARVIKADIKRIVARRAAELRRLLAAVRAEADLARRLELVISIPGIGERTALALILRMPELGRISREEAASLAGLAPFVHQSGKHKGETHIGGGRSRLRRSLFAAAVPASFRWNPALVALYGRLTQRGKPPVSALTACARKLLVFANTVLARGTPWCRERVPA

SEQ ID NO: 310039 - protein, 368 aa, unidentified
MKKNITFVGLDVHKNSIDVALADAGREGDVRFYGTVGGDLESLHKVVRKLQSTGSELHFVYEAGPCGYDIYRSLTAQGLDCIVVAPSKIPRKSGDRIKTDRRDALNLARLHRSGELTAVYVPTAEDEAMRDLTRGREDAVKALRVGRQVLLSFLLRHGHRYNGQSYWTKAHQNWIAGVKMPHRAQQIALQEYVHAAQEQLERVQRLTRQIQELVPSWQLAPLVMALQALRGVSLIIAVTTVAELGDLTRFDSAKQLMAYLGLVPSEHSSGATTRRGSITKTGNGHVRRVLTEAAHTYCHPARESRVLLARLDGLPQEVRKIAWKAQVRLCGRFRKLLARGKNRNTVITATARELAAFMWAIACATIPE

SEQ ID NO: 310040 - protein, 428 aa, unidentified
MTHSEIKSTEFAAYIGIDWADRKHDICLREAGSNRIESLQIDHKPDSISNWVSELRQRFQGRSIAIALEQKRGALLYSLMLYEFIILYPVNPHALASYREAFKTSGAKDDPVDADLLREMVYLHHDKLHPWTPDDPLTRELSLLVEYRRRLVDDKTRLTNRLRALLKQYFPQALDWAGELDTLRALEFLTRWPHLEAIQVATPEQVRDFYRKYYRLGEKLPERLAQISAAQPLTRDKAVNNASITMVKGLLETLRGLIAAIEAFDQRIETCFEQHSDKDIFNSLPGAGAILAPRLLAAFGADRARYQSAKEIQCFSGIAPVTERSGKTKFVRRRLACPKFVRQSFHEFAKSSINWSAWARAYYDQQRRRGNKHHEAIRSLAYKWARIIYRCWQDHKPYDESVYIAKLELRGSPLAKLIPTAAEQAEAS

SEQ ID NO: 310041 - protein, 443 aa, unidentified
MSRKKHTHLRGERGQAFADKIRGLPMEQILCVSLDIHKYFHVVMIHNALGEIVTMTFEIDIFQVGFDRLCRAIDEAVARTNAQVVLVGMEPTGHYFENLARHLDQRPQPVTLINSFAVSRNREQQMMRREKDDEIDVAAIGDLLRRGEGTSFQPVSGLYLEMQHLSRVRFSKVKMRTALKNQIIGHLDRIFPGLVIKGKAARERYELLFVTDFWSCQTLQHLIRVCPDPAKLATMAPQDLRSAFHKQGFVLGPKTAARIITYAQKVLLPDREVIAIRCQLLAHDLALLAEVERLIAELEDRLHTLLQQTPYWVWTQVRGLSLTQVASLAAAIGDPTHYTYAAQVFRRSGLVSGRNDSGTRRHKGKGKRVVKTGDVYLRQALMTAIMSLIRYQPVLHDYFTELHRTKHAGVARVATARRAMGILWAMQRDQHSRTLVLKRGVEM

SEQ ID NO: 310042 - protein, 409 aa, unidentified
MERQLDRCAGLDVHRDTVAACVRVLGRGGHREQHVETFGTTAAELLRLREWLEGYDVTDVAMESTGVYWKPIYYVLEEAFTCRLINAAHIKQVPGRKTDVQDCVWIAQLLEHGLLRSSFVPPEPIRELRDLTRYRKGLIQERQREANRLHKVLQDAGIKLASVATNILGVSGRAMLEALVGGTTVPEVLADLARGKLRAKLPALREALAGRFRPHHAFLVTQGLGHLDYLDEAIDTVSREVERLLLPFAEARRRLSTIPGIKTRTAEVVIAEIGVDMSRFPSEHHLASWAGLCPGNNESAGKHKAGTTRKGNRWLRTALIEIALAAIRTKESAFGARYRRVMRHRGHKKAVVAVAHSLLRTIYRVLAEATEYREPGANYYDRRQTARTTRRAVAQLERLGYRVTLERAA

SEQ ID NO: 310043 - protein, 366 aa, unidentified
MKKISTMQVFSNEILKDQKLTIGVDLGDRWSFYCILDEAGKIILEQKLPTTPEAMKQTFGKISRSLIALETGTHSPWVSRLLIELGHEVIVAHAQKVQLITKSNRKDDRHDARTLARLARIDPELLGPVRHRSAQAQIHLTVIRARAELVSARTALVNAARGLAKSYGERLPKCGRYQVSEKLAERLSAELRDVLGPLLKEIESLNERVKEYDERMEKIAKEAYPEVSLLQQVKGVGTQIALTYVLTIDDPYRFSKSREVGCFLGLKPGRRDSGESEPQKGISKEGDRYLRTMMVQGAHYILGPFGEDSDLRRWGLKLAERGGKNAKKRAVVAVARKLAILLHRLWVSGEVYEPLRNSQKAVRAVA

SEQ ID NO: 310044 - protein, 407 aa, unidentified
MGITCGIDWSESHHDVALIDEHGTVVARTRIDTGAIGFHILLALIAEHGGSVDDTPIALETDKNLLVVALAKAGFTVYPINPRAVARYRERYGQAGGKSDPGDAAVLAHILRTDRHLHRPLPAVSEEGRAVKALARQHQEAIWALHQTVSRLRSVLLEFYPQALQAFPNLKHKAALTVLAAAPTPAAGQRLTRGRVVALLRRSGRGNHPVLVEQILTDLHTPALGQPPRVEEAYGHTVRGLVAIVVAMGQAVDDLETELAREFDQHPQAAILRSVPGLGPVLAARVLGEIGDDPARFDNPQGLRAYAGTAPVTIASGRLRYVKARKVRNKRFGDACHWWAYTMLTKSAGARAHYDRRRAAGDHHNAALRNLANKLLGRLWWCLVNNQPWDEHGAWPDHGHTENPTAA

SEQ ID NO: 310045 - protein, 341 aa, unidentified
MDDIAPAAAVAAAPAAAGASGCFVGVDVSKAALDAFADSPGRGAGRSSANTPEGFAALAEWLRPLGVTLVVIEATGGYERAAAVALMDGGFEVAVVNPRNVRDFARSAGKLAKTDALDARVLAEFGRRIGPRPTPRPSEAQLRLEALVARRRQVVRMRAMELNRLQQTTEKFSLRLIKGHVAQLDGQVGKLEKEIASLIERDDDWRGKAELLAGVPGVGPATAAALLAEMPELGAAGAGARRLCALAGLAPYPDDSGTVKGARRVRGGRAAARAALYMAALSARRCNPAVRAFAERLKAAGKPFKVLMTACMRKLLVILDAVVRSGKPWEDRCPQSEAANA

SEQ ID NO: 310046 - protein, 404 aa, unidentified
MYNAVGIDVSKGKSTIAVLQPGGTVIRKPFDVSHTSQSLIELAHYLGSLEGSTKIVMECTGRYHEPMLKALYEAGLFVSVVNPHLIKNFGNNSLRRVKSDPADARRIARYTLDNWAELRQYSGMDNTRTQLKTLNSQFSFFMKQKVAAKANLIALLDNTYPGVNKLFDSPPREDGSEKWVDYAYSFWHVDCVRRIGLKTFTERYRAFCRKHHYIFQPDKPEKLFHASKELVAVFPKEKTYKLLIQQSIQQSNLASGHVERLRQEMNALASTLPEYSTVMGIYGVGKTYGPQLIAEIGDVSRFTHREALTAFAGVDPGVDESGQHKSKSNRASKVGSARLRKTLFQVMATLLQNAPENDPVYRFLDKKRAQGKPYYVYMTAGANKFLRIYYGKVKECLRNLEQAE

SEQ ID NO: 310047 - protein, 346 aa, unidentified
MHSATIAVDLAKSVFEVAVSRHPGQVSERHRLSRGQFSRFLRERTPATLVMEACGTAHFWGREAGARGHQVVLLPPHAVRPYVLRNKTDGADAKGLLEALRNEAIRPVPVKSVEQHVLGGLHRLRSAWMATRTARLNTLRGLLRELGIAIPVGARQVVPHVWGLVSDAESEVPEGLRPALAEAAREIAELEARVRGVERQLEGLARGSAVVTRLRTIPGVGLLTATALVAFVGDVARFPSGRHLASYLGLTPRESSSGLQRHLGRISKRGDPYLRMLLIHGARSVLCHAKRAAGERDRLRAWALERQQTRGHNKAAVALANKLARIAWAVWRNERGYAGATQAAID

SEQ ID NO: 310048 - protein, 344 aa, unidentified
MLYVGLDLSRKRLDWLALDQAGQPAEIGAVAPDRDGLAKLGQRLGDAAVLAVIESMSGARFVHDQLELAGWDVRIADALKARGLAPLACKTDRIDCWVLAELARRGLVPEMWLPDPRVRAERERARFRLHLVKHRSSLKNRVHAILFQHGVPNPHRDLFGPGGRHLLRRLELAEPWASTVRASLALIDRLDEQIDECERELRRLGVEHRYIPLLTTLPGVAWVLGYTIAAEIGDIARFPSPRKLVGYTGLTPRVEQSGERDRRGPLRKNGPNYLRWALIEAAHTAGRDPRYRPIVDRMRARHGRARGSKIAAIEIGRRLTEAIWHMLTHDRPFAPAGASTPVAA

SEQ ID NO: 310049 - protein, 382 aa, unidentified
MPTTPKGAKDVTTTGREGRRGKDSGTVVEGVVLGVDTHLDLHVTVALDCLGRHLGELAVPTTKKGYEMLVCWAEGFGPVGCAGVEGTSSYGAGLARHLRSAGIRVLEVERPKRRHLRRKGKSDSRDAESAARAVLAGETAGEPKSGDGRVEMIRVLRGARRSAVKARTQAANQLRGVRVTAPEALRRRLRGLSTKELVAGAARFRPGGNPGDVEEATRFALRSVARRYQALSEEIAQLDAQLHRLVAETAPELTSLPAIGTDHAATLLMVAGDNPQRLGSEASFASLCGVSPVEASSGKVVRHRLNRGGNRDANRALHLICVVRMRIDQRTRRYAARRASEGKSKKEIIRCLKRYVAREVYRVLTTSVDFADSPRKRDASSL

SEQ ID NO: 310050 - protein, 349 aa, unidentified
MNNISVIAVDLAKHKFQVHGYGPQDEQRFAKTLTRAAFEKLLREQPPCKLVMEACGSAHFWSRLALELGHQPAQLPAQFVKAFVIGNKTDRNDANAIHEASKRPNVRPVPVKSVEQQDALLPHLTRQRLLKTRLELTNQLRGVLRERGIAFAKGDAALRRGLRDLRDAEPTRELSPRLLAWVGQALEEWTELEARLSGVERQLQQDYRDSPRCRQLGELPGIGVLTATAVQARVTSVDSFPDSRAFASSLGLVPSEHSSGEKQRRGGIHRRGDPYLRLLFIHGGRSVVQSVLRKQRAGIVLDVFEQWVLGVYQRRGYNRAAVAVANKNARIVWALLKTGEAYRKPPLAA

SEQ ID NO: 310051 - protein, 321 aa, unidentified
MVYIGIDISKNSFIAAYPSVNGYHTKAYPNTTAGVRKFIATLAAVEHHCVMEATGNYSFLLLYLLHQSGIAVSLVNPKQIKHFARMMMAVTKTDEKDACMIAMYGEKMNPPIYKMPSQAIMLLKQKKTVIRQLRKQLVASKNLRESLIVLPYRDKACVRALDKTIDFLTRQIEQLEAELADIASSEFDKQLKALTSIKGIGITLATALILTTGGFTYFDNAKQLSRFIGICPTYQQSGTSINIRGHINRNGDEHLRSLLYVASWSALRSNAACREYYRRLKTNGKPSKVALIAVANKLVRQAFAIVTTDSTYIDGFVSTKK

SEQ ID NO: 310052 - protein, 499 aa, unidentified
MSEKKSVEIRVSVDVGYRRHSVAIGLPSGEVLEEFEIAHRPEGFAEFFSRIEKHQKVRDCEVAVAMEGFNGCARPLDAMVRRRGYRLYNINNLKLARFKEIFPGAAKSDRIDARKGLELFQLSDHLPMAKEVLQEVKGTPRENEVLKRLTRRRRRLVDERVRVISNLQTDMQAVCAGLLEITKNAGNQWFLNFLVSAPTLSQLARLRPATLRKIPAVGRKYAGLIEDWQKRAHFSEEVEWVGEMIQEDAKRCLELDEKIKALRAKIKEVAKDSKIAKTLLSIPGFGTICTAELAGEIGTIERFSKEGSLALYLGMSTLDNSSGKYQGSKQPKHVNTRAKAAMMVALDRHRKYVPESQRYYEKKRSEGKKHNQAIRALGRHLCRIIYKLLKEEREYEIRPEKGNTKTKVSARSLIKRQIRKPKISDVQDSGFLNSEVIDKELSLFHFRFERSPPFRVTGPVLASDPQEDPVGVQSPLTNGSVHHRVPPSCALVWGSRRGS

SEQ ID NO: 310053 - protein, 395 aa, unidentified
MQFDYYLGIDIAKHRHQGAIVDPEGNLLLRGISFANSWEGFQRLVSATARLGPPSQFLSGMESTGHYWLNLYYALKEHGFHPVVINPLSTAHISQGRIRKTKTDRVDAVVIANQLRVGHYKPAIVPDEYAFRLRQLTRLRWKLSTLACNLRNRIVGCVDRYFPEYETLFKPLWLASSRRLLQVAPLPDDILAMGQGELAELLRSASHGRFSQEKADQVSNLAQASFGLRLAPDAGRIEIRCLMTLLSQIEQHMRALEAEANTVLAQRPQFLTTIAGIKELTAASIIGEIGDIRYFDSPKELVAFAGLDPSTFQTGSFIGTRARISKRGNAYLRRSLWVAAMVASMKNPAFRPFYLRLRGAGKHHLLAVTATARKLTHVVWRMLKDNRPFDPTRLA

SEQ ID NO: 310054 - protein, 338 aa, unidentified
MDRQYVGIDFHRRRSVIVRLSAAGERLAVTRVGNDPFEFAAVIAEAGNSPAVVIEATYGWYWVVDLLQDLGATVHLANPKALNWGDRRVKNDVVDATDLADMLRMGRLAHAWIAPPAIRELRELVRYRAKLVQLRSGLKAQVHAVMAKEGVLPGTLDMFGQAGERQLDQMDLGRNYAIRVASLRELIGAYDREILTLERDIHQHLKADRGYRAVQAINGVGRTIAAILVAEIGDVSRFPTPAHLCSWAGLTPRHHESDTKTRRGKISKQGSRLLRWALIEGISRYHGGEVLAHSYHQIAKRRGTNKARVAVARKVLTLAYYGLRDGEIRCLAPAQVAA

SEQ ID NO: 310055 - protein, 404 aa, unidentified
MGTNSDLRVSIDVGCYRHSVAIGLPGGELLEEFDLAHGPEGFDQFFGRVDKLQHHYGGSVLVAMEGYNGWARPLDTLVRAHGYRLFNINNLKLARFKEIFPAAAKTDRIDARKGLELFQLRDHFPTARDVLQEIAATPLVNDKLKRLTRRRRALVDERSRLIARLQADLQAVCPGLLEITKDTDNLWFLNFLTHGDDLRKLGRLRKTTILGIAGIGRKFGAIIEHWQKTARFSHDAEWVGPMVVEDARRVLELRRTIKTLEAACKVLMQDSKITVLTKTIPGFGLTCSSELAGEIGTIDRFDKEGSLAMYLGMANLTNSSGKHQGSKNPKHVNSRAKAAMMAAVDKHRKLVPESKRYYDKKRTEGKKHNQAIRALGRHLCRVIFVMLKQGRGYELRKENDSNIA

SEQ ID NO: 310056 - protein, 349 aa, unidentified
MIIIGCDYHPSFQQIAWVDSETGECGERRLAHSDGEAENYYRGLNGHGVRVGIEATGHARWFERLLAELKYELWVGDPAQIWAMRVRKQKTDRQDAQHLLKLLVEDRFPRVWVPSAENRDLRQLLWHRHRLVQMRTRVMNQLQAIAMNEGVRRKKGLWSKQGRRQLESFSLAPWATRRRQDLLELLDRLDPSIQELSAAIEQEAVQRPEVKRLMTHPGVGPLTALAFVLIIGSPERFRCGKQIGSYLGLAPCEDSSADRQRLGHISKQGNALLRFLLVEAAQATVRSDPEWRHQFLHLAMRRERAIAKVAMARKLVVRLYWMWRKGWDHQQMVQFGSHVGQPVVSHGVK

SEQ ID NO: 310057 - protein, 402 aa, unidentified
MAGRTGGIDWASEAHEVCISEEGRVVERFSASHDERGIAALAGRLARLDVERVAIERPDGILVERLLAADLEVMAIHPNQVKAARARFAVAHGKSDRFDAYVLAELARTDAHRFRALVPDGDETKALRALTRAREDLVAVRVELANQLRAQLEAFWPGALVFAEVDSPISLAFLERHPGPVDAKGLGVGRMKAFLARNSYSGRTDPAELVARMKAAPEGTAGMAEREARRAVVLGLVGALRPIVEEIAGLTAQIREQLAAHPDAEIFRPLFRDPRTTICPATLIAELGDARGRYPTEAAMAADAGMSPVALESGKLRVATFRRACDKRLRVAVATLADSTRHWHPWAKEVYARARARGQDHPHAIRTLGRAWIRVLWRCWRDRMPYDPARHGNLRRLQPVGG

SEQ ID NO: 310058 - protein, 419 aa, unidentified
MQSELPEVYERCGALDVHKESVAACIRVPGQDGKQQEIRTFGTMTTDLLVLRDWLVSNGVTHVAMESTGVYWKPVYYILEDDMGIVLVNAAHVKNVPGHKTDVKDCAWLAKLMEVGLLKASFVPPRPFRDLRDLTRFRKQLINDRVREVNRLHKVLQDCGVKLSSVATDVMGVSGRAMIEALIHGTTDPEVLADLAKGRLRKKLPQLQKALTGRFREHHAFVAAQILTLIDGLEATLEDVSARIGTLMRPFEKSVVKIRRVPGLERKVIEDILAEITDNMRYFPSARHIASWAAICPGNNESAGKNKGGKTRHGNKWLRAALIQAARAAVRQKDCYFAALYRRLVVRRGDQKAIIAVAHSLLVTIYHMLRNDTDYADLGGDYFARRNSEAARRRSIKELERLGYRVTLEPVSPTLAAGA

SEQ ID NO: 310059 - protein, 401 aa, unidentified
MKTVLSVDVAKNKSMIMLMNSDGEILIDTKEIKHNLEDFEKAKEEIKEISPENLTVFMESTGTYHLPVERYFKENGFNTLVINSLTTKNNYDTIRKTKTDKKDCYRLAKLFFVNEVEYHELSKKDLYANLKAMTRQYFYLLQQNVSCKNRYKRLLNICFPELEKIFKSTRVYDDTALNFIKEFPHAEIVKEKRIDALYNNLYKTNGRNLNFYKRLSETIKIASANSYPGVDKEHKDVKNLSDMAKIVQNNNNVINELRDKMIETAKKSPYYEIINSFYGIGEILTAEILGELGDITRFDSPKQLIAFCGLDPTIKQSGKSINVKGAISKRGNKYARYILFNCSQMVVKLGASNYPEHPVYIYYQNKKAEGKHYYESLTACSTKILRMLYSMCKNNKQFLEN

SEQ ID NO: 310060 - protein, 393 aa, unidentified
MIYVGIDVAKHKHDCFITNSDGEVLQNVFTIQNSKFGFLQLYDAILTLESNPSPQNIRIGLEATGHYSNNLIEFLLTKKLNPVVLNPLSTNLFRKGQSLRKTKTDKSDARFITMMLITEDIKPYSPVSYHISELKSLTRHRFRMVQERTRFKISYSRLIDIIFPELHTVVWAPAQKSMLHTLLALPNTQAISQCHLTRLTNVLKEHSHGRYSRSKAIEIRQLAQDSIGSNSPAVAFELQQVIRSILFLQEEIQLLDVQIKNAVLALDSPVMSIPGISYTLAAVILAEIGDVEKFDSPAKLLAFAGLEPSMYQSGNFTASHCNMVKRGSKYLRWALLQAARLVCMRDTTFKAYRDKKVNEGKHFYVALSHTAKKLVRVIFYMLANGQRFVAQLA

SEQ ID NO: 310061 - protein, 459 aa, unidentified
MTRHKRQGNGLPSQLAAVNLHAAGIDIGAQEHWVAVPPGSDAQPVRRFGAWTADLEALADWLRQCQVTTVAMESTGVYWIPLFELLEARGFTVVLADAREVQRAPGRPKTDVQDCQWLQRLHTYGLLAAAFRPPEHICVLRSYLRQRAMLVTYTGQHIQHMQKALTQMNLKLQHVVSDVTSVTGMAIIKAILAGERDPTARARLRDRHCQHSEAEIARALQGTWRAEHLFALHQAVELYEFYHRQIAACDQQIAAHLQTLPDQSGGKLGPAAPRTPKRRRNDHHFDARLPLFRATGVDLTAIEGINEHTALVLLSEIGTDMSRWPTEKHCAAWLGLCPLHKISGGKVLSRKVRPSANRAAVALRLAASCLHHSQSALGAFFRRLKARLGTPKAVVATAHKLARLVYRLLKHGEAYVAQGMAEYERTYRERVVESLARKAKALGYKLLPTTDDTLQANSA

SEQ ID NO: 310062 - protein, 367 aa, unidentified
MKQQTSAASETYTKGRNIIDFTGKPIYVGIDVHQKNYQVAKVCNGICLGNHHMNANDDTLIEHLRSHYPGADFHCVYESSAWGFNLQRRLTAEGMECIVVHAADVSTTDKERKRKTDPVDALKLARSLAAGDLKAIHVPDETIQKERNLIRYRAKVVGFITKSKNQLKSLLKFQGIKVPVQYEKNNWSNNFLNWVEEQGSKDPLLGDTLLLMLEQIRLLRQHLLKVEKKLRGLRKGKYASKVKLATSVAGIGPTNAMVFLLEVGDITRFKGFDALNDFVGLCPDTDNSGETERNQGITKRRHKRLRTALIESAWDAIHTDPALMDSYQVLTKRMKGTHAIIRIARKLLRRLRAVLLSGVPYQKGVVA

SEQ ID NO: 310063 - protein, 459 aa, unidentified
MLPNESLYIGVDIGKFQHVSGFVSKTLLERHKHFEHCPAFLFEQSREGFRAFVERIRAYCPLEQCFILMEQTGHYHKALLQYLLELDLPVYVMHVQRRESGMIKTDKRDALGLANQLYNQLALGVQVSDKLQVVHRAIPPSEAAAQLKGLMRHRYELVNEATQRKNKLTAICDELFPELVQVLKNPNLPIALDLREQFPTPQAVATASPIALRQVRRRNHPSEAEFALLQQLAAQSIGTKDVARQRGLVLEQSLLIKELRLMQEHMERLDMEVTQIVEHCREGQILLSIPPISPMYAAAILATIGHIANFEDAGHLKSYFGWAPKRAQTGVSFDRTSLTKGGSREMKKVMYLVAWHAIKDGTEWASLYKRLVPRLCTYDERTQTFKGRGKAVGHVIGRLITLIYALLKQDDETLSHLPPGTPPPEPVLYDPEVHRRHRAGHYQPLKKKLPENRIVQVQR

SEQ ID NO: 310064 - protein, 357 aa, unidentified
MPTTFDCPAGPVAGIDTHTDTHTVAVISDTGRHIATDTFPATNPGYVAISEFMATYGVTTVGVEGTSSYGAGLTRHLRTQKYSVVEVLRPTRAVRRRDGKSDPVDAVAAARQVLTGEALSIPKDTSGPVESLRGLQITRRQLVMTAAKLMTTIKSLLVTAPDEIRRRYSAMSPLVMVEALSRCRPSADLADPRNGVLLALKTFATTYRDLHKQGTQLEKHISILVEMINPHVTSIFGCGAVVAADLIVSVGDNPSRIHSEAALAHLCGVAPIPASSGRTHRHRLNRGGDRRANSALHRIALVRMHHDQRTRDYVAKRTKEGLSEKGDLTVSETRHCQGGLPGVVLGSGRSSNGPGRG

SEQ ID NO: 310065 - protein, 421 aa, unidentified
MIQVSHEAFAAFVGIDWADAKHDGCRQVAGSAKREYFQLEHTPEAIDAWGTTLRMRCHGQPVALCLALNKGPLGSALRTYDFLVLCPIHPLTLARYREAFTPSRAKDDPTDAALQLALLLTQRDTLQPLNPQSPTMRALAQLIAHRRRVVGDTVRITNRLPSTLKNYFPHVLHGLQEKDTAIFCDFLSRWPTLKAVPLARRATLATFFRAHHVRYAEVIAQRLQAIKAAPPLPTDAGVMAPHALLVQALVAQLRGTLQALADCDTAIAQRAQSHPDFPLFQALPGAGPVFAPRLLVACGEQRERYACAADLQKYAGSAPVTERSGTKSWVHWRLQCPKFLRHTFVEWAAESIRPSFWAQVSYQQPRDKGKAHQAAVRARAFQWIRILSRCWQERTPYDAAIYRQALHRRGASLSQTLAKAS

SEQ ID NO: 310066 - protein, 406 aa, unidentified
MNAVGIDISKGKSTVAALRPTGEVAIMPIDITHTQIGLENLADRILALGEDTKVVMEATGRYHEPVAQMLCECGIFVCVLNPILIKQSGGGSVRKVKTDKADALKIAKYGLDNWCALREHTPMDTIRQHLKLFGRQYNLYMKTVVAIQNNLISLLDKTFPGANKLFSSPAKADGHQKWVDFVTTFWHADCVSQLSQRTFSSRYQKWCKRHKYQFSAAKAEDVYIESLGLFTTLPKSNSAKVLVTSAAAELTATAKVLATIKAEMICLAQQLPEYETVRAMYGVGDITAAHLIAELGDVRRFDNRGSIVAFAGVDPAVNQSGAYQQRSNSTTKRGSPHLRKTLFQVVSTYLKRSPVDEPVYCFIDKKRAEGKPYYVYMTAGANKFLRIYYARVKECLAALDDERVDT

SEQ ID NO: 310067 - protein, 406 aa, unidentified
MDIIIDKGCGLDVHKETVVTCVMGSGIKKEIRTFSAMTGDLLRMKGWLTDLGITHVAMESTGPYWKPVFNILEDSFEVILANARHIKNVPGRKTDVKDSEWICKLLRSGLLTASFVPPQAIRDLRDLTRYRQKLIQAASAEKNRIQKVLEDANVKLSSVVSDTFGVSASRMIKAIMSGNFDTDSLAELAVGRLKGKKEKLKEALQGHFRDHHGFMIQASLDHIASLEKIIADLDRQINEKLKDYHRERELLASIPGVKEQGSSSILAEIGAAMNVFPSEGHLSAWAGMSPGNNESAGKKKSGKTTHGNKNLRSILTQCAWVATKMKNTYLSAKYYSLVGRRGKKRALIAVGHKILIMAYQILKTGIPYKELGHDYLSRRKEDKIVKGHIKRLKDLGYQVELKKAAA

SEQ ID NO: 310068 - protein, 369 aa, unidentified
MEKDTTYVALDDSKRKIVVGILRSGDTQPELREIANDPRQIRRLFERLKREGPVAACYEAGVSGYDLHRQLIALGVAGAVIAPALTPRRPGQRIKTDRRDAAKLVRLFRAGELTAIHVLDESEEAVRDLVRCRDDIRRDVLRWRHRVLKLLARHGRACLTGKNWSQAHWRWIREQRFDLPPLQRAFEATLFALEQALARQAELDKELEAVAATASYREPVGWLRCFRGIDTLSALILLAEVVDFQRFRRPRELMAYLGLVPSEYSSGESQRRGALTKAGNSHARRILVEAAWHYRHRPTIGRALASRTHGQPDEVVAQAWRAQQRLHRRYRHLVGHGKRTPVAVAAVARELVGFIWAAMTRHESRRATA

SEQ ID NO: 310069 - protein, 358 aa, unidentified
MDGSKGHPKLTAGLDLGDRYSYLCLIDQENGEVMEEGRLRTSPKAFRRRFASEQPPMCIAIEAGTHSPWVSRVLEECGHEVLVANARKLRLIYSNKRKTDEIDAENLARLARVDPKLLYPLRHRGEESQAHMALIRSREALVSSRTQLVNHVRGAVKSFGHRLPKCPARSFHKRASEHIPEALRPALGPILEQIGSLTERIRNYDRKLEAISKEHYPETDLLRQVEGIGPLTALTFVLTLEDPYRFERSRSVGAYLGLVPARDQSGDRDPQKRISKEGDEMLRRLLVGSAHYVLGPFGSDSDLRRHGEKVASRGGKNAKKRAVVAVARKLCVLLHSLWITGEVYDPLHNARRREGLAA

SEQ ID NO: 310070 - protein, 320 aa, unidentified
MMAQNDLVVVGIDVAKDKVDACIRRFKLRQTFPNNPQGRRKLIAWLGKYQVGKAVMEASGGYEREWRNVLHNAGIEVRIVDPRRVRNFALSAGRLAKNDPIDAEMIAWFAETFSQASGQIPDAAREELAGLTKARKALMDVKIRLQAQNEHAAPEPARKAHARILKSLAAEIDKLEVAISAKVKATPEFAERAEIIQSVPGLAQTTSAVLIAGMPELGQVSDEVAAALVGLAPYDDDSGKRRGERYIKGGRRWVRNAIYMPCLGAATQNNPVLRVFYQRLIAKGKEPKVALVACMRKLIIILNTMLARRQKWNPGAHAIA

SEQ ID NO: 310071 - protein, 329 aa, unidentified
MYYVGIDISKRVVDVCLLADGIKGKRKTKTLPNGPNAVQALAEWLTRQKCEPSQAHIIMEATGVYHEHLAYGLHQSGIAVSVINPHRLREFARGMGILTKTDKVDACVLACYGCLRQPEGWTPPSPEIRKLRALLQHRDSLLGDKQRLENRLSTLNATLTTEEVVTSLESMVQHVKGELERIERLIEDHIDKHPGLKNDLKLLKSIDGVGDQIGWNMLATIRGSNFRSAEQVAAYLGVIPVERRSGTSVRGRARLSKIGPPAIRAKLYMGAIAAISHNRHVKAQYERLLLKGKAKMLAIGAAMRKLVHLCYGVLHTQQRYDRDYGAVAS

SEQ ID NO: 310072 - protein, 349 aa, unidentified
MKKVCRIGLDIAKNYFQAHGVDKHGKGMLNRKLRRDDVLPFFANLPPCLVGIEACAGAHNWAREIEGLDAGHTVRLISPRHVKPFIVNNKTDAADARAICEVVGRPATRFVNTKTVAQQDMTAWHRIRERKVCERTALVNQIRALLGEQGIVIAKGIEHVRKLLHPIIEDLDNKLSMSARDYLSELYTELVECDETIKRYESRILAYTKSDDACQRLQKIPGIGPITATAIVAHFGSAKQFNNGRAFAACLGLTPREHSSGGKQKLLGISKRGNNYLRYLLIQGARVAMRYALLRPAADSSSRLKWIRGLCTRKNKHIAAVALANKTARIIWTLLSSGEAYQPYFAQTG

SEQ ID NO: 310073 - protein, 342 aa, unidentified
MSDRTATSSAPAKESSTTTTSHVILALDLGKFKSVACRYDPVTGEHAYETIATTPPAVHDLLIEASPAVLVIEACSASGWISDLAESLGIAVRVANTLGEAWKWKRVKRKTDRDDALKLAKLAASDQLPQVHVPALSVRQHRSLIKHRHALIDRRTGIKNTIRSLLDAQGLSMPMRSRGWTIESINELKQLSRPLSECDARTLWRGQLDLELRLLEAVSTLIKEADKKLDAIASQDERVKRLKTIPQVGSRLAELVVTTLDNAKRFKTARQVSAYAGLVPKQYQSGQMNRLGRITGQGPGLLRRVLVQVAWGLQRREETRGHAVFERLCHGQRQAWRSVVSR

SEQ ID NO: 310074 - protein, 356 aa, unidentified
MNTRKVQDFVVKGKEVFVGLEDSKKTWKIAVRCNRMLIHRVSMPARGEVLIQYLHNRFPECTIHLIYEAGFRGFNLFDRLTEEGIDCVVIPPHLVTEPKVSRVKTDKRDANRLAIMLENHDFREPCCVPDKERREDRQISRTLWAFQKDIVRTRNRIRKFLDFNGIEVSFPDRWGKEEFEALKELPLGDSLRISLMALIAHLEQLWAHKESLQAALRALCSKERYKKAFRITMSLPGIGWFTAIRLVLELGEDLSRFTSGKKIASFVGLTCSEHSTGETEHKGHITGMGSGLIRATLVENSWAAIRKDPVLLAKFTRIWKGKGTKKKALVAVARMLIVRLRACVISGTPYAIGTVK

SEQ ID NO: 310075 - protein, 314 aa, unidentified
MEAPVAGIDVSKDKLIVYFQGKLYEFTNDKRGYEEIRKILPKGCKVGIESTGVYHVNLAKYLMSEYDVRIINPFILKKFKGFRGKKSDKNDAKKLAEIVVSMGSGFVTSDARELTSQWDFVTRSIARVKNRLRRDLVLLGYRDSLSKKNLEEVLRGGDSVVLAEVRFLLEELERLEGRKREIEKELEDFVPKDSLIFTIPGIGKTLGCIILARVGDVRRFSDKKRFVAYCGLVVESSGKSVVSRGISKRGDAVLRRAFYLAALTAIKVDPVIKRFYEDHKGRLKGKKLITACARKLAVITWAVLYYNKPFDASE

SEQ ID NO: 310076 - protein, 428 aa, unidentified
MGVTEQAHTKGVALEIVYPRVAAIDVGKKIVAVAVRTPGVQPGQRHQQLRKYKTFYPVLREMVGWLVAQGVTQVAMEATGVYWKPVFHALCEAEQLEVLLVNAQHVKNVPGRKTDAKDAEWLAELCEVGLLRGSFIPPAEIAAVRELTRYRKKLTEARTSELQRLCKVLEDGGVKIDSVASSITTMSARAMVEALIAGERNPRVLAELALGRMRKKIPDLAMALAGRFGAHHALLARMHLEHIDHLSGMIGRLDGEIDQVVAPFSEQVGLLCTIPGIGERTAQVLIGEIGVDMSRFPTADHLASWAGLCPANNESAGKHRRARTRKGNREVREALVEAAWAAGRTGTYLGARFRRLHRRFGKQGGSKAAVAIAHNLLVIVWFVLHDRADYRDLGADWFTRHDNPDARKRRLIRELQTLGYTVDLTPAA

SEQ ID NO: 310077 - protein, 324 aa, unidentified
MGSRRTFVGIDVAKAELVVSVLPNAERFTVANDERGVRTLVERLRSIGAQLIVLEATGGYELLAVAALVAAALPAIVVNPRQVRDFAKATGQLAKTDRIDADVLARFADVVRPALRPMPDEPAPELEALLTRRRQLLDMLQAEKNRTGQVFGKGKRLAKKSLKAPIAFLERELRMTDTDLGDMVKASPAWRERDDLQQSVPGVGPVMSRTLLAALPELGRLSRREIAKLVGVAPLSRDSGTMRGRRFIQGGRSSVRAVLYMAALVATKRDAAIRVFYLRLVTAGKPKKLALVACMRKLLTMLNTIVRTKTPWRDDVAAGVLTGA

SEQ ID NO: 310078 - protein, 407 aa, unidentified
MSPGYSVVIGLDVGKTEHHACALDPEGNRIFDKPLPQDETELRELFTSLQQHGDVLMVVDQPNTIGALSIAVARDCGCSVAYLPGLAMRKAADLYPGRSKTDARDAFIIADTARTMPHTLRAVDRDNEVLAALKVLAGFDEDLAHETTRALNRIRSLLTQIHPALERVFAGGTLSTRLVLDLLEKFGGPTGLRTAGRARVLRFARAHSRRDPEALIDRIFTALAEQTVTVPATAAVELVIPRVAGQVKELKDQRATVAREVEAMLEGFPLAGVLMSMPGIGIKTAAQILLAIGDGSAFETAGHLAAYAGIAPVTRRSGTSIRGEFPARSGNKRLKNALFYSSWIASNHDPASKAYYDRKRAEGKRHNAAVICLARRRCNVIFAMLRDGTYYQPPTTTPNPEPAALAA

SEQ ID NO: 310079 - protein, 347 aa, unidentified
MFAESVDVVIGVDTHRDSHALALLDAGLGALVAEERVDANREGYRRALKLASGCGRRRLWAVEGTGSYGAGLARFLQRQGERVLELERPVRGGSRGRAKSDALDALRAARAALSGEPLAELRSGGQREALRVLLVSREASVAVRRRGLNQLRALVLTAPAELRERLQGQPKRALVKRCVALRPRPGQQPQLRGTLLALRSCGRQVELASREAAVLERELAALVEQLAPQLLSHYGVGPITAAQLLVSWSHPGRLRSEAAFARLAGAAPIPCSSGKTIRHRLDRGGDRQLNRALHTIVLARRRGDQQTIAYIHRRIKEGKTEREAIRSLKRYIARSLYRLLEHSHRTA

SEQ ID NO: 310080 - protein, 352 aa, unidentified
MLVAIDIAKVRNGVLIEAPGHKRRRRLLVLNTRAEHDHLIEVLQAYGRPVVCAFEAAGNYHRPDSMAPGRSGFEVRLVSSLALARTREALHNSWDKNDPKDAQVILHMLRIQATQVYHDPLRAGINDVQELSKTHEAIARAKTEIQHRILTHYLPLYFPEIDRFRGNSRSDWFFAFLHAFPTPASITALTKEEFVTAAWDVVGRKVSKTQIRMDIYETARSSIGLPLPLDAPAIRMFRMVIDEARGLIRQRNEIEAQADELLRHSQDYQLLRQIPGIGPINALTIIAEAGDLRRFAHHRQFLKFCGLDLSTQQSGQYRGQTRLSKFGNARPAPYPVDRWTSRDPPAGERLPS

SEQ ID NO: 310081 - protein, 414 aa, unidentified
MEIILDRCCGLDVHKKSVVACVLTATVGEPARAETKTFGTMTADLEALAAWLRERQVVDVVMEATGVYWKPVYNVLETAGGFRLVVGNAEHLRAVPGRKTDIKDAQWLAQLLQHGLVRASFIPDREQRELRELTRYRTALVRERASEANRLQKTLEAATIKLAAVISDVTGVSGQAILDALVRGEEDPAKLVDLAYPTVQKKREALERALVGTVSGTLKFIVERQLRHIRELDGVIKECDAKVSELTRPFVGEIARLAAIPGVGLRTAEVILAELGVDMARFPTDRHAAAWAGVCPGQNISAGKRRKARARKGSPWLRGALAETAWAASRSRDTYLAAHYRQLLARRGKKRAIVAVSHTILVIIYHLLKDGTEYTDLGPAYSLTRNADRVRRRSIQQLEALGYHVDLSRPEDAA

SEQ ID NO: 310082 - protein, 339 aa, unidentified
MEVIRQNVGIDISKDSFVATVTVLLKGQLIKHVATRKFTNNKQGINEFYQWVEVHKSNTFSVSYTLEATGIYYESLAYFLFEKQEVIHVVLPNKAKKFAESLNIKSKTDKIDSKILGQMGVERVLFKWELSSMIYRQLRTLTRERGRLIKERTRIKNQLHAEACSAEPMKTTMRRMNSHIQYVNKHIKSIEKELEILIKTDDFVAEKVKKITTVPGLAFATVVSIVAETQGFANTKSIKQLTSYAGYDIQIKESGKWKGRPKISKKGNSHIRSVLFMPALSAKTHSKTLGKFYNRLNEKKQNGLISGTAVQRKLLCLIYVLWKNDTTYIENYQHQKSAS

SEQ ID NO: 310083 - protein, 346 aa, unidentified
MNQITRIGMDTSKHIFQLHGVDASEQVVLRKRLGRNGMLSFFTKLPPTVIVIEACGAAHCLARELGKLGHTVKLIAPQLVKPYVERNKNDGRDAEGLCEASSRPRMRYVPVKTAEQQAALMLLGVRDQLVTRRTQLSNTIRGHAAEFGLIEAKGLDKLASLLAAIEQGDNVPVLARELFAMLARQYAQVQVELKAIEAKLLTWHRGNALSRRLAEIPSVGPVTAAALVMKAPDPHAFRSGRMFAAWLGLTPKDHSTAGKTRLGKITRAGDERLRQLLVVGATSVVKQATGKHHRGSLWLLDLVKRKTPKQAAVALANKTARIAWKLMTTGESYDGARMPKASAAAA

SEQ ID NO: 310084 - protein, 357 aa, unidentified
MTQSKELNFKGQNIYIGLDVHLKSWTVTVLSEVSVLKTFSQDPSPDKLYKYLTNNYPGAEYYSVYEAGFCGFWIHHRLTELGVHNIVVNPADVPTMTSERLRKTDAVDSKKLAVGLRAKQLRGIYTPDDEAIEVRSLIRLKSTITKDITRQKNRIKSHLRYLGIEIPQEFTGPSFHWPMRFIDWLRDVSIKTTSGRQALDMHIRRLEDLHSQNLEITREIRELSRTDRFKEIHSLLMTIPGIGRTVSLILMAEIIDIKRFNSSEQLAAYIGMIPMCHCSGEHKGNGNITVRRQAALRSVVVEAAWAAIRQDPALQLCYANNCKRMPPGKAIIKVARKLINRIYFVLKRQQPYVHSVA

SEQ ID NO: 310085 - protein, 350 aa, unidentified
MVMIGTDSHKRTHTVVAVDDVGRRLATKTVRTNSDGHLDLVRWSTQFDDVVFALEDCRHLTRRLESDLLIAGYRVVRVPTRLMAAERRGTKEPGKSDPIDAEAVALAALRYPDLPVAELEGPAREVKLLSDHRRDLVVQRTRIASQVRWFVHELDPDRVVPSRGLRRQCVLSELQEALSSVDGVVARLARELLDRCAELNRQITQLEAELRRLVQVLAPSLLAIPGCGVLSAAVLIGETAGVHRFRNKDAYARFTGTAPIPVWSGASAGKVRLNRGGNRATNCALHMIAVTQARGIGPGHAYLAKQQARGKDKTASLRLLRRRLSDAVFAALRTAQTVAGDQPVPLPAAA

SEQ ID NO: 310086 - protein, 482 aa, unidentified
MKKKNIYVNQSQELLTLFEEAGDSAKIMCVPIDYAKKDHVVMFCNGHGDILRKPFSVKNNPEGVKYITEQVSRSCRHHKINQNHVFFGGEDVGSYAENFASTLRSGGWLVAGVNAHDAKKQRANLQASTDRLDLMGIAAMLLNRRANCSPAQSGIYRNLRTLVRHRRRLVVMTTEVRNRIHAIVDRLFPGFLDERKSGITPFSKSSLYLMENRFSASQIRRRRRSTLIEALRGLGTPKPDCAVAKLEEYAQQVLKTPDEYVSTLQLSMAQHVKHYRCLQENIEQLERETALWLAQTQGAFLTSVRGIGIVLAAGVSAEIGDPFEQKPLNNLVSYSGIIPRVIQTGGPEGEIYTGKVAKRSNRILKDYVVQSASHLGLHGPEDLMIDHKRRDAAGQHADFGIARRYLRMAMCLMRTSQVYLPPRLRKPGIKPEERAGYYLMTWPYLRDKWQKLGALEAAFSEDRPLGRWRNMVQEFYKIKLTL

SEQ ID NO: 310087 - protein, 296 aa, unidentified
MVAVMIGVDPHKASHTAVVISAAEEPLGEVRVRACAAQAERLLAWAAAWPERAWAVEGADGVGHLLAQQLLAAGERVLDVQPKLSARVRLLAAGATSKNDPNDARSVAVAALRSPSARAVAADDHAAVLRVWSKRHRDLSRTRTQVACRLHAVLCELLPGGLATQMTAGQAAQLLGSITPGDAVAAARRELAAQFTADLRGIDAQMRDTKRKLTVAVRAAGTSLTGLFGAGPVIAATVIGDVRDVSRFPSRDHFAAWNGTAPVEVSSGKRKIYRMSRRGNRRVNHAIHMAAVTQIR

SEQ ID NO: 310088 - protein, 329 aa, unidentified
MSALFCGLDVHKESTYATILDSDGKMVSQRRMANERILPYLSEYRIDRIGMEASNQVAPLYRELRRNGYDVLVSHPKKTRYIAEARIKSDRVDSKAIAELVRLDALPSAYMPPRDVAELRERVRRRAFLVRERTRLRVKVRSILTYEGIKPPSDHGLFTEKGVEWLRSLGLEPVESYLRVLNPLNEEIKRVSRQLKEMAGEDEEVTLLMTIPGVGYYTALLVKSEVGDINRFSDGDRLCSYAGLVPSTHASGGTVRHGGITREGSRWLRWVMVEAAMTHVHKYDTAITRSYHRIAERRGRQVATVAVARRLLMCCYSVLRNRKPYRDQA

SEQ ID NO: 310089 - protein, 358 aa, unidentified
MFIGVDTHKDTLAVSCVDRAGQQVAHQSFANSSAGHAMLLSWTRCHAPELERVGIEGSANFGAGAAQFLYLHGIDVREVPAKLTGRERTRLRRPGKTDPTDALAIARITARDEDLPPARRRGPHEELKVLVDAREELVTARTAEANRLHADLSILRPGYTGQLRSLLHPDSVTKAARLVKALDGARAGVARRRIIRLRRLDHEIAEMTAEIKQALTAVGTALTDIHGVGAITAARIIGEVGDIRRFPSKDHFAAGNGTAPIPVASGRTDRHRLNRGGNRRLNRAIHVIARTQAAWYPEAKTYMDKKRAEGKTRAEALRCLKRRLSDTVYRTLCEDHRSTAPHAADQPIPATTAPPPSR

SEQ ID NO: 310090 - protein, 385 aa, unidentified
MNILAIDLGKFNSMCCFYDTDTQKYRFQAVATTRPYLTAVFTHHKIDLVVMEACGPSGWINDLCQEFGLKTLVCSTNDEAWRWKNVKRKTDKDDALKLSRMAMMRQLTPVHVPSHTVREHRTLIKYRKKLVGRINQIKNSIRGLFACRGIEIDRGQPAWRTGRELINSHRKSLVECSLEELWRGQLDAELTQLDSLADQLADVERRLDVIANEDERIQRVRTIPGVGRKTAEVIVTALDDVDRFKNARQVSAYIGLVPRQYQSGETDRNGRITKRGSRLLRTMLVECAWLSLRYNEWSRTTYDRIHGGQKTRKKKAAIALARKIAVVAWSMLKHKTDWDPERAGIVAKEPAKEGPTRDTNQGRCDRVTHTDASSVGQVAESSMTS

SEQ ID NO: 310091 - protein, 387 aa, unidentified
MYFVGIDISKYKHDCFICTETGEVIESNFSFPNTSDGFEQLLNLLKSIDNFKEIRIGFEATGHYGMNLKLFLEKNNYSFMEFNPKLVKEFISGQTLRKTKTDKKDAYQITKYLISADYKPHPKQFYHKYSLKSLSRMREKLVKQRSYYEVALTNVLDHIFPEYKPFFNNTFSASSIFILSKYKSPNKIKNMKDYDSIRKISRGKFTSAQFFLLKDLAKNTIGTSNEIFELELETLLILRSQIEFEIKKLESNIEEIIKELNPPILSIKGIGYILGAGIVSEYGDVSRFKSADAMVAFAGIEPSICQSGTESHTGHMVKHGSGHLRYYLLNAADCIFLHEPIFTEFYYKKRNEGKSHRVALNHVAKKLIRIIYKLETENITFDSSKVK

SEQ ID NO: 310092 - protein, 341 aa, unidentified
MTEVTMIGLDLAKNVFQVHGMRPDGSVAFRVKLARIKVLAFFAAQPICTVAMEACASAHYWGRELSGLGHDVKLIPPIYVKPFVKRQKNDMADAEAIAEAASRPTMRFVAVKSEEKQAAGMAFRTRDLFVRQKTQTINALRGHLAEYGVVAPKGPAHLGRLIRAVEEVESGLPEPVVAFARMLLDQIAMLQAKIDELEKEIRHQVRRDDVTARLMTIPGIGPISAAAMMAFAPPPESFAKGRDFAAWMGLTPRQHSSGGKERLGRTSKMGQRDLRRLLITGAMAVVRWATRRGAPEGSWLWRMLQRKPRMLVAVALANRMARIAWALMAKGGVYKDPSVAA

SEQ ID NO: 310093 - protein, 424 aa, unidentified
MTESFKPVVFAGVDWATERHDACVVDGSGRVLAERAFAADAAGLAAMADWLIAHGDAPPEEIAVGIEVPHGPVVEALLERGFAVHSINPKQLDRFRDRFTVAGAKDDRRDARVLGDSLRTDRRAYRRLVNDDPDVIELREWSRMAGDLKRENNVLCNRARQQLLRYFPQVLALTDDVGEAWIRALLEAVPTPADAHRRRRASIEKLLRSHRIRRWKADEVLEILRQPALTVAPGTVAAATAHLRLVSRRIALVRSQLAECHKMLDQICERLGAGDGGEGRKNEPRDVEILQSLPGVGRIIVATLFAEASRPLRDRDYQALRAHAGIAPVTASSGKRTGRRARVSMRKACNQRLRDAMYHWARVAAQCDPIWRTRYRELRARGHTHGRACRGIADRLLNVAMAMLRTRTLYDATKIAQRRARAAA

SEQ ID NO: 310094 - protein, 425 aa, unidentified
MARRKEDHFGPHDVYLGIDVGKSFHWAFALGAGGEVLIDRPLPNRQADVDALVAEAGAGALVVVDQKNNIGSLVVRRCRAAGVDVGYLPGKAMKQARDLFPGTAKTDRIDAEVIARTAMGMRGVVLPVAESDDLGASVSLLSSQLEYATRRATMARNRLHAVLLESDPAFEAACDLRGAWQLSVLAELGGAAGVCAAGKRRYRSLCGRLRARESARDALWEEAVASARSAFHPDAEDALVRSLASEVLAADAEREALQSDIASRLSGDETYRCLLTVPGIGVKTATALVTMVDVSLFPGDDRLASYCGLAPANSQSGTSIDSASSSRSGNKDLKNLLVFTCNSLVGTSNRFGRYYEQCRARGMRHNKALKAVARKRLGVIYAIMRDRVPYVEPASPVENSGQARPAEPQSPAAVENSIKIPLTKL

SEQ ID NO: 310095 - protein, 405 aa, unidentified
MLYVGIDWAERHHDVCLLDTEGRVLARARVPDGVQGVGRLHGLLAEHAHDPAPVVVGIETDRGLLVGALVAAGYQVHAVNPLAASRSRERHVTSRAKSDRGDARVLAEVMRTDRHHHRQVAGDSELAEALKVLARAHQRLIWTRRQQANQLRSSLREFYPAALAAFGAELADPQALAVLAAAPTPAQGRSLSVAQLAELLGAAGRQRGAPARAVAVQQALGSPQLAAPEPVTAAYGQVVTATVGILLELNQQISALEEDLTKAFETHPDAEILRSLPGLGVVLGTRVLAEFGDDPTRSHHPKARKADAGTAPITRASGTGQVVLARVARNKRLADACYLWAFSALTRSAGARAYYDQLRAQGATHHQALRGLGNRLVGSLHGCLRHHTIYDEHQAWSHHIKAAAA

SEQ ID NO: 310096 - protein, 343 aa, unidentified
MQFEATYDIGKKLFHVVALNAAGSVIQRAKFSRDTLLAFFDAAPNALIGMEACPGSQWLARRLVAMGHDARIIPARFVKPYVKSNKTDTVDAAAIAEAVTRPTMRFVEVRTPEQIDLQALHRIRDRLVGQRTALINQARAFCLEYGLAMRVGAGGFHADIRRHLGNVENDLTPAMRVLLEELLDDLAYIEGRIRAVTGKVEAYASQHDAVSRLVTIPGIGALGATAIVAAAGDGRQFRKARDLAAWLGLVPAEHSTGGKQTLLGISKRGNRYVRRLIIHGARSCLLHLNRANHALGGWLSALEARTHRNKAVVALANKLTRIVWAILTRPGAIYLPSRGAALS

SEQ ID NO: 310097 - protein, 419 aa, unidentified
MFSDTDLIVGVDVHRRTNVIQVMDGQGDVVDSSHRFANNGTGTSRLAHHLAQLTCSGGFSAIHIAAEATNNYWLPFFCQLSRAAELSSWPLTLYSFNPRVVHGFKKALGDLEKTDSLDATVAAERLRFGKELPRPFCMDELYLPLRALTRYRYHLVRELVRVKSYCLSQVYLKVTNYSDKDQKPFSDVFGATSQAVLQEFATLDTIANMPFDELVEWIDVKGKRRFANPQENARKLQKIAADSYQLPAEWSAVIHDIISLNLRHMNALENLIQRVETAIAEQMHAIPNTLDTIPGIGPVLSAGIIAEVGDLARFDYNEAKVASFAGLKWPRSQSADFDAQDTKMSRSGNRFLRYYLCEAAQMVRMHSPEYRDFYDRKYKEVRKHQHKRAIVLTARKLVRLVVRLLATNEPYRLRRVSSD

SEQ ID NO: 310098 - protein, 271 aa, unidentified
MKMTHSQAVVGIDVSSGKLDAHVHGHDQSRQVTNDASGHRELVAWARAKRATTAVMEASGGYERDLARALRRAEFAVYVVDPKRVRHYAKAVGQLAKTDRIDARIIAEYGTTVLAAGRLALPRPDDPQRDRLSALLGARAALIEHRDALQQQSAAMPAGLARQALKDAHASMKLRIKHLERQIGALIAEHAAFAALARRLDTVPGLGPVAIAALIAWLPELGYAGRARISALVGVAPVADDSGDREGKRHIAGGSKKLRNVLYMPVVAAIR

SEQ ID NO: 310099 - protein, 366 aa, unidentified
MPSVTSGAEWIHLGMDVSKDAIVVGVLHPGEEVPVVDRIFNDEASLRRLVGRFRDRSRLAACYEAGPGGYELHRLLTSMGVACDVVAPSLIPKGAGERVKTDRRDAIRLARLHRAGELTAIRVPTIAEEAVRDLVRTRADLLDDRRRAQQRINAFLLRHGRVWRGGVRWTKIHRQWVASQVFDEPALTATLATYRAALMAREAELAALEAQLHELAQCEPLHAAVSRLGCYRGIAELTALTLAAEVVDWHRFASARAFMSYSGLIPTEYSSGDRIRRGGITKAGSEPVRTALTESAWSYQHRPTIGAPLRRRQQDATAETLARSWKAQQRLCGKFRRMAKAGKSPAVTVVAVARELAGFVWAEMTS

SEQ ID NO: 310100 - protein, 473 aa, unidentified
MARQAARSDLGAMPLFPHETLYVGVDVGKFGHVAGLLWRTLLKRHERFEGCPTFAFEQSREGFRAFVDHLRELVPIEQITILLEHTGHYHRLLEQYLLELDITVYRIHVQERPKGMIKTDKRDALSLANRLYTQLEVGAQVEDKMQLVRRALPATKAASQLKGLIQHRYELSHQCTQLRNKVTSICDELFPELVQIFRDPNREVALMFREKFPPPHTIATASMAALREIRSRNFPSEAQLLKLQQLARETIGIKDVDRQQGLLIEQALLIKELRVVQEHLEILHTTISEVVTSSREGQILLSIPPIGPIQAATTIATVGNIANFENASELKSYFGWAPRRDQTGASFDRTRLTTRGSRPMKQMLFLMAARATTLECEWARSYQRLLPRLAIYDERKKDYRGKLRVSGRVAGQMATMIFALLKTDQGLVDSTPSGQEPPPPMLSDPEVHRRHQEGHYRSLKPGTRPRKIIRLPH

SEQ ID NO: 310101 - protein, 345 aa, unidentified
MNTKLSRVGVDIAKNVFQIHGVTCDERTVWCRRVPREQWLNTVLGHLEPGSEVGMEACGGAHHWARQLQAAGYRVKLMAPQFVKPYVKGNKNDANDAEAICEAMSRPHMHFVPVKTVAQQDLQAVHRIRSELVEQRTAKANQIRGLVAEYGLIAPLRLEHLRTVLPDWLEDVDNGLTERFRRLLHGLSQDLCRLDERVAELDEEIRVIAQSDPAALRLQQLRGIGPITATALLATLGDANQFANGRQMAAALGLTPRQHSSGGKERLFGISKRGDAYLRTLLIHGARAVMRFAAGKTDRLSVWVTSLAQRRHPNIAAAALANKTARIAWALLHNGTDYQPGGAAR

SEQ ID NO: 310102 - protein, 377 aa, unidentified
MDERIKIYVGLDVHKESIAMAVADTGRQPARMVGTLPHDLNKLLKKLQALGEPSSVHVVYEAGPTGYGLQRALAVRGYLCEIIAPSLIPKRPGDRIKTDRRDCVRLAELSRAGELKAIWIPDPTDEAIRDLTRAREDAINARTQVRQQLKSFLLRHEIRYPGKTAWTQSFHRWLGTLRLEAVSSQEAFVEYRLAVEAADKRVERMTMAMLSAIEGWRFESVVKALCALRGVDMVSAISLVAEIGDIDRFDHPRKLMGYLGLVPSERSSGDRVSRGSITKTGNAHARRLLTEAAWSYRFKPKIGYPAQRRQQDLPDPIRGIAWKAQLRLTERFAKLHARGLTINKVCVAVARELAGFVWAIAREPQAVAQPNWQASET

SEQ ID NO: 310103 - protein, 351 aa, unidentified
MTIVSQIVDFVIGVDTHARTHTLAVLAADGRDLGQATFPVTPAGLSRAQVWAARKTGGDLSVLWVVEGAATYGACLVDSLHQAGCQVVEAPAVPKGLRAGKGKSDPVDATLIAAATLCLDTTRLRHPRRDNGIRAGIRVLIAARDQMSTQKTAAVNALTALLRTVNLGVDARKKLTGTLIGHAAGWRARHEDIGLAIARTDATRLAKQIITLERQLDANKKQIEQLIKASPAAGLLNEKGIGPITAAVSLATWSHLGRIRSEAAFAALAGVNPLPASSGNTTRHRLNRGGDRRLNQALHMAIVVRMRCDPDTIAYVAKRTAQGRPRKETRRCLKRYLARHIYRALNTAATI

SEQ ID NO: 310104 - protein, 402 aa, unidentified
MNAVGIDVSKSKSVVAIMRPFGEIVSTPFEIKHTASDIHSLIELINSVEGESRIVMEHTGRYYEVLAHQLLEANLFVSAINPKLIKDFDNDSLRKVKSDKADAVKIARYALDKWQNLKQYNVMNELRNQLKTMNRQFGFYMKHKTAMKNNLIGILDQTYPGVNTYFDSPARSDGSQKWVDFASTYWHVDCVRKMSLNAFTCHYQNWCKRKKYNFSQSKAEEIYGKAKELVPVLPKDNITKLIIKQAVNQLNIASATVESLRTLMNETASQLPEYPVVMAMKGVGTSLGPQLMAEIGNVSRFTHKSAITAFAGVDPGVNESGTYEQKSVPTSKRGSADLRKTLFQVMDVLIKTHPQDDPVYQFLDKKRAQGKPYYVYMTAGANKFLRIYYGRVKEYLSSLPES

SEQ ID NO: 310105 - protein, 403 aa, unidentified
MNAVGIDVSKGKSMVAIMRPFGEIVSTPFEIKHTTSDINSLVELINSIEGESRIVMEHTGRYYEVLAHQLSEANLFVSAINPKLIKDFDSDSLRKVKSDKADAIKIARYALDKWQNLKQYNVMDELRNQLKTMNRQFGFYMKHKTAMKNNLIGILDQTYPGVNTYFDSPARSDGSQKWVDFASTYWHVDCVRKMSLNAFIDHYQKWCKRKKYNFSQSKAEEIYGKAKELVPVLPKDEITKLIIKQAIDQLNRASVTVEELRSLMDKTASKLPEYPIVMQMKGVGSSLGPQLMAEIGDVSRFTHKGAITAFAGVDPGVNESGSYEQKSVPTSKRGSSGLRKTLFQIMDVLIKTHPQDDPVYQFLDKKRAQGKPYYVYMTAGANKFLRIYYGRVKEYLSSLPESE

SEQ ID NO: 310106 - protein, 337 aa, unidentified
MDITTVGIDLAKSVFQLHGIDANGNIVLQKTLRRGRVLAFLTKIPPCLIGMEACATAHYWAREITSLGHKVRLIPPAYVKPYVKRQKNDAADAEAICEAVTRPNMHFVPVKTKEQQGVLVLHRSRDLLMRQRTMLLNAVRAHLSEFGYIAAQGPQKTLDLLRRLEEGDGIELPDTVITALLSLGEQLSSLQRAIRGIEKRLLIWHRQNTSSQRLETIPGIGLITATALAASVPDPTVFKSARQFSAWLGLVPRQNSSGGKTRLGRISKMGNGYLRKLLVVGATSVTRRAANNETRTGAWVRSLLERKPTRLVTVAIANKTARTAWALMIKGEVYKAY

SEQ ID NO: 310107 - protein, 358 aa, unidentified
MRMVVYVGIDVHKKYCQAALMNDNGKLERELRFDNTTEGAKSLVNLAKSIDPEIKAVLEPSANFWIRIYDQLEDESVEVKLSNPLRTKAIAEARIKTDRIDAKTLATLLRGDLVAESYVPNHKNRERRAIIRHKASLMHMRVEIKNRIHALLDKHELTHSYSDLFGKEGLEWLRNIQLPTIDHQILQSNIQILETITTEIDNADIQIAKDAVNENQAKLLMSMPGVDYYAAMILLSEIGDVKRFPTPDKLASWVGLTPQVHQSGETNWTGHITRKGSKRARWILGQCAQSARQHDPRMRNFYERIERKHGSSKAIVAVAHKMVTIMHVMLTRNEPYRGQNIQLTEKKHKRLDRIANTT

SEQ ID NO: 310108 - protein, 363 aa, unidentified
MRFYGEQRRFYCGIDLHASKMYVCVLDEQGNVVLHRNLRTEPEALKRALAPYRASLVVGAECMFSWYWVADWCREERIEFVLGHALYMKAIHGGKAKNDRIDSEKIARLLRGGTFPLAHVYPKEMRGTRDLLRRRNLFVRRRAELLAHVQNTFTQYNVPTASGKGRDRLREGDVGSSFEDGSVQVMLDADVEVIEQLDETIARLETHVLKHAKVHDPARLHLLQTIPGVGKVLSLVMLYEIQDVDRFENIGQFVSYARLVSCAKESAGKKQGSGGRKIGNAHLKWAFSEAAALMIRSSPEAKAFMEKMTRQRGKARAVALVAAKIGRAVYWMMKRKQPFDARKLWKSILPKGVREMEGAAMKG

SEQ ID NO: 310109 - protein, 404 aa, unidentified
MELTAIYRCVAALDVHQAKLTVCVLSENDLGEVVTAVREFGGFKRDRREMAAWVASFHPELVVMESTGIYWKSPYAALEWYDLNLAVVNARHVKQVPGRKTDINDAQWLAILARSGLLRGGFVPPRQFRDYRLIARQLQKLTGIASGEKNRLHKLLTDAGIRLSVVVSDVYGKSAKAMITGLLDGETPEQLLTHADSRLKATPDALREALEGDLSDSHRFVIRELMIHIDELEARILRFRQTLLKHLSDYQVILQNLQTIPGIDEFSAAMLLVEIGDDMSAFGSADKLASWAGVCPGQNESAGKRQSARARKGNPYVRRILCEAAHAASRTRCGLQEKFKGLLIRRGRKRAIFAIAHKLLKTVFLLIQRGDYYRDANTDYEALTVQRNAPRWIKKLIQYGYIAP

SEQ ID NO: 310110 - protein, 416 aa, unidentified
MKKRSYRAQKVNEVRWEEMADRVKDKAVVWAIDVAKVEQYGVLMDSEREVVVTVKWAHPAETSTVLDQLRRLPCGSLTAVMESTGVYGDTLRRQLREAGIEVHQMSAKRVHDACEVYDGVPSMHDAKAAQVIGRLYLEGASRVWVEASEQQRSHDAIGRLYRLYQKQHQQHQNRLEAVLQRHWPELTHHLDLDGITLEDLLLSYGSPAELSARAEEGRERMRRVSRGKLAAEKIEAVLESAHHTIGVPCVAAEREYLMALGAELRHSREQKERVGLRLSALTQADPELHALGVTIGRVTTGLLIAEGLDPRAYANSGSYCKALGLNLKERSSGQHKGQLKITKRGSGSARRDLYLATLRLIQRNEIVKTWFENKVKSNGGRNKQRIVVALMRKLSRALWYVARGQAFDARRLCAVG

SEQ ID NO: 310111 - protein, 428 aa, unidentified
MSNQEINRRRQFCQITKEISGSNQYLVVGIDVAKNKHHAFMGTATGQCVLRRLVFENDIEGFSRLLQTVEQLKARHDLSKVVYGLEPTANYHKPLARHLIRCDCNVVLVAGQAVKNNRQLLDGRWDKNDTKDAANVADLVSRGRCLYLDWPSDRIINLRHLLSLRRRLKKHEHSLRMRIRNGLLALYFPELDSYYGSCESESLAIVRWCLSPDKIAMMDYDRFFKVVTRTRRGVAQKLRLHKIHQAAIDSVGCPMGPAGEFEAELLVDSLGYVRHQIRDTEELIEQISMDYPEYSYLLTIPGFGRYISARVLSSIGDPFRFENRRQVLKMAGLDLCANRSGKTSDRAVPVISKKGSGDLRYALYQAAHVASSRVDHFRAYFANMLRGREREKGIQTKMRVKLSAKMLVIAWTLMKRKEVFDPAYLNIA

SEQ ID NO: 310112 - protein, 322 aa, unidentified
MAMLSFGGIDVSKDRLDVMVLPEEQSSSVSNDAAGWAELVEQLRSSSIVAIGIEASGGYERGVMRALLAADLPVRQVNPFKLRQFARASGVLAKSDPLDARMIASFVAIMPTRPAPRQAPAAERLTEMLAVRRQLSAEKVAAENASRLLEDAMLRRLSRRRIGRLGTDIDLLDKHLVGIVGTDAALAHRYQLLTSMPGVGVVLACTLLALLPELGRMSRKQVAALVGVAPYAFESGTLKGRRCIWGGRAHVRQVLYMAAMSACNWNPPFKTFHDRLKAAGKLPKVAIVAVMRKMITTLNAMVRDDVSWADRLTGRHSVPTAR

SEQ ID NO: 310113 - protein, 376 aa, unidentified
MNEKLRFLGLDVHAETIAVAVAEPNGEVRSLGMIANREDSVRRFIRKLGSPEHLPACYEAGPTGFVLYWQLTQLGVKCDVVAPSLVPKKPGDRVKTDRRDALKLARSHRSNDLTAVWVPDGGSEALRDLVRAREAAKQDQLRAKHRLTKFLLRTGQRPPLGVKAWTEKYVEWVQQVRYTHPAQEATLLDCLNEVQHMEERVKRLEQSIVEVIQLAPAPMQEVVRGLQALRGIAHISAVTIAVELGNITSRFESARDLMGYSGAFPSEDSTGKRIRRGGITKSGNAHLRRIVVESAWSYRHRPAIGARLRRRQEGLPAEITEIAWKAQNRLHKRYMTLMARGKEQRKTMTAIARELLGFIWAIGIKAEAACKQPMAA

SEQ ID NO: 310114 - protein, 346 aa, unidentified
MQKIAYLAIDLHARSFTMGNMDENGVFRGNLKYPTSENHIIHALKSVKAKEKFLTIEEGPLTYWAAQLANPYIDKVLACDPRENALIYKSPYKKDKVDTQRLCRLLRLGELKQVYHPEKDDRAIFKAAVQHYIDLRNQLIRVKHKIKAMFRRWGVTNVSADSVYSQAGRDKYLELIKQPPIRTQLKRLYYLMDQTEDLRKAALKTMKQLGRNYPEINEFKKIPGVADIGAHVFDAFIQTPHRFAKKNQLWKYCRLSISEHSSDGKPLGYQRLDRSGIGELKALSFRAYMSAMSGDNEVRRFYLKSLKRTHNHKHARLNTQRKILSVMYSMWKKGAVYRAELFSASA

SEQ ID NO: 310115 - protein, 315 aa, unidentified
MAEPSFAGIDVSKDHLDVAVSQGDEIIECFQKPHTEDTILGLVEKFKEIMPKRIVVEATGGFERALAAYMFEAGLPIVVINPRQARDFARATGILAKTDKIDARCLARFGAVIKPASRPIKDAQRQAITDQVTRRRQIVHMLAQEKNRLSRSVEPVRADIEHHITYLKERLDKSNKDIQQIIEATPVYQETVELLSTVPGIGPVTSASLIANCPELGSLNRRQIAALIGTAPFNRDSGTRSGPRCVWGGRRTVRHQLYMATVSAIRCNYKIKSFYMRLTTAGKKPKVAITACMRKLIVILNAMVKHRKPWQISAV

SEQ ID NO: 310116 - protein, 374 aa, unidentified
MENSITYVAMDTHKKEHHVALHYPGQEEIVRFAIKNTAREITKMTQKVIKQAPGDVEFCYEAGVCGFILKRRIESHGCHCAVIAPSLVPRKPGDHVKTDRRDALKLLTMFQAGLLTEVHAPDQQQEAARELTRSRQAAQENLKRVRHQLLKFLTRHGYLYSDGNHWTDKHIKWLRTLVFEESLLHDVFDNYFTEMQHCIQRLCSLDNQVEKLAKSEPYQEVVGLLRCFYGIDTLSAITIITEIFDLGRFSSPGELMSYLGLTCSEFSSGEKQKRGPITKAGNKRVRRVLVEVCWHYRHPCNISKVLRARRKDQPQWVIDIADKAGQRLRKRYRHLTNCGKMPCKVTVAIARELAGFIWSVFKEYEIRKNAKQAA

SEQ ID NO: 310117 - protein, 393 aa, unidentified
MKQRKNAESEPVRIKKFARFIAISGLPACLNPDPDSRLTSIVKVVGLSSNPFFLKSVKDKSMENFYFIGVDVSKKKLDFCVMFEGKVVHEEETSNNQGAIMSLLHHLEEDYGIASGQMLVCAEHTGQYTFPLACACKAVECKLWLENAAEIKYSSGVQRGKNDRVDAKRIAIYASRFQDKVQYYERPTEDIERLKQLESERTLYVTDLAKYKGQMKDQKEYMPKSLYERKMKRLQALMDDLEEAIQSITDEMDEVIASCPVLFRQRELLMSIDGVGRVVATNMIIATEAFTRFGDPRKFNCYAGVAPFSYSSGSSLHSKARVSHRADKVMKRLLHLAAVAVTHRIGGELKKYYERKVAEGKNKMSVINALRAKIVARMFAVIKRNERYKPILS

SEQ ID NO: 310118 - protein, 338 aa, unidentified
MEKYIGMDAHSSICVFSVVDEKGTEVNQAKIATNGLLLVEYIRSIKGSKKLVFEECELSAWLFETLHGEVDELIVCNPTRNQQYKKAKTDKLDAQNLARLLRGGFLTPVYHDGSKTEWLRALMSGYQDVVDTGVSVKNRYKSLFRKAGLPARGTKLYDDSSLLEDLPRPDQRFVGHSFYRLLEALEKEREQYVVAIGKLGRTFPEIKLLKGIPGIGDISAAKIIAQVISAQRFKDKHKFWSYCGLVRHRMESGGHVYGSRRGWGNRTLKCVFKMAAKSVLTGENELRAHYDELRAKGTSDKSARNAVSRKLAAITLSILKTRRPYEETRILSQAEQAG

SEQ ID NO: 310119 - protein, 350 aa, unidentified
MNKFCKPKTDGSVFKNMFVGMDVHKNYLQVAVLNEKGKVLNNSRIDNNLMKVNEFFDRLHPNSNTKVVMESSGMWYNIYKSLRKKNLDVRLSNPAKTRAIASAKIKTDKLDAVKLADLLRGGYIAECYIPTRETMDLRELVRHRAALVRMRTKLKNKIHSIMLMNGTSISYAGTTFTKGHIEKLKELNDYRINGYLRIIESLNDEINTVSKKILLIAQEDEMAKLLMTVPGIGYYSALLIVSEVGDINRFPDSYHLCSYAGLIPSTHSSGGMTYHGSITKTGSKYLRWIMLECLHAHIRNEKNSNATRFYHRLSKKKGTSKAAVAAASKLLKIVYWIMKEKRTYYNNKSK

SEQ ID NO: 310120 - protein, 356 aa, unidentified
MLSFMRSTIGCDLGDRNSRVCCLTADARVETEATVRTTRQGMREFFSARAKARVVLEVGTHSRWVSELLKSLGHEVVVANPRRVKLISQSDSKSDISDAKLLARLGRADPELLAPIIHRGTQVQADLAAAKVRDALVRTRTKLVCQARGLVKSFGERLPRCSAESFHRRARADVPEALKAALEPLFDILEKLEIQIKLQDVAVEQLAKKYPDVEVISQVNGVGTLTALVFLLTLEDKSRFKKSRTVGAFIGLRPRKDQSGDTDKQLPITKAGDPFLRRLLVNCANQILGPFGKDTDLRRWGLELASRGGKNAKRRATVAVARKLAVLMHRLWVTGEEYQPVGYEAWKKNITTTAAS

SEQ ID NO: 310121 - protein, 320 aa, unidentified
MAILDAAAIVGVDVAMAELVTAQRGVDKTHCLVNARTSIHHWLKTLPQGSAIALEATNTYHLDLVEMAHDMGHLVFVVDAARVSKYRESLGKRAKTDACDAHLLARYLEKEGDELRQWSPPPELHTQLKHLLHRRASLVNSQTALRQGWKDEKDLRMGFEKLMRRFSHLIKDIEKQLKDVLIKSGEIDQVKRCQGIEGVGFLTATALFAAFLRGEFKNVDAYIAYLGLDLRVSDSGNKSGRRRLSKKGDPEVRRLGFNASMAACRSATWKPYYEKKIGEGKARTEALTILSRKLAGVAFSLMKKREEYDPTKRLGVAPQT

SEQ ID NO: 310122 - protein, 385 aa, unidentified
MAPIRMPEAVIGLDVGKSSHWACVATRDGEVLLSAPVANREDDLDSLFGRFPDALVVVDQSRNIGALALARARAAGMSAAYLPGLAAHGAARLFAGDAKTDERDAMVIAKTALGIPDALLPVGDPGPTIAAARALAAQRNFLTCENTRNKNRLRSILLESCPAFEALVDLSDGPQLRLMASLGGAWSVADAGPRRAAALTRGAARGKIEALVRSTTSSTRPDASVVAAEDRAVKLLARRISENSAEIEAITAEISALLEGDDTYRCLLTVPGIGPKTASELAISIDIEDFPSHDRLASYCGLAPRNRQSGTSISSVTASRQGNKRLKNLLIFSCNCLTRTEGRWGDYYTRCRERGMSHGKALKALARKRLKVIYAVMRDRVPYAA

SEQ ID NO: 310123 - protein, 317 aa, unidentified
MTKTSMKVAGIDTAKDKLDIAVHGQALRWQVENLLQGWKRLGSELAKAGITRVGIEATGGYERGVVRYLRAAGLTVLVLQPIQVRAFARFHLRRAKNDALDAVLIAACAAAMEEPRIGPDQRLIELADLLTFVEQTEEDLARLKTRLEHLNEPRLRRIVFTDIARLKARRLAQLRLIARQLRDHPDLAARLDLVLSVPGIGERTALALIIRMPELGRISREEAAALAGLAPFDDDSGKHKGQRHIAGGRGRLRRSLYAAALPAAFRWNKALISLYGRLVARGRPHKAALTACARKLLVYTNTVVARGTPWADSPSPA

SEQ ID NO: 310124 - protein, 346 aa, unidentified
MTMLEARRVTGGVDTHLDVHVAAALDPLGGLLGTKSFEVNPVGYRSLLSWLESFGAVGKVGVEGTGSYGAGLARFLRQHGVSLIDVDRPNRAERRRSGKSDPLDAVEAARATLSGRAKSVPKSKDGAVEAIRVLLVAKRSARQARVKAVTQVRHLVITAPEELRRRMKGLSVSALVEEGAKLRPSRSTDPVVAATKAAISSLVHRIQALESELDELAEMINALLVATAPDLLALFGVGPDTAAALLVCAGDNPERLRSEASFAHLCGVAPIPASSGKSIGRYRLDSGGDRQANSALWRIVMVRIAHDPETTAYFERRVKEGRTKREVIRILKRYVAREVYHHLPRG

SEQ ID NO: 310125 - protein, 372 aa, unidentified
MNLHPIIMNQSNDTELSSPEGTRGQFNDRPRTIKLGIDVHQAFYVVVVQEGGSNPKPPQRFHKEAFLVWAAKLRAKHPEAKVHAVYEACGFGFGLQRALRALGIECLVVCPQKLDERNQRVKTDGRDARSLCLKLSRYVEGNKEELAVVRVPSAAEEQLRALHRQREQLVRTRKQWEAHGRSLLVNHGFEPVQKWWKARAFAALAVPDWMREMLSHTQPILLTIEAQIRALTVQLQSAAAPDQPRGLGALTSVVIDREICAWDRFRNRRQIGSYTGLCPGEHSSGNTRLQTCITKHGNPRLRAALVELAWRMVRFQPEYRPVVKWRRILAKGALATGAARKKAIVAVARQLAVDLWRIRTGRVEAATLGLKT

SEQ ID NO: 310126 - protein, 396 aa, unidentified
MTGVIIGVDPHKLSATIEVVDHHEKLLGSGRFTTDQAGYIAMRRYVAAWPDHVWAVEGSNGAGRPLAQRLLEAGERVVDVPAKLSARVRLFDTGHNRKTDARDAHSIAVVAVRTKTLRVLRVDGELEALRMLADRREELTRSRVQTVNRVQRLLSELLPGQAKRDITTGQAKALLATVRPRDIAGKTRRRIAAEELRELVAIEAKMKKSTAELKALVTVRGSRLMDLHGVGPVVAARTLADVGDVTRFADRNRFASWTGTAPLDASSGEQIRHRLSRAGNRRMNHMIHIAAISQIRLETPGRDYYRRKLAQGKTPLEALRCLKRRISDAIYRQLLADQRGASPGGHCGASQESSAVDLPPHIDTSDQPLPDPHTRRYAAPPPPRKSTAARTVHTAG

SEQ ID NO: 310127 - protein, 314 aa, unidentified
MLSPSRYLGVDVSKDTLVVACERRRWQFANSKAGHRKFIAQLKKLPGPVHVLCESTGPYHLPMCLALQDAGFAVTIGNAARIHYFGLSEGIIAKNDPIDAELIERFAKAKRPPADPPLCREQLALSESVTHRRQLVEMIKVLRTHRQQVLHAALVAEINKSIAVLEKRLQALDQQLRAKIEAHPLWKAKFALLTATKGVGFVTALILLAKMPELGTLNRGQCAALGGVAPYDDDSGKHLGKRSIRGGRHEVRASLYMAALTAAHFNPILKTFYQRLLAQKKPAKVALTAVMRKLLVYLNALLKTPALPQTSPAS

SEQ ID NO: 310128 - protein, 457 aa, unidentified
MRKRGRRTKGVEEAHPFEAMSRINPNAAGVDIGAEEIVVCVEGNEQTQIVRAFGNYTVDLENIGRWLKEREVKSVAMESTGVYWIPLFEELERQGFECLLISSRSLRRVPGRKSDIQDAQWIQTLHSYGLLESSFRPQADLVALRTLLRHRNQLVEHRSPHIQHMQKALLQMNVQLSQALSDVTGETGLAIIRAIAGGERNPMVLAAFRDPGCKKSEEEIAEALRGTWREEHLFVMKQALELYDFYTGQIEACDREIERLYSHTRADQEGGELPPVPKKKLHTHSKNMPGNAYEVRVHLKRISGVDLSLVDGMGVSLAQTIIMEVGTDMTKFPTEKHFCSWLGLAPKHEISGAKVLKNNTLKTRNRAGQAFRMAAQAVKKADCIFGSIYRRLRTRLDKKQATVATAHAIARVVYRMLKEKVEYEALSVDEYEQKYKEQQIKYMRKKAAKMGFELIPV

SEQ ID NO: 310129 - protein, 436 aa, unidentified
MRGCRCSMLMGFTKPIEHLNLQRKKVIIMNTLYVGIDVSSKSNVVYLMLPNGDKHSNFSIANSHEGSTQLVKRILSALTSHSLDTVLIGLEATSVYGDNLVYFLREDATLASFNRKIHVLNPKQVKKFHDAYNDLPKNDYVDSFVIADCLRFGRINKEVYLGDYRYKALQNLTRARFFAVQNLVKEKQRFMNVLFKKYSTMTQEKVFSDTFSTTALAVYDEFESAEALANMDLQELTDFIIEKGKNRFPDPDAVAKAIQKAARSSYRLPKTVNDSVNQVLSISITSMKALESQIKEFDKAIKAQMELLPNVLISIPGIGPVYSAGIMAEIGDINRFNSQAALAKYAGLTWKQHQSGGFEAEVTRLIPSGNRFLKYYLCEAAFSLVRCDKEYSDFYHLKYKEVNRCQHKRALALTARKFVRLVFRLLKDNRLYCPAK

SEQ ID NO: 310130 - protein, 343 aa, unidentified
MQTITTIGLDIAKSVFQVHGVDAQGKAVIRRQLKRRAVLAFFEKLPPCLIGIEACASSHHWSRELKALGHTVRLMPPAYVKPYVKRQKNDATDAEAICEAVTRANMRFVPTKTPEQQSCLMLHRTRHLFIRQQTAVINSIRAHLAEFGIVAPVGRKGVEELLDVVADSNDDRLPEVARVCLAALGAQLRRVKEQILEFDRQIMAWHRSDETSRRLRYIPGVGPMLATALVASVADPKAFRSGRNFSAWIGLVPKQHSSGGKDRLGSISKQGDRYLRGLFVAGALSVIRYAKIRGTKHRPWLTALLARKPTKVAAIALANKLARMAWAMMARGERYRNPVALAA

SEQ ID NO: 310131 - protein, 360 aa, unidentified
MKKVSKPMRNMEVPAKPEMTMGLDIGDRYSHYCLLNATGDVEEEGRIQSTEAALRRHLEGEPRMRIALECGTHSPWVSRLLTALGHQVIVANARKIPAITGSESKNDRNDAEKLARFAAYDPKLLSPLKHRSEQRQVDLNLIHARATLVRARTMIVNALRGLIKSAGGRLPACSTESLPTRAAGAIPPALIEVATPLVEQIALLNAQIGGMDKQEEKLAVKYPEIVLLRTAPGVGPIVAAAYVLTLDRPDVASNRAAGAFLGLRPGQSQSGDADPQQRISKTGDRCLRSLLVQSAQYVLGRFGPDSALRRWGLKLAATGGKRGKKRAIVAVARKLAVILHAMWRSGQRFQAFPQASTVAA

SEQ ID NO: 310132 - protein, 331 aa, unidentified
MNQAGIDVSNETFDIERRCGDVLSQRQFSNSSAGHRQAITWMQRGAEGVRVCLEATGIYHLQLALALDRAPGIEVLVINPRAGRRFAEARMVRAKTDKADAAILLQFVERMPFTAWEAPSEQQLELQSLAHRLAQIKKERVRECSRLHAAQRAGAHTRLAQRDIGEHLLYLKRHADRIQAAAIALMKQNESLAEDLHLLDSVPGIAELSAMKLIAELGLLAKGLSPAQWVAQAGLDPRPQESGTSVRSPRRISKQGNANLREALFMPAMAAIRKDPNVNAFYNALLARGKRKMQAITAVMRKLLHAIWGILHHRQEWDGGKFYRMPTANTA

SEQ ID NO: 310133 - protein, 343 aa, unidentified
MQTVTTIGVDIAKSVFQVHGIDAAGQVVIRRQLRRRHVLTFFQKLPPCLVGIEACASSHYWSRELQVLGHTVRLMPPAYVKPYVKRQKNDATDAEAICEAVSRPNMRFVETKTAEQQSCLMLHRTRHLFIRQQTAVINSIRAQLAELGVVAPVGRRGVDQLLVIVADPSDKRLPEIARICIAALGAQLQMLKLRILEFDRLIRAWHRSNEVSRRLDRIPGVGPALATALVASIPDPKVFRSGRDFSAWIGLVPKQNSSGGKDRLGNISKRGDRYLRSLFTTGALAVIRYAKIHGTRHRPWLTALLARRPTKVAAIALANKLARMAWAMMARNEDYKEPVALAA

SEQ ID NO: 310134 - protein, 304 aa, unidentified
MNGIGIDVSKRQLDIGTTDGETLQVGNNRSGFSELDVWLKKRPTRQIVLEATGGYEQPVLDFLHKAGHPVVRANALRARKLAQGLGQTAKTDRLDAYALAQMAVLVKLPPYQPLQPWQQKMREFVRARRQAMDALTIARQQQEMVLDRELRRLLQGNITRLQTLVERLGKQIVEQVGQQPQLKMLKSMKGVGPVLQAVLASYLPELGRITGKRIASLVGVAPMSHDSGTMRGKRSIHGGRAEIRQVLYMAAMSAMRHEPRLRDFYQSLRARGKEGKVAIVAVMRKMLVILNARVRDAESGLVPA

SEQ ID NO: 310135 - protein, 404 aa, unidentified
MFYGGIDWSEDHHNLCLMNEAGARVSEIEFAHSAQGFAQVETERRKLNVPAGECVTAIETSYNLLADFLLDRGYLVHIVPPGATDGYRNRQGLSGAHTDGSDAALLASIMRTDRDSHRRLRPNKPLTRQMMAQVRLIENLRRSIQRQENQLRALLLRVYPQILGLFSKLKAQISLQFLMAYPTAQEAQSLSLQQFEAFCREQRYTRTDLISKRYAQLIEPAPEASPADALAHRDQIIILAEVLLLQVRRRSEAQSRLKQLFAQHPDAFLFDSLPGAGDLLAPGLLVKFGDHRDRFPTPAAVQALAGTCPVTESSGKRKRVKFRKACDKEFRRIVQQFARASKRESGWAAAYWQEGRPHWNSDSHAYRCLANRWLAIIWKIWQEREPYDEAYHLRQRALRRRPRP

SEQ ID NO: 310136 - protein, 347 aa, unidentified
MNGDYAGRQVVGMDLHRRRSVLVRMTEDGKKLGTARITNSPAELRAELARAGENPRVVLEATYGWYWAADTLAAAGAEVHLAHPLGVKAYGYQRVKTDARDAANLADLLRMGRLPEAWITPREVRDLRELTRYRQKLVGLRTSCKDQVHAVLAKLGIAVTCSDLFGAWATAWLDGLRLPQPYAGKVTSLRQLIGELTTEITMLAEVIADLLAGHPGYAVIQRLPGIGPVLAAVIIAEIGDVTRFATPGQLASWAGLTPKHRESDVKVTRGHATKQGSRQLRWALIEAIQHAPAGYKVREAKDAIIARRGRQARNIAKVAAARRLLTLVYYGLRDGQIRCLPEPARAA

SEQ ID NO: 310137 - protein, 342 aa, unidentified
MIYHTGCDAHNKRCKFQHIADDGALGLEMSVPTDKESICKFLDLLDAPTTITLEAGRNYWWLNQLFHTHPKITRVNVVDPRRSRKLAEELSVISGYGRAKNDRIDAEMLADQTRRGLSPTIHVPTPAQLETRSLNRHRYTLIINRTRSENSIQSLLAMHGVKTTNNDLLTKPDWKEKNMQKVPDYVRFIIEQLLDQIVFLNKQIDPCERELDKRLPLSHPQMKILLSVPGIGIILGRTIYTEIMDISYFKEPKYLVSYSGLAPIANESGDRKGHVKLNRHCNHYLKYAFVMAAHHACGHVNYHKKYEHDVKKHGKTIAKLNLARRMTKTVYWMLTRQQLYKK

SEQ ID NO: 310138 - protein, 373 aa, unidentified
MRRENLIYCGIDWAEKTHDVALVDDTGQLLAKRHITDDASGYKILVDLLAEYGDTEENPIPVAIETSRGLLVAVLRTGKRQVFAINPMAAARYRDRHSVSRKKSDPGDALVLANILRTDMHAHRPLPNDSDLAQAFAVLARAQQDATWNRQQIANQLRSLLREYYPSALAAADGWKNGLCRPEVREVLRSAPPPTRAARLTRTQLQAALKRAGRQRGVEAEAERLRDVFRADWAHQPLPVENALGKQMLALLIQLEAACTAADDLAEAVEEAFPQHPDAETILSFPGLGVQLGARVLAEIGDDRNRFADARGLKAYAGSSPITRASGKKSSITHRWVKNDRLNHVGCLWAFSAITASPGAKAHYRHRRDEHSD

SEQ ID NO: 310139 - protein, 346 aa, unidentified
MASYVGLDVSLRSTSVHVVDRDGKCLWRGKCATDPSVLVETLRRHAPEVARVGLETGFLSTWLCHALAEAGLPVACMDARQAKAVLQVRPNKTDANDAEGLAQLLRSGFYREVRVKSWDGMLLRNLVAARRQLVRTEVDLANQIRGILRTFGLALPPGGGGGGRFEAAVRERAPMRPGLDLVVLPLLDAWRAVRDRVVVLTSAVVAAARRDRRCRLLMTAPGVGAITALTYVGTVEDPVLFRGARTVGAWLGLTPTRYQSGDTDVSGRISRCGDPLLRTYLYEAANQVLTRSRSDSALRRWGLMLKARNGHKKAVVAVARKLAVILHAMWSRGEAFRAEPPGAVAA

SEQ ID NO: 310140 - protein, 377 aa, unidentified
MTKPKTKTVNDFSRCLDPLDMDATVIAVIEMSQSSWLVAGIVPGVERQPLKKLAISEHGLLNLLNRWRAEAEKQGHRITRIAVAFEAGHDGFWLARWLAARGVEAHVIHASSVAVTREHRRAKTDRLDTELLKRGFLGWLRGERGHCKMVAVPTLAEEDAKRPSRDRETLVGEASRIITRVKSAFVRLGIRGFNPKLKAAATRLETLRTPEGEPIPPNTLAALKRDLERHRIVKQQIREIEQTRLDVLKQAPEKGPHAMVLLLARVIGVGVETADMLVREVLSRTMRDRRAVGRYAGLTGSPDESGAKRRDKGLARSGNARVRHGMIQLAWRFLLFQKDSALAQWYRQRTADVPPPDRGNPLMFSSQVMASLPSARA

SEQ ID NO: 310141 - protein, 418 aa, unidentified
MNEEGHTRGTRRYVALDIHKHYCVIAAVEWEGRIVLPAVRVEHADLEGWLKKNLRPSDHVVFESTTNAWHVYDLLEQVVERVVVANPIKVKQIATARVKTDVRDTLILARLLAANLVPDVWVPPAHVREMRQLLSQRRQLVETHTQIVNRMHSVAHRHHLKHERGKRFNEKNTLWQRDKQLSKTEQFQLELEMENRGYIEKQIGRIGKEVAKMSHQKPWAESMTYLMQLPGFGVITAMTVLAAIGDIQRFGSAKHLASYSGLTGGVDQSGTHLVQKGITKEGRKELRWAMVEVAQRAVKSDPRWTRKFQEMEKRMHRNQAIVAIARQLLELVWYVLTRRQAYRHFSQERIAYKYLTWAWQMDEAARDGLTRQQFARYYLMRLGIGHDLTRIALDPKHPRKISSEAELLALRPDLNHIE

SEQ ID NO: 310142 - protein, 424 aa, unidentified
MNRTQNEKILQIKNETLIVGIDIGKDTHYARAFDFRGIELSKLLRFSNTSQGYESLENWMQEIMKEKGKAEAIVGFEPTGHYWFTLGDHLQRKRHRLGIVNPFHVKCTRELDDNSQTKNDKKDPKTIAMLVKDGRFREVYIPEDVYQELREAVSERERLVEQMISLSNQVIRWIDIRFPEFSKVFKKWSGLAALLTLKNFPTPAKVVTAGASGIVSVWGKEMKKASYKKAERLFRLASESIGRTAGSEAAEASLQNLLKQYEMVLQQIQEIEKLMQELLLKVPNASKLVDIKGIGMVTAAVIVSEIGGISRFKDPRQIQKMAGLSLRENSSGKHKGKTTISKRGRKRLREGLFKAIITMLATNHEFRMLHQRNLNREKNPLNKMDSVIALCGKLIRVIFAILTKGNDYDAKKMIEDMSKSMKAA

SEQ ID NO: 310143 - protein, 313 aa, unidentified
MANVGIDVSKDHLDWTADTEAPVQRVANRPAGVRRLVRRLSGFEVARVVVEATGGYERLLVEGLAEAALPVVVVNPWRVRRFGEGLGLLAKTDPIDARLLALFGERARPPVRPILHGADRRRTEWLSRRRQLVQMLVAEKNRLGVAPKALRREVASLIRILERRIERIEHKLDALLEADPERRETSAILQSVPSIGPGVARTLLVDLPELGQLNPKQLAALVGLAPFARDSGRKKGHRYIRAGRAAPRSALYVAAMNAVRFNPVLRRFYERLRAAGKPPKLALVAVARKLLTIVNAMVRDRTYWRESPIAARS

SEQ ID NO: 310144 - protein, 413 aa, unidentified
MQVEYARCCGIDVHKETVVACLIVPDAQGHPVKETRTFSAMTGDLQALGRWLAEQGCTHVVMESTGVYWKPVYNLLERQFALLVVNPTSIKKLRGPKTDVADAEWLADLLRHGLVRGSFIPSAEQRALRDLTRYRTQLLDERTREVNRVQKVLEDANIKLASVATDIMGVSGRAILQELLEGEGEPALLAELAKGRLRNKRALLEQALTGKVQAHHRFLLVQHLSHIDYLDEQIAQLDSEVAERMRPFEAALASWEQLPGIRQRNAQVIVAELGADLQQFPDAEHCASWAAICPGTNESAGKRHSGKTAKGNRWLKRALTEAAHGAARTKKSYYAALYHRLAGRRGKKRAIIAVAHSLLVTGYHLVTQGVDYQDLGRDYFDKRNQETIKRRAVKRLEQLGYQVDLTPVPALAG

SEQ ID NO: 310145 - protein, 333 aa, unidentified
MPRANSNLLDWDFMKSATTNEKIFVGVDVSKAALDVYRPDTKEGFKIDNSDEAIALLCSQLKKMKRNVMVVMEGTGGYEYLLLKHLAAHKLEAAVINPRRVRDFAKGIGLDAKTDPIDARVISKYAEVVVPQPMVTKSDHELKHVALVARRNQLLELVNQENNRLKQSWDDDAKQSIRDVLEILKKQLKNIDLQLAKMIQADTENQRAIEVLQSVMGVGPVMISTVLAELPELGKLNRGEIAKLVGVAPINRDSGKKSGKRFIGGGRGQVRRVLYMATIVAIRHNPAIKAFYAHLKSKGKESKVAIVACMRKFITILNLLIKTDQLWEDKMSV

SEQ ID NO: 310146 - protein, 356 aa, unidentified
MTTAERQRIMFIGVDVHKDTHTAVGVSPFGEKLFEITVGNYKKDFEVLTKKVEETRGTLSPYFGLEDCHGYGERLAGYLVEGYPVIHVPSIMVDRARQNATHPEKSDSLDALGVAKVMMQSIDTLPVYTLTEESQRAKQLKEISMDREYLVEERTRLKNHLHSILHRIWNTEYKEKFKDPFSLKALAYWKRAKPVCDPFLLRAMKRKVCRLVDIHYDVGELEREMTALLKSGGYTIQTASGCGVVIASAIIGEIGDIARFHSPAALAKYAGCAPRECSSGKSQRHRKTRAGNRRLNCAFHRMALSQISRMGNDKAKLYFKRKISEGKSKSQALVCLRRQMVNIVWMMLKHKTVYQP

SEQ ID NO: 310147 - protein, 351 aa, unidentified
MRTSQKTPATISTIGIDVGKNTFHLVGLDKRGAIVLQQKVTRHQLGRRVSNIPRCLIGMEACSGTHFIARQITALGHDVRLIPAQYVKPFLKGHKNDYRDAEAIAEAVQRPTMHFVSIKTPEQMDLLALHRVRSRLVRQRTGVANQIRGFLLERGITVRQGLMPLRKALPEILSSKSDVLSPRMINLIGDLSQDWRRLDERIARVSTEIEALAKQDESCQGLMSIPGVGPIISSAVVAAIGNGAGFKQGRDFAAWLGLIPKQESTGDRTILGKMSKRGNKYVRTLFVQAAHVVLERRPRTARQGLWPWIEQASKRLHRNMLAIALANKLARIAWAVLARGHSYQPRIISNA

SEQ ID NO: 310148 - protein, 387 aa, unidentified
MIYVGIDVASDKHNVCIIDAKETVLSEFVIANSRSGFELLLAAISGFDKVSIGLEATGIYGDNLVSFLHAHSFNTITINPLSAKRLLNAKSLRKTKTDKMDAFGIAGLLIQEFQNPDTPVSYHISELKSLTRLRYQLVTDRSKQKIRAKRLITLLFPEFKGFFFKTFCSTAMAVLRRYPSAADLSKCRINTLTDILYSASRGRYGQEKAEQMKAVAKSSIGIYSKANIIALKSCLELIDFYNQQIKEVEKEIKTLMDEIDTPITSVPGISTTLGAVIISEIGEISRFSSANKLLAFAGLDPSVYQSGKFKPTTGTMVKHGSPYLRNAIVQAAKQVSRFNDTFAAFLSKKIFEGKHYNVAISHVAKKLIRVLFHLLVNNQSFSNLLLT

SEQ ID NO: 310149 - protein, 341 aa, unidentified
MMIIGCDFHPRFQQIAFVDQETGEYGERRLSHPEEAERFYRELAGRPVRIGAEATGNFRWFRHLLDEQGHEFLLGDATTIRAACPRRQKTDKRDARHILNMLVEDRFPVVWQLSVENDHVRQLLLHRCRLVRMRTRIKNQLDSIAKNEGLLSSRVWSPKRRGEIEALPLPGWYAHRRADLLGLLDELDKRIRPLDEAVREAAEDNQEARLLMTHPGVGPIVSLAYVLTIGDWRRFPRGKQVGSYLGLIPEEESSGSTRRLGQVSKQGSVLVRWLLVEAAVHAQRHDASWHRQYLRLSMTKHHGVAKVAIAHKLAVRLYWMLRSGEDYSKVMERGSHAGQSV

SEQ ID NO: 310150 - protein, 446 aa, unidentified
MEVVFPYCAGLDVHKKRVTACRLVSDSTGQVPEGVAELQTFGTMTHELLALADWLVEAGVTHVAMESTGEYWKPVYNLLEGIVTIFLVNASHVKNVPGRKTDPADARWLAKLMRYGLLQASFIPPIAQRDLRDLTRYRTKLVQERAREVNRVQGVLERANIKLASVASDVLGVSGRAMLEALITGQADPATMAALAKRRMRSKIPALEQALTGTVRDHHRRLLAMQLRHIDFLDEQIAALNSAIAQCVTTLSQEAPVSPAPLAPTTRDVPTPADPPPPLTFTRAVELLDTIPGVNQRGAEMIIAEIGIDMTRFGTAARLAAWSGVAPGNDESAGKQRSGKTRKGNQVLRAGLTQLAHGAVRTKGTYVSALYRRLAARRGKRRAILAVAHSIMGSVFHMLSRNEPYRELGPNYFDERRRHYTVDRLTSRIEHLGYRVHLEPLPTAAA

SEQ ID NO: 310151 - protein, 459 aa, unidentified
MRTIGIDLALKSDHRAVVMDEQGNFITPVLKVSTRADDLERLLAQARAGAPNCELAAVLEPTGMAWFPVAVYLIRQGVTVYLVNSQQVADLRRYYRHHAKSDRIDARVLAKLPLHSPETLHPLQLNGAAALACQRGCTQADRWATQITAIKTRFKALVRFAWPGLETVFPDLYGVQARWFAEHWFDPRGVLQAGPAQLQQEWLKSSLKPDDSGDWIPALVALAQQVIALYGPHPTYLDFELLQAEVQRELSLLAYLEEQLHDLRRQTIYPLYHQIQPYRRLETINGVGQDSAAVYASFIGAAQRFDSARLFRSWSGMIPNSKESAGVESKGLHINRAGPRLVKKFAFLDAEIARQWDPQIAAIYYDQMVNKGKHHNQAVCACATHLLDRVLVVLKDRRPYELRDVDGAPVTVEQARTIITEKYKVPEEVRRRKTKRFRQAHRDQQAEKKQKREAARTQG

SEQ ID NO: 310152 - protein, 371 aa, unidentified
MQYTTVYVGMDVHKESFSLCCYTNEKETAEHSQRVEAHYSKVLGYLEAMRFHYGQDACFICGYEAGCLGFTLYHQLAKHHVQCVILAPTTMLVSQSRKRIKTDKRDASIIARCLAHHDYSPVHVPTAEDEEIKEFIRMRDDHKLALKKVKQQILAFCLRHGHSFDGNHWTQAHVAWLHALKLKGLYAEILTEYLLTYSKLADKLERLDKRIGELASGERYAENVHKLSCFLGIRAQTALSVLTETGDFKRFASAPQYACFLGLVPGEDSSGDSQTRLGITKAGNRHIRTLLIEAAQSYTRGKAGYKSKGIKARQEGNPPEVIAYADRANERLRRKYYHLVLGKNKRSNVAKTAIARELACFIWGMMTGNIA

SEQ ID NO: 310153 - protein, 342 aa, unidentified
MNNRTVISADIAKNVFQCVQFKNDRQVGKNKTYKRDNFAKLITSNRPGKLVMETCSGAQHWARMAKAHGHEVVLIPPRVVTPYRQGQKTDANDAQAIYEASQRKHLKASPHKTVEQQALGVLESVRAHYQSRKNKLSNAIRGHLAEFGLIIPKGYKSLRTQLPLILEDAENGLPMSVRMAINIYWQDWQLAHQKVMELEKEKLVELNQIPSAKEILKIEGIGPVCASGLICTLGDGRVFQRGKEAAAFIGTSPKQHSSGGKEIMVGISKTTGHKKLRSALIQGARSVILKLKAKKEPSSEKERWLAQLIERQGENRAAVALANKNVRTAWALLVHNREYIAA

SEQ ID NO: 310154 - protein, 341 aa, unidentified
MDHYAGIDVSLEQSSVCVVDGSGNIVREAKVASEPGALIEWFRSLGSRVVRIGLEAGPLSQWLFSAMKEAGLAVELLETRHVRNAFKTMPVKTDRKDARGIAELMRLGWFRPVHCKSMEAQETRAMLTARDVLKQKLRDIEMTLRGTLRGFGLKIGETTPVRFGARVKDLVAGHSTLETIAASLLAAHTVLLREFKAIEKRVLSMARHSSRARLLMSTPGVGAVISLTFVSAIDDPKRFKSSKNVGAHYGMTPKKYQSGETDITGRISKAGDKRVRRALYQAAHIILTKPVKGSGLKSWAMQLAKRVGMQKAKVALARKLAVIMHRMLVDEKKFEFAAKAA

SEQ ID NO: 310155 - protein, 424 aa, unidentified
MDVIYDRVAGLDVHKETVVATVRVMVGRKAERECRTFETTTAGLSALLAWLTETRCSHVAMEATGVYWKPVWNILSDGAFELIVANAAHIKNVPGRKTDVNDATWIADLLACGLIRGSFVPSETFQELRALQRTRKQLTREQTRHVQRLQKTLEEANIKLDSVISDIMGLSGRRMIEAIIAGVRSPRKLADLADRRIKASPKELYDALHGRVTDHHRFRLRLHLGQYDALAEAIAALDKEIDAAIGRIDGEREFAGQVPFRAASREVCQIPGINLLAANMILAETGLDMGRFRTAGHLVAWAGLCPGQNESAGKRKSSKLRKGAPWLKTTLVQCAVSASNKKDSYFRAQFQRLKSRRGAPKAFCAVAASLLTTIYHMLKDGTQFRDLGKDHFDKRPTKAKVNRLLAQLAKLGYQADVRLLANAP

SEQ ID NO: 310156 - protein, 358 aa, unidentified
MTVNYVIGVDVHKHNHTFVAVDCTGRKVATKSVQATTAGHQMALRWARTTCPESRLWGVEDLRGLSCRLEAELLDAGESVVRVPPKLTARQRASARTVGKSDAIDALAVARAVLREPDLPTARHDAYSRDMKLLVDYRDTLLTTRTAITNRVLGRLHELAPDHSSTRLVLCYANHRRAAQVLLQSHTGLLAELIRADLTQIATASDHVNSLEKRIKDAVQCGASALVGIDGCGPLMAAKIIGETADVSRFTNEAKYACYAGVAPIPHWSGGTPVHIRATRSGNRQLNRALHTIAMIQIRHGGRGEHYYRRRIADGDTHRQALRCLKRQLCRTVYRALITDTKARATAASVERGDNLVE

SEQ ID NO: 310157 - protein, 342 aa, unidentified
MAAAAIGVDTHKDTLAACLVDQLGLAREERAFGNEPAGHAAFAAWVTGLAEPDVRIGVEGSASYGAVLARHLVAAGLDVVEVPPQLSRRERGRTRRPGKSDPGDAFAIARVTLAEADLPPVRLADRTRDLQLLAEARATAVVAQTRARNRLHAHLRVLVAGYSATVAHLVTGRELAQVRRLLRGHHGIEADLARAELAEVVRLGRRADALERQIRPLLGDDPLLAIPGCGLLSAAVIRGEAGDVARFPSHDALAMFAGVAPLPASSGKTSRVRYNRRGNRRVNRAIWTIAVWQAKFDPRARAYLARKKAEGKRSKEALRCLKRHLVRHVFAALVAGQLPAAI

SEQ ID NO: 310158 - protein, 288 aa, unidentified
MEERTKFHVGLDVHKDSISVAAAEPGRAPGRLIGKVTHDVAKLLKVLAKIGTPEQLHLVYEAGPTGFGLQRALVAKGYRCEIIAPSQIPRRPGDRVKTDGRDCLQLAECSRAGQLSAVWIPDPGDEAIRDLSRAREDAVNSRVQARHQLKGFLLRHDIRYTGKTSWSLAYYRWLSTLNFDAGATQSAFTEYWHAVEAADERVERLTKALQSSITGWRFEPVVGALQALRGVASITAIGLVAEIGDFARFSHPRKLMGYSVWFPRSTRAASERGAAASPRRATRTHAGC

SEQ ID NO: 310159 - protein, 370 aa, unidentified
MLDTTTFVGLDVHARSIKAVSLDVMTGEVRCATFGYDAGAVAEWVRSVDPKAKCVYESGVTGFDLQKRLSGLGVDCVVGAVSKMIKPSADRRRKNDRNDAEFLARMLSVGNVVEVWVPDDECEAARDLTRALEDARDDLSRSKQRLSKFLLRHGLVFDERTPTGRRKGNWTRAHWSWIESIRFAEGADNDVLAYYVDAVRRAAEEKARLEGLVEAEARKPRWRRRVDSLRCLKGVDTATAADLVFEAGEFSRFRNARSFAAWVGLTPSEHSSGESDRRGAITKAGNKHLRKALVEAAWHYLTCSGRPKDLAKGQAPDRVARRHAAKGVRRLVERREALLARGVHNNKANVATARELACWVWAVGLMAEEA

SEQ ID NO: 310160 - protein, 346 aa, unidentified
MEHYVGLDVSLKLTAICIVDRTGKIEREGVVTSDPETIAAFVKSHAPHVARIGLEAGATSTWLWTELNKMGLPVICIDARHAKAALKMQINKSDRNDAVGIARIMQCGWYKEVRVKDLDSHAIKALLVSRALLVKIKRDIENQIRGLLKNLGLVIGRAKMNVFAVRAAELADARPAVAAAVEPLLKARDAVGRQIADLDRKVLRLARNNAQVRRFITVPGVGPITALCFLATIDDPTRFKRSRSVGAYAGLTTRRYASGEIDWTGRISKCGDKMLRTYLYEAANVLLTRIEKWSALKAWGIRLAKRSGLRKAKVAVARKLAVILHRMWIERTEFKWSSKEAANQPA

SEQ ID NO: 310161 - protein, 337 aa, unidentified
MLSIGLDVHWKTTSVCILDHNGKIVKDKKVRGHWDQLIAFLDRELDQPCQIVFEASCGYGVLYDALMQLKHVRRVLMAHPGQLRLIFRSKRKNDRVDARKLAKLLYLDEVPTAYVPPVQTRQWREIIEYRQGVVAKVTRAKNELRALLRMQGIVAPKSLWSRKGLAWLAAVDMPGMRDLKRKILLDELALQMAHVKQVTKTLDAIAEKHPSVVLLRTIPGIGPRTAEAVVAYVGDPHRFRRTDSIGAYFGLVPCQDASAGSNRLVRITREGPATVRKLLVEGAWQVIRRSPRMKARFARLCQDRKDRRKKALVGVARHLACCMLSMLQTGEVWREAA

SEQ ID NO: 310162 - protein, 276 aa, unidentified
MSQNTMTTIYAGLDIAKLNLQLHLAGRIHDLPNTAAGHRRLLKLLAVQPGVQVVCEATGGYEREVVAALHEAKVPVSVLNPARVRHFARATGQRAKTDDIDAALLTAYGQALHPKPTAPRTEQEQQLAELVRRRVQVLETLVAQRQQAQRLTLPVLRRQAQSLVRRLERDVEQIEAQLKELRTQATLLDERVQKLEAITGVGTITALGVLAELPELSTLNRRQAAALAGLAPHPRQSGQWHGRRSIGGGRARGRTCASNCWRRTGNSTSSSKARSG

SEQ ID NO: 310163 - protein, 451 aa, unidentified
MAIDPCLDDLRGVAPERAWYHRDRVIGTCPQGASNVDASGVPRRPEHTLLQTGVVMESPVYLGVDIGKSGHYAVAVDAAGKPIHQTSVSNDELALRRLVDWAKAHQATVVVDQPGGAAGLLLKLCWQVDVRIGYLHGLAMARAREFYAGKSKTDPKDAFVLADVARAHPNRVVWLEPNSEALAHLELLCGYDADLRSDANRLTNRLRALLVTHWPALERALGERLDTRGVLAVLQHYPSGPALKDAGVDQLVAALKAQRVHRAEAFAKHLHQAALAQTVTISGSATAAGLISELAVQLAAILARRVELEKEIEQGFFALPEAPILRSLPGIGPRLGARIAVELGSISRFRTPGHLAAYAGLGPTPWKSGTSINANRPSRCGNHRLKNALFLAAFASLRHEPSRSYYDRKRAQGKRHNQAVLCLARRRVDVLHAMLSRGVPYRSPVPLAAAA

SEQ ID NO: 310164 - protein, 360 aa, unidentified
MSEEVRHTSEPEFAALVAIDWADKKHVWRLEVIGTGQRERGELEHTPEAIEAWASHLAERFSGRAIAVGLEQSRGSLLYTLTKYAHLVLYPIHPTTLARFRAALFPSGAKDDPMDADLLLELLLHHRGFLRPLQPDTLETRRLQLLVEQRRQLVNEKTRQTNRLTARLKMYYPQILQWFEEVDSPMVSALLLRWPTLQKLQRARPDTLRKFFHQHNCRGTQRIEQRLEQIGQAIPATHDAAVVETCVVAVQLLARLIATLRRGIAELDRRIEKVAASHPDFALFDSLPGAGKVMAPRLIVAFGTQRERYSSAKEIHAYSGIAPVLERSGKSTWTHFRWTCPKFLRQTFHEWAGHSLSKSH

SEQ ID NO: 310165 - protein, 423 aa, unidentified
MKPRSDPRFTAHVGIDWADAKHDVCLQAADSEQREFDRFAHQVGSIDQWAKSLHQRFGGPIAVALELAKGPIVYALQKYDFFVLFPINPATLAKYREAFKPSGAKDDPTDAELALDLLLRHPHRFPPLKPQSVAMRTLLSLIEQRRELVDDKTRVTNRLCNALKQYYPQALDWFEQRDTILFCDFLTRWPTLSAVKRARKAGLKAFFYAHNGRRPKLIDDRIDSIRAATPLTDDMGVIAPYRLQVLVLVEQLRVTLQAIDRFDRQIAAVAATLPDYALFSPLPGAGPHLAPRLLAAFGEQRERFMSADELQKYSGIAPVTERSGKKRWVHWRWQCPTFVRQTFVEWAGQTINKSFWAGVYYRQQRDKGSSHQAAVRSLAFKWIRILYRCWQAGTPYDESTYLNALRQRGSPLLKHLHPTAQNA

SEQ ID NO: 310166 - protein, 419 aa, unidentified
MDETFDLFVGVDWGGSQHQVCVLDRSGKIKGQRSFAHSGQALADMCTWLLSFCHDIGGVAAVAIEVPYGPVVETLLDRGFAVFFIHPKQLDRFRDRFSASGAKDDRRDARVAGEAVRTDRVHLRRLDVRDPMTICLGEWRRILAEVTDESVVLTNRLRSQLWRYYPAFLEVASDLSAAWVIALWALIPTPAAAANVTLIAVAELFKNYPVRRTNAETALAKLRQPAPIVAPGTVEAAESHCRLLFERLRLVLAQQKEAQRVIDELLAQWDCAHCADCDKLTAPDASPHLGDAQILRSFPGIGRVVLASILCDASDLVKNRDYHGLRLRAGTAPVTRQSGKTKHVVRRRACSRPLRDAIYHWARITCINGGISAARYRSLREAGHSHGRALRTIGDRLLAVACAMLRSGTLFDPQRVKQV

SEQ ID NO: 310167 - protein, 388 aa, unidentified
MHVYVGVDIAKELHYAAIVDSDGVVTKPFSFENNDKGFNLLLSHLAPYNKEAILIGYESTAHYQENLAFFLKSLGYRTAEINPLQTAALRKANIRNTKTDSVDARLICLALMNHNIQGDQRDSARLDDLYQLCKMRMDILKKRTTCKIQLVATMDRIFPELAPFFDNNLHTNTIYRLIESYPLPSQIKKTRIDILTKLLHKASKGHFKKEKAQKLKNLADISVGIPSDIFAFQAQQLVHQIEFYTDQIQTIEERINTNPDVMSSPLMTIPGIGTFCVACILSAIKNINDFDAPCKILAYAGLDPVIRQSGKFNASHTRMSKRGNSLLRYALVWSAGNVVKNNHTFAEYYRHKTEDQGKSHYQALGHCAKKLVKSIYHMLKCNESFNLD

SEQ ID NO: 310168 - protein, 359 aa, unidentified
MRERRNEISFKGQKIYVGIDVHLKSWSVTVLSETSVLKKFSQHPSPEALHGFLTRSYPGAEYHSVYEAGFCGFWIHERLTALGIDNIVVNPADVPTTSGEKLRKSDAVDSGKLARSLRANELKGIYTPDSVSLETRSLIRLKNSITKDTTRQKNRIKSQLRYLGIEIPQEFLEPFSNWSKRFFAWLKEVETLTPSGRQALDIQIRHLEELRRQKLEMARALRVLAKTDRFREPLRLIMSVPGFGQATGMAFLSEICDIARFRNAEQLAAYIGMIPMCHSSGEKDGTGDITVRKHAIMRCNLIEAAWVAVRQDPAMNLFYTEQCKRMPKSKAIVKVARKLVNRLYFVLKHQTEYVNCVVS

SEQ ID NO: 310169 - protein, 397 aa, unidentified
MIAVGIDVSKSKSTVAILNGDGSIRAKPFDVHHVADELQALVDYIKRTSEPPTILMEPTSHYHYPLLKAFTEAELPVCLINPYQMKKYGDTELRKAKTDKRDSLRIAQYALEKSYSLIPYTPQDQKYEDLRFLSRQYSQRISTLTVAKVQLLSLLDETMPGITTILPLKSRDPDNCVLLRFIKRFKSFDVIRKMGKTRFLDSYQVLVKKTKDRFAGSKGLAIYELILNSVTTRGENPLSAMTQDQCVDLVSTSQKAADEINLQMRIIAETMPEYKVLRSMAGVGDRLGPIILGEIGDIRRFHSGKALNAYAGNDAPPYQSGQFESRNRHISKRGNPALRKACFEVMQALKLTKPQDDPVYLFLLKKEQEGKPYNVAKMAAVNKFLRIYYARAMELYK

SEQ ID NO: 310170 - protein, 487 aa, unidentified
MRSFTMKKRNIFQNQSQEILSLFETVENRSKMMCVPIDYAKKDHTVMFCNGNGEIIRKPFSVKNSLKGKNYLVEQVTKSCRHHGINLQYAFFGGEDCGSFADNFITALRSDDWIVAGVNPCDAKRYRENMQASTDRLDLLGICKMLLSCRGNCSPAQSGIYLNLRTLVRQRRKLVKMTTGVKNRIHTIVDRVFPGFLNEKKSGLWPFSKCSLLLMKDRFSAHQIRRRRRSTLVKLFTSQAIHQPDRCAEKLQQYATQVLTPPENHIATLQLSLKQQVKLFICLQENIEQTEKEIAEHLAQTQGAFLTSIRGIGIVLASGVSAEVGNPDKQKSINNLVSYAGIIPRIKQTGGIQGKTQIKKMGKRCNHILKDYVVQSASHIGLCGPEDLMSDYKRRDAQGQHADFGISRRYLRMAMCLMRTYQIYLPKRLRGAKIPMKERAQYYLTTWPKLHEKWRNASALDIAFDKEMPLGQWRNVIQGIYGIELKL

SEQ ID NO: 310171 - protein, 377 aa, unidentified
MNGSAVLTQSALSSQHVDHVLDRTGSGQIPDRGVFIGVDTHQLTHHAAVIDPHHARLAHREFPATATGYRDLSRWAGSHGRVLGIGVESTGSYGAGLTRHLLTTMPGVEIFEVSRPERTTRAKEGKSDPIDAYSAAVQVVSRRTQARPKITTGLVEAIRVVKVPRDLAVKDRTAAYSQMRDLITTGPEHLRQELIGLTSRGRVTRALTLRPDPTRLHEPLQATKQALRALARRIRDLDAEIDEADKILTALTKQACPTVLAMPGVGTQSAAQLVITAGQNIDRMRTEAAFAKFCGTAPLPASSGKTNRHRLNRGGDRAANSALYMIIVGRMSRDPRTRAYVERRRAQGMTTPEIIRCLKRHLARNIYNTLKHDLMTP

SEQ ID NO: 310172 - protein, 349 aa, unidentified
MDKITTIGLDLAKQIIQVHAVDATGRVVLRKAVRRERLLALLAQFPRCQVGMEACSGAHHWARELIKLGHEPRIMAAEFVRPFRKSLAAKNDANDAEAVCTALRQPNMRFVALKTVEQQALLCLHRVRQGWIEERTALINRLRGLLAEFGVVLPQSATALQRALPTLIADHETRLPAHAQRCVQELADHLRTLTTRLTTLDHEIAQHARSNDAAQRLAALTGIGAITASAIVATVGNAGDYRNGRQFAAFLGIVPRQFSSGGRTKLGRITKRGDAYLRTLLIQGARSTMQAALRRPPTGRDRISAWIVQLAQRVGYHKALVAIANKHARIVWALLARGETFDRTHSAAH

SEQ ID NO: 310173 - protein, 461 aa, unidentified
MKSLFFGIDVSKGYADFCCINQAGSRIGVVSQFDDDFNGHTAVKILVEGLRSKFPDAQMIFGLENSGGFERNWAVFLKALVTPFNGKVFTLNPLAVKKFLDRDLHRNITDAISAHGIANYLRQGMRPAEFPFEDSLSGPISLYRCLRNAISRCAQMQNELQSFLPRVQPELVQFCRHRVPDWALEVLQMWPTALKLSKAKRTQLVKIPRLTEKRATELIIAAKESVASQGDSFTETTMSFLAKEIIHAQETISTLKKQLIESLAKDRGVITLMTIPGIGAFDRFPSPEGLVAFAGLDPRIKQSGDNTRHVGISRRGRRQIRAILYPLTLSAIRHNPAVKEFYSRLRAKGKKHMVSATACMRKMLHIIYGCWISGKHFDPCYEKNRQADKSQAVSPQDEQVNEPKAASPKAEKPSPRVYILKIKAPVSRREAVKRRKAATMPQTGISRRERGPGTASENNIT

SEQ ID NO: 310174 - protein, 351 aa, unidentified
MNATTVAVDLAKNVFELALANAQWKVLERARLTRGQFERWFDNRKVDLVVMEACGSAHHWARRFKARGIEVRLLPAQYVRAYVKRNKTDAADCLALLEAGRAQDIQPVAVKSVEQQALQALHRTRSGWMSTRTRRINTLRGFCREFGLVVPEGAATGLAQIARYLADERSGLPAMLRPSMRLVLEEIRLMEARIGQLEQTLSALAKESPACQMLLSVPGIGLLTSTAMVAAVADPRSFPSGRRYSSFLGLTPREYSSGNTRHLGRISKRGDRYIRMLLTHGARSILRAATVARRAGRQIDRLKTWALAVQARTNHNKAACALANKLARIAWAVWVKHERYRAEPAPATPSL

SEQ ID NO: 310175 - protein, 373 aa, unidentified
MPRYSTAFGMDVHLRSTTVCALDAETGEAVTRRFRGNPWGEVAEWMSGFPGPSLAAYESGYLGFAPQRELSGLGVDCVVAAVSRVPRSAADLSSKNDRNDAARMAKAILSHDVTPVWVPSPEIEGLRDLAGAHDAATARLAAAKQRLLAFLARRGYAYGGTTPAGNPRKYWTYGFLRWLDGIHPADDGGIRALAALRNEVEAADETREALLAEYRAAVAAGPLSAEVEALQSIKGCGFALAAAFASEVGDFSRFRSGRQVTAYFGLAPKQRSSADSVRLGGISGAGNALVRKLAVEGSWCYAQAGHQPKLMPKGSGVPLEIRMHGRKGSERLLRRREEMLERGMPQAKANAATAAELVRWLWALGTMCREAGE

SEQ ID NO: 310176 - protein, 357 aa, unidentified
MAIVAHTHPFVIGVDTHARNHALSILAAPNGEVIDDAQFPATTAGLARAVAWAARRTGGDLDALWVIEGIGTYGARLARAAADAGYLVVEAARINARANRGVGKSDPLDARRIAQAVLPLDVSMLRQPRADDGVRAAVRVLIASRDHMSAERTATVNALTALLRVIDLGIDARRPLTNGQITTIAAWRSRKEDLATATARDEATRLAKRVAALEEDLKVNSKRVTELVHQSPARGLLEQPGIGPVTAAVALTAWSHPGRVRSEAAFASLAGVNPIPASSGNTVRHRINRGGDRRLNRALHMAVVTRMRMDPRTRAYVDRRTTEGRTLREIRRCLKRYLARQIYRHLNAAAQSAPSTP

SEQ ID NO: 310177 - protein, 388 aa, unidentified
MIKYSLGIDVSMKILHACLSVIDVQQQVKIKATRKFANNASGFKELQHWIQKHYKQQDIPLHIIMEATGVYYEQCAMYLYKNGFTVIVVLPNKAKKYLQAKGLKSKNDKIDSKGLAQMGAEQKLDPWQPMDDFYYTLRSIIRHHESLQNLKTNLNNQLHAEHAGVYINKQVDKQLNKLIATIEKQIAEIEKSIEDHIASDITVQQKINGIIKIKGVGLMTVVTLLAETNGFLLFKNTSQLVSFAGYDVIENQSGKHKGKTRISKKGNRHIRRILHMPAFNVVRYQVSPFEQLFNRTIQKHNIKMKSYVAVQKKLLVIIYSLWKNNKAFDENYYKEHTTRDEELMQSSRLSFAEADQSIQKNSPEINQGYTRYTTVEVSPLASSRLLQK

SEQ ID NO: 310178 - protein, 364 aa, unidentified
MQYIAFDSHKRYTLASVEELNSRKVFETRIEHERGSVRDFLNQCESGSPVAVETIGNWYWIIDEIEEAGMVPKLVHSRKAKLMLAMVNKTDKLDARGLNRLQRTGTLPTVWIPPGELRDQRELFRTRMVLSQQRTRLKNRIHATLSKYGLSVETASDAFGKRGREELLIHFRILPSHTQYAAQRLLEQLDVIEEQIYQFEKRMREVFNSTGDLKIIRSLPGIGFILGVVILSEVGDIGRFPSAEHFASYAGTTPRVHASGGKIRYGQMRSDVNRYLKWAFIEAANTICLNRRRNPYRHVSKLYERIRNRRGHQKAIGAVARHLAEATYWILKKVEPYKEPHIRYSFRPREDKREITLSSMKLGT

SEQ ID NO: 310179 - protein, 411 aa, unidentified
MDVLVERCCGLDVHKTSVVACLLVSRPQGEPVRAVRTFGTMTEDLLALADWLAGAGCTHVAMESTGVYWKPIWNLLEDGFDLLLANPRRIKAVPGRKTDVTDAEWIADLLRHGLLQGSFVPDRPQRELRELTRYRASLVRERTAEANRPQKTLEGANIKLASVATDVLGKSGREILRALVAGSEDAAALAQLAQGRLREKLPELERALAGRIAPHQRFLLAQQLAHVDFLDAAIARVSAEVAACLEPAAEAVERLDPIPGIGRYVAEALIAEIGTDMRRFPTAGHLASWAGMCPGNHERAGKRRSGRTRKGSPWLRALLVQAAHAGARTKGTSLQAHDRRLAARRGKSRAAVAVGHTILVIADHLLAEGTTDRDLGPNSFDERDRRHVEHRLIRRLEGLGYEAKLTPLAAD

SEQ ID NO: 310180 - protein, 310 aa, unidentified
MDAIYVGIDVSKDRLDVHLHPSGEAFAVARDGKGLEELVARLQTCSPTLVAVEATGGFETIVAAALAGAQLPLVVVNPAQIRHFAQAVGQRAKTDPIDAAIIARFVEAVKPTPRAMPDQEARLLAELVSRRRQIIEMIVAERQREKRAENVRVRKSLARHIKVLEKELLEIDNDIDTLVRGSPIWRAKEELLVSFPGVSNTLARTFLAEVPELGTLNRRQIASLAGLAPFTRQSGRWKGKSMIGGGRAALRAGLYMAALSASRYHPQLKVFYRRLLAAGKPKMVALIAVARKVLTILNAMLRDQKLWQPA

SEQ ID NO: 310181 - protein, 318 aa, unidentified
MNSPSMTVGIDVSKQRLDFARFPQGDTFSVAYTDNGLAKLLKRLRGWSPHIILLEASGGYEYGVVAALVAASLTPVLINPRQVRDFARALGILAKTDKIDARVLAEFAFRVQPEPRPLPAAQQQELNHLLSRRRQLLEMIQMECNRREVSPFLRVRQSIDHNLDSLRRQLTDLEREIDDFFNQSPLWVQQDALLRTVPGIGPQTVLSLQAWLPELGALNRHQIAALVGLAPFNRDSGVLRGRRMIRGGRHKVRQALYMATLSAVRYNPVIKALFERLAGQSGKPGKVALVACMRKLLTILNAMVKNQTTWRPMIPLTS

SEQ ID NO: 310182 - protein, 346 aa, unidentified
MEQYVGLDVSLKMTAICIVDRTGKIKREGVVASDPEAIAAFVRLHAPHVARIGLETGATSTWLWTELNKMELPVICIDARHAKAALKMQINKSDRNDAVGIARIMQCGWYKEVRVKGLDSHAIKALLVSRALLVKIKRDLENQIRGLLKNLGLVIGRAKMNVFLMRAVELTEARPELAAAVEPLLKAREAVEKQIADLDRKVMQLARNDVQVRRFMTAPGIGPITALCYLAIIDDPTRFKRSRSVGAYVGLTSRRYASGEVDWTGRISKCGDAMLRSYLYEAAGVLLTRVAKWSVLKAWGMRVAKRSGLRKAKVAVARKLAVILHRMWVDGTEFKWSSKEVATQPA

SEQ ID NO: 310183 - protein, 361 aa, unidentified
MKRKVYVGMDVHKETIQIASLTSNTKDLVKEQQIKHEEVQIKKFIQKLKLEKSEIHCCYEAGVTGYPLYRYLKTLGVNCTIVAPGKIPRQSSDKIKTDKRDAIKLARLLRSGELESIHVPSEEDEAVRDYLRSRDSLRLDLGRNRQRLMKFLLRKGIKYSTTKYWTTSHYKWLNNLHFENEILQTTFNDYYSRVRVQEENLKAMDKKIQEIAESEPYREKVGILRCFRGLTAMFLLSEVNDFKRFKTAGSFMSFLGLVPGEYSSGSKRKQTGITKTGSPRLRRILTEAAWQHRFSGTGSKVVVARRVGQSALVVSLAEKASLRLHKKFKNLQLRGKSPQVMITAVSRELSGFLWAAMNLVV

SEQ ID NO: 310184 - protein, 403 aa, unidentified
MSQLQDDFVMGIDVSSQFSVVAMLEPSGKLIRKPFRVDHSPAGFNKFLEILRKEEERLQRKPIYFVESTGIFHLPLFFFLRSNDLKGFVLNPFSVHSIKNFDLRKVKNDNKDAEAIAKLAKYQDVKLSLVPEPQILALRMMVREYFALADTLTEIKNRLCTDLYLLFPGFLNIFSDPFGKTALAVLREYPSPKAIRQADREHLTTLIAASARKGLAWASKKVEALVETSNLTHAMPAELSVLHSKIAIHLDTIFQLQNSQLAIEKQLHEMVHAEDFPADARQYIELLDDMPGVGFITAATLVTEIGDFSLFKSPKALVAFFGIDPSVNQSGKFTGDGQPINAVLREFYQKKCVNKKKKVALVAVMHELLHYMFAVLRDGRPYQVRRPEQHQTWRQDKLQLVAT

SEQ ID NO: 310185 - protein, 335 aa, unidentified
MDRQYVGIDFHRRRSVIVRLDADGNKLSTQRVGNDPLAIATAVAAAGPDPEVVVEATYGWYWVVDLLQSNGARVHLANPQGLNWGQRRVKNDERDAIDLADMLRLGRLPEAWIAPPATRQLRELVRYRAKLVQPRSGLKAQVHAVMAKEGVLPAVADMFCDAGNAQLDGMKLADAYLIRVESLRDLIAVYDREVAMLERRIHTELRGHRGYQAIQAINGVGRTIGAILVAEIGDVSRFRSAEALCSWAGLTPRHRESDVKTVRGAITKQGSTLVRWALIEAVSRYHGGPKLATDFHRIAERRGKNKARVAVARKVLTLVYYGLRDGEIRCLVEAA

SEQ ID NO: 310186 - protein, 482 aa, unidentified
MSKGSIYGERSQRVRECFLGAGGADRVLVVPVDLAKTEHVAALCRGSGEYLCRPFAVHNTPAGLDLLLERVRKACSRHGIRQGDVLVGGEDPCQYAFNFIHALRLAGHPFVRVNAREAATLRNNHRATSDALALDGIAQALVQQRGWETETQDGLYSTLKLAGRSRRALVRQQTAFKNRIHRSVEVLFPCFLREERSGISPFGPASLDLMRGDFSCVRIARMRQDTLARRLRRHRVPHAEQAAAKLKALAAGTLPPTPEAVPYEMRSLTARVRMLETLQQMAAAELEEMARCLAQTPGFVLTSIPGMGVTLAAHITAEYGSPDRWASADRMASYAGIVPRQKQTGGPGRQAVVGSLPRNANRVLKDYLIQAANHVGTTGSHRLRDHYERVMDRGGRERLGTAKMLVRILRVMVTTESVYLPPGLLRPGNATVGDLVAHYREIAAAMAVKWRAFDLAGIDPEHNRMLQWRNTIDDMARYATQH

SEQ ID NO: 310187 - protein, 326 aa, unidentified
MKKVFFVGADVSRDKIDFCFLTPVENTRPKFVSLPNDTDTIKAYFQSFIKDDIFIVFEHTNNYHVPLQSALTDLSIKHSALNPAKISHFLKHLTFQKSDVTDSYGLALYCRIFKSDLNPSAYNHEYNLIKSYNSTILLLSKIQTQLKNFKKSQDFVADTELSELIKSLTLHVQKTREKIKLIAFEILKSFVPNCEQIIKSNKGFGIDLALNLFPQLHFNRAKSEKQFISFLGLSPRIYESGLSVHKSPRINKRGSSAVRRILFLNAISCARFNDKFKQRYETLVSKGKKKKVALFAVMCAIVRYLKSLFPLNESYINESLYHTRTS

SEQ ID NO: 310188 - protein, 341 aa, unidentified
MEEYIGLDVSMKETSVSIRRAGERIWRGRCASDPRIIAELIRKRAPAVKRVVFETGPLSIWFYHSLRTEGLPAICIDARHAKAALDMATNKTDANDADGLAQLAEVGFFREVRVKGFDSMLTRTLVAARTRLVRITTELSNQIRGVMKTFGLLVPAGKGSTFEKNVRSLLTDQDGLASIVLPMLEAWRGIRIRAAELGRQLVRDARQSQACRILMSIPGIGAITATAFATAIERPDNFKKSRSVGAWIGLTTRRYQSGEVDYDGHISRRGDSHLRGLLYEAAAVILTRSSTDSTLRTWGLKLRERIGFKRAAVAVARKLAVIMHTMLKTGELFHPNAGATV

SEQ ID NO: 310189 - protein, 428 aa, unidentified
MQAVVVSERTQAVWEAVIERCCGLDVHQKTVTACILAGALNQQPSESLRTFSTTTKGLLELRDWLEEHGCSHVAIESTGIYWRPVFNILEDTVTVLLVNAYHMKQVPGRKIDLKDAQWIARLLRWGLLKPSLIPPKPIRDLRDLCRYRKKLTEQASSEKNRIQKVLEDANIKLASVVSNVFGVSGRAMLDALMQGVMSPEETADLAKRKLRSKIPQLVEALEGHVNEHHRFLIQMQMEHLEYLERAIAQLHERIDEKIKPYQHEIDLICTTPGIDTVSAQHIFAEIGGDISVFPSEGHLASWIGVCPGNNESAGKRRSGRTTKGNRWLKALLVQTAHASSRTKGTYLKAFYHRVAARRGKNRAAIAVAHKQTTIIYHELSEDKPYQELGENFFDRRNQKALEQRLVRRLRNLGYQVDLHPEPVTSQCS

SEQ ID NO: 310190 - protein, 356 aa, unidentified
MSSEVKYIGMDVHKEAIVIAVRDTRGHVVMESIVETKASSILQFIRGLQGELHVTWEEGTWAAWLYDLLKPHMHRVLVCNPRRNALLKEGSKNDKVDARKLADLLRTGMLRPVYHGEHGLRTLRELARTYQTLSQDLNRVMNRLKALYRGWGIACGGTQVYAPRYRDEWLGKIEHAGVRRRAELLYQQLDGLQALRRTLRSELLAESRKHKASKLLRQIPCIGPIRAARLVALMQTPHRFRSKRQLWTYSGLGIETHDSAQYRFVRGELQRAKKPQQIRGLNRNHNHEMKDIFKGAANRASCGVGPLRDFYVALLDKGMKPEMARLTLARKIAAIALTLWKKEERFNAEHLKTQAA

SEQ ID NO: 310191 - protein, 341 aa, unidentified
MYSIGLDVSKASLSVHVPLNSLDFEIKNTLKDLKSLYAKLKKLYKKDMDKLVFVYEPTGSYSSILTKFCALKNIKSFIINPKQSSNFAKALGYRSKSDKIDAHMLSQALSIAKEREIKVPVINATAEDIKELMSYYTFTVKQRVAVNNHHEALNSKDGNTYALKDLKKRIKELKLKEAEILEKIKDIIQEDDEIAQGYSNIITIPGIGKVAGIVLTHLFIRYPDANKKQIISLTGLDPVIKDSGTSVKSKPRISKSGSRLYRAVMFMATMVSINYNSEMKEFYDRLKENGKHSTVAQIAVMRKLIVIAHSLYKNNTQYDKEIYNKACGRIETKEAEKELVT

SEQ ID NO: 310192 - protein, 317 aa, unidentified
MSFVGIDVSKLQLDIAVRPDNKRWSVANVETDIATVVEVLNELSPGVIIVEATGGLEMPLVAALSQACLPVVVVNPRQVRNFAKAVGRMAKTDRIDAEILAHFGEAVKPVVRLLKDEDTQMLTALVTRRRQVIEMLTAEKNRLGISPKVIHKDIQKHIEWLQRRLEDIDRNLDSAIRKSPVWREKDDLLRSVPGVGQVLSTSLITGLPELGTLSHRKISALVGVAPLNRDSGLFRGKRTVWGGRSYIRAVLYMATLSASRVNPTISVFYRRLIEAGKKPKVALTACMRKLLGILNAIMKNRRPWQADYSTCPALNIA

SEQ ID NO: 310193 - protein, 354 aa, unidentified
MKRTTKYVALDVHQATTSASVREESGRVIARSVLPTDGGAITEFVRGMRGAVHVALEEGTQAQWLRDLLAPLVDRVVVCDRRGAPRQGNKADQVDADQLSEQLRRGGLRAVYHGSADRATLKELTRTYRNLVEDATRVMLRLKALFRARGIPAAGKRVYHPRARAQWLAQLQDPGARLRAETLYAELDVLRHLRPRAKAAMVTEARRDPAWPVLRAIPFFGSVRVALLLATMQTPWRFRTKRNLWAYAGLAVVTRSSADYAVVAGETVRRRRPPMTRGLNRNHNRVLKDVFKGAATAATARPGPLQDFYHSVIARGTREELARLTLTRKLAALTLRLWKKGERYDPTKLTTPAR

SEQ ID NO: 310194 - protein, 436 aa, unidentified
MDIVHPRVAGIDVHKKIIWVAVRLPGERPGERKVITRSFRTFWRSLQKMAAWLAELGVTDAAMESTGVYWWPVYHALAQAGIVVCVCNAAHMRNVPGRKTDLRDCQWIAELHEHGLLRPSFIPSAEVSGLRQRTRYRKKLIEARTSEGQRLSKVLEDAGIKIDSVASELLGKSGRAMIEALIAGERNPAVLADMAKGVLRRKTDELAMACDGRFTAAHAQMCRLHLDARDHLTAQIAGLDLLVAEAAAPFQRLIARLVTIPGVGQRTAEIIVAETGGDMTRFATPAHLAAWAGLAPGDNESAGKRKHAAARKGDQHLRTAMVESAWVTARTRSRPGARFRRLARRFGRGNEKKAAVAVAHTLICIAWAVMRYDGDYTEAGEDYYEQHDQRNHEHLVRHHQQALARLGYQVTLIPPGDPSPPPGTHTPPAAAPGQAA

SEQ ID NO: 310195 - protein, 342 aa, unidentified
MQITTIGLDIAKNVFQVHGIDAKEKVVVRKQLRRSQVIAFFSALPPCLIGMEACATSHYWARELKKLGHEVRLMPAKDVKAYVKRNKNDAADAEAICEAVRRPTMRFVGIKSAEQQGQLMQHRTRDVLIRQRTQIINALRAHLAELGIVAAQGNAGVNGLLAIVADEQDTRLPVDARASVIVLAAQLEALQAQIGAIEKRIKMQHRSNETSQRVETIPGIGVLGATAIVATAADPTIFRSGRDFAAWIGLVPRQDSTGGKQKLGPISKQGDRYLRRILVVGAIAVLRRAQENPGKYPWLTQLLARRPFKVVAVALANKMARTAWALMVHGGTYRAPELAEAA

SEQ ID NO: 310196 - protein, 349 aa, unidentified
MQTQSKQIDFSGHNFYCGIDVHKKSWTVTIQTDELKLKTFSQDPDPHQIVRYLKKNYPGGNFLAGYEAGYFGYGIQRTLEAMGIPCLVLHPADIPTSDKDREQKRDPRDSRKIANAIKNHEVTSIWVPPVDLEQDRQLLRTREKLSRDKTRIKNRIKAFLQLYGIAYPESFSQPASHWSGRFIQWLDSIKLSESTGTESLRSLVRNLRFQRGEILTVSKNIRRLAQSEKYNQEYLQLIKKPGIGMITAMTILTETGDISRFRTVDCFRSFMGIVPKAHDSGDKERPGKITKRANSHLRYLLVEITWMAIRHNPYYLNIYQNYKKRMPGNKALIRTAGKVTNEIYYCLKK

SEQ ID NO: 310197 - protein, 411 aa, unidentified
MRLFVGDDWAQDHHDIEVMDAAGTVLAKRRLPGGVAGMAQLHELIGAHLGEDAADAEVVIGIETDRGPWVAALAAAGYAVFPVNPLQAARYRDRHQVSGAKSDAGDAHVLADMVRTDSHQLRPAAGDSPQAEGVKVLARTHKTLIWERARQVQRLRHQLREYFPAALQAFEDLDAPDALELLAKAPDPARAAKLTRAQVAAALKRARRRHAADKATAILAALRGEQLGQPPALTAAYAAAVRALIAVITTLNEQVSVLEGQVGEHFGRHPDAEIYRSQPGLGPVPGARVLAEFGDGPHRYADGKARKNYAGTSPITRASGKRKVVAARFVHNDRLIDALMAQAFSALKVSPGARACYDAHRDKGLEHNDALRRVANRLVGILHGCLKTRTRYDEATAWGHRENPGQSPAAA

SEQ ID NO: 310198 - protein, 420 aa, unidentified
MKVVYQTCCGVDVHKSFLVATIIKTISGVEPSYQKKRFSTFNNSILQFKNWLIENQCRDVCMESTGKYWVPVFNLLEDDINVTIANPKWVKAVKGNKDDTKDSKWIGDLFRLGLVPGSYIPCKPIRILREFTRYRYKLTSCRTSEKNRYQNALTVCNVALDSVVSDIFGKSATSVIDYLIERSDNSINHEEIASRLLRSLKKKSDSVIESIEGYQMTDSQKYRMRLVRAHLDYITSTINDIDTMLDSLIAPYENAVQLLCTIPGVDRNSAITVISEIGTDMTPFSNSKRLCCWAGLTPGNNESAGKKKSVRITRAGVYLKPALVQVAHAAVKSDKSPYYKQKYERIMKRRGKKRAIIAIDRMILTAIYQMLSTGEAWNPTDLYKIDIPEPLKEKQKEKAIKQAKKLLIREGILSESQLAS

SEQ ID NO: 310199 - protein, 397 aa, unidentified
MYIVGIDIAKRKHEAAVIDGEGTVIIKPFSFTNNCSGYNRLLAMLTKAKLPLDEVSFAMEATGHYWLALFTRLQKEGFRVQVINPVQTNSIRSFYIRQAKTDPRDALLIAEVIRFGHFSESTLHPENIYELRELCRGRHAIVSMQADVKRKVVALLDQVFPEYETAFTNMFGDTSMAILQTCPTPKELSEMPFEELCHLIEVSSHKRFRMAKAQELQALARNSFGFAMAGDVFSTMIRLYAKHLDFLKQQVREMDRKIAEIMETLDTPITTITGIGLTLGAYILSEIGDISRFSSAAKLAAYAGIDPTMRQSGEYNGVRNRMSKRGSPYLRHAIWLAASSAVLHDPALKLYFQKKRDEGKPYMASVGHACRKMVSIIYAVMRDNKAYTPYIPNEISA

SEQ ID NO: 310200 - protein, 313 aa, unidentified
MTTASAWIGVDICKKYLDVAAASGTPVRIANDADGRTALARRLSCENVRGVIVEATGGLERALVEALDAEGVPASIVNPARVRKFAEGTGQLAKTDRIDAAILARFGAYMQPAPTCLADAQRQKLRDLIAYRAQITREITARAAQARLYTDPDLRARAAAAIAALREERKVLERDMQALIKSQDAMRGLYKRLLTVPGIGLIGAATLIAELPELGRLSRRQIAALVGVAPFPNESGDRRGYRAIRGGRDEVRQALFNCARVAIEHNPVAKPFYERLRARGKAHKVALVATMRKLLTILNAMLKTNTDWTCKPA

SEQ ID NO: 310201 - protein, 368 aa, unidentified
MKMNAIKAAPAASAIALKNEKSAKAKRILIGTDVHLRGYQAARKVDNGVIGVVENFRSEEELLLHVEKQCERAEQVVVVYEAGPLGYTLYRKLTARGVLCYVCAPDSSEQKRKRRKNNKIDARNLTSKLFNYLNGDEGALQLARVPTEAQEQLRLASREHDQMVEERKRLGAKGNALLLTQGFGSWSNWWRPKAWAQLSSLVPEWLLERLKIWVDVLKMLDEKICLAKVALARACSGPRPKGVGALSQIQLQSEVLDWSLYTNRRKIACLAGMVPSEWSTGDTERRGSITKVGVPAIRRIIVEMVWRIVLFQPQYKPVQKWQKVLQGTNPALKKKAVVAIGRQLIVDLWRLQTGRVTAQELNLVMVGA

SEQ ID NO: 310202 - protein, 406 aa, unidentified
MNAVGIDVSKGKSTVAILRPFGEIAVSPFDVSHSPKELSKLVTLLKSLDGDTKVVMEYTGNYYLPIALFLRNNGLFVSVVNPILVKDYSTKSLTVRKVKTDKKDSVKLASFALDRWKELSPFSAQSEARLLLKSYNRQYNQYNKLKVSLKNNLISILDQTFPSANNLFTTPTRKSDGHEKWVDFVLKYPHAECISKKSFPAFAKSYLSWCRRFGYNFSESKAKSVYDFACNCSPSLSFTESAVLLVSNAISQLNCINETLASLASEMNKISATLPEYDTVMSMFGVGSVLGSQLIAEIGGVSRFTNKKALVGFAGLDASPFQSGNFNPQSRAISKRGSSALRKTLFQIMSVILQNSPADNSVFQFMNKKRAEGKHFYVYMTAAANKFLRIYYARVTEFLNSLNPVA

SEQ ID NO: 310203 - protein, 415 aa, unidentified
MVDDHRWFVGIDWATQSHSVCLLDAEGRRVGEREFAHGGAGLTELRDWLLEKTKAAPGQIAVAIETPHGPVVEMLLEHGFVVFAINPKQLDRFRDRFTVAGAKDDRRDAHVLGGSLRTDRAAFRRLATDNPTVIELREWSRIADELQQERTRLANRVRQQLWRYYPQAAELTDDVADDWFLALWQKVPTPAVAAKATEKTIAAILKEHRIRRLDAASALKTLRKTPLFVAPGTTEAACAHIRSLAARLSLINQQVKQAQQSLDRLCTKLEEAEKPSGQSLEQCDVMILRSWPGIGRIVLATLLAEATEALRRRDYHALRALTGVAPVTRCSGKQRFVIRRLACNGRLRSAIYHWSRVAIQHDAAARRRYDALRQRGHSHARALRSVGDRLLYALCATLKRQTKYDAAYKRAQMLA

SEQ ID NO: 310204 - protein, 409 aa, unidentified
MSLPPAQFFVGLDWAAETHAVCVINAEGKPLAQFTVAHSTDGIALLLRRLAKFGDPIDVPVGIERPDGRLVDLLLEAGHPVVPVSPNAIKTWREGEVLSGAKSDAGDAAVIAEYLRLRQHRLTPATPYSGQTKAVRTVVRTRDDLVQMRVAAVNQLAALLDAHWPGAKAIFADLESPIALAFLSRYPTPAAAAHLGEKRIAGFCKAHGYSGRRPAAELLTRLRSAPTGTSDPHLTTALKDAVLAMVGVIGAVNAAVKNLDTSVAARLGEHPDGAIFASLPRSGQINAAQMLAEWGDCRQAYEGPDSVAALAGCTPVTKASGKHKAVHFRWACNKRFRRAMTTFADNSRHASPWAARIYTDARQAGKDHPHAVRVLARAWIRVIWRCWRDNTPYDPGKHGAAQTIADLAA

SEQ ID NO: 310205 - protein, 347 aa, unidentified
MSIRMIGLDTAKTVFQVHGVDEAGKAEIRRKLRRNDLIAFFEKQPACTVVMEACGAAHHWARMLTGLGHSVKLIAPEAVKPFVKKGKKNDAVDAAAICDAASRPDVKFVPAKSVEQQGILALHAARSLLVKQQTMLANAMRGLATEFGLTVPKGIHKLDELMAVVDADEIIPKQAKQAIAGLHDYCNNLSEGVETLEAEIVAHARRDETARRLATIPGIGPITASLIAATVGDISLFKTARQFAAWLGLVPRQSSTGGKTRLGRITKTGNREIRKLLVLGATSMVYRADGWISAVGAWLRSVLERRPVRLVTVALANKMARIAWAVMTRKEVYRPKGGVAAVAQAAA

SEQ ID NO: 310206 - protein, 460 aa, unidentified
MAETKKSRKKFKKDPFGSLPPLNLNAAGIDIGNSAHYVAVPADRDSEPVRKFACFTADLYRVADWLEQCGIETIAMESTGVYWIPLFQILEARGFDVKLVNARQVKNLPGRKTDMLDCQWLQKLHTFGLLNNSFRPTDQICILRSYWRQRDNLITATSTCVQHMQKALTEMNIQLANVISDISGWTGLAIIRAILGGERDPQKLAKLRHERIRASKEEIAKSLEGNWREELLFNLRQALELYDFYQEKIKDCDLRIQQHLKTFQSKVDQTVIVAGAKKRKPATGNVPQFDLSSELHRITGVDLTRIDGINVVTAQTIISEIGLDMTKWKTEKNFASWLGLCPDHAITGGKILKRGTRHVINRASDALRMASRALLRSKSALGSNYRRLRTQLGAPKAITAMAHKLARLTYRMLKYGADYVDKGMDHYEAKYRQTKLLWLKKRAAELNMALVPATLHLRPS

SEQ ID NO: 310207 - protein, 349 aa, unidentified
MPLAHNGYSSIIGLDLAKRSFQAHGALADGGVAFRKKLSREKVLAFFAEQPRCVVAMEACGSAHHWRRAIRDLGHEVRLIPPAYVKPFVKRQKNDAADAEAIAEAAVRPTMRFVAVKTEEQQGRAMLFRTRDLMVRQRTQLINALRGHLSEHGVVAAQGPANVKVLAEAVEDRGQGTSLPLLVVELARVFLDQIEGLSKRISGLEKVTVHEAACGATTRRLQTMPGVGPITALAIETFAPPMDVFKRGRDFAAWLGLAPRQHSTGGKQVLGKVSKMGQRDIRRLLIIGAMAVVRSASRKGAPEGSWLQRLLARKPKMLVAIALANKMARSIWAMLAKAEDYRVPVAAAA

SEQ ID NO: 310208 - protein, 429 aa, unidentified
MTQENETVWLGIDWADEKHRWAMRILGETRTQHGELEHTPEAVDEFISSLAIRFPGQRVAVALEQSRGALIFMLGKYEHLILYPIHPNTLDHYRKSVYPSGAKSDPADATLILEFLCKHSERLRPFHPDTEETRTLQLLVEARREAVDDKTRYLNRLTAQLKMFFPQMLYWFSTIDTVVVGRLLEKWPTLEILQAAPAAEVADFLKQHRIPESRVAVLQQLIGKAVPAIRDKAVLESSVLIVRRIVGQLEALREAITEHDRQIAALTQSHPEYHIFSSLPGAGPVMVPRLIAAFGTQRDRYATASAMQCYAGIAPVVESSGKQKWVHWRWACPKFLRQTFHEWAWFSTRKSAWAKSFYDRQRERKKSHHAAIRALAFKWIRILFRCWKDGVPYDATRYAAALQKHSPAKPAEIHWGNVAGFAKLARFSS

SEQ ID NO: 310209 - protein, 353 aa, unidentified
MRYMGVDVGKRRCVAVVKDECGSSLQEIRFLNSGDGVRQLLDAVKPEGDLVAVVEATCNAWVKIYDALECRGIRVKLANPSKTKAIAEARIKSDRVDASILADLLRGDLVAESYVPSKERRGQRALVRHRAALIKERTEVKNRIHSMLEKYDVDETLFSDLFSKSGREWLSKIKLSDTDRFIIEGELMLLKSLDDEVDRVTRRIASEAYDEEDVKLLMTMPGIDFYSALLIISEIGSIDRFRDQWKLVSYAGLAPSLHQSGNTLYTGRITKRGSKWLRWIMVQCAQTARLHDERLKRYYERVASRKGHQKAIVAVAKEMLCIIWFMLKRKEPYRGENLTNRKLIRMHRLAQEG

SEQ ID NO: 310210 - protein, 345 aa, unidentified
MDIGKRNCKACIMNADGSIAEESEYDNKLTEAEVFAYSLVKKYGKCIAVCESTSNLWLKTYQAFEKYGIGVTLANPLKTKAIAEARIKTDTLDARTLAHLLRSDLVAECYIAPKEIREDRSLLRLRTNLVQDRTRVMNRVHSLLDKYDVKCDYDNIFGVKGTRWLSSLKLSDNDQILLHEYIMQIEFLNTQIKNTESKISYQASKNESAKILMSMTGIDYFSAMLIALEIGDITRFSTPEKLVSWSGLCPSIHQSGNSLYMGKMKDGNKKVRWILIQAANTAARNDDRLRRFYLRIAKRHGHHIAITHMANKMITIIWYMLVNKKLYNERKQNLYETKLKRIQKT

SEQ ID NO: 310211 - protein, 309 aa, unidentified
MIIHPGFVGIDVSKHHLDLFDAARGASRIANTAEAVVGLAAMLAADGGFVTFEATGVYDRALASALANAGVPFARVNPARARDFARAAGFLAKTDAVDAKMLAAMGQCLRPRQSAPAEPGRERLTSLAKRRDQLVAMRQQERTRRRECCDADITDDLDRHLAFLDAAIAGLEQRIATAIAADRQLQQDQRLMRSVPGIGPVTAVTLIALMPELGSRSPKQIAALAGLAPLNADSGAFRGKRAIRGGRKRVRDALYMAAVSAMRSSTHLAEFYQRLRRAGKAPKAALIALARKLLVTLNAMLRDKTAFQP

SEQ ID NO: 310212 - protein, 339 aa, unidentified
MTVKTVGLDLAKDVFQVHCVSATGRKIINKKIKRAKLLAFFETLPRCVVGMEACGSAHHWGRQLSKLGHDVRLMPAAYVKPYVKRGKTDAADAEAICEAVRRPTMRFVEIKSEDQQAVLAIHRARDLVVRQRTQVVNMIRSILREFGYILPTGIEAVSKFAREHGTEEQLEMPEIADGILGVMCHQLNGLNARVDGLTKLIEQHAWLDADARRLMRMPGIGPITASAIVATIGDAKQFETGRDLAAWLGLTPLNKSSGGRERLGRITKKGDRYIRKLLIVGMTSRALMARNRPEKADTWTAKLLDEKPFRLATVAMANKSARIIWALLTKQEEYRQPIV

SEQ ID NO: 310213 - protein, 425 aa, unidentified
MDILYERVAGLDVHKDTVVACVRILAEGKTTRKCRTFATTTDQLMELRAWLEECRCTQVAMEATGVYWMPVFRILGEGAFELIVANAAHIKNVPGRKTDVNDATWIADLLACGLIKASFVPNEEIQELRSLTRTRKQLVREQTRHVQRIEKTLAEANIKLNSVISDIMGASGRRMIEAMIKGVRQPRQLAELAGKQIKATPKELYDALHGRLTDHHRFLLDLHLTQWDGLDETIRKIDREIDQRIGRLHKKGEGESGKRPFRTLIELLSTVPGISTVSASAIVSEIGCDMNRFPTAGHLVSWSGLCPGKNESAGKRKPSRLRKGAPWLKTMLVQCAWAAKRKKDSYYRAQFFRLQSKRGPQKAICAVAASILTAVYHILKDGTEHRDLGASYFDRRPTELKASRLVARLKKLGFNVQLQPAAEAA

SEQ ID NO: 310214 - protein, 401 aa, unidentified
MAYHAGLDWGGVSHSICVIDSSGRIVARSEVSHDAAGLTSLLALLRKLGLPSTIPIAIERPTGLLVDTLVEAGHPVFPIHPNVVKACRPRYRAAGGKSDSGDAYMLADILRTDGHRFRPLSPLCDDIRALRVLVRGRDDLVAHRITIANQLRSLLESFWPGAGAVFAAIDSPIALAFIARYPTPDSAGRLGEKRLATFLAQHSYSGRRSPAELLGRLHAAPGGHAQEVESDENGELVRALVALLEQLVMQIAKLSARIEHAVAQLPDGQTVMSFPRTGRICAAQILSELGNVRERYISEAQLAAEAGVCPVTHASGKSRGVVFRWACNHRLRKAITCFADNSRHASPWAAHIYNRAKARGCTHQHAARILARAWIRILWRAWQDNAPYDPKYHAAAVKLAA

SEQ ID NO: 310215 - protein, 348 aa, unidentified
MIIIGVDYHPSDQYIAFVTGEYVERQLNHSDREAEKFYRELAARGVSVRVGMEATGYSRWFERLLAELGIEVWIGDAAEIKTKRVRKQKTDREDARLMLRLMRENNFPRIWVPSPENRDLRQLLWHRHRLVQMRTRIMNQLQALAMNEGQRRKKKLWSEQGRAQLEKLPLATWASRRRKDLLELLDRMNPTIEELTRAIEQEAKKWPEVLRLMTHPGVGPLTALAFVLIIGTPERFKCGKQIGSYVGLIPCEDSSAGHQRLGHITKQGSSLLRFLLGEAAQAAARWDSDWRRRYVHLAMRRQRNIAKVAMARRLAVRMYWMWRNGWEYSEWVKFSSHAGQLGTRHGVN

SEQ ID NO: 310216 - protein, 356 aa, unidentified
MRNITRVGVDLAKNLIQVHAVDAAGKVVTNRALKREKFLVWCADLPAGCLVAMEACSGAHHWCRQLRERGFDARMIPAQFVAPYRLQGKSGKNDANDAAAVCEAASRPHMNFVPPKTLDQQGMLCVHRLREALKEERTACINRIRGLLAEFGVVLPQTPAILRQHLNDVLEDASNDIAGMARLVLQRAQEHWRELEKHVQWCDERIAAHQKDDEQVQRAAELKGVGPLTASAVVATVGDFKQFKNGAQFGAWLGLTPKQNSSGGKTSLGSITKRGSNYLRNLLIQGAKSVVLVGKHNDDPISQWVQRLRERCGWQKAVVALANKNARILWAVMTGNKRYDARHVSVPPAGAMPAAA

SEQ ID NO: 310217 - protein, 345 aa, unidentified
MDKDSMLFVGLDLGDRWSHLAILDQEGEMMEEGRIPTTPAAMQRKFSSLVHCRVAMEVGAHSRWASQTLQELGHEVLVANARKLRVIFDNPRKGDRADAHTLARLARLDPKLLSPIEHRSPQAQADLTVLHSRDALVRTRTLLVNHVRGVVKSTGARISLCSANSFPSKAAASLPETLKPALLPILETVHSLNQQIQSYDRQIEDLCAAKYPDCQRLRSIHGVGPITALAFVLTLENPKRFQKSREVGPALGLVPRRDQSGRQDPQLHITKTGNTGVHPESWTVGSLLSCGAKAMVAESRCISRVVGSRSTNAADRGCNSSSSCRRRPQAGSAFGHPGTATGSRS

SEQ ID NO: 310218 - protein, 368 aa, unidentified
MNEYKLKAAPTAVSKEQNSQKNPKANRILIGVDAHLKSYEAARKIDNGAVGVAQSFRSKEAFLLYVEKQREQAEEVAVVYEAGPLGYTLYRELKASDIECLVCAPRSGEQKRKRRKNNSIDARTLSSDLFNYLNGNEQALQAVRVPSEAQEQARVESRQHDALVEERKRIGAMGNSLLLSQGYGSWSNWWRPKAFERLSKGVAPWIVKHLGRWVGILRELDQQIQQAKAELTQHYQGPRPKGMGAPSLAQLNAEVLDWTLYSSRRKIGCLAGMVPSEWSTGEAQRLGAITKVGVPAIRRIITEMVWRMILFQPEYKPVQKWREVLEGPNRGLKKKAVVAIGRQLIVDIWRLQTGRITAQELGLIMIEA

SEQ ID NO: 310219 - protein, 341 aa, unidentified
MEQMKVYAGLDMHSETITGTIKDSEGNPLRVQKVETSKEGVKKLFTRFKKKQVRAVFEASKNWPYYAQLLKPHCGEVIMAHPLKIRAIASARIKTDVIDSNILCDLLRGNLIPESYMPSLEIVELRELLRYRATLSNLRARFKTKVRNIISREGKKCEWKDITAKGARLWLNNVPLNDLNRRELDYTVSLMDNLNDEIKDLDKTIDKEQYKYPEADLLKSIIGISTFSALLIIAEIADFSRFATPHKLAAYAGLAPSTYQSSTTLYHGRITKQGSKWLRWILMQCTHASVKSTKHHKLKSFYLRLQRKKGKQKAIVATARKMLVVIWHLLDKNEYYAARNY

SEQ ID NO: 310220 - protein, 406 aa, unidentified
MAVVMIGIDPHKGSHAAVAVDQQEVVLGEIRVRSSSGQTDQLLAWAAAWPERTWAVEGAAGLGYLLSQQLVNVGEKVLDVQPKLAAKVRLLESGSTNKNDPNDARAVAVAALRGKGVALVRREDHAEVMKVWIRRRRELQQTRNRVANRLHALLCELMPGGFAGPISPAKAERVLVKVETSGAVVAARVDLAQEMIEDLRRLDGQRRAVIKRLEQVVAASGTSTTGIVGVGPVVAAMAVSITGDIGRFKSIGHFAAYNATAPVEVSSGPQKIYRLSMRGNRQLNHAIHIAAVSQIRHTNNPGRVYYDRKLAEGKSPKMALRALKRRISDALYRAMIADARKQSAAKVEGPGGQPGNDSHSSAASSHPEHQLFGQATPGPASSLRPIKTPGASKTTSHRKTRVKKVS

SEQ ID NO: 310221 - protein, 371 aa, unidentified
MRSDSTTKFIGLDVHSKTISVAIADEGRKGEVRHYGTIQNTFEAIDKVIKTVAATETELKFIYEAGPCGFVLYRYLTGNGFKCIITAPGLIPKRSGVRIKNDRRDALTLARLYRAGELTGIYVPEPEDEAVRDLARARDDARVAERKAKQRLNSFLLRYNLIYPGKTKWNRTYFNWLGSVGMKYPAQKIALQEYIEAANECTGRVARLSEQIRLAVEEWRMAPMVKALQALRGVSLICATVTVAELGDLSRFQNPKELMAYLGLVPSEHSSGETIRRGGITKTGNGHARRVLVEGAWTYKHHARITPPLIKRQRDLSKSICQISWKAQLRLCARYRKMVARKKPNNVVVIAIARELAAFMWAIAQEVRAAA

SEQ ID NO: 310222 - protein, 338 aa, unidentified
MKEVTTLGIDLAKNIYQLHGVDRHGKPILKKAVSRAKLLETLGNLPPCLVGIEACGGAHHWAREIGNLGHQVRIIAPQFVVPYRKSGKNDANDAEAICEAVSRPSMRFVAIKTLEQQAVLVVHRVREAIKAERTALINQIRGLLQEFGIVLPQGAATFSKRLVEALADSEIPLDAVSVFSELRGHLLRLEERLADYDRKIARLAQDETARRLAEIPGIGPVTATAAVATVGDARLFRNGRELAAWVGLVPRQSSSGGKTRLGRITKQGDSYLRTLFVQGALVVIRHLGEKTDPRSQWIRALVARRGIQKAAVALAAKMVRTAWAIMARGEHYRLAASG

SEQ ID NO: 310223 - protein, 345 aa, unidentified
MQITTIGLDIAKRIFQVHGADATGRAILRRKLQRHDVLAFFKSVPACLVGIEACGTAHHWARQIRALGHEVRLLPPAYVKPYVKRGKTDAADAEAICEAITRPSMQTVPVKSTEQQAMLTLHRVRDLLVRQRTMLINALRGHMAEFGIIAPQGARRVGELVALLMGEDETVLPALARQALRLLAAELHALEQRITQAEDAIMAGHKQNEASRRLAAIPGIGPITASAIVATVGDAAQFRSARHFAAWIGLVPKQNSSGGKQRQGGISKQGNPYLRRLLVIGATAVIRHAGGRLAATPSGAWAKTLLERRPARLASVALANKTARIAWALLTKGESYRGNAPAQPA

SEQ ID NO: 310224 - protein, 422 aa, unidentified
MSKRRYSSVNCKRVDWRALAARVAGKRVIVAVDVAKFDFVAAVQSAFGQTLVRVKWTHPLETGELLAGLERLAEAAAVLEVVMESSGVYGDALRWQLHQRGIAVYHVSAKRVHDSAEVYDGVPSLHDAKAVELIARLHWEGYTRRWVMAEEARRDLLAHARQLRQAKQRAQAERNRLEALLSRHWPEVIALLGLGSATLHRLIAAYGSPGPLLVLHRQARALMHEVGGRWLAGEKIDAVLASARTTLGMPCTEAERAQLRWQAEQVIAAQREQRRAERLLARTVAPEPRFAAMRTRIGEVTSAVLLATQGDPKDYASAAAYCKSLGLNLKEHSSGKHQGQLAITKRGPALARHYLYFAALRLIHREPTIKRWFELKTARPGAVKQKQVIELMRKLAKAFWHQANGQAFDIERLVNLNALPDA

SEQ ID NO: 310225 - protein, 420 aa, unidentified
MAYRVAAIDIHKKVLMVVVATAAEETSDATGQALEFECRRFGTGSKERMPLVSWLQPRGVVEVVMESTAQYWRPVYLDLEPHFAKLHLAQAQSNRAPKGRKNDSKDAKRLGRRLLADELMLSFVPDAEQRRGRTLPRGRQPLIRDRVRLQNQVEAWLEEMRIQLSGVISDLLGVSGRRIPAALAQGQTEPAKRAALGDAQWKCSQEELTDALTGSPEPLQLQVLQLFLERLKLFDEQIEPMEKMTAEQLHQHEQAVIRIAQIPGFGVHSAQQIIAEIGPDGSAFPSADAFCAWIGCCPGSNESAEKNQRSRSPQGHRYVRRILAEAAPAAVRKMGCRFQQLFQRFLPRLGYAGTVWAVAHRLARVIWKMLHDAIRYKELGDQGTPQSPKRRFQKLVKELRRLGYTVTLKADKETICLATS

SEQ ID NO: 310226 - protein, 456 aa, unidentified
MKIPQSTIRLLTGRLVKILLYREVSTMKSNTQNAKIEAITEKTLVLGIDVGSETHYARAFDYRGIEYSKKPFKFSNTEAGFATFKEWILDLKERHEKDKVVPGMEPTGHYWFNLGKFLQDNEMKPVLVNPHHVKKSKELDDNNPTKNDRKDPKVIAGLVREGRYMIPYLPDGVYADLRTASNIRFQLQAELTRIQNRISRWFNIYFPEYKTVYGKPDAKSGMLILKQAPLPEDILTLGIDGVNQIWRDAKMRAVGKARAKTLIEAAEHSVGSKEGAISARMEIRMLLEDYESRNIRLQEIMTLIEELVNQIPMAEKLLEIKGVGIKTVSGFLAEVGDISRFNNPKELQKLAGLALVENSYGKHKGRTTISRRGRKRLRYLLFEVAMSLVAKNPEFRELHTYYTTRRLNPLKKMQSLMAVAAKLIRVFYVMLTKGVDYDLKKMVGDIKRPAVYLQAA

SEQ ID NO: 310227 - protein, 455 aa, unidentified
MYLPDWKWIPIRKGLLLMSNKVIFNLDELFISVGIDVGADFSWMSIALPNQQFVGKPYKILHNSIDSLTTAVSKIKEAEELYSLESRIFLESTGIYHYPLFCYLRDKGFNCSVINPIITKNSTNINIRKVHNDRFDSKKAALVGLKPDLKVSLMPSDLALNCRNLCREYYDLMDNRSAYVNKLQGELRMAFPQYLGIFSKVTINTSLTLLETYTSPSAFLEADKQEIIDIIKSTARFGLTYAQNKYNAIIQAATDANQFGYIIDSNIKRIRLYISFIRKYDEEINSILESLHELVDANEDANFVKQIHLIETFKGAGFLSAVSIMGEIGDFSAFSKPKQLFAYFGLDPAVKQSGKFEDTKVQMSKRGSAIARRVIHMLTLQSISISRNGEAKNPVLREYYLKKCDSKPKLVAMGAVSHKVCNMIFAILRDNKPFKIIAPQEHIKQYNAAKCDIAA

SEQ ID NO: 310228 - protein, 397 aa, unidentified
MYIVGIDIAKRKHEAAVIDGEGTVIIKPFSFTNNCSGYNRLLAMLTRAKLPLDEVSFAMEATGHYWLALFTRLQKESFRVQVINPVQTNSIRSFYIRQAKTDPRDALLIAEVIRFGHFSESTLHPENIYELRELCRGRHAIVSMQADVKRKVVALLDQVFPEYETAFTNLFGDTSMAILQTCPTPKELSEMRLEELCHLIDVSSHKRFRMAKAQELQELARNSFGFAMAGDVFSTMIRLYAKHLDFLKQQVREMDRKIAEIMDTLDTPITTITGIGPTLGAYILSEIGDISRFPSAAKLAAYAGIDPTMRQSGEYNGVRNRMSKRGSPYLRHAIWLAASSAVLHDPALKLYFQKKRDEGKPYMASVGHACRKMVSIIYAVMRDNKSYTPCIPNEISA

SEQ ID NO: 310229 - protein, 415 aa, unidentified
MIRKVMEVIHEKAGGLDVHKETILACRRRLLARGQVEVESSEFGTMTRQLEGMASWLEEWEVTDVAMESTGVLWIPVWNVLSGRFKLLLVNAQHLKKVPGRKDDVKDAEWIAQCHQFGLLRASFVPNIEVRQWRELTRGRMKLIDHHTSVVNRIHRVLQQGNIKLSSVASDVLGVSGRAMIKAMIKGESDPQKLAELARGRLKGKHEQLVESLNGQLTQQQRWVLSQLWEQIEESERRLALYDGEIRESMRSCEEKLERLVTIGGVNRRSAENILAEVGSNMGQFPTDDDLVSWSGLCPGRNQSAGKNRSGKMPKGNHWLKRTLIEPAWAATREKDSYLAALYRRLASRRGKKRAVVAVARTILVAVWHILREDVEYKELGGNYFDHIDEDKIKRNLVKRLEKLGYDVKLKKNAA

SEQ ID NO: 310230 - protein, 365 aa, unidentified
MHAQGREPMDSLPPHNRIDNKMTHNPLQETSSQSTPRLFAGIDVGSEELVLLVRKNGKPLDPQKYANTRADHARMVKKLGKLPGVIVCMEATGAYHFDLAIALHDAGIKVMVVNPKVSHNFAKVLMKNSKTDAVDADTLAVYAERMDFVAWARPADEKIALRCFSRRIAALTHQKAAAKNQLHALGATAETPEGVMRDVKLAIAQLEKRIDSLTVLALALIGKHPELARVLQLLVGIKGIAEASAIALMGELLLLPPGLSHREWVKFAGLDPKAFESGKSVHKKTRLSKAGNSHVRAALYMPAMSAIQHDRHVKAYFQHLTEMGKLPLQGYCAVMRKLLHAIHGMLKHDKPFDNTRFYAIPISVG

SEQ ID NO: 310231 - protein, 337 aa, unidentified
MDYFAGLDISMDETRICVLDREGAVVYEGKSASTAEAIADELAKAPSCRRTVFETGRMAPILFHSLSQLGLPVVCVESRQAYQALKSLATHKTDRNDARGLAHLARTGFFKPVHVKSLSAHAVRSLIIARKKLVGQRVTLENQIRGLAVVFGVRLPRALTTAFIDQALKASEGVAGLSAAMRGLIAARTAVMTAVAAIDADIRRMTGASEACRRLMTIPGVGRLTALAFVAAIDDPSRIRRSRDVGAYLGLVPRRYQSGEVDYVGGISKRGDRRVRTLLYEAANVMLTRTKGQLKLKDWAFAIARRSSMRKARVALARRLAIIMHAMLRDGTEFVAA

SEQ ID NO: 310232 - protein, 361 aa, unidentified
MSESMALVGLDVHKSRTVAAVLDPVTGELRMERLRGEPERVVPVFLEELDRPVAAVYEAGPTGFVLARAAEQRGLDIRVVAPGSIPRAPGDRVKTDRRDAKRLVRLLAAGELGFVFVPSEADERFRDLVRCIDDVRRDLMRARHRLSKFLLRRGVRFQGKTWTQQHERWLCALHFEDPLSQAVFVDYLCAVQGLGQRRKTLIGVLEQAVPDSSHAETVSRLRCFRSIDTLTAAGLCAEVGDFTRFPKPVLLSGFLGIVPSEYTSDERRTQGHITKAGPSNARRLLVEAAHNYRHRPRVGENLKARQSGQDPRVVEIAWRCQQRLHGRWLHLAGKRGKPAGTVAVAVARELAAFCWEAATLN

SEQ ID NO: 310233 - protein, 350 aa, unidentified
MIIIGADYHPGFQQIAYVDTETGELQERRLRHREEAEKFYRELAAPQMKVRVGMEASGHARWFERLLWELQFELWIGDAAEIRTKRVRKQKTDRQDAQLILKLMLEDRFPQIWVPSWENRDLRQLLWHRHRMVQARTRIMNQLQAVALNEGLRSKKRLWGEQGREQRAAFRLAPWASRRRQDVLELLDRLNPTIGELTKAVEQEAEKCPEAQRLMTHPGVGPLTALAFVLVIGTAERFGCGKQIASYLGLVPEEDSSGERRRLGHISKQGNALLRFLLVEAAQVRVRSNQEWRSKFFHLAMRRGRKIAKVAMARRLAIRLYWMWRKSWNYEQLTKFGSHAGQPGNPHGVR

SEQ ID NO: 310234 - protein, 463 aa, unidentified
MSGKKSKQGKASKQSKKTLDELTMANPNAAGLDIGSTEIWAAVPANREGETVRCFGTYTSDLLELADWLQALGIQTVAMESTGVYWIPVFEILEERGLEVLVVNARHIKNVPGRKSDVQDCQWVQRLHSYGLLRGSFRPQVEIASLRAYLRHRDSLIEHRAAHIQHMQKALLQMNIQLTQVLSDITGVTGLAILRAIVAGVRNPHALAQLRHGRCEHPPEELVKALTGHYRAEHVFALKQALALFDAYTQQLCECDEEIQRQFENFKPDLPDDLPPLPPNPKPGSHSKNAPAYDVRSLLYPKVGVDLFAIPGMNAVLVQTVLTEVGLDMSRWPTAKHFCSWLGLAPHNGISGGKVLYSHIPNTQNRAGQAFRLAAQAVSRGKTVYSEFYRRVRARSGPKQAIVATAHKIARTFYYMLKRRQPFQSMDIEEYHRRQREKDVQRLSRNAARLGFQIQPIPATNML

SEQ ID NO: 310235 - protein, 319 aa, unidentified
MSEQQEERFVGIDVSKAMLEVAIRPSGERWSVANEEAGVRELVKALEKVIPTLIVVEATGGMQSLVVAELAAAGLPVAVVNPRQARNFAKATGRLAKTDAIDAEVLANFGQAIRPEVRELKDELTQLLTALMGRRRQIVDMLTAEKNRLASAPTAVRKEIRKHIEWLEARLKAMDGQISDTIKESPEWREKDLILRSTPGVGPVLSVSLLAGVPELGKLNRQKLAALVGVAPLNDDSGNHRGTRRVWGGRAQVRAVLYMAAVSASRANPVIRVFYQRLVAAGKKPKVALTACMRRLLCILNTMIKNGTRWRHEEATASA

SEQ ID NO: 310236 - protein, 361 aa, unidentified
MRIIGCDLHARQQTLAMLETTTGEVVNLTLMHEGNEVRDFYSQLPRPVRVGIEATGSMQWFLNLMEELGIECRVGHPATIRAAEPRKQKHDRRDADLILKLLAENRFPAIWLPTKELLDLRALVLHRHQWVRMRVRMQNALQAIALANGLRRGPGLWSYDGQAKIAFLPLLPHASYRRSALQTMYKHMEEEIENLTKQVAEQAGHRSGARLLMTHPGVGPVTALATDVFLGDPKRFVDGKALASYVGIIPREYSSGERQRLGGVTKQGSPLLRFLWCEAGAHAVRRDPELQRFYRRKLVQKGLGKARVAVARKLGIRLWIMLRDEIDYQEFCRRGQKQQSGAACAGMPETGYGANRHRPID

SEQ ID NO: 310237 - protein, 341 aa, unidentified
MTITQIGIDIGKNTFHVIGLDAGNAIALRRQFSRSGLLRFFAEKMSEPADIAFEACSGAHWLAHRLIALGHRVMLLTPESVRPFAKAQKNDWNDALAIAEAARRPGRHAVGVKSEEQLDMQALHRVRQRLVTARTAIINQLRGLMRERGIVAPGGRARFERFVRDQLLGGDVDLSPVSRALFATLDCEYETISARLTEIDRQLEAFARENPVCRALLPIPGIGFVVATALYSAVANISDFRTGRDLAAFLGLVPRQRSTGGKTILLGISKRGNSYVRTLMIHGMRSAFHHRARRDNRMTQFMERMVERGLHTNKIVVVSANKAARIVWAVLAKNETYRPAA

SEQ ID NO: 310238 - protein, 396 aa, unidentified
MFVGVDWASRAHELCVVDDHGAVVECFGFAHSEQGLHDALTRLARLAPPGQLPVAIERPSGLLVERLLAAGHPVVPIHPNAFAAARPRWEGAASKSDTGDAYRLADYLRTDRQRLRRLEPLDRQTRELQALVRLRDDQLAARVAATNQLAALLDEHWPGAKAIFGRLDSEIALTFCERYPTPDSAARLGEARLAAFLRRHSYCGRRSPSELLTRLRTAPQPIQRLDPEIVAELVHAQLRLVRTLLGTLADLERALAAALQTHPKAHLLRPLPRIGTISLGQVVAEIGPLIERTNTAEQAAALAGAAPVTKHSGQHKAVCFRHQTNAKARKALTLYADNSRHASPWAQRIYREARARGCRHPHAIRILARAWLRIIWACWQTNTPSAPSPNRPQHRP

SEQ ID NO: 310239 - protein, 342 aa, unidentified
MLNHYREGEVVEEITTVGIDLAKNVFSVHAVGSQGEVVVRRTLSRAKLSELIAQLPPCLIGMEACSGAHEWARRFAASGHTVKLMAAKFVMPYRKSGKNDGNDAEAICEAVARPNMRFVPVKSLEQQSDLTLHRVRQGFVEERTATLNRLRGLLTEFGHVLPLRASEVHRRVPQLLGKLPTRVAACARDLLEHAARLQAKTLEYEHEIKIHVRSNALACRAQTRLGIGPITASALVATVGNGHDFKNGRQFAAWLGLVPRQYSTGGRIRLGHITKRGDPYLRTLLVMGARAVLQRAASLTDPLSRWALAVRERRRYHRACIAIAAKNARVAWALLAKEPSAA

SEQ ID NO: 310240 - protein, 365 aa, unidentified
MTTRQRSTSSSTDPPVRREVVLGVDTHGEVHVAAVISPLGKILGTESFPATAAGYRQLLVWARKRGTVRRAGVEGTGTFGAGLSRYLLAQQIQVFEVNRPDRSARRLLGKSDPLDAQAAARAVLSGRARARAKSGDGPAHSARIFKLAKDSAVKARTQAINQLKAVLVIADPALRERLSSLGNAELFRTCATLSPPDGGGDEEAVAQATHMTLRMLAERIEQLTGQINALNQRLTRLVERHAPQLLVPMGIGPDSAVTLLITMGDNPERLNTEASFAALCGVSPIEYSSGRRVTRRLNYGGDRQANAALHRIVFTRLRHDPRTQAYCERRTQEGKTRREIIRCLKRYAAREVFNLVRPVFRAPAL

SEQ ID NO: 310241 - protein, 351 aa, unidentified
MNVNHYIGFDVHKKTINYCVKMADGQIVEEGKLRATHDALRQWASRRREPWCGAMEATLFSGWIYDTLKPFAAELQIGHPAMMKAIGASKKKNDKIDARKTADLVRCNLLPECYVAPAEMRELRRLLRYRNVVVAQAVRIKNKMSGLLMEVGAEYNKRQLHGKKYFTELLGNVEEVPESVKDLLRLSQGALEVFEATQRQLLNRLQKEPRLVKRLAVLKSIRGVGEVTALTWALEICDPQRFRSIADAVSYCGLTSALDCSADKQHRGPVSKQRNGHLQTVLIEAAKLAPRWNPQLAAVHDRELERGNRNRATLAVARKLVAYLLAVDKSGQPFRIRNQAAAPTTEVETAA

SEQ ID NO: 310242 - protein, 388 aa, unidentified
MFQPFDASKSLTAFEQDGTVIAVIEMSQSKWLVAAVVPGIERQPLKKIEANEEALLKLLHRWRAEAGQAGRMIKRVAVAYEAGRDGFWLARWLRARDIEAYVIHPASIAVSREHRRAKTDRLDTELLMRAFLGWLRGEKRHCSIVAIPTVAEEDARRPNRERENLVTERTRIVNRMKATLTRFGIRNFKPTLRKAAEKLDNLRTAEAMPLPENTRAELRRHLARLRVVREQIREIEHERLRMLKAAPVTEKGPHAMVRLLARVLSVGIETADMLVNEVLSRHLRDHRAVARYAGLTGSPDESGRRRREKGLARAGNARVRCGMIQLAWRFLRFQKDSALAKWFDARTADGRAGTRKTMIVALARKLLIALWRLVTTGEVPQGVVLRPA

SEQ ID NO: 310243 - protein, 421 aa, unidentified
MQRVSTEEFAAFIGLDWADAKHDICLQATGSAHREFLCLDHRPDAIDAWVQSLRTRFNGQPIAVCLELNKGPIVSALRQYEFLVLFPVNPLTVARYREAFTPSRAKDDPTDAELQVEILLKHRDKLTPLTPQSPAMRALAQLVEDRRRLVGDKVRLTNRLTSALKNYFPHVLQWFQEKDTAIFCDFLSRWPTLKAAQLARRTTLEGFFRAHHVRSADVITTRIEAIKSARALTTDDGVITPNVLLVQALVAQLRVTVQAIADFDNAITQRAQDHPDFPLFDALPGAGAVFAPRLLVAFGEQRERYASAAELQKYAGIAPVTERSGQKSWVHWRWQCPTFLRQTFVEWAAESIRHSFWAQVYYQQQRDKGKAHQAAVRALAFTWIRILYRCWQDRTPYDESTSLQALHRRGSSLMQNLAKAS

SEQ ID NO: 310244 - protein, 378 aa, unidentified
MTFRAAEARRDRCERVAALSTVARVGSGTRGPFEGSRDSWIGPRLFLWPERIPGGEPRMTSRGAEKMQNDTIGVDVSKDHLDVHRLYDGASRRFANDKRGHKALIKWLAETPVSRVVFEPTGPYHRAFERALGAAGVPFVKVNPRQARRFAEATGKLAKTDRLDAAMLARMGAMLELEARPARNETLLELKELYMAREALMKDRTAAKNRGKVLMLSLLKRQNAQRLEQIERQIMTIEAAIFQIVEADVGLADRLAILTSIPGVSNITAFALLIEMPELGVLEAGQAASLVGLAPIARQSGRWTGRAFIRGGRASARRALYMPALVATRFNPDLKAKYRQLVEAGKPAKVALIAIMRKLIVLANALLKANRKWAPKSA

SEQ ID NO: 310245 - protein, 391 aa, unidentified
MECPMPHANDQSRCLAPVEQDCTIIAVIEMSQSSWLVAGIVPGIERQPLKKLEPDKSALLRLLHRWRNEATTAGRTVTRIAVAFEAGRDGFWLSRWLRAHGAEAYVIHPASVAVAREHRRAKTDRLDTGLLKRAFLGWLRGERGHCSMAAVPTLAEEDAKRPSRERESLVGERTRIVNRMKGTLTRLGIRSFKPTLRNAVECLPTLRTAEGAPLPPNTLAELRRDMARLRFVSDQIKEIEDTRLERLEQQPQEGPHVMVRLLARVIGVGIETADLLVHEVLARQLRDRRAVARYAGLTGSPDESGARRREKGLAKAGSARVRRSMIELAWRFLRFQPDSSLARWYRARTADARGGTRKTMIVALARKLLVALWRFVTTGETPEGIVLRSAA

SEQ ID NO: 310246 - protein, 425 aa, unidentified
MNYKQNEKINQVKESTLVVGIDIGSTTQYARAFDWRGIELGKVFTFSNSREGFEAFKAWMQHLQDKYRKSDVIVGIEPTGHYWFDLGAYLEDEGIRLVMVNPYAVKQTKELDDNSQSKNDRKDPKVIAKLVTEGRYSAPYTPDGVYADLRIMVANRKRLIREMTQIKNRFARWFAIYFPEYTDVFGDYEAQSSMLLLKKVCTPEAIVELGAEKINQIWRDAKLRAVGMKRATTLCETAKRSIGLKKGSSAARYEMKLLLEDYEYKKAQLDAVMEEIEKLCRKIPESEQMLAIKGIGVITVAGFLAEVGDVRRFESPRQIQKLAGLSLRENSSGKHKGQTTISKRGRSKLRAVLFNAAIPLIAKNPEFKSLHEYYTTRANNPLKKKQSVIAISCKLIRVFYAILAKGVTYDAQKLISDIHRQPQVA

SEQ ID NO: 310247 - protein, 343 aa, unidentified
MKYYVGLDVSVKLTAICIVDEAGTVVRETVLVTEPLSLASYLEGTGLRFERIGLEAGPMSSWLHDGLLAAGLPVVVVEARHMKSALSAMRNKTDRTDARGIAQMMRMGWFRQVHVKSADAQELRLLLVNRHALMSKRRDIDNTIRGTLKVFGFKVGTVSRQCFEERVASLLADRSDLLELVTPMLTVRRVLLEQFFVLHRRLKKMAKEHEVCRQLMTAPSIGPVISVTYMSGVDDPRRFAKSRSVGAHFGITPRTHASGEVERTGRISKCGDGMVRAALYEAAHNILTRLKRWCALKAWGLRVAKRAGMQKAKVAVARKLAVILHRMWMDGTAFRWGKEVTAA

SEQ ID NO: 310248 - protein, 374 aa, unidentified
MPQSRTLYVGLDVHKESIAVAYVAQDHGAEVISLGTVGTRQCDIDKLLRHLQSKSPQLVFVYEAGPCGYWLSRYLMKKGYVCWVVAPSLIPKKPGDRVKTDRRDARQLARLMRSGDLTPVYVPAVDDEAIRDLSRAREDTLRDLKAATLRLKAFVLRHDIRSTGRANWSPAHLRWLSEVVCPTPAQHMVFQEYVQTVTEQTERLQRLEHELHEQVKTWRFQPVVEALQALRGVQFTVAVTTVAELGDLTRFANPRPLMHYLGLTPSEYASGARRQQGSITKTGHTHARRALVEGAWAYRYPAKVSRHLQLRLENLPKAIQAISWKAQVRLCKRYRQLLAKGKNANQVVVAIARELSAFMWAIAKQVTMAPKDQS

SEQ ID NO: 310249 - protein, 415 aa, unidentified
MSLKIVFPICCGIDVHKNFVVACVASTNSSNITSYSSHRFSTYTNGLRELVSWLAAHNCHDICMESTGKYWIPIFNILEPSCNLVLAHPKYVKAIRGKKTDKKDAKWIADLFKHDLVAPSFMPPANIRQLRDLMRYRFKLTCFSASEKNRFQNCLTVSNIQLGNIVSDTFGKSSQRIISQILEHPNEPLHLPSLIHGSMMSKLPELELAVDGVFCPEQAAKLKIIRQHYDDLEIRKAELEQLILALAMPYQQEINLILTVPSFKNVFSAITVLSEIGTNMEAFPSAKHLCSWAGLTPTNNESAGKKKSVRISKAGCYIKPLLVQCATAVVKSEKHPEIRNRYLRLKKRRGHKKAIIAIARMLLTAIYHILKNKVPYNAEFYRKADIIPINREITVEQAVLLVQSQGYRIKTASSS

SEQ ID NO: 310250 - protein, 265 aa, unidentified
MNVKTIGIDLAKEVFQIHGVDEHGKRLFNKQLRRAQMTSFFANIPPCLIGMEACASAHFWANKLMSMGHNVKLMAPQFVKPYVKTNKHDAADAEAICEAVTRPNMRFVPVKTAEQQAVLALHRSRQSFIKQRTAQANQIRGLLAEFGIVVPRGIQQLQRRLPELMEDADNSLPALFRTQLSLLQHHMAHLFDVIATLDKQIEQCYRQNALCQRIGKIPGIGPVTASALIATIGKANNFENGRQLAAWLGLVPRQHSSGGKQVLLG

SEQ ID NO: 310251 - protein, 425 aa, unidentified
MKAKPQEKNKRATKPVRCFGCTTAELKAMAAWLQQCRIRTVAMQSTGVYWVAVYDILEQAGLEVYLVNARDTKNLPGHKSDVQESQWLMKLHTYGLLRNSFRPSQKIRTMRTYWRQRNDLVQSASRHILRVQKALTQMNVQLANVLSDISGVTGQAIIKAILAGERNPHKLAEFRDPRVQASEEEIAHYLEGNWQPDLLFVLKQEQDGYEFCQQQMAECDRQLAQYLQQREDRSQGAPLPEEKRKGRLKKKSGNKPQFDLRTGLFRMSGTDLTRIDGIDVMTATTVISEAGYDMSKWQTENHFVSWLRLCPDNRISGNKVIGKGRLPTHNPISIALKIAATTLRQSQTYLGAQFRRLRTKLGAPVAIKAMAAKLARLVYRMLRYGMKYVDQGAAVYELKHRELQVQQLKSKAAKLGYKVTLLPAA

SEQ ID NO: 310252 - protein, 463 aa, unidentified
MSKKGQSNSQLKTDRLKGDWKALEIVHPCAAGIDIGGSEHWVAINPERDQQPVRCFDCFTADLEQMADWLVDRGVRSVAMQSTGVYWIPVFEILQQHGLEVYLVNARHTKNLPGRKSDIAECQWLLKLHTFGLLSNSFQPSDEVRTARTLWRHRGELVAQASSAIQRMQKALIEMNIQLSNVLSDLSGVSGMAIVQAILNGQRDPQKLAALADPQVKASKKVIAKSLEGNWRPELVFVLRQQVEMYRMCHDKIAACDCQLQLHLQSMAPKVELEAQPLGPRPKRRRARGNAPKFDLRTELYRITGVDWTQVDGIDVQVAQSVIAEVGVDLKAFPSEKHFANWLGLCPTNETSGGKVLNRRTPKVVNRAKVAFRQAASTLIRSQSYLGAQYRRLRTRLGAPKAITAMARKLACLFYRLLQRGQQYVDKGTEYYEERYREQQVRFVIHRAKQLGLQIVTPARSNP

SEQ ID NO: 310253 - protein, 340 aa, unidentified
MGETTTVGLDLAKNVFQVHGVDAEGATVLRKQLRRAQVPGFFGKLPRCLVGLEACATAHYWARELCALGHEVRLMPAQYVKAYVKRNKNDAADAEAICEAVMRPTMRFVPIKTADQQAAVLLHRGRERLVRQRTMLVNALRAHLAEFGIVAPQGLRNVGKLIAIIRDEDDARLPDLARQVLAVLAVQIEQLETAIAALEKQLMAWHKSNPVSQRLATIPGIGPIIATAIAAMVAEPSGFRSGREFAAWLGLVPRQNSTGGKTRLGGISKRGNQYLRRLLINGASANLLRSKATNADPWVIGLRRRRPSMVVAVALANKTARIAWAVMHRQENYQRTVLAA

SEQ ID NO: 310254 - protein, 489 aa, unidentified
MKSLPAKKAHKDKMPSNKASGKPTPGKWEEMNRKQRREMMRKIQSEDLSLEVVHPHAAGIDIGNASHYVAVPPSRDPQPVRCFGCTTAELKRMAEWLTQCGIRTVALQSTGVYWIAVYDILEEAGLKVYLANARETKNLPGRKTDVQESQWLMKLHTYGLLRNSFRPSHEIRTLRTYWRQRQDLVRSTGRHIQRMQKALTQMNIQLANVISDISGVTGQAILKAILNGERDPRELAAYRDCRVEASQEEIAQALEGNWQEDQLFVLRQEQAGYEFCQKQITECDQQLAQYLAQFEDRTQGATLPEETRKGRRKKKKNNSQFNLREELFRMTGTDLTQIDGIDVMTAMTVVSEVGCDMSKWKTENHFVSWLKLSPDNKISGGKIIGKGRMPTNNRATTVLRMAASTLRESDSYLGAQFRRFRTRLGPPVATKAMAAKLARLIYRMLRYGMKYVDQGVEFYEAQHRKQQVIHLKRKAAQLGLQIIEAAQAA

SEQ ID NO: 310255 - protein, 365 aa, unidentified
MNKCHSNTELSSHEGTRRQFNGGRCAIKLGIDVHQDFYVVVMQVGGANPKPPQRFQKEAFLHWAAKLKQSSGAEIHAVYEACGFGFGLQRALSALGMRSHVVCPQKLDEANKRVKTDGLDAKALCLRLDRFVQGNRDALALVRVPSEQEERLRAIHRQREQLVKARKQLEAQGRNLMVNHGIEPVKIWWKPRKFALLPLPQWMRELLNNSQPILIALQEKIGALTLQLQAAAGSKQPRGLGAMSSVIIDREIGDWNRFNNRRQVASYTGLCPGEYSSGNTRLQSCVTKHGNPRLRAALVELAWRLVRFQPNYKPICKWNATLCKGALATGAARKKAIVAVARQLAVDLWRIRTGRLSAETLGLSN

SEQ ID NO: 310256 - protein, 697 aa, unidentified
MNEYHKKLEAETAGKAYQIPAEKRHDDFVSFVNDVWFPLQVRDGKHKPKTIAFYESMTKLLLPCFSGSTLQGIGSLDIQRCLTCLRTEHKNQHGKPLTPKTLHHLYNTLNLIFGFAEKQELLVKNPMKLVDSPKKEKKPVDALTEEQAKKFFSLLPDTPLDFHCILQLLITTGIRRGECMGLKWSDIDEKNCTIRIERNIVYTPECGVIVSSPKTATSIRTIPIMPSTLSLLKQLRKATQSQHPNTSQVYCAQTGTSALWDVTYEPDVGAMNRFLLISQQVVTFSSTRNVRNLNMRGACTMYIVGIDIAKRKHEAAVIDGEGTVIIKPFSFTNNCSGYNRLLAMLARAKLPLDEVSFAMEATGHYWLALFTRLQKEGFRVQVINPVQTNSIRSFYIRQAKTDPRDALLIAEVIRFGHFSESTLHPENIYELRELCRGRHAIVSMQADVKRKVVALLDQVFPEYETAFTNMFGDTSMAILQACPTPKELSEMPLEELCHLIEVSSHKRFRMAKAQELQALARNSFGFAMAGDVFSTMIRLYAKHLDFLKQQVREMDRKIAEIMDTLDTPITTITGIGPTLGAYILSEIGDISRFSSAAKLAAYAGIDPTMRQSGEYNGVRNRMSKRGSPYLRHAIWLAASSAVLHDPALKLYFQKKRDEGKPYMASVGHACRKMVSIIYAVMRDNKAYTPCIPNEISA

SEQ ID NO: 310257 - protein, 377 aa, unidentified
MSRPILYLGMDVHKESVTIAVLPAEAASPTHVERLPNDFVKLRRWMDRLAETAAIRACYEASGAGYVLQRAMREWGYPCEVIAPSLIPTRPGSQRKHDKYDAAQLARLYRAGELTPVRIPSEAEERVRDIVRCRETFQREALKSRHYILKFLARRGFVYRDGTNWSGRHFVWLRHLASSNSPLAREDTLVYGEYLALLEYKLARRDELDRQIEALALSPALATAVAYLQCFRGLQVHSAMVLACELVDWRRFARPGQLMAYLGLVSREDSSGDRERRGSITKAGNRHCRHALVQAAWSYRHKPKVGTALKLRQQGQPAWVITHAWKAQHRLYKLYHHLAFRKKPQVAAVAVARELVGFLWAVMREVEPVRTETTAVH

SEQ ID NO: 310258 - protein, 408 aa, unidentified
MGQTRSFGDVCLMSGLPPESGLKSEVVTCPRMGWTGRAPAPNGSQSAPGACQERITTMPRTTTLHAVTAIGIDMGKNTLHLIGLDARGAIMLREKVARGRIALRLANLPPCLIGIEAGMATHYVARELAALGHDVKQVPATYAKPFRQGQKNDFRDAHAVAEAVQRPTTRFVPAKTNEQLDLQALHRVRSRLVSERTAVINQIRGFLLERGIVVRQGPRFLRQQLPDILAKQTDVLSPRMARIVADLANDWRRLDERIETVTDEIGTLAKSDDSCRRVMTVPGIGPIISSAMVAAIGNGAAFARGRDFSAWLGLVPKQMSTGDRTILGRISKRGNGYLRTLFMQAARVILLRSANWPKHSFGLWLVRAAQRLHPNVLAAALANKLARIAWTVLAQERSYEARVTKAAA

SEQ ID NO: 310259 - protein, 440 aa, unidentified
MLRFVGCDVHKRTAVFTILLQDGTLLATYTVAVTREALTAFAKRQLCAEDRLAMEATTNTWAVAGVLRPFVKEIVIGNPLRVRVIAEAKIKTDKVDARVLAELLRADYLPTVWQPDSETQRLRRLTHRRAALVSDRTRLKNRLHSLLHHALIPLPDCDLFSRRGIAWLRQVPLPEEEALARDSDLRLLEQTELEILELDERLVRAAWQDEKVRLVMSIPGIDYTVAQTCLAAIGDVTRFSSGKKLAAYLGLNPSTRQSGPHCYHGPITKQGNAHARWLLVQAAQHLGQYRGPLGQTFRKIARRKNRKVAVVACARKLAVLVWHVLRSGEPFRYALPRSLQTKYARLRVRATGQRRRGGVAPGTPRSSQYGHGRTRAVPSLPQVLQENGLPEIAPLSKGERMMLERNRLETFYGELQTSARAKVGPPVLKQKSLEEMKESS

SEQ ID NO: 310260 - protein, 345 aa, unidentified
MEQISRIGMDTSKHIFQLHGVNTAEQPVLRKKLRRKEMFAFLEKLAPTVIAIEACGASHHCARLLQSFGHSVKLIAPQLVKPYIKRGKNDAADAEALCEAMSRPTMRFVPVKTAEQQAGLMLVGVRDRLIRNRTQLSNAIRGYAGEFGLTAAKGKAHLAPLLERIHADENLPALARELFAAQAEEYAQLQAQIDEVDARLMAWHRADECSRRLSKIPGVGPIGAVLLTMKTPEPELFRSGRQFAAWIGLTPKDHSTAGKVRLGGITRAGDEGLRSVLVVGATTVIQHAQRGGRPSPWLTELLKRKSPKLAAVALANKTARIAWKLMVTGENYAAKAAPAALAAAA

SEQ ID NO: 310261 - protein, 313 aa, unidentified
MNNQEINVGIDTGKHQLDIYIRPLGEYFTVTNDAKGVKEAIKRIGTHQPARIIIEATGRLETAFVCAAAKANLPVVIANTYHVHNFAVSTGKRAKTDKLDAKMIAHYGEALKPRLSEIKPDNIQQISDLLVRRAQLIDMRTMEKNRLSILPKTLHRSIKKIINTLQKEVEHIEETLDELMQDTAQWQELKDILLSVKGVGKVLAYTLMSDLPELGQLNRKEIAALVGVAPMNRESGAYKGKRKIKGGRHRIRTVLFMSMLSAIQSNPKFKGIYTGMVAAGKPKKVAIVACMRRLITILNTMVKNNRQWDEKLV

SEQ ID NO: 310262 - protein, 331 aa, unidentified
MNYIGMDIHKQFTVVVVKDEQGNKIVEDKFTNSENNFGSFMQKYKPEETKIVIESTCVWEYIYEILEAKNYEVKLANPYRTRAIAEARIKTDSIDASTLADLLRANLIAESYIPPKEIRRLREITRERKTFVKQTTQIKNKIHAILIKRGIELNYATLCKSAIIWIKQKLPDDKIVLHYIELLEFQKKKMEEINKTITEKSDENADAKLLTTIYGIGSIRALNIIAEIGEINRFPSADKLCSYAGLVPSVHQSGHTLRFGRLVQQSSKTLKHNLIETCWNIIRVKESNPLKDFYKKLSKKKGKQKAICATARKLCCVIYAMLKNQEEFRYS

SEQ ID NO: 310263 - protein, 395 aa, unidentified
MKANELQVAVDVGARTHRVAVGDASGRLIEEFDLDHTAAGFAGFFTRIERLRGSRSAPVAVAMEGFNGWARPLDRQVLEHGWRLYNVNNLKLARYKEIFPAPAKTDAIDARRILELFRLRGDLAIARGVLQEIVATTEEAERLKRLTRRRRQLVNEKVRVLNRMHSDLQAVCPGLLAITAEADNLWFLSLLGAREDIRRLAGLRPTSLLALEGVGRAYCVKIQAWQREALFSHEAEWAGPMIVADARRVLALKREIAALDQLIEPLIDGCETARRLRTIPGFGPTCSGELAGEIGAIERFATEASLALYLGMAVLDHSSGTHTGTKRPRQVNARAKAAMMTAVARHMEQVPSSRAYYDKKRAQGKAHNQAVRALGRQLVRVIWSMLKHQRDYEVR

SEQ ID NO: 310264 - protein, 378 aa, unidentified
MALQTAAHDGPVLFLALELSKSAWLLAAHLPGANKPKLHRIEAGDTAALLATITALRARVAGKSGTAVDVACCFEAGRDGFWLHRLLTANGVASHVLEPTSILVNRRARRAKTDRLDAQGLLRVLMAHCRGDRQACSMVRVPTPEEEDAKRLHREREHLVQERVRVENRIGALLATQGIRGRPSLRSWERDMTALRTGDGRALPTRLRAELDRLRRRLVLTLEMIREVEAERAAALAAEPQDDSCRTIAALCRIRGIGETSATVLAREVLYRPFANRKQLASYVGLAPMPYQSGGMDRDRRISRSGNPRARTAIIQLAWLWLRYQPGSALAGWFRGRVGALAGRTRRIAIVAMARKLLIALWKYARTGLLPEGVEIGA

SEQ ID NO: 310265 - protein, 423 aa, unidentified
MPVTTLYVGIDVSLKTNQVCSINFNQDVFFNQSFDNTPSGTETLIRRLLSVLDAHPELTKIRVCMEATNVYHTHVSSVLASDARMQAYDVHVYSVNASLIENYKRTFADRSKTDPEDAYLCADYVRIGKCKNLPAVIGYQKIALQRLTRQRKHIAEQLGIEKQYLSSNLYLKFSALKVNPEVKPFSNIFGKTSSVMLTDYLTNEEIVQADVADLAVRIAELSRNRCDNPEEIARLLRQVSANSYRLDKVASDSVTKAMASSFRMIQCYQDELKTLDKEILRLVESMDNHYYTILTSIKGIGHVYAAGIIAEITDIRYFPSHDKLASYCGLRWKRNQSGTRDSQHRRQPNSCNSFLRYYFVEATGSVIRNCPNLAAYYNRKRSEVKINAHKRALVLTSRKFVRIVFGLLRNNKLFDDHCLVTTD

SEQ ID NO: 310266 - protein, 366 aa, unidentified
MRNYIIVGCDVSDRFASLQWAYNLGGPSKRSFVNDEEGRLRMIEFLHGRAHEAGGAEVVLAYEAGVHGPGLHDALRAHGIRCEILAPTKMPVSVKARKMKTDDEDALRIFEVLRGHLMAGNRLPAIWVPPPAVREDREVVRARLDVARKARCVRTQIRMLLKRAEVRRPRDFKKAWSAKHLAWLRGLRGGTSPLGRGSRVALDSLLRQLVWLDDETTRLDQAVVSLAKSTAWAVPARALQEEAGVGFLTAMVFLTEIGDLNRFRNRRTIAAYLGLTPSSHETGNADDRKGHITRQGSARVRWALCQAAWSRVRNDSREKAFYERLVRKHPKKKKIAIVAVMRRLAIRLWHRGQEGDRRVATTAAVA

SEQ ID NO: 310267 - protein, 559 aa, unidentified
MCSLDIAVPYKGGLVMARRKGSSRRQGRIHRQKVNSAFLERARAVGAERFGILTVDPAKQRSAVKLTNYYGQELMAPLVVEHTDRDLKALVETVKREQQEHGLGDLVVGVERTGRYHAPIRRALELHWTVQMLHPFATKQLRQPVDPGQKTDPNDLNAMTRGMIVGYGAEEPGLPERWLEWRLVSRERENFVRKTATLRNQMKERLEALLPGYAALFGAFWQAPVALAVAERYPSAAALLQAGPDTILEALRHDGQATRRDTVARLLEWARNAPTPDPCADLNHRLLRGEFGLLRHLESALRAFECDLVQYLVDTPFVLLISIPGIHVVSSASYAAELGPLEHYLTPKNISGRAGLYPSRYQSDETDRADGPLVSRRNARLRDAIMEIAHNLIRCNHYFEAWAEVRRRQHWPARKLDLAVATRFIRISFRMVSGRMVFRHPCAQGRDAILDKLLDFALRHQIPPRDIQDLLQRALRQIPQDAFEEEARALIGRLPRRDRRDDPRPDTSGREPVRLGDLLRQVIHHLAPHLSLELPRSTTEEPTHTGGLPNHRLSAAEGS

SEQ ID NO: 310268 - protein, 472 aa, unidentified
MKAKHRRCCGIDVHKNSVTVCVLPPAGQPHLEVKRRKFRTFTRDLRQLRNWLKNCQVTDIAMESTGQYWRPLWNVLEGEFAQLILVNPQHIKGLNGYKTDPKDALWIAGLLEGGKLRNSWVPPRPIRELRDLTRQRVNVLEDLNRAKNRIEQLCQTGNIKVSSVATDLFGVSGRRMLKAIVEGKRDPGWMADYARGALRGKRGDLERALEGTFTDDQRWLLDKELRQVEWLEAQVVTLEQEIERRVAPFEEQIQRLVTIPGIERKTAWMIVAEIGVDMSVFPDARHLASWAGLCPGNRESAGKRMSGRTRKANRYVKRAMCQAAWAASHTKDTFLSAFYRRLCVRKGSPKAVIALAHHLITVVYQILSRAEVYIELGGDYYDRRNKPKVVARLVSRLSRLGYYAELRPIGPPQTNADPSPPEAAEASQAASNLKRKRGRPCKCSERGINCKHTTSVQVNPLIPQPASTVRFS

SEQ ID NO: 310269 - protein, 309 aa, unidentified
MSAYAGIDVSKATLQVALFPKADELCVPNTEEGLASIAEYLSAHQVERVLVEATGGYEKLSVKLLANAGFKVQRINPVRSRQFALAMGKRAKTDPIDAQMLAMFASSLEAKSFAKPDEEREVLLELVNLRNNLLQQRDDNRRRIKQAILPSVVDIYLALEASLKVQIKAVDQLVDAQARKVDSELLQRLHAVKGVGPVTIASLFCYLPELGDLSRGQIAALAGVAPYNNDSGSKVGKRQIYGGRTKLRRATYMCALVMVRYNADFKARYARLRAKGKCAKVALVACMRVLLIRLNAMVRDGTPWRDHAV

SEQ ID NO: 310270 - protein, 389 aa, unidentified
MKIFVGIDIAKLNHFAAAISLDGEILIEPFKFTNDADGFQLLVSKLESFDKNSIIIGLESTAHYGDNLVRYLVAEFYQVCVLNPIKTCQMRKNNVRKTKTDKVDTFVIAKTLMMQDDLRFITFFDLDMMDLKALGRFRQKTIKQRTRLKIQLTTYVDQVFPEIQYFFKSGLHQHAVYALLKEAPSPKEIASMHMTHLANLLKVNSHGHFTKEQAKELRVLAQKSVGANDSAISIQITQTIQQIELLDSQLEKIEAEMTDIMKFNDSVIMTIPGIGYINGGMILGEIGDIHRFSNPNKLLAFAGLDPSVYQSGNFQAKTTRMSKRGSRVLRYALVNAAWNVVRNNATFKAYYDAKRAEGRSHYNALGHCSGKLVRVIWKMLTDNVEFNLK

SEQ ID NO: 310271 - protein, 408 aa, unidentified
MTVVGIDVSKGKSMVASMKPGGELVAAPYEVRHSDIELSRLALDVLCMEPDTRVVMEATGRYHEPVAALLHSEGIFVSILNPLLIKQSGAGSLRKVKSDPKDALKIAKYGLDNWSTLREYTPTEAIRQQLKLCERQCDLYSKNIVMLTNNLISLSDKTFPGVNELFSSPEKADGHLKWVDFYRTFWHCDCINRMSPDAFGERYKKWCKKKGYHFSADATDALYAASCGLYTTLPRDNNAKLLVTVAADQLIALRENQSKLEAEMLNLCKQLPEYETVMAMYGVGKSTGPHLMAELGDIRRFPHRSSIVAFAGVDPGVVGSGKMQLSSVATSKRGSPQLRKALFQVVSTYVKRKPENEAVYQFYAKKRDEGKPFFVCTTAAANKFLRIYYARVKECLNAAESAVQTEEG

SEQ ID NO: 310272 - protein, 415 aa, unidentified
MEPVLDSCAGMDVHEKKVDVCIAHGPLEKSPKFEIRTFSTMTSDLEDLKSWLKKYNVTTIGMESTGVYWKPIFNIMEGEFTIVLANAQRLKAIPRKKTDIMDCKRIAKLLRYGLLPNSFIPPREIRELRDLNRTRRKLVGMMTSEKNRLTKVLESSNIKLSSVVSKISGVSSMAMIRSLLEKDRLSKEEISQLAKGSLKKKVDLLEKALDGKLTDHHRFLLKMHMENLDHLARQIGKIDAQIERKMIPFQKESNLIQSIPGISKVSASAILAEIGTDMSQFPDEAHLSSWAGVCPGNNESAGKKKSGKTQKGNSFLKGTLAEAAWAASKVKRSTYNAFYQNIVRRRGKKRALVALAHRMLMDIYRVLKTGTPYQDTGAEEANERATKRKERSMIRLLEKAGYSVVKTSTAEIAVA

SEQ ID NO: 310273 - protein, 316 aa, unidentified
MANHVTKITLGIDVAKDQHLTYNWQTNQTTRLPNQVGDIRTWLKSFHGPVRIAIESTSNYHLTLVDEALALGYEVYLVNPRQLVHYREAVNVRNKTDPLDAWLLARYLEHESDHLRPFQPRDPRAQRLWGLILRRATVVKSRQQLQQSFAEVQMSIQGLLTQYENLMARIECQILKLIKEIGWWSDYQCCLSIPGIGHGNASALVVAYHRGAFSGSDAFISYLGLDVRIRDSGRFKGRRKLTKRGEPELRRLLYCAAYPARHYQRFAEYFQRQLDKGLCKIAARVALSRKLARIAFTLMRNQETFIKEEKIYCVES

SEQ ID NO: 310274 - protein, 409 aa, unidentified
MVHARCAGLDISKRDAKVCVRIAGAGRRKTVETVTTWGSMTSQILALRDHLIAERITCAVMEATSDYWKPFYYLLEDAGFDVLLVNARHVKNLPGRKTDVADATWLAQLGAHGLVRASFVPPEPIRHLRDLTRARTAITRERSREVQRLEKLLEDAGIKLSAVASDILGVSGRAMLESFIAGNRDPAALADLAKRRLRSKIPALTEALTGRFNEHHAFLARVHLDLVDQHTAAINHITTRIEATIKPFHWFRDLICTIPGISILTADVIIAETGADMTRFPTAGHLASWAGTTPGHNESAGKVKSSQTRPGNPYLQGALGAAAMSCAQNPGTYLGARYRRIASRRGPQKANVAIQHSMLIAIWHMGTNGCIYDDPGADYFNRLHPERAKKRAISQLEAMGYNVTLTHAS

SEQ ID NO: 310275 - protein, 401 aa, unidentified
MKEFNAKEVRIETASALETVKPARADRKYPAYIGLDVHKETIAVAVAQAGREAPESRGEIANKPKTVAKLVERLNREFGGEVLLFCYEAGPCGYGLYRQLLELGHDCQVVAPSLIPRKPGERIKTDRRDACKLARTLRNGDLTAVWVPDEEQEAMRDLTRARDDMKGQERKARQQLNAYVLRHGHAWPSNKTRWTQTHYNWLDSLKFPHDWQQVVLQEYIDAVKATSQRVADITAQMERVLPQWSLSPVVDSLVALRGIDKLAAMVLLAELGDISRFDSPKQLMAFLGLVPSEHTSGGRRRQGAITKTGNRHARRMLVESAWSYRFPARQTAHLKRKAANASDEAKVIAWRAQKRLCGRYRTLLQAGKNTKQTTVAIARELVGFIWDIACHEMPKVQQAVR

SEQ ID NO: 310276 - protein, 313 aa, unidentified
MIIPIRCVGIDVSKQYLDIFDEGLGVPERIANATQAITQIAARWRCDVLVVFEATGIYDLELREVLSQAGIRFARINPARARDFARASGQLAKTDPIDARMLAAFARAMQPATEQAANPARNTLARLAKRRDQLVRMRAQEKNRRSEADERAMAERIGRLIEVLDSEIAEIEADIKALIKTEREIADDARLMRSLPGVGPVACMQLIAKMPELGHVGAKQIAALAGLAPFNVDSGAFRGKRKIAGGRKRVRDALYMAALNAVRWADPFKVFYERLRQAGKPAKLALIAVARKLLTVLNAMMRDRKPYLRANPA

SEQ ID NO: 310277 - protein, 377 aa, unidentified
MADARSHDQLPSIYIGVDIGSEILDFAAHGIEGTCGNDPSGFRALLAATNRLRTQRHFICEPTGQYGIKLVSFLLSKRCRVSVVSGSRVRQFARAAGRKAKTDRFDAKLLAEFGEWSRPDPMKRPSNSQMALSRAVRFRWQLERLRQVVKRQHGQQLDSVCRKRMGEVLKVVSAQLKHANGMVDAAVASDPHFRDLSRVLTTVVGVGPRAAATFLAELPELGSADRRRIASLVGVAPFNDDSGTFVGGAIEGGRIRVRNVLFMCAMVAVRHNEVLRPVYEGLRKRGKPHRVALVAVMRRLLVHLNTLSKKFIAAPDDLYVRRAPTKAVMARWSGGEVETLKRLVAERVICKAIAVEMGRSVQAVSAKIVKLRKKGAI

SEQ ID NO: 310278 - protein, 417 aa, unidentified
MIRKVMEVIHPCVGGLDVHKKMVMACRRRLLGDGQVESETLEFGTTMLQLCALSKWLAEWGCTHVAMESTGVLWIPVWNVLEGDFKLLLTNAHHLKKVPGRKRDVSDAEWIGQLMQCGLLKPSFVPSREVRHWRTLTRQRMKLIDQHTGVVNRLHKVLQQGNIKLSSVATDVLGGSVRAMIRAMIEGESDPETLASLAKGRLKSKHEQLVESLEGRLNQDDRWVMKELWEQLEYLEEEIARYDDQIQEKMSAYAELLKRLMTIDLIERRSAENMLAEIGPEMRFFPSDDHLVSWAGLCPGSDESAHKNRSGKTPKGNQWLRRALVEPSWGAARRKDGYLGALYHGIAVRRGEKRAVIAVARTILQAAWHVLSKGVDYKELGGDHFDRRNSEQTKNKLIKRLERLGYEVDLKPKPAAA

SEQ ID NO: 310279 - protein, 319 aa, unidentified
MALPLTIVGIDVAKDWLDLWLDPLKRFERVSNNAAGWAALVDRLTLLGPKAGTTVAFEASGGYERGLRQALITAGFAVQRLNPLRVRLYARSLGRNAKNDGIDARVIARYAAAAETIPEVLDPLRERLAELVSHRRSLINERVAIGNRTAMLQDPGLMAHNRQRLALLERQIGEVDRRIGDTVSNATQLLAKSRLMTTLSGVKHATAATLIALLPELGRLTRRAIAALVGLAPFDHDSGRHKGTRASAGGRAAVRTALYMAARAAARSTSPLGHFYRRLIAAGKTPKVATVALMRKMLVTLNAMLRDGQPWKYAHASVA

SEQ ID NO: 310280 - protein, 345 aa, unidentified
MKLTTVSVDLAKAVFQLHAIDQQGKTALRKQIKREQVVPFFANLEPCLVGMEACGGAHYWARKLQALGHTVKLMAPQFVKPYVKSNKNDVADAEAICEAVTRPNMRFVPIKTVEQQAILAVHRARQGFVKARTAQANSIRGLLGEFGVVLPQGIRHIVERLPDILEDHENALPGSLRQLMQRLMEHFKELDRQVVELEREIQQWHRSNEDSCRLAEIPGVGPLTATALVASVGDAKNFSNGRQMAAWLGLVPRQHSSGGKPTLLGISKRGDGYLRTLLIHGSRSMVRVVESKTDPSADWLKGLLARRHTNVAVVAQANKTARIAWALLAHGGKFRPDYTPDVTVA

SEQ ID NO: 310281 - protein, 369 aa, unidentified
MADRITYVGLDVHKDSIVVAVAAGGLRGEVREYGRIANTSTALDRLLRKLGGDGMRLRFCYEAGPCGYGIQRRLSTRGHECVVVAPSLIPKRAGDRVKTDRRDAASLARLHRAGELTAVWVPDVGHEAMRDLVRARLDAVHSLRRARQQLSGFLLRHGCHYGRAAWTRLHRRWLAGLKFEQAVHHIVLEDYIAAVEAAEARRNRLTAQIEAMLPDWTLAPVVAALQTMRGMALVNAASLIAELGDLSRFANPRQLMAYLGLVPSEHSSGSSVKRGGITKAGNAAARRLLIEAAWSYRFPARLSRELLLRQESQPRLIRDIAWKGQVRLCARYRRLARTGKPANIVTTAIARELAGFVWAIARQVTVTTD

SEQ ID NO: 310282 - protein, 368 aa, unidentified
MTQMKFIGLDVHKETVAVAIADETRDGEVRFYGTIPNTPEAIRRLFDRLSGSGIELHFCYEAGGCGYGIYRQLRQLDASCDVIAPSMMPKKRGDRIKNDRRDAVALARLLRAGELTAIWVPDESHEAMRDLVRARRQAKGDLVAARQMLLGFLLRHGRKFTGKTNWTRMHWRWLGEQAFDSPHQQFVFGECIRRIEEAQARCDRLDHMLQEAMESWSLAPLVKGLQALRGVGLVIAATLVTEIGDLARFQAPKHLMGWLGLAPSEASSGSRTRRGAITKTGNAEARAMLVEAAWAYRLPAREERRYRMRVEDLPEEIRAIGWKAQARLCQRYRRLSAAGKPQPKVITAIARELAGFVWDVSRHIQPIQ

SEQ ID NO: 310283 - protein, 350 aa, unidentified
MELHTIGIDLGKTVFHLVGLNPCGEVVVRKKFSRKQLLHFTANLNVKLIGMEACGGSHFLGQALREQGHEVRLMPAQYVKPYVKTNKSDYIDAEAIAEAVERPKMRFVPIKSDDQLDLQSLHRVRERWVMRRTAVINQIRGLLLERGITLRQGRRHVDEALPGILEDASAKLSGAVRLLLAQLKLELDHLQMRIDEADAVIQKIAEENEACRRLVAIPGIGPVTATAIIAAIGNGAAFKKGRGFSAWLGIVPGEYTTGGKQKLLGISKRGNSYLRRLLVQGARAVLQQSAKQSSGLSAWLAQLTTRTHSNVAAVALANKLARMAWAVLAKNEPYRSPMSAGAATAGLACR

SEQ ID NO: 310284 - protein, 327 aa, unidentified
MTALSASDNNTFIGIDVGGASFEVAWHRGGCTQYANRPDAIAGFVERLQAGPPIVRIVLEPTGGYEKPLLRALRRVGFVVEKIHTSRFKAYRELVGAKAKSDTSDARLLAAYAAAPDEVRGRKAHHVVLPEDAGREELAELAARRDQLKQMIHAESCRLTTVQNEAIRREITLHVDALRASARNIHAAMASLVRQRDDLNRDKQLLRTIKAIGDTSALTMLALLPELGQIDNKAAAALVGVAPFVRKSGTMNAPARICGGRAAVRNAIYMAAVTASRHNPVLRPFYERLIAAGKPVKVALVAVMRRLVVFANAVLKSGQPWKGAIAA

SEQ ID NO: 310285 - protein, 342 aa, unidentified
MDHFAGLDVSVKETSICIVDDTGGIVKEVKVASEPQALLKALGNPTYRFKRIGLEAGPLSQWLFSALAEAELPVVCVETRHMQAVLKAQINKTDRNDARGIAQMMRVGLYRPVHVKTLRSQKLRMLLTHRKLLQSKAIAIENDLRGTLRNFGLKVGMVGTVKFEARIQELVETLPDLAVLVEPLLIVRRALREQIVILHRRLLAIVRDDEVCRRLMTTPGVGPVVALTYRATVDVPARFRKSKSVGAVFGLTCSRYQSGEIDWSGRISRCGDEMMRVMLYEAAQSMLHSKKWSWLKAWAMQIARRRGMKKAIVALARRLAVIMHRIWVDGTEFRWTREAAVS

SEQ ID NO: 310286 - protein, 382 aa, unidentified
MQASTVDTPTAGHSGTIFVSIELSQKTWLVTLHSPDRDRISRHKLEGGDHAGLLGLLENIRARAALKLGAAPKVVSCYEAGYDGFWLHRLLTAAGITSFVFDPASIAVDQRARRAKTDRIDGELLLRTLMAHLRGEPRVVRIVRIPSVEQEDARRASRERDQLVKEQTAHTNRIKALLRLLGMAVGNPRRGDWLGWLEQQRDRQQHPMPPHLLAEVKREHARLMLEREQLAALEAVQAAQAPAVPAPMAERRDALRRLKALGPAFTATLVNELFYKDFCNRREVASYCGLTPSPWRSGGIDREQGISKSGNRRARHKAIELAWLWLRHQPDSALSCWFRARTASAGKRAKRIAIVALARKLIVALWRYLTTGLVPEQATMKA

SEQ ID NO: 310287 - protein, 314 aa, unidentified
MADPCSVGIDVSKASLDVAWSTNPTTPWQTTNDDPGWAALVAHVRALAPTIVVLEATGGYEIGVASALSTAHVPVAIVNPRQVRDFAKALGLLEQTDRIDAAVLAAFAARIQPTPRPLPDDLQADLQALVTRRRQLVDMLTAERNRVPLARGAVRKNVVAHIAWLEKQLGHTDRDLRTQIEASPIWRARDHLLQSVPGIGPATSARLLASLPELGTLSHRQISKLVGLAPLPDDSGRRHGYRRVQGGRGAVRSALYMATVSAITHNPTIRAAYRRWRAAGKLPKVALVAAMHKLLIHLNAMIRHQTPWHPPATA

SEQ ID NO: 310288 - protein, 443 aa, unidentified
MRTIGLDVHKRFAEVAILDQGERVVRRGERIDATASALRAFARTLGPEDQVVLEATVNTWAIADLLRERAGRVVVSNPMRTRAIADAKVKTDRIDAAVLAQLLAADFLPEVWTPDEATRGRRRQVAHRSSLLQQRTRLRNRVQAILHRNLLDCPFSDAFGKGGRRWLAEAALPTGERGQVESALRLLDALEAEVAIADTEVAEETLGDERVQRLMTIPGVGATTAFALVAVIGDVGRFPRPNQLVGYLGLDPRVRQSGDRPAHTGHISRQGQAHARGLLVEAAHSAIRTPGPLRAFHERTRARRGPQIAAVAVARKLAILAWHLLHSGTEYRWAPSGLTAAKLRRLELTAGAPRRRGGWDARATDAERQIHSRQSAEERRALAQAEEAYRALVAGRRHQEDAAAANGERLCGAKPDARRRSHPHPPHFSTGSDRVPDQASASS

SEQ ID NO: 310289 - protein, 399 aa, unidentified
MDRNRTVAGLDVHKDSVYLCIMGYDEAIIFEKNYGVLTPDLRQMCNDMVGRGVTEAAMESTAVYWVPVWNELCESMELKLVNPYFIKQLPGRKSDVKDAQWIAECLLKNLIKGSFVPEPVVQDMRKLNRRIMDLNDDMTYNTNKLDAALQRCGFRLSNYVTHIKGKSYQSVLSYIIEGERDPGKLITKVHGRTVNKHGRETIMAAITGSFSDTDIIIFRQTKAVIDQIEKQIEQCQEKLTALCQEHFSEQYIRLQTIPGVKERAATAIIAETGVDMKMFATAACLVGWSGLKPRNDVSNGRYKSRKVTHGNRYLRQILIEIAWVASRTRNCFFSNFSYVQTTVKKKSKMKIQVAIARKILVAVWHMLSKQEDFIDLYLKRLEEQRLMEEKIRQLESKMA

SEQ ID NO: 310290 - protein, 353 aa, unidentified
MIQNKYVGLDVHQASISIAVLDEQGKMLSQAIIKTEATTITDFFKGLSGSVHLTFEEGCHAQWLFDILSPLVSRVVVCNPKHNKLLLSGNKSDSLDAQNLATLLRGNLLKSVFHSTDSCAALKERVRLYESLTEDMTRISNRIKAMFRSRGIACAGRLPYQKAHREQWLAKIQEPGAQARLALLYQQRDFLKQLRRRAKLEMLQEAKRHRAFKVLLKVPTLGPIRVAQIIATVSSPQRFRTKRQFWTYCGLAVVRRTSADYEFKDGCVKKVAKATATRGLNRNFNHRLKQVFKSAALDAIRRGQFKKYSQHQKERGLKAELVRVQMARKLAAIVLAIFKSGEEFDEARLTCLS

SEQ ID NO: 310291 - protein, 356 aa, unidentified
MINHNRLNFTGQPIYIGLDVHKKSWSVSIFSKYGEYKTFNQLPEVDKLVYYLRHHFPGALYYAVYEAGYCGFWIHDQLREKGIQCLVVNPADIPTKNKERRTKRDPIDCRKLARSLRNGEIEGIYVPCRSKLEDRTLIRTRQSMVRKQTRCKNQIKGMLLFYGVVIPEEKEMGHWSRRFIQWIEQIQMERASGDIALKAHLEELSHLRQLIANLNRAIVRLARTEEYRPAVNLLKSVPGISTLTAMILLSELCEVTRFPSLDELSCYVGLIPDTQGSGEKEYVGGMTQRRHSQLRWLLIEASWVAVRKDPALLMAFQEYCKRMRKTKAIVKIAKKLLNRIRYVLKNQAEYVPCVIE

SEQ ID NO: 310292 - protein, 345 aa, unidentified
MPIVGGLDIHRKQITFDYLDTGTGQVRRGQITPADRVHLRAWLARFAGRDDVAFAVEACTGWRYIAEELAAAGVAVHLAEPADTAFARGRKRHAKTDKTDSRHLRMLLAEGRLPECWIPPGHILEARALLELYHDLRAGHTAWVQRIHAVLFHHGAPALGEGTLRTERGLAALQAAAAAHLSPAGQLQVATALEVIEALETRMHAVRHQLLAAARHLTGAKVLAARLYGVGPITALAMTCWLAGAGRFSSSRQAVRFAGLDITVRSPDRKGPPGRLSRQGPPVLRWAVYEAGKTHARAPAPDHGYYATVKDREGGKRAALSEARKILRQACHILTELGDDALSAA

SEQ ID NO: 310293 - protein, 310 aa, unidentified
MTFYLGIDVSSKSLDVALSTADTPMQCWQYANTPAGVKKLLKALTAHAVQHVVLEATGGYEMLVLEALATQYPTTRIASHRGAAFARSLGRFAKTDAMVLAHMAQAIPPQPYVPLDPTQRHLRGLVKGRDQLVQQRDDNRRRIKQADAAPVRVALERVNALLEKEIRALEARLREAADACDAGRACQLSQVPGVGKVTVATLLAFLPELGRCTNRQVSALVGVAPYTQQSGRRDGPRQIMAGRPFVRRVLYMAALAAIRSKASPLRAHYLALRARGKAAKVAIVACMRKLLITLNAMVRNSTPWQGIVAA

SEQ ID NO: 310294 - protein, 418 aa, unidentified
MAKKRRITDEVEEIVYERCCGMDIHKENVTACLNINGKKEVRTYGTMTDELLTMTKWLKDNEVQMVAMESTGSYWKPIFNILENEGVSAILVNPQQIKSLSERKTDVRDARWISNLLRHGLLRASFVPTREMRELRELVKYRSSLSDDSTRTLNRIDKVLQGANIKLSNVISRTNTKTEMLIIQALANGENDVKTLAELAKGTLKNKIPELKRALNGLLGDHQRMLLKSMHGHLKQIHEELEMIEAEIDRRMEKEAELIERLDEIPGVGKITAQSIVAEIGTNMDQFPDEKHLSAWAGVCPGQNESAGKRKSGKTKKGNSNIKKTLVQCANSASHTKDTYLSAQHKRIAARRGRKRANVAVAHTILIICYFMIRDGVRYQDLGANYFDNRDKEGIVKRSIKRLEALGYNVVATPKEVA

SEQ ID NO: 310295 - protein, 344 aa, unidentified
MTKTPIAVLGIDLGKNSCSLAGMDATGAVVMRKRMTRDAIVTFAMTLPACIIAMEACCGAHFLGRNLALYGHTIRLMSPEYVQPYVKAQKTDDRDAEAIAEAATRPTMRFVSLKSEDQLDLQILHRVRERLVNARTALINQLRAILLERGIILPKGRINLMRRLGDLMAGDPAISARTATLLSDLRAEWAGLDQRVKAYDDELAALTREDVQARRLATIPGIGVINATALLAAIGDGSAFAKGRDLAAWLGLTPRQHSTGGKTKLLGISKRGNGYLRKQLIHGARAAMPHLAAKPNQLGAWLQNMLARAHPNVVVVALAAKLARIAWAVLRHEKDFDRQALVAA

SEQ ID NO: 310296 - protein, 418 aa, unidentified
MSKADLTIDHTPIKENPMNAVGIDVSKNKSTVAILRPFGEIVTKPFDVKHTSSDITHLISQLKSLNGDTRIVMEHTGRYYEPMAQWLSDAGLFVSAVNPKLIKDFGNNSLRKVKTDKADAVKIARYTLDNWCDLKPYSNMDELRRQLKNMNRQFDFYMKQKTAMKNNLIALLDETFPGINTFFDSPARTDGSQKWVDFATTFWHVDCVRKQSFSSFSKRYQSWCKKKKYNFQSQKPKEIYEFSQELIATLPRDNVTKLLIQQAVDQLNIASKNVESLRLLMNQTAAKLPEYPIVLSMAGVGTTLGPQLIAEIGDVSRFSHKGALTAYAGVDPGANQSGDYEQQSVRTSKRGTPQLRKTLFLIMDSLMKLAPPDDPIYGFMMKKRAQGKDYYVYMTAGANKFLRIYYGRVNECLASLTT

SEQ ID NO: 310297 - protein, 375 aa, unidentified
MRDFSTFIGMDVHMETIAIATAGKHGAPRYYGEIANTAEAITKLVKKVVPSRSRAVFCYEAGPCGYGVYRQITDMGHRCDVIAPSLIPKKAGDRVKTDRRDAVTLVRLLRANELTAVWVPDQQQEAMRDLTRIREDMKSMERRARQRLNGFLLRNKRIYSGQNKWTQAHFRWLEKISFENPIQQIVFQEYADAVKHLQGRVVSLEEEMRRALSGWSLGIVVEALMALRGVNLVTAMTIVSEIGDISRFESPRQLMAYLGLVPSEDSSGKRKRRGEITKTGNGHVRRVLVEASWSYRLPARKTAHLQRKAEKTSEAVQAIAWKAQKRLCGRYWHLTQKGKLKVQACTAVARELAGFIWAIGCEVMGKNNTPVVKVA

SEQ ID NO: 310298 - protein, 366 aa, unidentified
MKKTSTVRVNGNMIFKGHKLTIGLDLGDHWSCYCVLDEAGKIILEQKVATTPEAMKQTFGKIPRSLMALETGTHSPWVSRLFTELGYKVIVAHAQKVQLITKSNRKDDRHDARTLARLARIDPELLGPVRHRSAQAQIHLTVIRARAELVRARTALVNAARGLVKSYGQRLPKCGTQQVSRELGAGLHAELREVLEPLFKEIESLNERIQEYEVRVEKIAKENYPHVELLKQVKGVGTQIALTYVLTLDDPQRFPKSREVGCFLGLRPGRRDSGESQPQMRISKEGDRYLRTMLVQGAHYILGPFGEDSDLRRWGLKLAARGGKNAKKRAVVAVARKLAVLLHRLWVSGEVYEPLRNSQKAMRAAA

SEQ ID NO: 310299 - protein, 345 aa, unidentified
MQAEYDGRQVVGIDLHRRRSVIVRMTEAGEQLGCVRIDNDPLVLATEIGKAGEHPEVVLEATYGWYWAADVLQEAGARVHLAHPLGVKGFTYRRVKNDQRDAADLADLLRMNRLPEAYVAPPAVRELRELVRHRAKLVALRSGLKAGVHAVLAKQGVHIPVTDLFGIGGRELLTAAGLDGPYLARVNAYCRLIDAFGFEIDAVSGQLRARLCPHRGYQVIQRLPGVGPVLAAVFVAEIGEAGRFTDAAKLVSWAGLTPRHRESDTTVHRGPITKQGSGLVRWAAIEAAQKMPASAGWLVSSRARIAERRGRNIATVAVARKLLTLVYYGLRDGHIRALATATAAG

SEQ ID NO: 310300 - protein, 313 aa, unidentified
MSEPKFIGIDTAKDSLAVASSPEGITLAVPNSPEGRQQLINAFKTHTIALIVLEASGGYECAAAADLLDAGFTTVVVNPRQVRDFAKGLGELAKTDPIDAKVLARFAQIVQPKPRPTPSAQQAVLAELVSRRRQLVDALTQESNRAAMSHLAQVRRSIEAVRRMLKKQIEKLDDEIAKIIEADETLACKDKLLRSTPGVGKGASAMLLSHLPELGQLNRQEVAALVGVAPYDLRSGTWIGRSRIWGGRADVRSVLYMAALAAIRSNPTIKAFAARLKAQGKAAKIVITACIRKLLVILNSMLRSETPWRQKNS

SEQ ID NO: 310301 - protein, 449 aa, unidentified
MSKGSGVTRGDRRRNARKARLRALVPQENAVLGLDLGEKRQALTVAGADGQVLARRSPQVSVHDLGPCLGWALEQARAAGYGGLSVACEPTGSRWMAVQDLCAARSLPFVCVQPLVSHVAREQEDLTGDKTDEGDSALIARLARELHCYEPERLEGAWAELREEGRRRAQLITSATAAKQLIRDKLGLVAPALLDSACEPFDSPTWLASLEVVLERCGGDAAQAAAMGYEAFAAAAAAALGGWGGQRVGGTCRQLFSALGDDRGAARMRRAALRRARGALADLKYARARRGQAEADMITLLAELGVDAGRICEIPGLSAVTLAAVLAETGDLHRYESSSSVVKHAGMSPARNESGSFRGQAKISRRGRPALRLAVWRATWPVLRHCAVLAAKHAALTGRAGGSRLTAGQARVACAASLLRWIWSLTVHGTRWDARIAAGELGHHHAMAA

SEQ ID NO: 310302 - protein, 422 aa, unidentified
MLAESHDEEQIIARVAALDIAKAELVCCVRVPSPAGGKRRLQEVATYSTMTQALTELANRLVEMRVQRVVMEATSSYWKPVFYLLEAHGLDPWLVNARDVKHLPGRPKTDVLDAVWLCKVAERQMLRPSFVPPWPIRRLRDLTRYRTDLVAARTAEKNRVEKLLEDACIKLSVVASDIFGVSGRAMLAALVAGERDPKVLAQLARARMRGKIDRLEQAFDGHFDDHHRFLLSRMLARIEGLDADIAAVDAQIDVQLAPFAEAAARLHAIPGIGPVAAAAIIAEIGVDMSRFPTAGHLCSWAKFAPGINSSAGKSKGSASSGHGNPYLARVLGEAAVGTTKTNTFLAARYRRIARRRGQPRAVVAIGRSILVIIWHLLHDPDTRYRDLGSDHYARHVDPTAKKRSHIRQLEALGYTVTLTPAA

SEQ ID NO: 310303 - protein, 417 aa, unidentified
MKTWALYAGIDWSENLNDLAVVDRAGQVVAAHRFEATPAGVREALAVIAALRASHGFSRKSVPVAIEASRGLLVTALRQHGQTVVPVHPATVARYRGRINPGNRKKSDAGDAALLANILRTDGRLHRPLPRNSEPVEALGALTRAQLRAVRTRQHHYLQLRAQLQAVHPAAVTAWTHLNGRLFRPEAREVIALAPTSGSAARLTRRQIRDALERAGRIRLLDAEAERLHALFQAKTIRNPPMVEDALGREVRATVRLLSEACATADEFADAASKLFTQHPQHPIYLSFPGIGLLTGSRLLAELGDDPDRFATAKGLAAYAGARPFTWASGSSRKVMHRRIAANKRLATYGHHWAFSSLTHSPECRAHYDRRRAAGDRHTAALRNLLARLLSSLHHCLRHGQEFDPAAWPRAPEPPSG

SEQ ID NO: 310304 - protein, 356 aa, unidentified
MEIHRVQNFVVKGEEVFVGLEDSKKTWKIAVRCDKMVIHQVSMEAKYSVLIQYLRNKFPGCGIHLIYEAGFKGFNLFDRLMEEGIDCIVIPPHLVTEPKINRVKTDKRDANRLAVMLENHDFKDPCFVPDKERREDRQLSRTLWAMQKNIIRTRNQIRRLLDFHGIEVPFPARWGKEEFQALKELPLGDSLKKSLVTFITLLEELWAHRESLLPDLRALCSKERYKKAFGIAVSLPGIGWFTAIRLVLELGEDLTRFTSGKKIAGFVGLGCTEHSTGETERKGRITGMGSGFVRSTLIECSWMAIRKDPVLLAKFTRIWKGKGTKKKAIVAVARMLIVRLRACMISGRPYAVGTVK

SEQ ID NO: 310305 - protein, 338 aa, unidentified
MTQILYIGSDMSKAYFDVALCPERKASMLGEYPNKEQGYQEMAQELTAEIKSDEETIIHLIVEPTGGYEKQLVAFAFEQGWRVSLPNPKLVRDWAKGMGVRAKNDHLDSRTLAEYGAICQPAPENCLAAEVAGLDTLLRRREDLQQMLREEKNRLEALEYKPHASSAAKRSVGRMIELLEEELEQVEAAMKELLDQHTDLKAQARLLLTVSGIGPKTVLIILVFLHRWEARTAGQGTAKGLVAFAGLDPQERRSGDSVFARPTISKMGCTFTRHKLYLAAKGGVRARSGPLRHFYDRLRGRGKAYDLALIAAARKILVWAFAIFSRQVPFDKSLHAAA

SEQ ID NO: 310306 - protein, 407 aa, unidentified
MRVFVGDDWAEDHHDVEVMDERGKVLARGRLPEGVAGMARLHELIGRHLGPGAEDAEVAIGIETDRGPWVAALVAAGYTVFAVNPLQASRYRERHGVSGAKSDKGDSHMLTDMVRTDSHQLRAVAGDSAEANGIKVVARTHKTLIWERTRQVQRLRQNLLDYFPAAIAAFADLDAPDALELLAKAPDPARAAKLTRAQVSAVLKRARRRDIPGKATAILAALRTPQLTQPPAVTAAYAASARSLIAVIITLNEQVKVMQGEVEAVFGRHPDAEIYLSQPGLGLTLGARVLGEFGDDPDRYTSSKARKNYAATSPLTRASGKKKVVVARFIRNDRLTDALMAQAFTALTASPGARALYDQQRAAKVEHNPALRKVANRLVGILDGCLKTRTLYSEEIAWPRQENKPAA

SEQ ID NO: 310307 - protein, 420 aa, unidentified
MQPMEVMVMKRTRDRVGGLDVHRDTVVACARVVDPDGSVHVTKQSFSTTSKGLGELAMFLSDAAVDTVAMEATGVYWKAPYYALEGLFEEVWLCNAQHVKNVPGRKSDLSDAEWLADVAAHGMVRPSFVPPPEIRELRELTRYRKTQVDSRAREIQRLEKVLQDAGIKLTSVASAVWSLSSRAMIEAMIAGERDPKVLAEMAKSRLRAKIPQLEEAFSGHFGAHHAIVCRQIIDHIDFLDRSVGALTDEITTRLVPFEGAVAIVTSMPGISVTTAQVIVAETGADMSRFPTPGQLCAWAGVAPASHESAGKRRPAGTRHGAPWLRRALIEAARAAARTKGTYYHAQYARIAKRRGPNKAAVAVANSMLFTIWHLLLNGAYYEDLGADYFERRHDPVVEAKRLARRIEALGFDVDLNQKAA

SEQ ID NO: 310308 - protein, 353 aa, unidentified
MKCDKYMGMDVHQAMTVVVVLDADGRVILETMEPTEAAAIIRLVQSLSGPLRVTFEESTQAAWLYEVIRAYVTEVIVCDPRRNKLLEDGSKADKVDARKLAELLRAGLLRSVYHGHEATRNLKELVRAYETLSIDTQRTMARIKAIYRARGIRTPGRGVYQPKQRQRWLELLTESGIRQRVAWLYEQLDQLKPLRREAKQAMLAESRRHRAVSLLRTIPQMGPIRCAFIVATVDTPHRFRTKRQFWSYVGLAVVTHMSSEYEMTAGRVVRRRKPVATRGLNHNCNRRLKEVFISAATGGSLHEPYKPFLERLKQNGMRAEMARLTLARKIAAVALIVWKKGVAFDPKKLSCTT

SEQ ID NO: 310309 - protein, 379 aa, unidentified
MDHAIADTSAETVLRGALELSKNSWLLALQLPDRAQPSLYPIRGGDTEGLMAKLTAARDRWAKVSGKAPSIVLCYEAGYDAFWLARFLKARGIECLVVDAASMQVNRRARRAKTDRIDVGMLLRALIAWGQGDRHVWSVVRVPSVDEEDLRRSHRERDRLVRERTAHINRIKGLLFGQGIRGINVKSKYKTLQIDKLVTGEGHPLPPRLASEITREIARLALIQEQIAALERERDQAPTPCKTTERKRVQLMCLTGIGPAIAAVMTREVYYRQFDNRRQVAGFLGLATSPHDSGDVARSQGISRAGRGQVRGTMIQAAWLWLKHQPKSAITRWFVQRTAGQSGRIRRIMIVAVARKLAIALWRFLEQGLVPQGAMLANR

SEQ ID NO: 310310 - protein, 355 aa, unidentified
MIGEKYIGLDVHQATISVAVMDSKGKVVMESILETQAATILEFFVGLRGTLWVTFEEGTWAAWLYDLLKPHVAKLVVCNPRKNALLKHGNKSDKIDARKLADLLRLNDLEPVYHGETGVRMLRELARSYLTIVKDLSRVMNRLKALYRSWAIPCAGRDVYYTRHRSEWLGKIPEAGTRRRAEQLYQQLDMLQHLRQQARRELLAESRKHTITAKLRQIPSLGPIRSALAVALIQTPHRFRTKRQLWTYSGLGLETRDSGEYHYVQGQLRRRKKQVSIRGLNKDHNHDLKGLFKAAATRASVQPGPFQDFYQRSLAKGIKPTMARLTLARKIAAITLTLWKKGENFDVAKLKSQAA

SEQ ID NO: 310311 - protein, 325 aa, unidentified
MNYLGIDVSKDKIDCCLLINDISQKGKTKIFPNNENGFDKLAIWLNQKNIQYSDLLVTLEATGIYHENLCYYLHALQINIAISNPMRTRRFAQGMSILNKTDKVDSEVLAKYGALAPIKRWQPDSENFRELRDLMTRRDVLSTDLVRENNRLEKSTFTVTSKQVITMIQENMLYIQNCIDQIDNLIDQLIERDADLSQEMKLLTSIPAIGQRTALQMLNLFHGKEFESAGSAAAYVGLVPVQKQSGTSVRGATKISKAGSSRIRSALYMAAIVAIRFNPHTKILYDRLLKNGKSKMSALCAVMRKLVYLCYGVLKHKTPYQVDYM

SEQ ID NO: 310312 - protein, 387 aa, unidentified
MSQTAAALIPAPVAYGSTLVLAIEVSNKSWVLAAQVPGLPHTKAKRTIHPEAGALLAAIAGYRARAAATGHSIERVIAVYEAGWSGFWLARWLIRHGVEVYVVQPSSVPVDRRMRRAKSDGIDAELLLRTLLAWLRGEPRVCSMVPVPDEADEDARRCVRERTELISERVGLTNRIGAVLATLGVTDYNPLLRSRCRRLAELRTGLGEPLPANAHAKIKRLLARLELVLMQIAELERERDAVVETKASDKAGKMIQQLISLRGIGVQSATVLVREAFVRRFANGKALGSYAGLASSPYNSGGINREQGIGKGGNRRVRTVMVELAWLWTRYQPSAAQVCWFRERIGPTGRRVRKIMVVALARKLLIALWRFVIDGVVPEGAVLKPAA

SEQ ID NO: 310313 - protein, 459 aa, unidentified
MAQRVDPTKRRADGTPIEPLSIKHPNAAGIDIGGKSHYVAVPPDRVGKGESAVREFGPHTEDLVAIADWLDACRIDTVALESTGVYWIALYELLQAHGFDVWLVDAKSVRHVKARKSDVLDCQWLQQLHSFGLLCKAHRPDEQVCALREMSRLRDITIDERARHTQRMQKALTQMNVQLTNVITDITGETGMKIIRAIVLGERDRMVLAQMRNYRIHASTEQIAKALEGRWSREHLFSLDHELKAYDFASEQIARLDAEIKVLLDAMRVFDKTPAANANKGRRKNTLAFDGSQALMNWCGVDLTEVPGIDVGTAMKILSELGRSLTRFDTVKHFCSWLGLCPGTRISGNKRLSGASKRIPNRVARALKLAAMGLSRSRCAMGAYYRRLALRMGSPKAITAVAHKLARIVYAMLSGQADYVKEDQVRHDARYRERAIKALQKRAQELDLTLSPQAVPAHA

SEQ ID NO: 310314 - protein, 329 aa, unidentified
MNFKNVIGIDISKNTIDVCNHLDQKNDQFSNSKKGLQNFYLWVKSSKNEIEDVLFVYEHTGMYSHLITEFLTDKECHYHIAPALDIKRSMGITRGKDDVIDAKRIALYGYRLKDEITPTKSYSKSITQLKSLMSLKAKLIKQRAAYKGTLSEQKNIYKTKDFKIIFEVQEKMIHYITKQIKTLEYQILEVIKSQEALKQSLKLILSIKGVGMQMATTMIIATENFTKFKNWRKFASYCGVAPFPYQSGTSVKGRNKVSQLANKKIKVLIHMCSMVAIQHNPEMKKYYERRIEIGKNKMSTINIIRNKLIARIFAVIDRQTPYVDTMKFA

SEQ ID NO: 310315 - protein, 339 aa, unidentified
MENFVGVDLHKKVSQLATLREPKPASQVRFPNHTVTVEKVLKKLPQGSKIALEATGSWWWFVDLAQRTGHEVVMSHPKQTKAIASARLKSDKVDALMLAKLLKADLLPTVWIPPAAQRYVRELLTHRARLVRQRTSVINELHALYAKRNIDPGMIFHQVRPPAFRAEDLSDYGPRIVEEDVALLGFLNRQVQGLDKELKAIAEKDPESKRLMTIPGVGPVNAVAGSCWIGTIERFSNSKKLSSYFGLAPRVRQSGERERHGHITKEGNRMVRSLLIQAALWHIRRGPMSSRRHYLGVCKRRGKPIARVAAANKLLGIIFQMMKEKIDYEEFLRRGGNAQ

SEQ ID NO: 310316 - protein, 330 aa, unidentified
MTNVSELTTEALFVGIDVSKDTLEVALGENAKTQTFGNDQAGVAALLDQLKPVARRIAVVLLEATGGLEQVAAAALCAHGFAVIVVNPRQAHAFAKALGHLSKTDSIDAKALAQFARTLHNSDKRERLLYRLPTPEQELLLAMVTRRAQLIGMRVAESNRLASAHVSQRKSIERHIKILDKQIGQIDDDAQRHLRSHFQDKLALLKGLKGVGVGTQTMLMAALPELGSLKQREISKLVGVAPLNCDSGKFKGKRITWGGRHHVRAALYMAALTASRHDPVIKAFYERLTLAGKPKKVALVACMHKLLTIMNAVIKSAQPWQASYPQPNNV

SEQ ID NO: 310317 - protein, 315 aa, unidentified
MTKQLPAVNVGADVGKSQLDLYLLERDRALTVPNEEQAIASLLRSLRRYRIERIVIEATGRLEQPFVRAALAQGLPVIVVSPLKIRRFAEAIGQLAKTDAIDARLIAQFAATVKPVARPPSDANAQAIKDLVVRRRQLITLRTMEKNRRQVMPQDLKSSIDRIIKTLDRELKRLEQLIDHAVDQHAPSRHKRELLTSMPSIGNSVATTLIGDLPELGSLNRREIASLTGVAPFNRDSGKLRGKRRIRGGRAHSRTALYLSAMVAIRFNPDIKRFYERLLAAGKHKKVALIACIRKIVTVLNAMIRDNSPWQPAMT

SEQ ID NO: 310318 - protein, 314 aa, unidentified
MNADEKKYLGIDVSKDFFCAFMYPTNETWNIKNEPLEISKWIKTLPEDIELAVMEATGKLEWLVATQLDAAGIQICIVNPRQIRDFAKCIGILAKTDKIDAKVIAMFAKSIKLDPQKLPDEMESALKELVIRRFQIVDFITAEKNHLYSTRNKDIKKDVEENIKLLQKRLKDIESKIQIMIQESPIWREKVELLTSVIGVGPVTAFVLIATFPELGSLTGKKAASLGGVAPMVKQSGKSKGKYFTQGGRKHARTSLFMAVLSASKHNPVIREFYQRLIAKGKPRMVAITACMRKLLTILNALVRDNTKWRFVKL

SEQ ID NO: 310319 - protein, 338 aa, unidentified
MREYCGIDLHSTNCWVTVLDEAFKVVRERKVPNDLATVLAILEPHRDALEGVAVESTFNWYWLVDGLQDAGYRVHLTNTWAAQQYEGLKYTDDRHDARWLAHLLALGILPEGYIYPKEERPLRDLLRRRAFLVRKKTSMVLSMHGAFECRTGMRVKTNDLKKWSAEDVEAILEDPTISLGITCLLQPMTVLDEQIKVIEKVVLKRAKLREEFGPLQTVWGVGKVLALTIMYEVGQIARFATVGDFASYCRCVKTERFSNGKRKGSGNRKNGNPYLSWAFSEVAHYAARFYPEAQAYFQRKRAATNGIIANRALAHKLARASFYVMRDQVPFDPDKLFA

SEQ ID NO: 310320 - protein, 351 aa, unidentified
MVTVGIDPHKHVHVAMAVGKDGTPAGKPLTAKNDALLIITLLKWVRSITDDTVTWAIEDGRGFARQLADGLLLAGQEVVWVPAKLAAAHRRLHEATGAKSDPIDAAAVARAAIATPGLDRHRIDERVRELRVLVDYRADLVKRRTMVINQLKAQLHVWLDQTPGDLTRARNVNALATLISAAQLSPHVRQALADMTAEIAALSRHVGDLDTTIRNLVSPLAASLLQVTGISYNSAAVLIAEIGDITRFPSSARLARYAGCAPIPVYSADKPRHRLHRGGNRRLNSVLYTAAIVQKRRTPQAQQLLARHESGKGSRGARRILQRHLIDVIYRAMTTDQATWQHQIIRHELAV

SEQ ID NO: 310321 - protein, 381 aa, unidentified
MKKGSTITTKQIRNFAQATQIGDCGQRQLGQQKLTIGLDLGDRQSWYCVLDEAGQIQLEQRVRTNANALREVFGVMARCRIALETGTHSPWVSRLLSELGHEVIVAHARKVRLIGESRKKDDRLDAQTLARLARIDPELLCPVRHRSRKAQVDLTVIRARAGLVRARTALVNTARGLAKSYGERLRGCNVRHMNPEKAEGLSSELQSALEPLLAAMESLSAQIREYNERIEKLAEESYPQVELLKQVKGVGTLIALTFLLTLEDPHRFRKSRDVGCYLGLQPGRRNSGQSEPQMHISKEGDPYLRTLLVQGAQHILGPFGVDCDLRRWGLKLAERGGRSGKKRAIIATARKLAVLLHHLWVSGKVYEPLHNRRPTRVATAA

SEQ ID NO: 310322 - protein, 287 aa, unidentified
MSEVITIGLDIAKHVFYVYGADERGRAVFSKRISRAKLLDFFAAQPSCTVALEACGGAHHWARQLAQLGHEVRLIPPAYVKPFAKRQKNDAIDAEAICEAAQRPSMRFVAVKSEQQQAAGLLFRTRDLLVRQRTQLINAIRGHLTEYGWIAPKGPSHVAMLADLIDEKELASSLPAAALAMFRLMLDLLAGLNSKIADLDREIARRAREDEVSRRLMTIPGIGPISATAIAALAPPAETFAKGRDFAAWLGLTPFKDRRAASRSSVPHPKWANARSDACSSLAVAPS

SEQ ID NO: 310323 - protein, 299 aa, unidentified
MSIVGAFDVHRRQLTFEYLDAVTGELRRGRIAPADREHLRAWLARFAGQDDVHFALEGCTGWRYVAEELLAAGIVPHLAEPADTAALRGRKRHAKTDKTDARHLRVHLLAGDLPECWIPPGHVLEARATVRLYKDLLDERGGWHQRIAATLFHQGAPAIGSMAKPGGRAAVEQVELSPAGRQAVLAGLRQIDRLTAELDPVRRQPGMLSRRQPGCAALRATQFGIGPVTAVAIWAELGDVRRFGNSDAVVRHTGLDITVWSSDGKGPPGRLSRQGPPLLRFSSALGVFSGIRVAIDPLC

SEQ ID NO: 310324 - protein, 372 aa, unidentified
MAKSSKTTLYVGLDVHKESITVAYAPEERGAEVVVLGAIGTRQCDIDKLIRQLQAKGAGLEFVYEAGPCGYWLYRYLTGKGLICHVVAPSLIPRKPGDRVKTDRRDAASLARLMRSGDLSAIYVPSVADEAVRDVSRGREDALRDLKRSKLRLKSFLLRHDIRYEGRARWRAGHLRWLAQVVCPTPVQQIVFQEYLRAVTEQHDRLERLERELHDAVQGWRLAPVVEAVQALRGVEFTGAVILMAELGDITRFDTPRKLMSYLGLTPSEYSTGDRRRQGGITKAGNSHARRALVEGAWAYRYPAKVSRHLQLRQEKLPADIQAIAWKAQVRLCRRYRQLTARGKHVNQVVVAIAREMAAFAWAIARRVPVAA

SEQ ID NO: 310325 - protein, 321 aa, unidentified
MNYVGIDVSKATFVVAYSSAKGSETKTFENTTNGVHKFIQTITPEDTHCVMEATGNYSMLLVYLLSKAGITVSMENPLKIKNFARVMLSVVKTDEIDARMIAMYGEKMNPAPFKLRSDSLMVLKQKRTVLRQLKKQLTANTNLQESMEALPFIDSVCKKILDKTVKFLRKQIQEMEEELSSLANIEYKKQMDLLTSIKGIGVTLATALIVATGGFTYFDNAKQLTRYLGLSPTYQQSGTSVNLKGHINRNGDSYLRSQLYVAAFSSLRCNTECKACFDRLRANGKPGKVAVVAVANKLVRQAFAVVTQGKEYVDGFISAKK

SEQ ID NO: 310326 - protein, 341 aa, unidentified
MRKPKQCRPHNDLSRSLIPLNLNHTLIAVIELSQKSWLVAGIIPGVERQPLKKLEPGEDALSTLLDRWRKEANKAGYKVERIAVAFEAGRDGFWLARWLRAQGIEAHVIHAASVAVSRERRRAKTDRLDTEQLKRAFLGWLRGERDHCKMAAIPTFAEEDAKRPSRERESLVGEQGRIVNRMKATLARLGIRSFNPKLKNAAESLEDLRTAEGEPIPPNTLTELHRDLERRRLVIEQIRQIEAARLERLRRTPKAKPNAMVLLLARVIGVGIETADMLVQEVLSRNLRDRRAVARYAGLTGSPDESGSKRREKGLSRAGNARVRRGMVQRKRPPWTTALWA

SEQ ID NO: 310327 - protein, 359 aa, unidentified
MQSQNQELDFNGKDIYAGIDAHLKSWRVSIMTNGIMCKTFSQNAKAEDLKKYLENKYPNGTYYSAYEAGFCGFGPHRKLREMGITNIVVNPADIPTTDKEKKQKEDSRDSKKIVRSLYNRELEAIYVPNMEIEGLRSLVRYRRTLVKEISRYKNRTKSFLYYHNIEIPTELATGSTHWSKRYSNWLDSLELGIIHGRETLTHIKQTVEHLRAKLLEINRSFRGLELDSQYSALISLLRTVPGIGLITAMTIITELDNIGRFKSIDRLCSYVGFVPRTNSSGENEKTGGITPRSNRYLRSMLIESAWIAIRHDPALMMKYGELVKRMDAPKAIVNIAKKLLSRIKHVLVNETPYVKGVVK

SEQ ID NO: 310328 - protein, 338 aa, unidentified
MEVYAGLDLHSTNTYVAMIDGENKVLYKQRHKNEVPAILSALDPFKKDIQGVVVESTYNWYWLVDGLMDAGYRVHLANVSAIKQYEGLKQIDDKRSSLWLANLLRLNILPTGYIYPKEERPTRDLLRKRLHLVRHRTSHILSVKNILARNLGVRMKSDEVKKLTAPEVKRLFPDKEMRVAVMASVGLIGHLEEEIDGIEKLITKKLRIREEFIKLLTLPGIGQILGLTIMLEVGHIDRFPTVGDYSSYCRCVKSTRTSNGKVTGYGNRKNGNKYLSWAYVEAAQFARRFHEAVRTYYEKKMGRTNRIVAIKAVSHKLARASYYIMRDGVEYDQARLFG

SEQ ID NO: 310329 - protein, 337 aa, unidentified
MEHFAGLDISMKETHICVMDRDGKVILEAKAATSTAAIAAELTKAPAVQRIVFETGRMATTLYHGLKALSLPVVCIESRHAYQALKSLATHKTDRNDARGLVHLARTGFYKPVHVKSLPAHAVRALIIARKKLVGQRVTLENQIRGLALVFDIRLPRGLSPAFARQVNATGGELAALSGALRGLLAARDALLGAIATINRDIKRLAHSLEACQRLMTIPGVGHLTALAFVAAIDGPDRFRRSRDVGPYLGLVPRRWKSGEVDYTGSISKVGDQRVRTLLYEAANVMLTRYRGDLALKDWALRIGRRSTMRKARVALARRLAIIMHAMLRDGTEFHVP

SEQ ID NO: 310330 - protein, 433 aa, unidentified
MLKLNYMSTLFVGIDVSSKTNAVYAMDFEENKYISSSFGNNQPGADQLVNMIAECMQKHKNLDTVLIVLESTSVYSVHISNFLSASEVLMPYKPYVFCVNPKATSNYRKSYIGMEKTDPTDAYLIADFGRVGRTKKLEPWRGGQFISLKRLTRHRMHLSECITREKTYMVSNLYLKFSELQLLEGDDKPFGSLYGATSSAVLTEFLSPQEIIDMPEEDLLTFLAGKSRNRISDLSKTSELLRKAARDSYRLDKCMYEPLNISLASSFNCIHAYQKEIKLIEQAIEKCINGMNPNALLILQSIPGIGPIWASGILSEIGDITVFHSSDALAKYAGLYWPKGDSGDFTSEDNKMSKAGNPYLRCYLGEAANSVRKHIPEYADFYARKYAEVTKHQHKRALALTSRKLVRLVFGLLVKNQLYTGEKLDTEYNIESN

SEQ ID NO: 310331 - protein, 352 aa, unidentified
MNKTITIGIDLGDKKHVACILDAEGNETIRTGIVNTPKAITRFMRDFPHAVVAIEACVHSPWISRLLTELGATVYVGNPRKLRCIWDADDKTDTRDARMLARIARFDPKLLSPITHRSEGAQRDLQLIKARDALVNARTKLVNSVRSSVKVLGERLPSGWSARSFAKKAAEELSEEMLMTLAPLLETIQTLTDKIIAYDKSIEQLAETKYPETERLRQVKGVGAITALAYILTIDDPSRFKKSRDVGPFLGLVPKRDQSGDTNKQLHITKAGNTYLRQLLVNCAHYILGPFGEDCDLRRHGEKIAARGGKNAKKRAVIAVTRKLSVLLHRLWVSGEAYEPLRNDGQVDRTAA

SEQ ID NO: 310332 - protein, 435 aa, unidentified
MASKLQKIRAQGAGIDVGSRHFFVGIEDQEVKSFDTFTSGCHQVVEYLQQHSITSVAMEATGVYWITLHDMLREVGIEVDVVNGRHVKHVPGRKTDVKDCMWIGELHSYGLLKKSFIPEAQVKEMRHYMRLRETHIEQKVKAVQRMDKALVMMNIRLSSVVSDIQGQSSLRIIEAILKGERNAEVLLKLCDKRILNRKAKQMQECLKGFYKPEQLFALKQSWEQYEFSEKQIAGCDVCIEKLLQTLTINKPEPVLNKKPKRIYHNKPNVKNLHKMVQQLYDGKDLTVLPGITSYSMLKFFSVTGNDLKNWKTENHFAAWLGLAPNQYQSGKMKKYRRIKMNTEAGQILKECVQPLLRSKHLALGVFGKRIASRRGPSIAIKAMARKLACWIYRMVNNGLEFVENGIKQYEERQKKDTLKWLEKKAKELNLILTPC

SEQ ID NO: 310333 - protein, 418 aa, unidentified
MRFAGIDVGSMTHAVAIVDETCGVLLKPTSFGEDAAGHQRLFGLLGSPTDLLVVMEATGHYGRNLCGALVERAFTVSLVNPLRTHRFAQEDLMRAKTDRVDALGIARFGAQKRPAATTWDSSLDDLRELVRYHQRLVQDLGDRSRQLHRLVHLGFPEFIRHVRTLDSQRATAILHAYPTATAFDESCVGDLAALRCDDRPRVVGGRLAQQLVASARVSVGRYHGPAYQDQVRRVCEDLDALRDRSNSLASNIKRVVSGHPLAVLIASIDGLSPITAARILVTVGDPARFRSAGALAAYVGVVPGTKESGLRRSSHAHLSPIGNARLRKALYMTTLSAVQRNPWLRAYYQGLRKRGKLPKVALVAAMRKLLAAVYSVAKNRRPFTCSPDSQTGEAAGKGFGASRGKATDPERVAITDGG

SEQ ID NO: 310334 - protein, 424 aa, unidentified
MHLTASSSSNIPATVACDVSAYKLNLVCRDLSIPGAAAEWETANRTEAITSTLIAIRDRALASGVTSLRLVVEPTGIYHRLVLRIGRSLGFETALVDAGHVQKMRSVIFGDEGKTDERDPYAIAAVSEQGRLIVDRQHGEVYQLLRQWGKLYHDAEVALIDAKSRVHRAITLLFPDFDFSTDFLYGSSGQAIVRCFGLDPHAIATQSVARLYGRLRKHSTIRRSSVVRLQIQARQTIASVSKSRVSDLLVRELAFAWEDFESAARRRATARVEMESLYDEARMADPLLPVMTGSGVSKLALARLLGEAGPLSAYTSWRQLLRMGGVNLRERKSGTYVGQTKITRAGRPLFRAIINQMALALVRRDRLYGAYYHHKTSVQKMPGKKAMTAVGRKIVKLIWGWYRSGTSFDARRVFTCQGEHRRAA

SEQ ID NO: 310335 - protein, 415 aa, unidentified
MRSNYAGVDWASQKHDVWLTDASGKRLGKRTFAHSGVGLAQMCDWLIATSGGKPEDIHVAIEVPHGAVVETLLDRGFKVYSINPRQLDRFRDRFSPAGAKDDSRDAETLSSSLRTDRRAFHQVSLAGAAIIQLREWSRMADDLRADQIRHANRLREQLQRYYPQMLQFDSDLAEEWVLKLWEAAPTPAQAARLRQAGVERLLKRHRIRRIGAAKVLAILKEQALIVAPGVTEAAVAHIRVLIESIRLFTRQLKEAHQQLDKLCKLLAEPAASENEQTELEPEQTLGAILQSLPGAGRIVISTLLAEAFETLQRADYPILRKLCGVAPVTRRSGKSRAVTRRLACNPRLRNAIHYLADAARRCDEKSKAKYLALKARGCSHARALRTIGDRLLYVACAMLKNRTLFDPGLESQKCA

SEQ ID NO: 310336 - protein, 351 aa, unidentified
MLLIGVDYHPSFQQIAFLNQDSGECGELRLNHGDGEAERFYRELQQRGVRVRVGMEATGFARWFERLLAELGFELWIGDPAEIKAKRVKKQKTDRKDADLLLKLMREDRFPKIWIPTPENRDLRQLLWHRHRLVQMRTRIVNQLWALAMNEGQHRKKKLWSEQGRAELEKLSLAPWANRRRRELLELLDRLNPTIEELTAAAEQEAKKRPDVLRLMTHPGVGPLTALAYVLIIGTPSRFARGKQIGTYAGMIPSEESSGDKQRLGHISKQGNALLRFLLVEAAQAAARVNPEWRRRYIHLAMRRHKSIAKVAMGRRMAVRLYWMWRNGCPYSPSLEFGSYAGQPGIVHGVK

SEQ ID NO: 310337 - protein, 326 aa, unidentified
MLYVGVDIACATAQVAWLAVEGATGQQTVAQSEEGHRGLIRQLQQFALASQTRVVMEATGTYWLALALALHDAGMAVSVLNPSQARHFAKVCLKRAKSDPVDAALLAEFGRRMEPALWTPPPAVCSHLQQVLARRRQLVEMRTAELNHLHALQQRPDVLPCLVAQVRDHLALLTQGIDHLNDVLKELTNGQHEWQIAVRHLCSIPGVGALGAAALLTATHCFARCETPEQAAAFAGLVPYRHESGSSVRGKAHIGGGHPDLRQVLYMCALSASRCNPVLRAFYHRLLAHGKAKRAALCAVARKLVHIAWALVTKDRDFDPSFATPT

SEQ ID NO: 310338 - protein, 409 aa, unidentified
MYDKTKFIYVGLDLHKEQHTAVIMDCFNEKLGEITFQNKPSEFSKLLVKAKRYCTDGKEIVFALENSYGYGRALAAWLIERNYIVKDVNPALSYAYRKSVPQYKKNDSYDAQCVARVAINELNKIPDAMPEDMYWTLSQLVNRRANLKTHHIRLKNQLHEQVCVAYPSYKQFFQDIGRPTALYFWEHYPSPRLLRGKTVEELAEELIPVSHNQFSTRKCQKILDAVKSDGDTTRDYQPERDEITRGLVRDVRHYVNQLEEVDKAIANFLPRFGCTLNTIPGVSDTTVAKLLSEIGDIRRFPNANKLANFAGIAPVNFSSSGKGDDKPSKQGNRRLQGTIYFLAIQMIQLSSKGLPRNPAFYAYYKKQLARGKTKPQALILISRRLISIIYGMLKNKTEYRMPKVPENLN

SEQ ID NO: 310339 - protein, 474 aa, unidentified
MARTRSRPASPPVPGDAGAEVTDEPVQVITRAAAIDVAKGSGMVCMRLPHESRAGRRTQKVWEVTAAFAAVVALMDHLVCQGVERLVLESTSDYWRIWCYLAEAAGLEVWLVNARDVKHLPGRSKSDRLDCVWLCKLNEWGMLRRSFVPPEPVRDLRALTRLRANLTHDRVRHQNRIEKILEDALLKVSSVISDLMGGSGRRFLQSLVDGERSPAALAALGDYRLHASKAELAEALTGRFRDIHGFEIGMLLELIDDLSAKITELDERIEAQLENVPGLGGVCTSCGQPGPDGPCTGCGEPVLGVIARLDEITGIGRGAAQVIVAELGTDMTQFPTPGHAASWAKLTPRAIQSGATSKAGRTGKGDPYLRGATGVAVMTAARTGTFLGARYRRHARRRGKQKAIVAGCRTIIEIAWRIIADPGFRYIELGPDYHDQLDPRRKTRDKVRQLEKLNPGMTVTLTPRPEPGGQAPAA

SEQ ID NO: 310340 - protein, 410 aa, unidentified
MDRLVERCAGLDVHKDSVAATVRVPRKDGQRLQETRTFPTTTRGLLTLADWLASYGVTLVGMESTGCYWKPVYYVLEERFECWLLNAQHLRNVPGRKTDVADSAWICQLLEHGLVRPSFVPPKPIRELRDLTRYRKAQIEERVREVQRLDKVLQDAGIKVSSVAAETLGVSVRRMLDALVAGTHDPEVLAELARGRLRQKLPALQDALTGRFRSEHHGLLVSQILAHIDYLDETIATLSARIEHVIAPFSRELLQTIPGVARLGAEVLIAEIGVDMSVFPSDAHLASWAGQCPGNHESAGKRRSGKPRKGSKWLHKTLTESAKAAARSKGTYLSAQYGRLRGRRGPGKATGALRHSILIAAYHLLEQKVPYQELGADYFDRRRSTEQRTRRLVRQLEQLGHTVTLQPLAA

SEQ ID NO: 310341 - protein, 407 aa, unidentified
MEKKDFIEFEQVVEIGAGMDVHKGSVVATIRGKGTETQTKSFNTFTSSLIKLKEWLLKNGVTHVAMESTGVYWKPVFNVLGDDIKLLLVNSRHVKNIPGHKTDKRDSRWLSKLLLSGLLKGSFIPDRPIRELRDLTRYKTQITNEISADKNRLQKILEDANIKLSCVLNDVFGATGMKMIDHIIAHENFRPEELLKYVHGKVKSSKIDIKESLTGYVTAHHRFMLKTILANIARLECTVADLEAQIDLCIEPYKVQMELLESIPGVQKNSATRIIAEVGVDMDQFPDQNHLSSWAGVSPGSNETAGKNKSGRITYGNKYLRSLLVECGWAASRTKNTYFSAKYKSLVGRRGKKKTIIALGHKILIATYFILKDKVQFKELGEDYLNNFKKEKLIAYYTQQLAKLTAA

SEQ ID NO: 310342 - protein, 391 aa, unidentified
MIYAGIDVAKDKHDCFITKSDSEVLFKAFTLFNNLDGFNDLYQKIESVMDDVTKVKVGLEATGHYSYNLLGYLIDKGLPTYVINPLHTNLYRKSLSLRQTKTDKVDARTIASMLMSDVNLKSYSDTSYHNEELKSLTRYRFDKVKERAKLKTSVSRLVCILFPELEKLVPTLHMASVYALLSEFPSAKHVATAHLTRLTNLLSESSKGRYGKDTAITFRDSARASIGSNMPAKSLELKHTIKLIQELDSEIDEIENEIKIIMDEINSPILSIPGINYRMGAMIIAEIGDFNRFDSPDKILAYAGFSPSTYQSGQLDGAYAHMEKRGSRYLRYALYNATKYVCHWDPTFAAYLAKKRAEGKHYNVAISHAVKKLVRVIYHLEKTKQQYIKAA

SEQ ID NO: 310343 - protein, 392 aa, unidentified
MRYVGIDVGSDSHVVAAVTAEGTVAVKPTGIAEDAAGYAKLFALLGQAPVALVTMEATGHYWRNLFAALAAHGYAVALLNPLRTRRFAGEDLERTKTDAIDALGIARFGAQKRPAVTRLPDVATDELRELVRHRDRLVADFGDRVRQLHRLVDLGFPEFTRHVKSLDSMLACTLLAEYPNAQAFAGATPRRLAKLVYDGVHKVGPELAAALIAAAKVSVGRHHGPAYRIQVRHTCQDLDLLRRRIRELDDDIGRQLDDHEVGTLLTSIDGIGSNTAARLIAELGDLGRFRNAAALAAYVGVVPGLRQSGKRQSRRAGLCPIGHARLRAALWMPLLTAVRRNPWLAAFYDRLISRGKLPKVALVAALRKLLGAVFAVVRDRKPFVPRLLAAVA

SEQ ID NO: 310344 - protein, 363 aa, unidentified
MQTIYIGVDFHARQQTICYLTIETGELVTCELNHQDKEALRAFYAAFRGQVIVDLEASGYSPWFERLLEELGYEVWLGHATEIRRRARWRQKNDRRDAELILDLMLHNEFPRLHRPAIQSREVMRMLRYRHKLIKIRTMSKNSLQALALQSGVARRSGLFTREGKQELDAALMSPAMQWQREHWLQLLQPLDQQVLEAMAWLKAQSKDDVCIARLRTHPGIGLLSALCLVHTLQPVARFRNTRKVAAYAGFDPVERSSAEHKRFLGISKAGSRLLRHLMVEAANIAVRKDEELKCFYQRVAARRGRPKAKVAVARKLLIRAYIMLRDEIDYAEFRRRAVAARLARLRHRPNVPAVVIGQPAST

SEQ ID NO: 310345 - protein, 346 aa, unidentified
MSHKTTASVAHTIGIDTGKNTLHLIGLDDKGAIILREKIARGRIAARLANVPRCLIGIEAGMATHYVARELSALGHDVKQVPPAYAKPFRQGHKNDFRDAHAIAEAVQRPSTRCVPVKTDDQLDLQALHRVRSRLVGQRTAVINQIRGFLLEHGIVVRQGLRFLRQQLPDILAKRSDVLSPRMIRIIEDLSGDWRHLDERIQHVTEEIEVLAHGNESCRQLITVPGIGPLIASAMVAAIGNGAAFAKGRDFAAWLGLVPKQMSTGDRTILGRISKRGNRYLRTMIMQGARVILLRPANWAKHSFGTWLTAAANRLHHNVLATALANKLARIAWTVLMQARSYEARV

SEQ ID NO: 310346 - protein, 416 aa, unidentified
MEQIFMIKENYIYVGIDLHKETHTAVMIDCYNQKLGEITFPNRPADFPKLVAKVKKCNTDGKTIVFGLENAYGYGRALAVWLIDKGYLVKDVNTAISHRQAKHRGAMYRKSDSDDAEAIALATLNMLDKLPDAYPNDAYWSLGQLVHRRDNIMKQRTRLVNQLHEQLCIAYPSYKQFFNDISRPTALYFWEHYPSRKYLKGKSVEDLRAELVPISHNKCSTKTCEKILDAVASDKVKNNAYQDARDMVTLSIVSDLQHYDKQLAEVDKMLEQMYKMLGCTLTTIPGVNVITAVKILAEIGDIKRFSNANKLAQFAGIAPLHLSSSGKGKDVATKQGNRRLQATIYFLAIQMVQVSSKGTPRNPVVRAYYEKRKAEGKTSQQALICISRRLISVIYGMLKNGTEYRMPVVESAGENR

SEQ ID NO: 310347 - protein, 337 aa, unidentified
MSYLGVDLHTNSFTVCYRNGKGAERIATFEVRRIGQFRKTLRKRDELAVEATGNTAWFVEQISDRVSRVVVVNPHQFKVIRKSVKKTDKHDAKTLAFFLSKDMLPEARMKSKENAQLHSLAGTRDKLVKQRTALINKIHNILNGHGMKYKKESLSTDKHLKIVLSFDWDVIVRVELEVLAEQIRSLTKSIKKLDEQMSEHGKNLKGHKNLASIKGIGERSATVLLSVIDDVNDFADEDKLAAYFGMVPRVSDSNETVRHGRITKNGSKIGRTTLVQCTLVAKRYSPYLRKYYDRIKRHRGSGKAIIATARKLLGIIYQTLKNDWIFEDFPNFVIANT

SEQ ID NO: 310348 - protein, 340 aa, unidentified
MEITTIGLDLAKSVFQLHAVDAHGAVVWRKQVRRSSLLDTLAKIPACLVGMEACATSHYWAREISTLGHEVRLMPPAYVKAYLRRQKNDAADAEAICEAVRRPTMRFVPVKSAERQAVLALHRSRDLLVRQRTMLINAIRGHCAEFGLIARQGVCGARELIERMERSDSAAFPDVARAVVKALADQLEALAVQIQILNRRLLAWHRKDEDSQRLATIPGVGVISATALAASVTNPDQFRSGREFAASIGLVPRQNSSGGKDKLGRISKMGDRYLRKLLVVGATSVVRRATTSDIANAPWIRSLLERKPTRLVTVAMANKTARIVWAVLKRGEDYRSPIVA

SEQ ID NO: 310349 - protein, 416 aa, unidentified
MVSRGSGWKLLFVGDDWAEDHHDVCLQDAAGRVLAARRLPGGVAGITRLHELVAGHQDGDDPSQVVVAIETDRGPWVRALVAAGYRVYAVNPKQAARHREVVAVSGKKDDAFDAAALADMGRTRRHQLREVAADSDEAEAVKVAARAHQKLVRERTRQALRMRSALREYFPAALDAYAPLTLTGPDTLELLAKAPGPAAAARLTIAQISAALKRARRHDVAGKARQIRAALREQHLGQPEIVTEAYAAGVRASAAVIAVLNEQVKVMEARVESFFRRHPDAGVYLSQPGIGVITGARMPGEFGDAPGRYADVKARRNYAATSPLTIASGKKKTVHARFIHNDHLVNAMHDQAFAAISASPGARAYYDELRSREIDHTGALRRVANRQAGILHGCLKTGTGYDEHTAWGHRSQPAAA

SEQ ID NO: 310350 - protein, 345 aa, unidentified
MTQCKRVAIDTSKAVFTLHGIDQNDRPVLRINLRRAQMIPFFTKLLPTEIAMEACGGAHHWARELSELGHEVHLIPPQYVKPYVKRSKNDRNDAEAICEAAGRPGMHFVPVKSVTQQAQGMVLKVRESLVGQRTLLINTLRGHAAEFGVIAGKGIAKIGPLLAAFDQEASIPPEAKDMAVLLGQQIADIDAKVKELEVKLSAAHKANAVSQNLATIPGVGPVTALTLATEIDPAAFESGRHLAAWAGLTPKERSTGGKQKMGGISRAGNERLRSLLVTGATSVIKAAMKPGSQLMTDWLRALLLRKPRKVVAVALANKMVRVAWVLMARGEVYRRPTGPTAAAAA

SEQ ID NO: 310351 - protein, 355 aa, unidentified
MNQEKYIGMDVHQATISVAVRDSSGKLIMECILETKAATILEFIAGLRGTLSLTFEEGTSAAWLHDLLKPHVSHLVVCDPRRNALLKDGSKSDRIDARKLAELLHGNKLHAVYHGEHGLRTLKELGRSYLTITQDLTRVMSRIKALYRSWAIPCSGTTVYAPGHRAEWLAKIPEPGVRLRAERLYEQLDLLQPVRQGARRDLLGESHKHPAVKLLRQIPAIGPIRAALLVALLQTPHRFRSKRQLWAYSGFAVETHDSGEYRFVRGKPVRNRERITARGLNQNHNHDLKNLFKGAAISASTRPGPLCDFYVALVEKGMRPTMARLTLARKMAAITLTIWKKGVEFDAKQLNRQAA

SEQ ID NO: 310352 - protein, 366 aa, unidentified
MDAIYIGVDFHSRQQTICYLKTETGELVIRELKHQDKEQVRAFYQQFQGHVIVGLEASGYSPWFEAMIEELGHQVWLGDATEIRRRARWRQKSDRRDAELIWDLMVHNEFPLLHQPAPQSREILRMLRYRQKLIKVRTMSKNSLQAIALQAGLAKGSRLFTKDGQAEFQATAMSPALQWQRDHWFELLKPLNEQLLETMVWFKAQSKADPVIARLRTHPGIGLLTALCIWHTLQPVSRFRNQRKVVAYAGFDPMVRSSAERAIYLGISKAGSRMLRYLLVEAVHTAIRYDDDLKRFYKRVAERRGRPKAKVAAARKLLIRAYIMLRDEIDYAEFRRRAVAVGLPDEVKGQQKVPEVLIGQSTSPGA

SEQ ID NO: 310353 - protein, 421 aa, unidentified
MQVLYERCAAVDIGKDVIAVAVRLPADGPDGRATHKRTFKTFYGVLRQAARWLNSLGVTHVAMEATGIYSMPVYHALIEHGKFDQVLVCNAGHVKNVPGRKTDLADAEWLVHLLECGLLRGSFIPPAEIKAARDVIRYRTKVVQSRTSEVQRLGNVLQDAGIKIDSVASSIATKSGRAMIEALIDGERRPGVLADLAKGKMRVKIPDLTLALEGRFGEHHALMCRLHLDHIGHLDAMIARLDTQTETMMAPFHTERDLPTTIPGIGMLAAAAVLSEIGANVTEYFPGAAHLASWAGLCPGNHESAGRRHSGKRRHGNQHLQHILVEATWAAVRHDGYLKALYHRHVMKWGGYRSPTAKKKAIIVAAHAILVIIWHVLAAGKPYDELGTDFFTRRLDPERETRRLIAKLEALGHQVSLQPAA

SEQ ID NO: 310354 - protein, 344 aa, unidentified
MEKPSYFIGVDMSSETFTASVGTYPWRVVGSPESFENSAEGFGNLLEWLQKHGYKPDESIVCMEATGVYGQPLAYYLVAHNYFVAVEPPLKVKRAFPTHGHKNDITDSENLAEYAYRFFDELHLWQPPDNVLKQVKTLLKTREQLTRNLTAYKNTLRVLKREVVRTPTAEKMYEGLIGELKSLIGKIDEEIRSLMGKHPFFNPMLNLLLSIPGVGLQLASYVIVITQGGKREPKSRELAAYIGICPYEHSSGKSVYRRPHSKKNGSGSIRKLLYLSSLSLRTHEYYFKEYFLRKALQGKPKRLLINNISNKLLRIICAVMRSGRPYIPGYMSLNPVALRVKKCA

SEQ ID NO: 310355 - protein, 401 aa, unidentified
MVSDFRKGRYNLMKIFVGIDIAKLNHFAAAISSDGEILLEPFKFTNDADGFQLLVSKLESFDKNSIIIGLESTAHYGDNLVRYLVAEFYQVCVLNPIKTCQMRKNNVRKTKTDKVDTFVIAKTLMMQDDLRFITFFDLDMMDLKALGRFRQKTIKQRTRLKIQLTTYVDQVFPEIQYFFKSGLHQNAVYALLKEAPSPKEIASMHMTHLANLLKVNSHGHFTKEQAKELRVLAQKSVGANDSAISIQITQTIQQIELLDSQLEKIEAEMTDIMKFNDSVIMTIPGIGYINGGMILGEIGDIHRFSNPNKLLAFAGLDPSVYQSGNFQAKTTRMSKRGSRVLRYALVNAAWNVVRNNATFKAYYDAKRAEGRSHYNALGHCAGKLVRVIWKMLTDEVEFNLE

SEQ ID NO: 310356 - protein, 347 aa, unidentified
MQFYTQQHKYYCGIDLHASSMYLCIIDSEGNVLLHKKIKTDPKAFLRAIAPYRDNLVVGVECVFMWYWISDLCADNDISFVLGHALYMKAISGGKAKNDRIDSKKLAAMLRGGMFPLAYAYPRDMRSTRDLLRRRNYFMRHRAELLTHIQNTNTQYNLKPMRKKVAYKANRPGVAEKFSIPSVRKSIEADLLMTDHYDALITDLELYITRNAKIHDAQAFHLLRSVPGIGKILALVILYEVHDVSRFDRVQEFASYARLVKCQHSSAGKVHGTGGSKIGNAHLKWAFSEAAVLFLRRNEKAQKYKARLEKKHGKGKALSIIAHKLGRAVYFILQRRRPFQMDKFFNN

SEQ ID NO: 310357 - protein, 353 aa, unidentified
MDKIARVGVDLAKNVMQIHAVDSVEHVVIRKAITRERFANWFANLEPCLIAMEACSAAHYWARKLSALGHDVRLIPPQFVTPYRKGGVHVKNDALDAEAICEAASRPHMRFVPVKSPAQQSVLVLHRMRTGFVEERTALINRMRGLLAEFGVFLPQGIDSLRKQFVERVEDGSNELAGPARQALMHGWTQWQSLDEQIAWLERQIAEHAARDPQAQRCMGVCGVGRLTASAAVATVVDARQFKNGRQMAAWLGIVPKQNSSGGKSRLGRITKQGDTYLRTLLFQGARSAVLTAHRRNDRLSRWIVQLRARVGFYKALIAVANKHARILWAVLARGEQFDPSYAPVRTRTAADS

SEQ ID NO: 310358 - protein, 405 aa, unidentified
MRYYIGVDWADAEHAIWVEDEAGARVLARAVPHTAEGLAAWGRWLDEQRAAGIELWAAIERPDGRVVDFLLDHGVVVYPVNPKALDRARDRFRMSQAKSDPFDAQVLASFLRTDHAHLHPLQPSSAAAQELKLLTRDYARCVREQTRLVNQLTATLKEYYPRALEVCEDLTTQRARAFLRAYPTPEALAALSPKRWQRFARTQRWSAAQAATRWATLQEPHLPVPAHVVRAKARLAGILVTQLEAAVHAVAEYREAVTGFFGTLPAAEWATTLPAGHGTTVPTLCAELGDAPGRWASWQHLQGHAGTVPVTVRSGKYRSIQFRFACNKPLRTALHQFALCSLQHSEWARAYYDRQRARGHRHHAALRALGAKWLKIIFVLWRRHVPYREEHHLATMARQQLRQAA

SEQ ID NO: 310359 - protein, 339 aa, unidentified
MNRIVVGVDIAKRVFQLHWVEPQTGEIVALQLKREGFLEHFANRSNCLIGMEACGGSQHWARSLQKLGHEVKLLSGRMVKPFVGGNKNDAADARAIWTAMQQPGIKAVAVKSEEQQAVLALHRMREQLVKFRTAQINGLRGLLTEYGEVMPQGRAGIKRDIPGALGRLADRLPAMVIETLREQYARLGELDAQISQIERRLRQWQSEDSATQRIAAIPGVGLLSATAAVATMGDAKAFKSGREFAAWLGLVPRQTGTGGRVRLLGISKRGDKYLRTLLIHGARAVLTHSKSPPEWLTELVKRRPKNVAVVAMANKMARTIWALTAHESAYQSGYVCRPA

SEQ ID NO: 310360 - protein, 367 aa, unidentified
MSKAETGRLCVGVDLHKTQFTICALNEDGEYLLEKQYPTKEEGYSEFAREMHRFEEQGCSIELAVETTGNARFFKNRMESEFFAVKVVNTNRFKVITMSTKKTDANDAATLAYYLMKDMLPEAHLCSQTSEEIRRLLKTRSVLVQSMVKIKNQIHGMMLGYGIETKAAQLQSKRKRQELINDLEDHNFSAYTAPSLKVMLKILDDLSAEIKVIEKLLEEMVASNEDVALLMTVPGIGINTATVIAAYTAELERFEGNYKKFASYVGIIPSVHNSNETTHYGRITKHGPQELRTAFVQAALGMIRLTNVSSEWRIIKEYQRRKGDKGSGRAIIALARKITRIVFVMLSKREGFNPALMRCEQEIQQTA

SEQ ID NO: 310361 - protein, 482 aa, unidentified
MKKKNIYVNQSQELLTLFEEAGNSAKIMCIPIDYAKKDHVVMFCNGYGDILRKPFSVKNTPEGVSYLTEQVTRSCHNRSINPKYVFFGGEDVGSYAENFASTLRSGGWLVAGVNAHDAKKQRSNMQASTDRLDLMGIATMLLNRRCTCSPAQSGIYRNLRTLVRHRRRLVVMTTEVRNRIHAIADRLFPGFLDERKSGITPFSKSSLYLMENRFSAKQIRRRKRSTLIEALRRLGTPKPDCAATKIQEYAQQVLNTPDEYVGTLQVSLAQHVKHYRCLKENVEQLEREIAIWLAQTQGAFLTSVRGIGIVLAAGVSAEIGNPYGQKPLSNLASYAGIIPRVIQTGGPEGQIYTGKVAKRSNRILKDYVVQSASHLGLHGPEDLVSDYKRRDAAGQHADFGIARRYLRMAMCLMRKSGIYLPHRLRKKGVKPEERAGYYLMSWPYLREKWGKLGALEAAFAKDRPLGRWRNMVQELYEIKLTL

SEQ ID NO: 310362 - protein, 455 aa, unidentified
MKKKLEKNSVVKMGTGLPVFNAHAGGIDIGDTMHCVAISDGLGGHEVKTTSAFTCDLHAIVDYLKINGITTVAMESTGVYWLALYLLLEEAGIEPYLVNASHVKNVTGRKKDDTDAIWIQRLHTCGLLQKSFQPDSEIRLLRDYTRQRKNLISLSSDAVRRMQKALELMNLKIHTVISDILGKTGMLMVKAILSGERNAVVLSKLRDSRIKASEEDIIKSLQGIWREEYIFMLEQAVENYEFHQVQIKNCEAKIQAQLLKQVAIVNQGDVTCLEDNSKKKKKAKAKGKKNQFDFSVSPYLKAITGVDLCQIPGISDVTALEFISEVGADMSKWKSAKHFAAWLNLTPNTKITGGKVVSSKLMKKRNKAGQYLRQAASCLSTNKTPIGDYHRRMKGKLGGRGATLNTAHKLARIIYTMLLNKTEYNVIMVNENHENYKQDKIMRLEKQLERLRKAS

SEQ ID NO: 310363 - protein, 433 aa, unidentified
MKVMYERVAGIDVHKQMIKVAIRSPGEKPWTRTTEILEYRTFFGVLQEMTRELRRRGVTHVVMEASGVYTEPVYYALCEQDFAQVAVINPAHAKALKGHKTDAKDCARLAELFECGLLRGSYIPPPELKEVRDLTRYRMKTVQARTSEIQRLGKSLESAGIKLGSVASDITGKSATAMIEALIDGERRGTVLADLAIGRMRTAGKLTDLSMALAGRFTDHHALMCRLNLDRIKVLDGAVDDLEDRITAKAAPWQREAGLLKTLPGFGDAVGQAWLAEIGPAPHLHFASHEKLACWVSLCPGNNISAKKRKHGRTGDAGTYIKPMLIQAAWAAIRVRGRLQARYNRLVRRFGGENNPGAKKKAITAIAHTLLKIAYQVLKTGTPYQEPGADFYTRRESPAARQAFLQRQLQKLHPGCTITITISPPEAALTPGA

SEQ ID NO: 310364 - protein, 314 aa, unidentified
MSSLIFVGIDVSQARLDIAVRPGTSFSITHVEPAIASLVQQLCALSPTLIVLEATGGMEIPLTSALATAGLPVVVINPRQVRDFAKANGHLAKTDALDAQILAQFAEVMRPQPRPFPNTETRALAALVTRRRQLVEMLTAEKNRLLSAASPIRKRVRAHIAWLERELEHTNTELSEAIRHSPVWREKDDLLQSVPGVGPVLTSTLLASLPELGTLTHKQIAALVGVAPLNRDSGTLRGRRTVWGGRAQVRAVLYMGAIVAARFNPVIRVFYQRLQRAGKAKKVALTACMRKLLIILNAMLKHRTPWREMEASHA

SEQ ID NO: 310365 - protein, 407 aa, unidentified
MDWAKDHHAIVVLAPDGHKVLDVQIAQDAQGWQSLRKKLVAVAGANLAVVAATVETTCGPAVERLFELGCALYPINPKAGQRYRERKVPGGGKSDSLDAWCFADALRTDGHAWRRLAPEDPCLQELRLLCRDERHLIRQRTALVNQLRQALLEYYPAALEAFDDWTVPGPWDFVLRFPTPAALVQAGKQAWDKFLHSHHLYRPSTYAKRLEIFGRAAQFCGTEPVTKAKSLLAVSLAKELGTLQRQLSDYRERIAQLFREHPDHELFGSLPGAGDTLAPRLLSECGQDRQRFEDHEALQCYAGTAPVSFSSGQLHVVRFRRACNRDLRAAVHLWADCSRKTCTWAQVYYEHKRQEGKSHACALRCLGQRWLKILWKLWQTRQPYNEQVHTRNQVRHGSWGLALAAPQ

SEQ ID NO: 310366 - protein, 408 aa, unidentified
MDKIYDKCCGIDVHKKLIVACFRCGKQQEVCEFGATTRELLELADWLKEGGCEMVAMESTASYWKPLYNILESSDLKAMVVNARHMKAVPGRKTDVKDAEWIADLLQHGLLQPSYIPGKDQRELRELVRYRKSLVGERTRELNRLQKMLEGANIKLSGTVSDINGKSARSILEYLLTGKSIDGSKYDEMYEQKIIAHNLKATKEQIVDDLNGVMSPLQRRMMKELLVHLDELNVHIKNLNDEIDNFMKPEEKQASQAIQDVTGIGNTSAQAIISVIGSDMSRFPTDRHISSWAGLCPGDNESAKKRKSGKTRKGNALLRTTLITCAHAAVKNKKSYFYAQYMRISGPKRAYVAVAHSMLISIDHILKDGVMFKDLGADYYNQFNKERKINAYLKKLKTLGWEAPIVAA

SEQ ID NO: 310367 - protein, 411 aa, unidentified
MKAQVNFPQVIERGCGMDVHRDTVVVTVMGVGITVETRSFTTYTNSLRSLRDWLISLNITHMAIESTGIYWKPVYNILEQDFEVILVNARHVKNVPGHKTDKKDSRWLAKLLISGLLKASFIPPKDIRDMRDLTRYRKKLVQNAAADRNRFEKILQDANFKLSNVISDIFGKSGTLLINALIDGVDDFNLLLSLCHGRIKKKREILYESLQGVLTDNHKYMLNAIRTNLYNTLLKIESVDSQLLQLSQPYGTELELLKTMPGLNQISATMLLSEIGVDMSRFPTVNHLASWAGICPGNNESAGKSRSSRTNQGNQYIKPILVECAWAASHVKNSYLKKKYESLIGRRGKKRALIAVGHKMLNAAYYIIRDKVPYQDLGYEYLDSRKKQKQIQSYIDKLKDLGVDIEIPNIQ

SEQ ID NO: 310368 - protein, 346 aa, unidentified
MGYFAGLDVSLEESAVCVVDEAGRIVREARVASEPEALVAFFNSSGMPMERVGLEACSLTAWLHAALTEAGIPAICIETRQAKAAMGAMPNKTDRNDARGIAQIMRTGWYRAVHVKSPACRSWRALLTARRMVLNKRRDMENGIRALLREAGLKVGAPSHKDFPARVRELAADDPVLARLAEALLAVVEVMSRQIEQLTKRVLDEVRAEPTCRRLMTVPGVGPLTALAFRATIDQPSRFRKSRDVGAHLGLTPRRYQSGETDVQGRISRCGDELARTALYEAAHSLLIRGTKWSALRAWGMSVAKRRGMARARVAVARKLAVILHRMWTDGTEFRWGRQAASMPVA

SEQ ID NO: 310369 - protein, 346 aa, unidentified
MIIVGCDFHPAWQQVAWVDTETGETGERKLEHSSGEARVFYASLSVPALIGVEATGNCQWFLDLMMELGHQVWIGDAAQIRASYVRKQKTDKRDAAHVLKLLLEDRFPRIWVPNREERDLRQLLLHRSKLVEMRTRVKNELQHLALNQGVQRKRKLWSQAGQQLLRSLPLQPWASRRREDLFSLLTLLDRHIGVLDEAVEKASQLDKMAQLLKTQPGVGPITSLAFVLTIGDVSRFQNGKHIASYLGLIPREHSSAGKQRLGGITKQGNRMMRMLLIEAAQIAVRCDPGFRKQYLHRCHSKPKAVAKVAAARKLAVRLYWMLRTQTPYPEIVRIESSPRVPLVGAS

SEQ ID NO: 310370 - protein, 347 aa, unidentified
MSIVEVTRPIVGGVDTHLDVHVAAAVNPVGGLLGVESFPTTPAGYHDLSSWLSSFGPVERVGVEGSGTYGAGLARHLSASGIVVVEVDRPNRQARRRNGKSDELDAIEAARAALSGRASGAAKSATGNVEALRTLLVAKRSARSIRIKTIGQLRHLVITAPDDLRDRLGGLTTKALIRQAIALRPRPGRDPMGHAIKTAIVTLARRVQAINTEIAALDAHIDTLVRATAPALLEVYGVGSDTAAIFLTAAGDNPRRIRSEAAWAKICGVAPVPTGSGKTNGRHRLNQGGNRQANHALWRVVLTRLGQGEPRTVAYMHRRLAEGRTKPEIIRALKRYVAREIFQQIPT

SEQ ID NO: 310371 - protein, 405 aa, unidentified
MRYYIGVDWADAEHAVWVEAEHATLVTKRTVAQTAAGLSEWGRWLDERRAEGIDLWAAIEKPEGRIVDFLLDHGVRVFAVNPKAVDRARDRFRMSSAKSDPFDARVLATFLRTDHTHLAPLRPSSEAAQELNGLTRDYVRHVPHQTRRLNQLTVTLKAYSPRGLELGGELTSQWRRAFLHDFSTPAALATLTERQWHRWGRAHRLSAARMAELWPVLQAPQIPVPPHVVRVHARRLGTLLQLLAAASSAVEAYPTAVTDFFGSMPTAEWATSRPGASGTTVPRLYAELGDADGRWQTFRHWPAPGGTVPVTERSGHSCLVKFRFAGHLHLRDAVQQFAFQSLQHRTWARAYYDRCRQRDLSHHHALRSLAAKWLKIIFVLSTRHIASDETYHLATIGRQHLQQPA

SEQ ID NO: 310372 - protein, 383 aa, unidentified
MKTPNVCTPTTGNTGTIFVALELSRRTWLVTIHSPDRDRISHYKVDGGDHVGLLKLIARVRARSAKKLGYEPAVVSCYEAGYDGFWLHRLLTAAGIKNHVFDAASIMVEQRARRAKTDRIDGDKLERTLRQYCGGDRHAVRIVRVPSPEQEDLRRDTREEERLKEEQTSHSNRIKGLLRLHGMPVGDPRRSDYLDWLGKQRDWAGKPVPPRLLAEITREHARLRVVVEQLAAMEEQPSPARLNPAAAEMGRRRDLLFRLKSLGPAFSSRLVNEAFYKDFRNRREVGAYFGLDGSPWRSGDTNREQGISKAGNRRARHAAIELAWLWLQHQPESALSKWFRQRAANASKRIRRITIVALARKLMVALWRFLTTGLVPEGAVFKA

SEQ ID NO: 310373 - protein, 601 aa, unidentified
MTSAKAKGTSERKSKPAADATCDSTSHQVDHSMLHLGVGIDTARYGHHVTFLREDKQPACPPLPITESRGGYEQLQKRIEQLHQRFPRAHIHLRIDAAGQYAANLERFVRSLTHLPMTVSVGEPKRNKDYHRAHSPKRKNDATESHAMARYAVVERPDETYGKPAEYAVLRRVASRLQSQTKQSTRLANQLHETLSAGFPELATLINDLSAGWVLQLLEKYPTAQRIAAARIGSLENIPFIPKEMAEKLHKAAKHSVATLSGDVAEALSKELVSELRHSLAEEKRWRELLTKAFDALPDGPHHQIATIKGIGKQTAAAIVATAVDIDRFETDKLLVGYYGVFPEELQSGVDKFGRPLPPGKKIMCRKGNDLVRGLLWQCAKCASGVKGGNPAVRALYLRRLAAGDTPQIAWGYCMTKLLRQVFGVWSTGTAFDPEYEAKKPETLGPKDVSETLEQPACEEVTKAPASMEPVAQGASAASPHSAQPRSHKQANQPIDYAALREQIPLQRVLEHINQLPIISAVYRGPCPLHEPSATTGRKFSANLDRQVFRCFHRECGAQGNVLDFWQAYRNMQLYAAAEDLAQTFGVAIPYLESPDRQAPR

SEQ ID NO: 310374 - protein, 422 aa, unidentified
MSYCPVAGIDVSKRFSDMCILSPDNKIFAQEKIYHDETSINRANALLQKAERLFFSKPVIVMESTSHYHLILFQFFSEHGYDVIVVNPLQSNSMKDFSIRKRKTDRVDAFKLAMMYRTKTLRPSQIPQTATRALRQLCRHRAELLNDVSSYKNRLTALLDQTFPGYDKVFSDVGGVTSCAVLARFPTPTILLVEEESELVEVIAAASKSGYGFAKKKAGLLISAAQKAQTLGIHSCADETLIACTIQMLRTLSESVLQIETAIDNLLAQIKEMRNNVSLLQSIPGIGSHSAALLLGEIGDISLFKKPKQLAAYFGLDPTERQSGSFRGTKNKLSKRGSPYARAALHMGVVNSICKRGKDSAANPVLLSYYEKKCKNKPAKVAQAASMHKLVFIVFAVLRDQKPFELKTPEQHAVEQGFVKAA

SEQ ID NO: 310375 - protein, 340 aa, unidentified
MKIITIGIDLAKNVFQVHGVDECGQVALRKTLKRAQFVLFFSNLPPCLIGMEACGGAHHWARKLKAFGHTVKLMAPQFVRPYVKSNKNDNADAEAICEAVRRPTMRFVAVKTVEQQAVLSLHRARQGFVKARTAQANQIRGLLAEYGVVISKGISHVSRQVPLILADAENELPAAFRRLLSNLLDHFRELRRQVAELENQIKAWHQDSEASRRLEAIPGIGPLSATALIASIGDAQTFKNGRQLAAWLGLVPRQHSTGGKPNLLGISKRGDVYLRALLVHGARAAILSAQRHAKTDSWLMKLLGRRHPNVAAVALANKNARVVWALLAHDRIYQPNYTAA

SEQ ID NO: 310376 - protein, 339 aa, unidentified
MKNIKYYIGLDVHKEKTTHVVRDKLGNILLENETATLYSELFPRLKPYLATSLIGLEASTCYYTLYQTFLKNGYDIKVANTIQLRQLIAKNDKLDAKRLSEMLRLGTFPCSYIPEEKIQHLRNLVQMRHALMQEKVRCNNRIQAFLDRNGVVMPPQKAFSKKWKYVLMQYIGSGDVSVELRYEYDHYVYLEKKNEQADQEIIGYTQTYWKKEFQLIRSITGFGQILSCYIIAFVHPIDRFLSNRKLRRYAGVIPVAKESGNYTSKGRIPKSSSKALLRWALVQAANTIGKTNTNLGRYYRKKKKQKKNTGIAKIAVASTLVDIIYKVLTTKKHYISDAC

SEQ ID NO: 310377 - protein, 411 aa, unidentified
MRVHHNVCCGIDVHKKSVTACLMWGPADKEPEFEIRRFGTMTQDLQKLAEWLKQAGCEAATMESTGSYWKPVWNVLEGQIPRLILANAQHVRALPGEKTDRKDGKRLAELTRHGQVRPSYVPPRAILELRDLTRYRSKLLSAGSSERNRIQKVLEDANIKLGSVLSDVFGLSGQKMLQQLVKTDTVDIANVIQLAHWKLKPKMEAIEQSLEGKLTDHHRFLVQASLEHMRFIEEQLKRLDEEIQRRLQPYQEEYALLQTIPGIKETGAARILAEIGADMSVYPDGDHLSSWGGVCPGNNESAGKKFQSKIRKGNVHLLSALTQCAWAATKKKDCHFRNKYYRLKSRRGSQRAIVAVDHAMLKCIYVVLSQRKPYQEPKPVSLSEAQKQRKASSLCRQLRVLGYDVKIQKTA

SEQ ID NO: 310378 - protein, 382 aa, unidentified
MSTMTRGSESTAPAGGLLLAFELGQRSWKLGFTGGMGQRPRIRQIPAGAVTVLMTEIERAKKRLGLPSDAPVTSCYEAGRDGFWLHRFLVAHGITNYVVDSSSIEVDRRARRTKTDRLDLVGLVSLLARYVLGDRRAWRVVRVPTVADEDARHLPRTLEALTQDRTRLVNRLKSLLATQGLSLAIDAQFLNRLAGTHLWDGAPVPPGLQERLSRTWTLLQEVNGQIRNLKALRLIRPETVTSATSRAAAQLLTVRAIGPVGASVLATEIFGWRRIRNGRELGALVGLVPAPYQSGETDYDQGITRAGNAHVRRVIVQLAWGWIHHQRDSALTHWYQQRFGTGGKRLRKIGIVALARKLLIALWRYLETGMVPDGARLKTMAV

SEQ ID NO: 310379 - protein, 402 aa, unidentified
MEEVPATAQEVLALAGRLLADGVELVVMEATSDYWRIWYYLLEDAGLRVQLVNSRHARQLAGRPKTGQKDAQWIARLAEMGLLRPSFVPPPEIRALRDLARTRLMLVRDRTREWQRLEKLLEGALVKLSSVVHSMSRTKTARGILEALAAGERDPEILAALAYGGVKGGHAAVRQSLEGMRLGDHHPRLIRVHLDHITLLDRAVAAIEDEIEAALDAIGEAWGISADGVPSPAPGPDAAALTAAGRLAEIPGVSPGLARAIIAETGLDMTRFPTPAHLAAWAGLAPVARQSGPRARKPAKGHGDAYLKGYCTQAALGASRTDTFLGERFRRLSRRTGGVRAQCAVGRSILVIIWHLLSDPAARFRDLGPGWHERKTDRDRKIRSHLRQLQALGLDVTIAPAA

SEQ ID NO: 310380 - protein, 335 aa, unidentified
MKHYAGLDLSMESTQVCIVDEDGRKLISEKVESLPEAIAAMLERYAPIERIVIESGRMSPAICLGLRDLGVRVVCIDARQAHQSLKAMKANKTDPHDAAGLAQLARTGFYKEVHVKSRAAHGLRSVITARGHLVKARVGLDNTIRGICATFGYRPGPGQGKAFLARIMEATHIPGLGDAISSLLSVRTELVEQIKEMDRRLRIIASQSQACEILMSIPGVGVQTSAAFAAAVDEAGRFRQSRNAGAYFGLVPRRHQSGELDWTGRITKQGDSTVRKLLYEAANSILSRCQETFALKTWAMKIVKRRGFKKARVALARRLAVIMHAMLRDGTLFQA

SEQ ID NO: 310381 - protein, 343 aa, unidentified
MGEVSTIGLDIAKSVFQVHGVDATGAVVMRKRLGRAKVLAFFAGLSPCLVGLEACPSAHYWSRELQALGHTVKLMPPSYVKAYLKRSKNDANDAAAICEAVTRPSMRFVSIKTEEQQTGLMLHRSRQLLVRQRTMFSNAIRGHMAELGIISAKGRNGTAELLQIIGDVADDRIPPVARFCLDLLARQYLTLNAEVSSIDKRIHAWHRSCEESRRLEEIPGIGPIVATALVAEIGDWKAFRSGRSLAAWIGLVPKQHSTGGKERLGSITKQGNRYLRWLLVTGAMAVIRYARQRGTKRAWLTRIMDRRPAKVAAVALANKIARMAWAIMVRTERYREPKLLLAA

SEQ ID NO: 310382 - protein, 360 aa, unidentified
MSFNGTSVGLDVHALSVVAHAVDEETGRVERARLCPDHGEILAWLDRLRGPVRVAYEAGPTGFGLARALAAAEIDCVVAAPSKLIRPAGDRVKTDARDAAHLTRLLRLGEITAVTVPEADVEAVRDLVRAREDARADLMRVRHRLSKLLLRHGRVYCGGQAWNGVHETWLRRQRFDDSHTMAAFDHHFDAVLTATAARDRLDQQIVTVAASPRWADPVNRLGCLRGISALTGLALSVEIGDWTRFTGASIGAYVGLVPTEYSSGASRVQGSITKAGNAHVRRLLIEAAWHHRAAYRNPGPTMRARWAKVDPALKDRGHAGNRRLHQQWCRFNERKKHHVVANVAIARELAGWCWSLATLN

SEQ ID NO: 310383 - protein, 451 aa, unidentified
MNNEPEIVLDDEHELVIERVAAIDVAKASGKVCMRMPHPSRPDRRMSKVRDVDATTRAVTELANDLLGEGIERVTVESTSDYWRIWFYLLEAAGLRVQLVNARDVKNVPGRPKTDKLDAVWLAKLTEKGLLRPSFVPPAPIRQLRDYTRFRVDLTRERARCWQRMEKLLEDALIKVSAVVSRMDSMSVRDMLEALIAGERDPRRLAGLARGKMRPKYNALVEALSGRFDEHHAELARMLLDQIDALGAQISTLTTRIDELLAALIDTPGPAADGSVRDRDGEVELMVTGLDAAERLAEITGIGPVSAQVIIAEIGLDMARFPTAAHLVSWAKLSPRTIQSGAIQRSGKAGKGNPYLKGALGEAAAVAARTDTFLGERYRRIVKRRGKLKALVAVARSILVIVWNLLSDPTARFHDLGPDYYTRRIDTERRARNHLAQLAALGYRVTVEPAA

SEQ ID NO: 310384 - protein, 394 aa, unidentified
MFYCGIDIAKHKHEASIIDTEGKALLDSISFSNSEEGCKKVLALFERLGVTVETVIIGMEATGHYWLSVYEHFSELGYDVKVINPIQSEAFRKMYIRQTKNDSKDSFIIAQIMRFGQYSATTLADENVIALRQLSRYRLALVDSCGDCKRRIIALLDQVFPEYAKQFSDTFGVASTELLLNCPTPEDILAISSKKLTTLLTKSSRGRFGKSKADELKAAAKNSFGISYAKDAFSFQIKQLMEQLVFIEKQIEELEKEISTLLRKTNQVITTIPGIGETLGAIIVSEIGDIHRFDAPNKLVAFAGLDVKVNQSGEFTGTKNKISKRGSPYLRRAIWLAAGRAAFCDPILSEYYQSLRARGKHHLTAVGAVARKLCNIIFVILRENRPYEAALPKR

SEQ ID NO: 310385 - protein, 396 aa, unidentified
MTTIGIDIGGRTHVAARCRDGESRADREVLRVSQDRAGFAVLDAWLLRQPEPVTLVTMESSGHYWMPIASHLRRRDVPVAVVNPLAAKYFARSRLGRTKSDPADARSLAEMAMRDTPDARDPLAGVELRQAARFAMTLVTEQAKVCQRLVRLVELGFPELGELFDDPTCRTAREVLRVAPTARAATRRRTSTLASANGGPGHRRLGLARAERLQAAAADSIAVPELDAEVAFEVGLLLDQYDLLERQITDAERRVAGLLDGELARRLQTIPGVGPSIAATLVSEIGKIERFDDFDQLLAYAGVHPAERSSGRKGSNPETSWHMSKAGNSHLRAAAYRMAVVGIQHNPVIAAHYARKRTAGKSKMNALGHCMRKALAIVWGVWRNGQDFDPDWGVEA

SEQ ID NO: 310386 - protein, 365 aa, unidentified
MQKISTTRTNGRKIFKGQLTIGLDLGDRYSSYCVLDEAGKILLEQKLPTTQETMKQIFGRMARCRIAMETGTHSPWVSRLLTALGHEVIVAHAQNVRLIVKSRRKDDRIDARTLARLARIDPELLSPVRHRSAQAQLHLTEIRARAGLVSARTALINAARGLVKSYGERLRKCGSFQVSREIGSGLSTELREALQPLLREVESLNERIQEYDRRIEKMAKERYPEVALLKQVKGVGDVIATTYVLRIEDPHRFRKSRDAGCFVGLQPGRRNSGESEPQMHISKQGDEYLRTLLVQGAHYILGPFGEDSDLRRWGQKLAERGGKNAKKRAVVAVARKLAVLLHRLWVSGEVYEPLRNSHKAMSAAA

SEQ ID NO: 310387 - protein, 412 aa, unidentified
MQTLVERGCGLDVHQATVVACLLIVRKDGRVQKQMRTFGTTTRELVTLREWLLSENCTHVAMESTGVYWKPVYAILEGALEIVVANAQHVKKVPGRKTDVKDAEWLADLLCHGLLRSSFVPPQPIRELRDLTRYRRKLVESQTAERNRLLKLLESANIKLASVASDVFGVSGLLMLQALVEGKATPQEMADLAKKKLRKKIPELELALEGKVEEHHRFLLKLQLDRLQAVEKDLALLEQRLQEKLQPYEAQVTLLDEIPGVDWTLAAAIIAELGVDMSVFGSVSQLASWAGVCPGNNESAGKRKSSRIPKGNIYLKTALVEAANAAAKAKGTYLRDKFYRLKARRGYKRAAVAVAHKILVAIYHMFSHQVCYNELGDVYLDKRNKHHLTRNLVHRLERLGYAVTLTPQEKAA

SEQ ID NO: 310388 - protein, 351 aa, unidentified
MSEAYEGRQIVGIDLHRRRSVLVRMTDTGDHLETVRISNDPEYLAQVMARAGEAPEVVLEATYGWYWAADTLTGLGAHVHLAHPLGVKMFSLRRVKNDVRDAADLADLLRMGRLPEAWIAPPATRELRGWVRHRAKLVGLRSNLKCQVHAVLAGAGVQVPMSDLFGPAGQPLLASTRLAPESRARIASLTRLIDALDFEIDTYAKLVAGRLRTDPGYRAVQALPGVGPILAAVFVAEIGDIGRFARPQQLASWVGLTPKHRESDTHVHRGKITKQGSRLVRWAAIEAVQRVGPHTRLGQTRDRIAARRGRNIGVVAAARELITLVFYGLRDHHIRALDSPSRVPSTSSEAA

SEQ ID NO: 310389 - protein, 446 aa, unidentified
MDVVFTHCAGLDVHKKSVTACRLISDPTGQQAEGIAELQTFGTMTRELLALADWLAEAGITHIAMESTGEYWKPVYNLLEGTFTIILVNAAHVKNVPGRKTDKADARWIAKLMRYGLLQASFIPPAGQRDLRDLTRYRVKLVQERAREVNRVQGVLERANIKLASVVSDIMGVSGRAMLEALIAGQADPAAMAALAKRRMRSKLPLLEQALTGRVRDHHRRLLAMQLAHIDFLDEQITALSDTIHTCLLALNPPTEPPGSSLETSEPPGGSAPAIAPPVTFPRAVELLDTIPGVDQRGAEMLVAEIGIDMTRFGTAPRLAAWAGVAPGNNESAGKQRSSKTRQGNHTLRAGLTQLAHAAVHTKDTYLAALYRRLAARRGKKRAIRAVAHAIMVSVFYMLARNEPYRELGGNYFDERQRHYTVDRLASRLERLGYRVHLEPVAATAA

SEQ ID NO: 310390 - protein, 366 aa, unidentified
MASIADTPYTFMGLDVHKDSISAGILEPGAQQPIHDKIFHDEASIRRLMGRFDPTTLKVCYEAGPTGYRLARLLASMDIDCQVIAPSLIPTAPGDRVKTDKRDAQRLARLHRAGELTAIRVPTELEEAVRDLCRVRVDAVQERRRARQRLGGFLLRHGRVFREAGNWTAKHTQWLNSLTFDEPAATATFAHYRSMLQMADTALKAIDDDLAAWAVTEPFAGPVARLAAYRGIQPLGALVLVAEVCDYRRFATASSFMSWCGLVPSEYSSGGSTRRGHLTKAGSQMVRTQLVESAWAYQHRAAVGVGLRTRQQHVSSATIARSWAAQQRLCGKHRKLAARKDSKSVVNAAVARELAGFVWAEMVAED

SEQ ID NO: 310391 - protein, 481 aa, unidentified
MESRPAEKAKKTTEAKHVHWNDMNRKQRREMTRKIQSADLSLEVVHANAAGIDIGNESHYVAVPPDRDSQPVRRFGCTTAELKAMADWLKQCGICTVAMQSTGVYWIAVFDILEAAGLKVYLVNARDTKNLPGRKSDVQESQWLMKLHTYGLLRNSFRSSQEIRTMRTYWRQRNDLVQAAASHIQRMQKVLTQMNVQLANVLSDISGVTGQAIIKAILAGERDPHQLAELRDPHVKADKEQIARYLEGNWQEDLLFVLKQEHEAYKFCQQQMVACDQQLEQYLRQREDLSQGAPLPEEKRKGRLKKKKGNKPQFDLRADLFRMTGTDLTMIDGIDVMTATTILSEAGWDMSKWETEDHFVSWLRLCPDNRISGEKIIGKRRLPTNNRITIALKMAATTLRTSNTYLGAQFRRLRTRLGAPIAIKAMAAKLARLVYRILRYGMKYVDRGVEFYEAQHRGRQIKNLKSTAAKLGFHLVQAAAA

SEQ ID NO: 310392 - protein, 426 aa, unidentified
MEQVDESGELVERVAALDIGKASVMACTRIPHEDGRRRLQEVREYGTTTGALLALAGQLHDRGVTLVVMEATSDYWKPVFYLLEAEGFTCWLLNARHVKNVPGRPKTDKLDAVWLAKVAERGMCRPSLVHPRPVRELRDLTRYRRSLIRERTAEKQRVEKLLEDAQIKLTSVASNIFGVSGRQMLAAMLAGQDDPVVLARMAHGRMRAKIPQLREALAGNFTAHHAFLLQMMLDRIDSLTARVGEVTARIEEQIAPYARAVEQLDEIAGVGATSAQELIAEIGIDMSRFPAAGHLVSWAKFAPIDRSSAGKSKGSSTGKGNPWLAATLGEIIAATARTDTFLGERYHRIARRRGKRRAIVAVGNSILTIIWNLLSDPGASYHDLGHGYYQARSDSRHRERDLIRKLERLTGQTVTLQPSAGQKPAA

SEQ ID NO: 310393 - protein, 456 aa, unidentified
MPSTEKQCKSRNLSHGKWIGLRSLAGHKTNAHKVRLPAGFMETKQRNGGDSIYNKRKMAFIGIDMHKDTHTAVVMDCWTNKLGEITFANRPSAYDKFMADVKSLYGDLQPIFGLGDTRGFGRNFASYLLGHKYTVKHVNPAYTDAMRSSAPMSRKDDSYDAFCVARILRDMLDTLSDEPHDDLFWTIRQLVKRRDSLVKGIIIAKNQLNAQLTYVYPSYKQYFCDVDTKTAMYFWEKYPHPRHLKDVQPEELLEELRQVHRGMRVKKVQEIISLSERNSPEEKDYQDERDLVIGGLVRELKFRKQENEDIDRELERLIRLTGYKLHTMPGINLITAAGIISEIGNIERFSNSDKLARFSGVAPVNFSSAGKGKDQRSRQGNRVLNAIFHFLAIQLVQVNPNGKARHPVFKEYFESKLKEGKTKPQALVCITRRAVRIIYGMMRTKTEYKPFEKLAD

SEQ ID NO: 310394 - protein, 347 aa, unidentified
MKITRIGLDLAKNVFQVFGVDAQDKRVLSRQLKRKDMQVFFQALPACLIGMEACASAHYWAWVLTEMGHTVKLIAPQFVKPYVKGNKNDANDAEAICEAVSRPGMRFVPVKTIEQLHIQARHRVRSELIKQRTAKANQIRGLLAEYGIVIGLGVRCLRHHLPEILEEAENRLQEDFRLLLTGLRDDLVYLDERIKTEDKAIGTLANTHASARRLQQLRGVGPLVATALIAALGDGRQFRNGRQASAWVGLVPGQHSSGGKQTLLGISKRGDTYLRTLLIHGARAALRAARSKTDPLSLWLQGLCARRNPNVAAVALANKTMRLAWVLLRREEDYDPLHGHARPAQPA

SEQ ID NO: 310395 - protein, 344 aa, unidentified
MTGNDYIGLDIHKKTISFCAKAQDGTILDQGTIVARRDTLLAWAKARPRPWIGAMEATLFTGWIYDLLKPLAQELKVAHPAMLKAIAASKKKNDQVDARTIADLLRCNLLPECYMAPCAIRDLRRVLRYRNLVVRQATRMKNRIAGLLMETGTPYNKERLHGRAYFSELLGSLREVPRSVVELLQLSRGQLEFFATIQRRLLKGLGQNPDLSERVARLQTIPGVGEIMALSWALEVGEVKRLPSIGQAASYCGLTSAQHNSAGKEHRGPISKQRNKHLQTILIEAAKLAPRHNPQLAVVHERELQRGDRNQATLAVARKLVAYLMAVDKSGKPFAMRASGEEAA

SEQ ID NO: 310396 - protein, 289 aa, unidentified
MEQATTIGLDIAKHVFQLHGADGAGHVLFRKRITRVKLLGFSAAQARCVVAMEACAGAHCWAREISKLGHHVRLIAPTYVKPFTRRQKNDAANAEAICEAVQRPSMRFVPVKTEEQQANGIVFRARDLLVRQRTQCVNALRGHQMEYGYVFPKGITHVKALVAVVEDPQSSLPDSVRVTLKLLVDTFTGLEAQIAVLDAEINRRSKTDSAACRLMTIPGVGPIVSTAITALAPAAHSFAASRDFAAWLGLTPRQRSTGGKQKLGAVTKRGETNNPATPDYWSKCRGSAG

SEQ ID NO: 310397 - protein, 378 aa, unidentified
MNRIIKIGMDVHTSNYTLCIFEPSFEHDGTVHCITQVKPEVKNIIHVIETFKKKHENEELNIVCGYEAGCLGYSLYHELKEKGIECVILAPTTMKTEKGGRKLKNDYRDAKMIAECLAYGGYSAVHVPTELDNSVKEFIRMRDDIKENLKSIKQQIIAFLTRNGKQFEGKSFWTRKHIDWINTVSFSEPLLQDTLKEYMIEYNHLCDRVETLDRQIEEISLKEEYVEKVQQLQCLIGIKTHTALSLIVETSDFNRFKKGNMYSAYLGLIPGDDSSGGHENKLGITKAGNSHLRRLLVEAAQGYTRGRVGFKSKDLKARQEKCSSEVVAYADRANERLRRKYYRMTLRGKKFNVAKTAIARELACFVWGIMTDHIDLCN

SEQ ID NO: 310398 - protein, 343 aa, unidentified
MEHYAGIDVSLERSSVCVVDATGRIVREAKVASEPEALVGFLRRLGLPLARVGLEAGPLSQWLHAGLAGAGFEAVLLETRQVKAALSAMIVKTDRKDARGIAQLLRMGWYRPVHRKSPPAQEVRALLVGRKLLQGKLLDVELSIRGLPRGFGLKLGEVSKGRFAVRVRELVAGQPTLERVIGPMLRAREALRSEYLALHRAVLAIVREDAVCRRLMSVPGVGALVALTFASAVDDPARFRRSRDVGAHFGLTPKRYQSGETDVTGGISKVGDAMVRAALYEAANVMLTRAGRFSTLKRWALEVAKRRGARRAKVALARKLATVLHRLWADGSEFRFGKEAAAA

SEQ ID NO: 310399 - protein, 341 aa, unidentified
MGAGDVNRLFSILETGRARAMRDASRSLEIVLCYEVGYDGFWLARLLTARGIRTVVFDPASFLKPRRGRLAKTDRLDAGEMTRILRTWLSGNHDVATAVRIPTVEEEDAKRIERERKNLVEERTRIVGRIKGLLALHGIWLSSKRINKRLQGCLDTMMTGDGRRLPPFLRRDIERMIRHYEFICSQLTEVEADRKLALTDETSSFPHRDKVRRLATLGSVGETTATVLVAEVFHRTFETRRHLASFIGLAPSPYASGDVSRDRGINKAGTKLARQTLVELAWSWLRYQPNSKLALWWHERFGDQGMRGRKVGIVALARKLVIALWRFVEQGVVPEGATLKA

SEQ ID NO: 310400 - protein, 313 aa, unidentified
MAEPLFIGIDVAKETFHVASCPAAINISLPNCLSGTKQLIKTLQPHNISLIVLEATGGYERPIVAELLEADFKVVVASPRQVRDFARGIGEFAKTDPIDAAVLARFAQVVQPKPKPPVSPQTDELADLVRRRRQLTDLRTQELNRSETVRHPKVRKSVRKMIKTLDYQIAELDELIRQHIKSDDDFRKKDEILRSTPGVGPHTSATLLSQLPELGQLNRQQIAALVGVAPYNFSSGRFVGKSRIWGGRKDVRCVLYMAALTAIRCNPAIHRFAERLLEQGKVFKVVITACMRKLLIILNTMLRNQTLWRPEKN

SEQ ID NO: 310401 - protein, 312 aa, unidentified
MEPIVIGIDVSKDRLDVAVHPAGEAFVVARDQEGLEALRARIAPLAPAAVAVEATGGYETLVAATLAAAGLPVVVVNPAQVRAFAQALGRRAKTDPIDAAVIARFVAATRPEIRPLPDDRTRLLADLVARRRQIVAMIVAERQRQKRLTEKRLQRSIARLLAALQKELSTLETDINEAVRGSPAWRDREDLLASVPGVGKVVARTLIAELPELGSLDRRQIAALAGLAPWTRQSGRWRGRSFIGAGRATVRAALFMAALAAARWNKDLKAFRDRLVQAGKPRIVPIVATARKLLTILNAIVRDNKPWQPETA

SEQ ID NO: 310402 - protein, 375 aa, unidentified
MSFVSDAILVALELSNSIWLVGVRMPGLQKSQMHHIDAGDTPALMDLLTSLKSRHERTSQIVAPIVCCFEAGRDGFWLQRFLVDHGIPTHVVEPTSILVNRRAKRAKTDRLDAEGLLRVLAAYLAGDTEICSMVRVPTPEEEDRKRMHREREHLVQEKTRIENRIAALLATQGVRSRPSLRSWDRDMAALRTGDGREIPDHLAAELGRLRRRLVLTRDLIRELDEQREAFLAAAPVDDKTTAKVVALSTLYGIGANFSAVLGREIFYRDFGNRKQLASYVGLTPMPHQSGSMDKDRRIARAGNGRARKTLVQAAWLWLRYQPASALSAWFRERVGALKGRTRRIAIVAMARKLLIALWRFAEDGEIPQGAVLRAA

SEQ ID NO: 310403 - protein, 307 aa, unidentified
MALCVGIDVAKHTLEWCAGAEGKIQHARNEPRPIAQLVRQLVALDPVRIIVESTGGYERTLVTKLAEASLPVVVVNPRRVRSFGQAMGILAKTDAIDARLLALFGEKAEPAARPILLGRARLLADLVARRRQLVAMIVAEKSRRETASTAVRRSIETMLRTLAEHVRELDQRIDQTLGEDVETAELAALLQSVPSVGPGVARTLLVDLPELGHLGRREIASLVGVAPFARDSGRLRGVRYIRGGRASVRTVLYLAAMNAARFNPVLRPLYQRLLQAGKPPKLAFVAVARKLLVILNAIARERTAWQA

SEQ ID NO: 310404 - protein, 409 aa, unidentified
MDVIHPKCAGLDVHKDSVVACARIGTGPKIAREVKTFGTTTRDLLALSDWLTAQGCTHVAMEATGVYWKPVWHVLEGSFELILANAMHVRNIPGRKTDVNDATWIADLLAHGLIRSSFVPAAPLHELRDLTRTRTQLVREKARHILRIQKTLETANLKLASVLADILGVTGRRLLDALAAGESDPDRLADLAHDHRLKASRAEFVEALHGRMTPHHCFMLALHLRQIDALDTAVRELEARLEDALGPFRPALARLTTIRGIGDTAAHVLIAEIGIDMSHFPTAGHLISWAGLCPRLHESAGKRRSTRTRHGNRWLKTTLVQAAWGAVRHHHGGYLRAQFVRLRSRRGPKKAIVAVAASILTAAYHVLRDGVEYRDLGADYFDRRDKAKLANRLIARLHDLGLRVEVRAA

SEQ ID NO: 310405 - protein, 345 aa, unidentified
MKIVGCDLHTRYQQIAMLDQETGELIERRLEHEGGEARGFYASLEGPVRVGIEATGHTRWFEGMLAELGHELWIGDAAEIRATMVRKQKTDARDAAHLLQLLLSERFPRLWRPSLAERDLRQLVWHRQKLVWMRNAIGNQLHALAMGEGVCRKKKLFTKKGRVELEGLKLDPWASRRRQELLRMLDQLDASLKEFDQAVAEQAEQSPAAVLLMTHPGVGPVTSLAFVLTLGRVERFARSKQVVSYLGLNPREYSSGGRQRLGSISKQGNPMMRSLLVEAGHTAARLDHELRQDYQRLKLRRGGGVAKIAIARKLAVRMYWMLRSQSSYAQLVRMQGSPRATLVEN

SEQ ID NO: 310406 - protein, 315 aa, unidentified
MFVGIDVSKDWFDAAWEVDGQLRTQQFAYTDEGIEQLMEQVPSQAVCVMEATGTYHARLALKLFEAGRGVSVVNPLVIKRYGQMKLLRVKSDRADAQLILGYAQQERPALWQPASEQVQELQQAHGWLNDLIGQRVRLLNRQHAVSYRAKPSAFVVGQMAAQLQQLNERIDECERHLEVLVKKSFAELYERLLTIPSIGAKTALELIIVTDGFTRFEDVKQLGAYIGVSPTTLRSGSSVKGKGSIAKLGQGRMRQLLYLCTWTAKNCNPACKKLHQRLKAQGKPAKVINIALAHKLLRQAHAVATKNVSFSAEMA

SEQ ID NO: 310407 - protein, 404 aa, unidentified
MANNQRVVIGGVDTHKNVHVAAVIDERGKILDTSSFETTTAGYRQLLKWLRSYGELHKVGVEGTGSYGAGLYRYLFDEGVAVVEVNRPNRQMRRRRGKSDTVDAESAARSALNGEATVIPKTHNSIVESIRALRVAFTSARNSRTRVALQIRDLIVTAPAALRAEIEPLSTAKRVARCARFRPGDPTEPREATKVALRSLSRRYEALTEEMKELGSVLDDLTYKANPALRSARGVGADVAAILLVAAGDNPERLRNESAFAALCGVSPVQASSGMTTRHRLNRSGNRQANNALWRIAVVRITHDEETKVYAARRLAEGKTKREIVRCLKRHIAREIFVHLTNPAVVPVGTELRAERNAAKISLTTASSELGTYPLRISRLERGIDHDREFAEQYQAWLAERIAA

SEQ ID NO: 310408 - protein, 370 aa, unidentified
MKSIIYVGMDVHSTNYTLASFMFGNEQPFAVTQVDPDYKHILNYLKQVQKNYGGPCEFLCGYEAGCLGFTLYEQLKAHNVPCVILAPSKMPKVKNEIKTDKRDAMKIAKCLAYNDYSAVYVPTKEDYQVKEYIRMRDAHKTALKKVKQQILAFCLRNGFQFTAGKNYWTGKHMAWLRALQMSDLMREALDEYLATYQASLDKIERFDKRIEELAADTRYAEKVRMLSCFIGIRTHTALSLIVETGDFRRFAKADQYASFLGLVPGEHSSACDKNYLGITKAGNSHLRRLLIESAQCLARGRVGYKSRVLKAKQYGNPAQVIAYADKANERLRRKFYHLTLKLKKKRNIAVAAVARELSCFIWGMMTEHIS

SEQ ID NO: 310409 - protein, 364 aa, unidentified
MLAEINCKHASKKSPFVLATPWPIDLGKNNCSVAGFDEAGRVVLRRRLMRDGVVRLGAKLPTCTMAMEACCGAHCLGHVLREQGHEVRLMSPEYVQPYVKAQKNDERDAEAIAEAATRPTMRFVELKSEAQLDAQILHRARTRLVGQRTALINQLRAVLLERGIVVAKVRQQLQRFLTEMLDPAIEPPSTLNPRTRLLIVDMRLEWSELDRRIAELTTEFVARAREDQAAWRLVSIPGVGVLNATALVAAIGTGETFRSGRDLAAWLGLVPRQATTGGKPRLLDITKRGKTYLRTLLIHGARAALPSLSAGQTLDRRVAAWPRRPCSQEQGRRGARRQVGQDRLGGTPLRREGYAARVSQPVAA

SEQ ID NO: 310410 - protein, 348 aa, unidentified
MLADQLDYVVGVDPHRDSHALAVVHVLSGAVVLEASVAAGSEGYARALRLADEHGAGRRAFAVEGTGSFGAGLTRFLSERGELVLEVGRLRRERRSGGKTDALDAIRAARSVLAQKRPATPRAAGGREALRALMAAREGAVSAKRAGLCQLRGLVVTTPEPLRSELGPLTRARLLQRLAATRPERRRDPELRRALLALRSVARRVLQLTAEERELAHEIETLIGELAPQLLEQPGVGPLAAAQLVLSWSHRGRITSEAAFARLAGCAPIPACSGQTVRYRLDRSGDRRLNRALHMILVTRRRSHPATIAYIERRTKEGKSRREATRCLKRYLARNLYRLLEHGPPLAT

SEQ ID NO: 310411 - protein, 392 aa, unidentified
MSQQHCHFDASRSLTALEQDSTIIAVIEMSQSKWLIAALVPGVKRHPLKKLEAQEEGLLRLLHRWRNEGGQAGREIKRIVVAYEAGRDGFWLARWLRARDIEAYVIHPTSIAVSREHRRAKTDRLDTELLMRAFLGWLRGEKRHCSMVAIPTIEEEDARRPNRERQNLVTEQTRIVNQTKAVFARFGIRTFRPTLRKAEEKLKGLRTAEGTLLPENTRAELCRHLARLRVVREQIRVVERERLRKLAAAPAAEKVSHAMVHLIARVLGIGIETADMLLSEVLSRRWRDRKAIARYAGLTGSPDESGKRRRERGLARAGSARVRCSMIQFAWRFLRFQKNSALARWFAARTTDRRASTRKTMIVALARKLLIALWCLATRGEVPQGIILRPAP

SEQ ID NO: 310412 - protein, 327 aa, unidentified
MAKQVIGMDVSKLTLDVILTDGVISHFNRVENAPRGYQQLVTWLKSLGAAKAHICLEATGQYGDHVAEHLHIQGYPVSVVNPAQIKHYGSSKLRRNKTDIADAKLIAEFCLREKPAIWTLPPASFKDLQALVRHLEDLQTTRQQEANRLGSGVRTAFVLDSLKLLMIALDHQIQQTKQAIQDHIDQHPELKHRQDLLVTIPGIGRLTAAKLLGEIRDILGFENARQLGAYAGLTPRKFFSGTSVHHKARLSKTGNARLRQILYLPAISAKHWNPIVHAFCDRLIASNHNPMEVIGAAMHKLLHLVYGVLKSDRPFDPDYLVHSQVPA

SEQ ID NO: 310413 - protein, 429 aa, unidentified
MKNSAARKLKQVPKGYLVMGVDPHKKRHAAVAVTQDFTTHSKFKFDNSREGFEMALERARAEMVRTGSRGVIFAIETGGHYWRNLAYFLDERGIPFHFINQFTLKRRREGKDLNRRKNDYRDSEVAAQLLCTGEFTDTKLQHGVYAELRATYNAYRRLVKERTRITNLVKGLLDGIFPEFTRVFKDPCGQTALSVLSICSIPTVIARMTEEEFVDATRARHQGRLMRKKLRALHYAARTSIGIEAGARSVSSEISFLVEKLCLIRRQIRSIDETLAKLVDRTEEGKYLLSIIGLNYISVAGLLAELGSFRSYRSAKQLIKMAGSNPTESESGGKRSAHTPMSKKGRPVLRYCAWTAVIPMLRFNADFRAWAKKLRERPVYANPLNGREIVGAGLNKLLRLAFALVKNQTFYQVPELELISELELLPVGS

SEQ ID NO: 310414 - protein, 377 aa, unidentified
MFECLVEEEHEVLRKAELSIEADSENYLVGSSDDMYYIGLDVHKKTISYCVKDAAGHVHREGKIGSTRCELDTWIKTLPQPRMMAMEATIFTGWIYDHLLPHAESVKVAHPLMLRAIAAAKKKNDRIDASKIADCLRCDFLPECYMASTEIRDRRRTLRYRNLVLRQTVQMKNRISGLLMESGVSYDKQRLHKMGYFTELFSTNKEISESIRPLLRLGREHIQRGQRLDRALTSSLEHDPLLSERLRRLRTIPGVGPITALTWALEIGDYTRFQSVKQAVSYCGLCSAEKSSADKVMRMPISKQRNKHIQHVLVEAAKMAPRYSHELALLREKELQHGNKNRATLAVARKMVAYMLAVERRQQDFVPVEEMAGKAVA

SEQ ID NO: 310415 - protein, 367 aa, unidentified
MKKVSTAATKPSRNFSQPNLIIGLDLGDRSSCYCVLDETGRIVMEQKVSTTPKALQVALGGMPRSRIAQETGTHSPWVSRLLSRLGHEVIVAHARNVRLIGESRRKDDRLDAQTLARLARIDPELLCPVKHRSAKAQADLTVIRARAGLVRARTALVNTARGLAKSYGERLRGCNVRNMNPEKAEGLSPELQAALQPLLAALESLSEQIREYNERIEKLAQESYPQAALLKQVKGVGTLIALTFLLTLEDPHRFRKSRDVGCYLGLQPGRRNSGQSEPQMHISKEGDPYLRTLLVQGAQHILGPFGVDCDLRRWGLKLAERGGKNGKKRAVIATARKLAVLLHRLWVSGEAYEPLRNSSPVRMRVAA

SEQ ID NO: 310416 - protein, 419 aa, unidentified
MNKPNELELAACVGLDWADQRHVICLQAAETTKVESCELEQKPDALHDWIAQLRVRFQGGKVAIAIEQSRGAVIHALMMYDFLVLYPINPKALARYREAFRASGAKDDPLDAELLLDLLRLHRSRLRAWLPDTVETRRLQLLAEYRRKLVNNRIRHTNRTTSLLKMYFPQALDWAGELGTVQSCDFLEKWPSLSTIQHARPSQLRKFYLQHHGRNLDLIEERLRQISSARSLTDDPAIVQSLSLAVQAEAAQLRPVIDWIARFDQILAQQFASHPEHALYESFPGAGPVYAPRLLTALGTDRSRWESAADLQCHSGIAPVTEKSGKTCWVHRRLACSNFVRQTFHEFAAQSIRYSTWARAYYDQMRARGLRHPAAVRTLAFKWIRIIYRCWRDQKPYDEQIHVNSLRAKQSPLVKPDSD

SEQ ID NO: 310417 - protein, 349 aa, unidentified
MSMVGGLDLHRRQITYDVLDVESGEIWRGRLWQPDRARFRYWLEHEVTVRAHSRSVALAVEGCTGWRYVTEEISKAGFTPFLAEPADTQAARGKKHRAKTDRSDARLLRELLQSGELPESWIPPEGVLEWRERVRLYKSLVDQRTLWCQRIHATLYHHGVTIPEGAIRTEKTRSMLQSNDLFVSKAGRERIDAGYKMIDAADAEALPLRRVLQRFGERQPACRTLVDAQYGIGGLLAVVVWSELGDCRRFSRSEQVVRHSGLDVSVDSSDRRRANGHLSRQGPETLRWALYEAAKNSSHARSPDHGYYAKVKDRHDGKIATISVARQLARRSYHVLRAVDPELVYAIPA

SEQ ID NO: 310418 - protein, 310 aa, unidentified
MDMKAVGIDVSKDRLDVHVWPDGIAFAVARDGKGLAELIERLLPLTPDLVVVEATGGFETVVAAALAGAGLPLVVANPAQIRHFAQAAGTRAKTDPIDAAMIARFGHDMKPDVRPLPDEATQLLADLVARRRQIIEMIVAERNRERRATVRRIKKSIARLVRALEKELAEIDAEIDAGVRGSPAWRDKEDLLASVPGVGPVVARTLIAELPELGTLDKKKIASLAGLAPYTRQSGQWKGKSMIGGGRKSVRCALFLAALVASRHNPVLKAFRDRLRAAGKPKMVALIAVARKLLTILNAILRDQKPWQPA

SEQ ID NO: 310419 - protein, 488 aa, unidentified
MATTSKQPHRKNGSDARCSALKRKARGSHCHPGKGNRQRSKLTISNPDAAGIDVGAEVHYVAVPEDRAEAPVRSFGAYSAQLDELVQWLKECGIKTVAMESTGVYWIPLFQKLEEAGLEVLLVDARQAKHVPGRKSDVQDCQWLQQLHSYGLLRAAFRPEDSICRLRTLQRHRKDLVECAAMWIQHMQKALNEMNLHLHHVLSDISGQSGLAILDAIVAGERDPSKLASLAHYRVQKSQAEIEAALRGDYRPELLFVLSQSLENYRQLQQQLLKCDLSIEKKMATLAGRATISQGAEPTQQSQDSDGKPPKRKPKDALELSLASHLKRILGVDLTTIPGLNVLAVLTLLSEIGTNMTKWRNEKAFASWLGLNPNNKISGQRVLSSRTRKVANRAATTLRLAAMLSGKTNTPLGSFYRRKRAQLGAPKAITATARKLACLVYRLIKNGQAYKPTDLRTYELKYKQQTLDSLRKRAKNLGFDLVQLPKAA

SEQ ID NO: 310420 - protein, 354 aa, unidentified
MEFIGLDYHKQYSVATKIKSDGSKEQCRLNNTPDEFSRYFDTEEETSVVFESSRGWSYLYEMIKNKVDHIKMAHPLKVKAIASARIKTDKIDSNILAMLLRADLIPESHLREEENRTHLKILRQRAYFVKVTTSVRNRIHVHLDEQPYEVRQSVPKVSSLWGKKGMEWLKMLRLPIAEHQKLLKSMLKLMEHLTKQIKVSDGIVTKLYAKDADAQILSSIPGLGKFGAVMVSNEIDGIKRFDSAKKLASYAGLVPSTYSSGGRTFHGSITKQGSKWLRWMFIQAVSPAVRSNVQLSNYYEGIKRRKGTKAARVATSRRLLTIAFSCLKENRTFVPWKSNQSKEMYFSNGPSRPR

SEQ ID NO: 310421 - protein, 311 aa, unidentified
MIISPGYVGIDISKRTLDVFDAAMGRAERIENASAPLAALTERWRGKDVFVVFEATGRYDQMLQAALHGAGIVFARVNPGRARDFARAAGFLAKTDKVDAKMLAMMAERLKPRAELAQSSERERLRMLHRRRDQLVHARKQERTRLSEAAGEEELADLAAHIDFLSGRIADFDRRIRQLIAMVQSLKLAAATLRQAPGIGPVAATTLLALLPELGSRSPKAIAALAGLAPLNRDSGTVRGKRTIAGGRKRVRNAVYMASLAAIRTDPHFKAIYDRLVAAGKAKKLAIIAVARKLLIALNAMIRDRTGFNPV

SEQ ID NO: 310422 - protein, 402 aa, unidentified
MVFVGIDWAEAHHDVCVVDEEGRVLARRQVPEGLDGVGKLHALIAAHAEDPSKVVVGIETDRGLLVGSLVTAGYHIYAINPLASSRYRDRHATSGAKSDPGDARVLADLVRTDRHKYRPLAGDSNLAEAVQILARAHQGLVWTRQRQVNQLRNALREFYPGALAAFDDLDAADTVAILERAPTPSRGRALSQAKIISALRQGGRERNLEAKAAQIQAQLRLRQLEAPALLSEAYGHSVAANVAVIKQLNLQIAALEQELAASFELHPDAEIYLSLPGLGVVLGARAMGEFGDDRTRFLHPKARKNYAGTAPITKASGTRKVVLARVARNRRLADACYQWAFSALTRSEGARYRYDVLRARGQTHHQALRALANRLVAILHGCLANRQAYSEHLAWSAQAEVA

SEQ ID NO: 310423 - protein, 372 aa, unidentified
MNYNTVYVGMDVHKESFTLCAYTIDAEKGSHFQRTEADYKNVLKYLEFLRTVYGNDANFICGYEAGCLGYTLYHQLIEHHVNCVILAPTTMLEQRSKRRIKTDRRDAEIIGKCLAQHNYSPVHIPTATDEETKEFLRMRDDHKLALKKVKQQILAFCLRHNYRYDGNSHWTAAHIKWLKSLNPEALYKEILDEYLLTYTTLSDKVERLDKRIEELASKDEYRESVKKLCCFIGIKTHTALSVLVEVGDFQRFASAQNFASYLGLVPGEDSSGDGQTRLGITKAGNRHVRMLLTEASQCYARGQIGFKSKELKSRQAGNSPQVIAYADKANERLRRRYYKMVLGKSKKHNVAKTAIARELACFMWGMMTEHIA

SEQ ID NO: 310424 - protein, 406 aa, unidentified
MSALTIGIDVAKEFHWAVATVPHPDTGKARVTLSRRVDNTPTDISALLAEIAELEAEHGPAAVGIDVLGGIARLVEVMLTSAGLELRHVPGLAVKVTRRATRGGVHKSDPRDARVIADLVRSRDDLRLVTSDESQSVGLALLVARRRALVEDQTRGIAQLLDLLCSIHPGLERAINARNKADLALLARYVTPAEIRRAGRTRLLAYLRRTGRHNPAILDRLVTAALTAASEQRHIHVPGTDVAAGIVKDLATELLAIRTRLTAVNAHIADQLAAHPDAALIRSLPGMGATLTAEFLAVAGGITRFATADQLASAAGVAPALQQSGKVRYLQRSTGGDRALKRVFYQAAFCALQRDPTSRAYYDRKRTAGKTHHQAVIALARRRVNVLHAMLRTRQPYETRPPRVAA

SEQ ID NO: 310425 - protein, 341 aa, unidentified
MVDTETGEFTEKTLCHEGNAVREFYTALEGSVVVGIEATGAMQWFFELLEELGIECRVGHPAKIRAAETRKQKHDRRDARLLLDLLVMDRFPEIWMPSTEQRDLRSLLRDRHQWVKMRARLQHTLQAIALNHALRQGHALWSAAGQSALQTLPLSPYTSQRRTELLRLYVQLQRRIQELDKEVEAQARQRPQARRLQTHPGVGAVTALATEVFLGDPSRFATANQVASYIGMIPCEHSSGKRQRLGKLTKEGNSLLRYLWTEATIHAVGKDPELKRFYRRKLIQKGMGKARIAAARKLGIRLWIMMRDQIDYEEFCRRGKLRQKGEAHAGMPDFNSGPALQ

SEQ ID NO: 310426 - protein, 339 aa, unidentified
MKLYVAIDLHSNNNVLVILDEHDRIVYERRLPNELPFILAQLAPHRESIQAIAVESTFNWYWLVDGLMEAGYIVKLVNTVAVKTYDGLKHTGDEHDARHLAHLLRLGVLPTGYIYPKEERAVRDLLRKRAQLVRCRTAQILSIQNLVSRNSGKGISTDDIRKLDDEAITQACGGIGARVLAMQSNLTVLSCLDEQIRGLERAVLAQAKLKPAFEKLLTVDGIGKILGMTVMYEAGSMERFAKVGQFASYARCVSSSRLSNGKKKGEGNRKNGNKYLSWAFVEAAHFAVRYNERIRKFYQRKKAKRNGVVAVKAVAHKLARACYHVLKDQVPFDEARAFA

SEQ ID NO: 310427 - protein, 344 aa, unidentified
MDHFGGLDVSVKETSICIVDDTGRIVKEVKVASEPEALLKVLGNPTYRFKRIGLEAGPLSQWLFSALAEAELPVICVETRHMQAVLKAQINKTDRNDARGIAQMIRVGLYRPVHVKTLRSQKLRMLLTHRKLLQSKAIAIENDLRGTLRNFGLKVGMVGKVRFEARIQELVENLPDLAVLVEPLLIVRRALREQIIILHRRLLAIVREDEVCRRLMTTPGVGPVVALTYRATVDVPARFRKSKSVGAVFGLTCSRYQSGEVDWSGKISRCGDEMMRTMLYEAAQSMMHSKKWSWLKAWAMQIARRRGMKKAIVALARRLAVIMHRIWVDGTEFRWTREQVAAAA

SEQ ID NO: 310428 - protein, 378 aa, unidentified
MTSLETALQDKDTTSQSDLHVSFELGDRSWKLSCSDGIRSPSRYSVNAGDQAAVLDCMDKARARCGLDPRAKAHSCYEAGRDGWWLHRWLREQGIDNIVVDSSSIEVNRRAKRAKTDRLDADKLLALLLRYHRGERRVWSVVHEPTAQEEDARRTHREIARLVHERIAHTNRIGSLLVMHNLRPGRIGGRTWQGWWDAHCMQVPPLLRAEIEREYARLVLAKQQLNALETERRHEVAEGAHPVVAQLAKLRAIGPRGAWILDKELFGWRRFANRRELAGCLGLAPTPYASGTCEGEQGISKAGNKRARTLLVELAWRWLKFQPDSALSQWFRQRFGITGKRSRRIGIVALARRLAIALWRYVEHGEIPAGATLKTVDA

SEQ ID NO: 310429 - protein, 324 aa, unidentified
MVGAPQRKKGALEMERSIGIDVSKHRLDVHVLPEGQTRAFKMDEVEALAQWARSLSPTVVVMEASGGYERTAWVALVARDVPVSIVNARRVRDFAKATGRLAKTDRIDAEVLADFGARFSPAASALPTTAHRELEALLLRYRQLIEMTTAEKNRSAMVTSNWVHRQIRDHLRTLEKMRARAATELLARLNDSDDLRQKAERLRTVPGVGPITVASLLVDLPELGRLNRREIAALAGVAPMAHDSGAHRGTRRITAGRASVRCALYMAALVGTRFNPVLHDFYRRLLSRGKPKKVALTACMRRLLVQLNAMARDQTTWKPLAVAA

SEQ ID NO: 310430 - protein, 341 aa, unidentified
MNNVTLIGIDIGKHVFHLHAQDKFGKEVSRKKCSRPQMMRFLANHPLCTVVMEACAGSHCLAREIKAMGHEAKLISPQFVRPFVKSNKNDFVDAQAICEAASRPSMRFVTPKSPEQQTLSVSHRMRESLIRDRTKTVNQMHGFLLELGVSLPTGLAVIKRLASVLEEHDLPVRLVALLQRLHEHFVYLSEQIKVLDEELASQLADDDLGSRLLTIPCVGPITASLLAVEMGDAQQYGSSRDFAASVGLVPRQYSTGGRPALLGISKRGDKNLRRLLVQCARVYLMRLKYQKGPLADWVCSLLARRHSNVVACALANKLARIAWAITTRHTQYKTEPDAMNA

SEQ ID NO: 310431 - protein, 386 aa, unidentified
MARKRTLTTLDTSIAYEAVGLDLAKEDTAIAAFGPDHEGPYLIDRMPYDKLYELLADMAPTLVAMEPCSGAHQIAEQIKELGHKVMMISGHVQAWVKDHCNGQKTDLNDAFAILNLAYDRWLTPIRGKTREECRLLALQSSYRQLKGQRTKTMVHVKATLHAWGFPIRTGSFNQKALHELIDANREAFGDEVVETLHLMINRVHDLDHDIATVLKLLTEATQRDPRASLLRSIPGFGVLTTSRWCAVVGDIARFDTPKQTMAFIGLVPNNRITGHHTETSSGREARGQGKMSKRGDKMLRSLCILGAGALCLMVRNDRLPDCPFVASIKERLASPRPWFKVLVYVAAKLVRIATALLKYGETFSFEKAGISKAVLKQWELEQAKAA

SEQ ID NO: 310432 - protein, 341 aa, unidentified
MNRIVVGVDIAKRVFQLHWVEPQTGEIVVLQLQREKFLEHFANRSSCVIGTEACGGSQHWARSLQRLGHEVKLLSARMVKPFVSGNKNDAADARGIWTAVQQPGIKAVAVKSEEQQAVLALHRMREQLVKFRSAQINGLRGLLGEYGEVMPQGRAGMRRDIPGALGRLVDRLPAVVIETLREQYARLGELDEQISQIERRLRQWQREDAATRRIAAIPGVGLLSATAAVATMGDARAFKSGREFAAWLGLVPRQTGTGGRVRLLGISKRGDTYLRTLLIHGARSVLTHSKEPPKWLSELLKRRPKNVAVVALANKMARTIWALTAHERAYKQGYVSRPALS

SEQ ID NO: 310433 - protein, 348 aa, unidentified
MYYVGVDLHKETSWFYTVDDNEKKISSKNISNKPEILKRYFEQIPKPFILAVEATYNWYYFVDIAEQYAEKVFLANSYELKAFAKRHKKTDKIDARLIANILQKGFLPVVTIADQQTRQIRELLRYRINLINDRSRNIYRLKALLDKLGLDSNGDFTTYKRLKNIATDKMPIIYANLVRNYIERITDLTKKRLVIEKEVIAISYKDPDMLNLMSLPGIGPFSAALIKSEIIDISRFATFNRLCAYAGLAPRVSASANKTFHGPLNINRRKYLQWILLENAFHFIKAIPKIEEKYIELKQRKGHNTAKVASAREMLKVVYHVLKEQRPFYIDKKEPEIQSVAATALYGV

SEQ ID NO: 310434 - protein, 346 aa, unidentified
MSFKILKNNCCGLDVHKTWIFACIGITDSLKRTEYKQARFSSFSKGLQELYDWLSKYNCTDVCMESTGKYWIPVFNVLEKNNIWVTLSHPKYTKPQKGNKTDRKDARWICDLYMCGMVKPSFIPPADIRELRDLVRYRFKLTCMITGEKNRAHNCLTVSNFKLDDVFSDIFGKSSRSITEQILQPPGETFDVAPFVDGRCKTPIGEIQAAVDGAISKEQAVKLRQCLNHIDELEMHKVEIEREIFRFSDKYESVLYLIRTIPGFDKNPLTAIQVLSEIGGDMSVFPTAKNLVSWAGCCPRNDRSNHKIKFTRISHAGSYFKPVLVQIANARSNLRNILNLPLGIDV

SEQ ID NO: 310435 - protein, 435 aa, unidentified
MEPTNTTNTNAIITTNPTQVTTLDQELPHLWVGLDWGDQKHSFAWQDRFGQAQEGTLEHSPENLHQWLKSLGERTGGRPVRLAIETSRGAVIEALLQYPWLEIYPINPITSARYRSAFTPSGAKDDLPDAKVLLELVRHHTDKLRPLHKQDPQTVKLSGLVQARRGIVDQRTSVTNRLTSLLKSYYPQALELFEDLNSDLAIAFLRRWSNLISLKAAKPGTIRRFYYQHQVRSDKLVEQRLERISKAVALTTDEARVSVALLQLHQLLDELEVLRKHVSRFDGQIKLAFAAHPEASLFRDLPGAGSQMAPRLCVAFGTLRSAFPDPTSLQKYAGVAPVREKSGNQLWTHWRWRAPIFLRQTFVEWVGLTVRYSQWAGLYYEHMRKRNKPHATIIRALAFKWIRVLWKCWQTQTPYDEARYLKQLIRRKSPHALVS

SEQ ID NO: 310436 - protein, 392 aa, unidentified
MRFIGVDLHTTQITVCYLKSEDGFEIKKYRLCELDRFVSELEATDEIAVEATCNTRWFAEQVKEAVSRVVLVNPREFEVVKNSVRKTDKNDALNLARFLRADLLPEVRAKKEEAEKVQSLVNSRTKLVRLKTSLINKIHALFVSNGRKLKKTSLSSEKGLDQVLQAEWSAIERVELEIIIEQIRSLKVSIKKSDKAIEEESSKLKGFESLKSISGIGSLSAGILLSVIGNVKDFATSDKLASYFGIVPRVSNSNETVKTGRITKRGSKTGRTTLVQCSLSAIKKSEYLKKYYEQVKARRGHGKAKIALARKYLGIIYNTLTNGWVFADFNNFELAASFERSCFDLHRGRTAAAGGYFTKKRSRPGGTAAAYPPRFRLLRCRGSGSDDPARVG

SEQ ID NO: 310437 - protein, 332 aa, unidentified
MQTLAIDLGKQSFHIYGITSDGEVISRKVSRAKLVDAINKLHPQSVTMEACASSHHWGRTFDALGYVVRLIHPRFVKPFVKGSKNDAVDAEAIFEASSRPSMQFVPLKTVEQQELQSLHRMRDRLIVQRTALINHTRGLLAEYGFIIPVGASRFRLQIEDIVENAELSALAKNLFGKLIDEYRDLDTRVSVLDDMLVEICRTNERCKRLTTLPGVGPVVATALVAAVDDGRHFESGRALAAWIGLVPRQYTTGGKPRLGGIGNRANHYLRRQLVHGARSALLRIARYDDRHSKWAQALQARAGHNKTLVAMANKTARMAWAMLRNGENYQMA

SEQ ID NO: 310438 - protein, 411 aa, unidentified
MKRVYDNCCGIDVHKKLIVACFKQGSEQEVREFGATTRELLELCRWLKDGDCEMVAMESTASFWKPLYNILEASELDAIIVNARHMKNVPGRKTDVNDAEWIADLLQHALIQASYIPDKDQRELRELVRYRKSLVGERTRELNRLQKMLEGANIKLSGTVSNINGKSARAILEHVLTGESFDDAKYDEMYENNVISHRLKASKEEIIDDLNGVMSALQRRMMKELLIHLDELNIHIRNLDDEINNFMKPEAKTASVALQEMPGIGETSAQAILAVIGTDMSRFPTAGHLASWAGLCPGNNESAGKRKTGRTTKGNCLLRETLITCAHAAILKKDTYFYAQFQRISAHRGKKRAYVAVAHSMLTAIYHMLKDGVVFKDLGADYYNQFNRERKINACLRKLERLGYRAEIAAT

SEQ ID NO: 310439 - protein, 344 aa, unidentified
MGEVSTIGLDIAKSVLQVHGVDGAGAVVMRKRISRAKMLEFFADLPRCLVGMEACPSAHHWSRKLQALGHRVRLMPPSYVKAYLKRSKNDANDAAAICEAVVRPSMRFVPIKTKEQQAGLMLHRTRQLLVRQRTMLSNALRGHLAELGIVSAKGRNGISQLLGIITDVTDNRVAPAVRGLLDVLARQYNAIGAEIRSIDKSILTWHRSCEASRRLEEIPGIGPIVATALVAEVGDWREFRSGRNLAAWIGLVPKQHTTGGKERLGSITKQGNRYLRWLLVTGAMAVIRYAKKHGTERRPWLARLMERRHTKVAAVALANKMARMAWAIMVRSERYEEPKLLLAA

SEQ ID NO: 310440 - protein, 446 aa, unidentified
MKKSSRMSVIHPHAAGVDIGAEFHVVAVPPDADAAPVRTFQRFTGDLHRMSGWLKTCHITTIAMESTGVYWLPAFEIPEAAGFNVILVNARDAKNVPGRKTDVNDAQWLQKLHSFGLLRASFRPEHDISVLRSYLRQRERLTEYRAAHIQHMQKALMQMNVQLHHAVSDITGVTGLSIVRAIVSGERDPSVLIQYRDVRCKKTPEVLQQALTGNWQPEHLFALEQSVAFFDFYQEKIRECDDQIETSLLQLSTGTEEPEGVLPSARHRTKQPNQLSFDVRPLLWKITGADLTQIHGFGPYLALKFVAECGTDMNRWPDASHFTSWLCLSPGNKISGGKVLSPKTRRSSSRIAAALRLAATTIGRSDTALGAFYRRLSSRIGKAKAVTATARKLAILFYNALKYGQKYVDPGADYYEERYRNRVLDGLKRRAKSLGYSLQQDPELCV

SEQ ID NO: 310441 - protein, 441 aa, unidentified
MKNPNPLDLPILNPHAAGVDVGSEKFFVSVGGKEPRVFLTVTGQMQEVCAHLQAEGVRTVAMEATGVYWINLHGVLEEAGFEVVVVNGAHCRNFPGRKTDMKDCQWLAVLHAHGLLTGGFVPPSQIRRLRDYMRLRADLVSMAAQHVQHMQKAMDRLNVKIHVVISDITGRSGMRIIKAILAGQREPEKLVELCDAQILKTKKAPMIEALRGLWRKEHLFALRLAVESYENYQQQIAQCDREIAQVIQELCAGKPTPELGDPKELRHNAIVLEGLQKQMAQIYGKDLTKLPCLNQSTAALLLAEIGCDMSRWKDWRHFGSWLALAPCTAQSGRKRRRVKRYLTRAAQILCRAVQCMAVGKHTWLASFFRRIRAKRGSKVAIKATAYKLAKLIFLVLTKGWEYVEQGIAKYEERVRLMRFNALRKLAKELDFVVIPKAMVKV

SEQ ID NO: 310442 - protein, 377 aa, unidentified
MEKDSRFVGLDVHAETMAVAVAEPGGEVRSLGTIPNTPEAVRRLMKKLGPPGMLRVCYEAGPTGYVLYRQLTALGGPCAVIAPTLVPVQAGDRVKTDRRDAEKLARSYRSGDLTPVWVPDADHEALRDLVRAREAAKKDQLRARHRLGKFLLRQGRRPPAGIKAWGVKHRAWLQGLRYAHPAQAATLLDYLTEIDHAADRIQRLERAIETAVETAPAPVRAVIAALQALRGIAKLSAVSIVTEVGALSRFAKPRQLMGYSGVVASEHSSGPHPRRGGITKTGNAHLRRIVVEAAWAYRHRPAIGGTLRLRQAGLSEAVKALAWKAQHRLHGRYARLLARGKAPTQVVTAIGRELLGFIWAIGVHVERQRDGASRAAA

SEQ ID NO: 310443 - protein, 313 aa, unidentified
MITYERFIGIDIGKYSFVVAVHGNKKVDEYDNTPSGIEEFIKSHKKDLVKGLCILETTGGYEMSLLMTLCSHNFAVHRANTRKVKHFIKSYGNAAKTDKLDAKNLGLYGFERGKTLELFTPQSKQASELYEMIQRRTDLKQMLVAEKNRLKAPRTACVKESIQSLIDMLKVKLDAITEEINSLIAQDPVLSEKKNILKTVPGIGDIIANELLILLPELGQLSRREIASLVGVAPQCNDSGTLQSYRRTTHGRAGVKPLLFLAAMAARNSNSILKTFYEGLIARGKIKMVALVALMRKIIVIANARLKVAQPTS

SEQ ID NO: 310444 - protein, 407 aa, unidentified
MKTLIGIDWSQKHHDIRLHNEAGALLSRFRIAHSWQGFQKLEHEISQVNAEPGNCLIGIETADNMLVDFLWARQYRLYILAPIVVKSSRGRQRASAARDDDSDAALLADILRTDRQQLIPWQPDGQLVCQMRLLISFIDDLTASIVQYSNRLRANLQRYYPQVLNAFSPLKSKLCLHFLMTYPTPEAAAALSFAEFDAFCRQQRDTQTKYRRRRFGLLQQIIPIDQRLVTTYETQIPWLAQLLWRFVQQKQQTIRHLQSLFVQHPDHEIFASLPGAGDLLAPKLLAMFGDHRDQLPTPAVIQAVAGTCPVTVRSGQRRSVRFRRACNHSFRHLAQQFAEQSVRQSSWAAAYFHTARGRGLAKSHAYRCLANRWLKIIWTLWQRHELYDEAYHLQQIQRHRQPVAATS

SEQ ID NO: 310445 - protein, 349 aa, unidentified
MQQTHYFIGIDLHKTVVQVCVLDGQGSVVEEFRMRLERPELGQEVITRLIRWRATGRVVVEAVGFNRWFVNACRAAGLSVVVADAVKLGLAKLGKKTDRRDAYELARRLFLGDIDRHAATYYPSDEEYGVRKIERVRHRLVAIRQQVVNQIRGLLNAYLLPAPGTSLYSARSLAALKGTTLPTPDLTLCLQTLVTSLTALQEQVERLTQTIRERAAAPAVQQFAAHLPNVGPQTALTLHAELGDLSRFRGSRQVSAYVGLAPRVTNSADTRHHGRLTKRGNPELRWIVSQWAVRLLARGEPQVQHWAASRLRRMHKNKVRLALARRLLVGLYVSHCRGEEFALDRCLVG

SEQ ID NO: 310446 - protein, 370 aa, unidentified
MKNSTESRVPRKRAVSRRRRELTIGIDLGDRVSRYCVLDDEGNVLFERSAATTKKGLAQAFASVAASRIALEVGTHSPWVKRLLESWNHEVIVANARRVKLITESTRKDDRLDARTLARLARADPQLLSPIRHRSETAQAHLVMIRARAALVDARTKLVNSARGLTKSFGERLPSCDTDRVSVGLLVDLPPSLQAALQPLMTVARSLTEQIHIYDQKIAQIARSEYPETARLRQVTGVGELIALSYVLTLDDPQRFRRSRDVGGFLGLRPKRRDSGNSRPQLRITKEGDGYLRKLLVQGAQYILGWRGPDTDLRRWGLTLAARGGKNAKKRAVVAVARKLAVLLHRLWVTGDRYQPLRPSQAAPNSSAAA

SEQ ID NO: 310447 - protein, 339 aa, unidentified
MELCCGMDLHSSNTVIGIIDEKRKHLIDRKLPNDPELIRSFLRPYKPDLKGIVVESTYNWYWLADVLQEEGYQVHLSHPVANEQYNGLKHSNDKHEAFWLAELLSLGILKEGYIYPRQVRSVRDVLRKRAHLVRVRTALIVSLQHMISRNCAVKVETGDIKRLTADVISPCLEKEEALLLAGKTSKDVIDCLTRQIDKIERWGLKRLCREGVFIQLVTLPGVGDILGMTILLETGPISRFREVGNYASYCRKVSSRWTSNDKVKGRGNVRNGNKYLAWAFSEAAEHARRTNEACRRFYDRKVRQTNTKIAHNALAHKLARAAYYIMKDQVSYKEDKMFS

SEQ ID NO: 310448 - protein, 483 aa, unidentified
MKPKQVESNKKASCRPTPNRWHKMNHKQRREMLRKIQSEDLSLEVVHPDAAGIDIGNESHYVAVPGARDRQSVRRFGCTTAEVKAMADWLKQCKIQTIAMQSTGVYWVSVYDILEEAGFEVYLVNANETKNLPGRKSDVQESQWLMKLHTYGLLRNSFRPSQEIRTMRTYWRQRNDLVRAAGRHIQRMQKALTQMNIQLANVLSDVSGMTGQAIVNAILAGERDPYQLAALRNWRVKASEEEIARSLEGNWQEEHLFVLQQEQDGYQFCLKQMAECDQRLQQYLRQQEDRSQGASLPEEKRKERLRKKKKGNTPQFDLRTELFRMTGTDLTQIDGIDVTTTMTILSEAGWDMSKWKTEHHFVSWLRLCPDNRISGGKIIGKGRLPTNNRVSNALRMAASTLRLSNTYLGAQFRRLRTKLGAPVAIKAMAAKLARLVYRMLRYGMAFIDRGAEFYESQHRNLQINYLKRKAATLGFQIIEAPAA

SEQ ID NO: 310449 - protein, 428 aa, unidentified
MNCNTQNTKIASITEKTLIVGIDVGSETHYARAFDWRNFEFTRKPLIFSNTQAGFLTFKAWIEEIQEKNGKTAVIPGMEPTGHYWFALGKFLQDNGMKPVHVNPHHVKKSKELDDNNPNKNDRKDPKTIAALVNEGRFSYPYIPTGIYAEMRSLSNLRFQTQEEVTRIKNRIARWFAIYFPEYKDVYRDLKAVSGRMILKAAPLPEDIGKLGVEGVNQIWRDAKLRGTGMKRAKTLVSAAEHSVGSKEAPEAARMELKNLLDDMDVYTSRLEELVQKIEGKLKEIPYIDKLLEIKGIGMVTVSGFIAEVGDIRRFDNPKQLQKLAGYAIVANDSGKHNGESRISYRGRKRLRYVLYEAAISLVGKNAEFREIHEYYRTRKENPLKKMQSVVAVACKVIRVFYTILTKGVDYDAARLLGDIKHPQMQTA

SEQ ID NO: 310450 - protein, 350 aa, unidentified
MIIIGCDYQPGFQQIALVDTDTGEVRELRLEHREPAEKFYRSLAAQRAVVRLGMEGSGHTRWFERLLAELNFELWIGDAAEIRTKRVRKQKTDRQDAQLLLRLMVEDRFPRVWVPSWENRDLRQLLWHRHRMVQARTRIMNQLQAVALNEGLRAKKRLWREAGREQLKSFPLAPWASRRRGDLLELLDQLNPTIAELTQAIEQQVEKYPEARRLMTHPGVGALTALAFMLIVGEAGRFRCGKQIASYLGLVPLEESSGNRRRLGHITKQGNSLLRFLLVEAAQVTARSLPEWRNRYFHLMMRRGRKIAKVALARRLAVRLYWMLRKEWDYEQVKQFGSHAGQPENRHGVQ

SEQ ID NO: 310451 - protein, 342 aa, unidentified
MSIVGGLDIHRKQLTFDYLDQATGEVTSGRIAPADRRHLAVWLRRFEGVEQVTFAAEACTGWRYVVECLQAAGVRAQLAEPADTAAARGRKKRAKTDRADSRLLRELVEADRVPQCWIPPRQVLEHRALLELYHDLRREHTAWIQRIHAVCFHQGTEALSLSTEADRAHLRQVAAAQLSPAGQLQVDTYLQMLQALETHLAGVRRRLVAAAGHLRGPKVLTERLYGVGPVTALALTCWLGGAGRFSSSRKAVRFAGLDVTVYSSDGKRSPGRLSRQGPPVLRWCLYEAGKAHSRRSASDHPYYTRVKDRLDGKRAALSEARKLLRQACHILTELGDDAFAAA

SEQ ID NO: 310452 - protein, 392 aa, unidentified
MRFVGIDIGAERHSVAIVDDGGRVVSKSVSFEEGAAGYRRLGELLGSPADCLIAMEATGHYWKNLFVSLAAEGFQIVLLNPLRTRRFAEEELQRTKTDKVDAVSIARFAAQKRPTATTLHGPAIEELKQLVRLREQSVQHLGDRVRHLHKAIDLTFPEFTRHVRGLDTELATAILLRYPTAKALRTISVRKLAGLCYDGRRGIGDDLARALIEAAKISVGHFSSEPYQLQVRYACEDIVSLRTRVRGLETDIELRLNTHEVGKLLTTIPGVSTLTAARIIAETGDPARFRSAAAFASYIGAVPRLHQSGKKRYSGKPAIPLGNARLRRALWMPVLVGIRLNPWLRTYYLRLRAAGKRPKVAIIAAMHKLLIAIYSVAKHRTPFVLQLPATLT

SEQ ID NO: 310453 - protein, 408 aa, unidentified
MQPILKSCCGLDVHKSMVMACIAHGPLDKPPKFEIRKFSTMTDDLRTLKEWLKEYGVTAVAMESTGIYWKPIFNILEDDFEVVLANAQHIKNVPGRKTDVKDCQWIAHLFRNGLISGSFIPPREIRELRDLTRTRRKLVEAMTAEKNRVQKVLEDANIKISSVVSKVFGVSSLNMIGALLEKDTLSVDEIAEMAKGKLKRKVNQLVKALNGNVTDHHRFLLKQHLAHIDCIVERIREIDEEIQRKLRPYEKEFRAIQSVTGIKEVSAASVIAEIGVDMSRFPDEAHLSSWAAMCPGNNESAGKKKSGKTRRGNNYLKATLTEAAWAASRTKGTALSAMYHNIARRRGKNRALVAVGHQILIEIYRVLKTGELYQDVGAEAVNGRKSKNRELRLIRELEGCGYVVSKVL

SEQ ID NO: 310454 - protein, 411 aa, unidentified
MDKVYDKCCGIDVHKKLIVACFRKDNKQEVRNFGATTRELLALADWLKEGGCEMVAMESTGSYWKPLYNILESSDLKAMVVNARHMKAVPGRKTDVKDAEWIADLLQHGLLQPSYIPAKDQRELRELVRYRKSLVGERGRELNRLQKMLEGANIKLSGTVSDINGKSARSILEYLITGASIDSEKYDEMYEQKVIAHNLKASKDQIIDDLNGVMTPLQRRMMKELLIHLDELNAHIKNLDDEIDNFMKPDEKKAVAVIEDVTGIGHTSAQAIISVIGTDMSRFPTDAHIASWAGLCPGNNESAGKRKSGKTMKGNALLRSTLVTCAHAATRNRGSYFYAQFTRISAHRGKKRAYVAVAHSMLVAIYHILKDGVVFKDLGADYYNQFNKERKINAYLKKLKALGWEASVVAA

SEQ ID NO: 310455 - protein, 482 aa, unidentified
MKKRNIYQNQSQEIVNLFEAAGSNEKIMCVPMDYAKKDHLVMFCNGHGDILRKPFSVKNTPEGIAYIDDQVMRSCRRRGIKKEHVFFGGEDANSFAKNFVSTLRSKGFVVANVNARDAKKQRESVQASTDRIDLMGIAAMLLNCRGNCSPAQSGTYRNLRLLVRHRRKLVQMLTEVKNRVHGIVDELFPGFLKEKNTGIVPFTQSSLYLMEDRFSPKQIRRRKRQKLSEILKRFGTSKAEKTAAKLQHYAAKVLHAPVEYVDTMQLSLAQHVKHIRCLKESVAQMDNEIALNLAQTQGAFLTSVRGIGLVLAAGVTAEIGNPNEQKPLNNLSSYAGIVPRVKQTGGTEGKTYTGPVAKRCNRILKDYVVKSAYHLGLHGPQDLMVDYKRRDASGQHADFGMGRRYLRMAMCLMRTSQVYLPPDLRKDDYTLEDRASYYLVNWPYLRAKWNKVGALEEAFASDRPLGLWRLIVQELYDIKLKL

SEQ ID NO: 310456 - protein, 354 aa, unidentified
MSGHRHREGAAMNHYAGLDVSLEETAICVIDGSGRVVKETRAASEPEALVAALREIDLSLERIGLEACSLTAWLHDELRLAGLPAICIETRQANAAMKTMPNKTDRNDARALAQIMRTGWYRQVHVKSRPCRLWRSLLVARRTVLNEMRSIENVVRAVLREGGVKLGTPSRAAFAGRVRDLLADDASVKPLVEPLLAILATMLDQFARLTKQVLDIVRREKVCRRLMSVPGVGPITALAFRATIDRPDRFRRSRDVGAHLGLTPARYQSGETDIQGKISRCGDELARTALYEAAHTLLVRSRKWSSLRAWGMKIAKHRGMARARVAVARKLAVILHRMWRDETEFRFGKEPATA

SEQ ID NO: 310457 - protein, 342 aa, unidentified
MSKVTVFVGLDYHKDSIQVCVMDQSGKVLANRSCANDAGALALLVAFFGDHVRGAIEACTGAADLADELVERHGWDLDLAHPGSVARMKQSPDKSDYSDAKMLADLVRVGYLPRVWLAPEDVRQLRTTVRYRQQLVNRRRAVKLRITALLREARLVEPAGARRWGPSWLAWLATAEGLGPEARFVVDCHLAERRRLDEPIAKVEARLAQVTAEDPVVWRLVAMRGVGMVTAWALRAEIGRFDRFRTGKQLARYCGLSPRNASSGQRQADAGLIKAGSELLRATLIEAAHRLIRFDPRWGALAAKLKAAGKPGSVVAAAVANRRVRWLFHQVGGGCIALKTAG

SEQ ID NO: 310458 - protein, 400 aa, unidentified
MSTLWAGIDAGKHSHHCVVIDQQGAVLLSVKVDNDETALLGLIREVVKLAEGGVICWATDLTDGGAALLIALLSAHGQQLLYIPGRIVHHAAATYRGDGKTDAKDARIIADQARMRTDLQPVRIASPVAVDLRLLTSHRIDVIHDRVRAINRLRATLLEYFPALERAFDYSKHKAALVLLSHYTTPHSLRRVGVTRLSAWLKARGCRNSAAVAEAAVQAAHEQTTVLPAERGGSMLVTKLAARITSIDEDLAAVDAQISEHVASNQNAQILLSMPGFGPVLAATFLAQIGGNLDAFDNAGRLACVAGLAPVPRDSGRISGNLHRPRRFNRRLLRTCYLAALSSLKNSPSSRAFYDRKRTEGKSHKQALIALARRRMNVIWAMLRDNKPYAEPAIPIPIAA

SEQ ID NO: 310459 - protein, 341 aa, unidentified
MNHYAGIDVSLKDSSVCVADANGKIVRESTVASEPEALIALFGELGFAVTRIGLEAGPLSQWLYAAMQKAGLAVELLETRHVRDAFKAMPVKTDRKDAQGIAQLMRLGWFRPVHCKSIEAQETRAILSARKLVQSKLHDVEMSLRGTLRGFGLKVGKTTPNRFAARIKELVEEHPTLRIIATSLLAVHAALLREFKVFEKQIRIMARDDERARLLMSTPGVGVLVALTYVSAIDDPGRFTSSKRAGAHFGLTPKKYQSGETDITGRISKIGDKGVRTALYEAANIILTKPVKGSALKSWAARLAKRAGMKKAKVALARKLAVIMHRMLVDKTPFNPAAAAA

SEQ ID NO: 310460 - protein, 354 aa, unidentified
MQHYIGIDFHMQHSSVAVMDERGSVIDERKLYHTNMQELKNYFSSFNSDTHVVVEATRNWYWLIDCLQDLNLDVKLAHAKKVRIIAESTIKTDKIDAKVLAHLDRCNFLPQAYIANKETRANRELLRYHMSLVKIRSSIKNRIHSILAKNNIHYHATDLFGKDGIAFLHGVTLPPIFTLELQGYLQLLDTLKETLAIVQKQIKYECTSAPYVKQLMTIPGIAYFSALLISSEIADIKRFRNHKKLCAYAGLASTTHQSADTTYHGKIIKDSNKYLRYVLVEAVPKAIKKDPKLYAIYTSLYRKKGIGKAKIAIAHRLMTAIYFMLRDNTDYRICATTDYIRVNPMTKLGAYAAR

SEQ ID NO: 310461 - protein, 345 aa, unidentified
MNEFYEGQQFVGMDLHRRRSVLVRMTETGEHLETVRIVNTRDRLADVMTRAGESPEVVLEATYGWYWAVDALAELGASVHLAHPLGVKAFSYRRVKNDQRDAADLADLLRMGRLPHAWIAPPETRELRELVRHRAKLVAMRSRCKAEVHAVLAKGGVWVPMTDLFGVEGNLLLDKVTMPAPYLARIASLRRFVEAFDAEIDLFTGLAQRRLTHDAGYTAIQQIPGIGPVLAAVFVAEIGDVHRFDGPAKLTCWAGLTPRHHESDTTVHRGHITKQGSRLVRWAAIESVKILPAASRIGAIREQVAHRRGNRNIGAVAAARRQLELVFYGLRDHHIRALHRSPRAA

SEQ ID NO: 310462 - protein, 421 aa, unidentified
MEEITEEAAELVARVAALDIGKASLVACVRVPHETKPGARRQEVRTFTTTTRSLLQLQDWLVCQGVTLCVMEATSSYWKPPFYLLEDAIECWVVNARDVKNVPGRPKTDRLDAVWLGKLAERGMLRPSFVPPPWQRELRDLCRYRRTLIQERTREKQRAEKLLEDAQIKLSAVISDIFGKSGRDMLEALIAGQRDPYVLAQMARGSMRGKIGVLQEALTGHFRDHHGYLLTMMLARIDALTAQIEALTGRIDEVIAPFARQVAQLDEIPGVGATGAQEMIAEFGADMTRFPTAGHLVSWAKYAPKARQSAGKNKPGSTGKGNPWIAGTLGEAAMGAARTKTFLGSRYHRLARRRGKQRALVAVGNSILTIAYYLLSDPEAHFTDLGPDWHDRLAPIRRKRQLIAELERLSGKKVLLQEAAA

SEQ ID NO: 310463 - protein, 339 aa, unidentified
MKLYSGLDLHSTNTYIGILTPEFNRVFKKRVSNNLDLILETLEPFKDQLKGLVVESTYNWYWLVDGLMDAGYGCVHLANPSAIRQYEGLKHSDDKHDAFFLAQLLILGILPQGYIYPKKDRPVRDLARKRMFLVKHKTAHILSLQSLIARCSGQRISSNQIRTITSADLKQLLKEEHLVLSAQANLDSIVFLKQQIHGLEKVIKNKLKLSQAFNGLLTVPGIGHILAMTIMLEVGDVGRFAKVGNFTSYCRCAPTQRLSDGKAKGSGNRKNGNRYLSWAFSEAAQMARRFNARFRRYYARKAAQTNTIVATRALSNKLARICYYIMRDEVVFNEELILH

SEQ ID NO: 310464 - protein, 316 aa, unidentified
MSELVYVGIDIAKNSFEVAVTGELQTLNLANDEAGHAQLCQWLAPLAPRLILMEATGGYEQDLALALAGAGLRVSVVNPRQARDFARCVGKLAKTDRIDAQALRSFASMLDAQGHQPRALADDERRELTALVVRRRQLVTMLVSERQRLGVAHRKAKPSILAIMDAIAAQLHDVDDELKAHVQTHHADLAKLLTSVKGVGPTTACTLLAQLPELGQLNRKQITALVGLAPMNRDSGTLRGQRHIFGGRADVRRVLYVAALVGTRFNPVLKAFYAKLLAAGKAKKVALVACMHKLLVILNAIARTRSPWRDDFAERL

SEQ ID NO: 310465 - protein, 293 aa, unidentified
MEVTTIGLDLGKDVFQVHGVAGDGTIVFNRSIRRRQLLKFFQNLPNCLVGIEACGSAHHWARELIAIGHDVRLMPAVYVKPYVKRGKTDAVDAEAICEAVTRPTMRFVAVKSKEQQALLTMHRVRQLVVRQKTQMLNVIRGLLREFGHVIGYGPVAAMRFVKTFQTDDYPDIPDIAKSMLKTLCDQVNSLHDRVTFYDKLIEHHSRIDERAKRIRTVPGVGPITASAIVATIGDGKQFKNGREFAAWLGLTPLNRSSGGKERLGRISKKGDRYIRRLLVIGMTSQVQRARGYP

SEQ ID NO: 310466 - protein, 369 aa, unidentified
MADRITYVGLDVHKESIVVAVAEGGLRGEVREYGRIANTATALDRLLRKLGGDGVTLRFCYEAGPCGYGIQRRLSAQGQECVVVAPSLIPKRAGDRVKTDRRDAASLAKLHRAGELTAVWVPDARHEAMRDLVRARLDAVHSLRRARQQLSGFLLRQGCHYGRPAWTKLHRRWLAGLTFDQAVHHLVLEDYIAAVEAAMARRDRLTAQIEAMLPNWTLAPVVAALQTMRGMALVNAATLIAELGDLSRFTNPRQLMAYLGLVPSEHSSGASVKRGGITKAGNGAARRLLIEAAWSYRFPARLSRELLLRQENQPRPIRDIAWKGQVRLCARYRRLTRAAKPANVVTTAIARELTGFVWAIARQVAVSPR

SEQ ID NO: 310467 - protein, 433 aa, unidentified
MKEGTGEENVSRQYHTPVGQITREQLKLKHAGETKRYIGLDLSKQSCYVCIINKQGEVEKHRSYSMRSNQRHKLYETLQTGDVVLMEASTGTFNIARAMNKHSGVVACVINPHTTRINETKKKTDKEDSLFLARLIARTPVEELSLVSIPSDQEMANRETISYYQHLKKQHTQGINRMHALFYEKGFPEAGKAYNLHTKGGRAAAIEKYIGSDRVLATTKRLLKGYSKQLTLLEQQMESEDTQFAKIVKQDDRMAAILGSIPGVGLKSISAFIAFVGDINRFSSAKQLASYCGLVPRVSQSGQKNSTGKITKEGQAALREYLVEAVLTIQNTKFDFPLKRKYLEMKQRMNGRKAAVAIARKLVTIMYAMLKNGTVFFVEKEEERKAIATYQSRKRIKSLGGYYKICNSCKEYSEMIEVTNTLHSNEIGVLKFI

SEQ ID NO: 310468 - protein, 468 aa, unidentified
MTVKQEGEVGVGKGRKSRKGKKKRKIAKLDSLKQLNLNAGGLDIGAAEIYAAVPEGRDEVSVRQFDTFTVDLKALADWLEACGVDTVAMESTSVYWIPIYEILEERGFDLYLVNARQVKNVTGRKTDVLDCQWLQQLHTYGLLRGSFRPRQEICELRTLLRHRGNLIRWRAAHIQHMQKALNLMNLHLTNVISDITGVTGMKIVRAIVAGERDPKVLAQYRDPNCKNSEEVIAKSLEGNYSSEHLFVLQQALELYDIYTAKIRTCDEEVEKLYSTFEPQVDLVEKPLKPSKKNRRKNKNVPGYDLRTYLYQMTGVDLTAIDGLDVLTVQTIISEVGTDMSKWKSVKHFTSWLGLAPENDISGGKVLRRGTKKVKSRANLAFRQGAMGASRGQSVLGAFYRRIRAKHGPGVANVATAHKIARIFYAMLKERQEYISPDTAEYKVKQRERTIKHLRRKAARFGLQVVSAA

SEQ ID NO: 310469 - protein, 375 aa, unidentified
MEHHSEAFVALDTAKLRNAVAIADAGRNGEIRYLGEIDNTEAETRKLVAKLASKHARLTFCYEAGPTGYGLYRLIKSIGHDCIVVAPSLIPSKPGDRVKTNRRDAVNLVKLLRAGELTAVWVPDERHEAMRDLVRARDAAVKDYRIKRQNVSSLLLRLGRPYPGKKTWGRTHINWLTGLKLEHREQRIAFEEMLLAVRQVRERIERLEQAMREAVTDWTLAPVIEAVQAMRGIDMVGAIAFLAELGDLSRFENPRQLMAYLGLTPSERSTGESVKRGGITKAGNTRARRLLIEAAWSYRFPPRVSKDMQTRIGAAPRTAREIAWKAQMRLCGRFRTLTRKGKRPTIVVTAIARELSAFIWAINREVVGSHATANQ

SEQ ID NO: 310470 - protein, 370 aa, unidentified
MRKVATLFIGLDVHKDSISVAHVPDDRRAEVSYVGRIGTRPADIDRLVRRLQEKADRLVVAYEAGPCGYVLYRDLTRRGITCLVVAPSLIPKKPGDHVKTDRRDAVQLARLLRSGDLESVYVPSVEDEALRDVCRAREAAVVTLKAAKFRLKSFLLRLDIHYTGRADWNDAHLRYLAKVVCPTPAQQIVFQESLRAVDEQVQRLKRLEAELADLVPAWRLAPVVRAFQALRGVQDTVAVTMLAEIGDLTRFDNPRQLAAFLGLTPSENSTGESRRQGPITKAGNGHARRVLVEGAWAYQYPAKVSPAIRKRLEKLPQPVQDIAWKAQVRLCKRFRRLVTRGKHPNVVVTAIARELAAFMWAIAKEVPITA

SEQ ID NO: 310471 - protein, 420 aa, unidentified
MQVIYERCAGVDVGKDVIAVAVRVPGKGGGARITEKRTYRAFYGVLREMARWLESLGVTHVAMEATGVYSMPVYYALMESDFEKVLVCNAGHVKNVPGRKTDLADAEWLAQLLECGLLAGSFIPPAEVKAVRDLVRYRSKIAQQRVSEIARLGGVLQDAGIKIDSVASSVATKSGREMIEALIDGERRGAVLADLAKGKMRSKIPDLSMALEGRFGDHHAMMCRLHLDHIGYLEQTIAELEARIEAMMQPFRAARDLLMTIPGIAQVAAAAVIAEIGPDPRQYFPTAAHLASWAGLCPGNHESAGKRRHGKRRHGNIYLQPVLTEIAWSAVRHDGYLKSLYHRHVMRNGGYRNPVAKGKAITTVAHAILVIIWHILTTGRPYQDLGADYYTRRADPGKEARRLIARLEALGKHVTVNDAA

SEQ ID NO: 310472 - protein, 338 aa, unidentified
MEYGAIDLHARKTLIRIVEADGTVVLDRTITTTREGFTKVFEGRARLRVLLETGTESEWVAQTIEACGHEVVVADPNYALMYGVRVRAVKTDRRDVAALAEACRLGIYRAAHRVSAAQRQVRRQLRVRSQLIRMRTQAINLLRAQLRQEGYRLPSGASESVVARCRRVALTVGLRDDLAPVLTLLEALAPLIKARDQAAEIQATADPVVRRLMTAPGVGPIVGLTYRAVLDDVTRFRDASSSTAFLGLVPKEASSGTRRQKGRITKRGPTTLRVLLIQAAWTIWRQRQGRAALHAWVDRLAARRGRRIAVVALARRLARILYAMWRDGCDYRPVPAAA

SEQ ID NO: 310473 - protein, 425 aa, unidentified
MQVVYSRCCGLDVHKDSLTACVLVFDEHGRRQVRKKEFPTYWQQLQRLKLWLYANQVQHVAMESTGVYWKPVWNILQGHFPLLVTNPYHMKNIPGRKTDQNDAEWIADLLAHGLLRGSFIPPPGIQELRDWTRYRVKLMQEYNRIHNRIHKVLEDANLKLSSVASDILGASGRAIIQAIIRGQEHPDWLADKAMSTLRNKRDQLRLVLKGRITDHHRHLLRELMDDVERVEQKICRVQAEIAQRMQPYQPLVDRLTTIPGVDILTAWTLIAELGPDMSVFPDADHAASWAGLVPGSFQSAGKRKSSRTRHGNRWLRRALCQSAWAVAHKKDCYLTAHFYRRASRQGAKKAIVATAHQILIIAFHILRDGTIYRERGGDAFDRMNPARTTKRLSQRLESLGYEVILKPRDPAPPPTPSLPRRPARN

SEQ ID NO: 310474 - protein, 349 aa, unidentified
MTMLADLVDVVIGVDTHKHTHTAAVVTASTGAAVEDLTIDTDPDGYAELLALAGRYSGLRAWSIEGTGGYGAGLARFLAERGELVIELDRPNRPARRNGAKSDPLDAVRAGREALARKHLAQPRAAGERAALAVRLAARRSAVDASTVAQRQMLSLITASPEAVRARFRGCSTVIAVTTAARLRMSPSWDMETRTYAEAIRDLARRALVMQTEAAAHEKAMLAVIRSWRPDLLDQPGVGAIVAATVLCAWSHPGRCRSDAAFASLAGVAPIPASSGLTTRYRLNRCGDRQLNRALHVIVISRLRYDARTRAYAQRRRAEGRTDREIKRCLKRYVARQLFRQLENPPSPT

SEQ ID NO: 310475 - protein, 377 aa, unidentified
MNLRPIAGIDVGKFFSEMAILSPSNEVIARMKIHHDSTSDVEKAIELLKKTEKDFASRPFIVMESTGHYHKILFHSLCKAGFEVSIINPIQTDSIKNIGIRKVKNDKVDARKIALLYRFQELKTTNIPDEDIECLRSLCRQYYKLNDELTAYKNRLTAIVDQIMLNFKDVFPNIFSKAALAVLEKYPTPAHILKADRNKLISLIRNNSRRSLKWATAKYELLVSKAREFAPLSINNSSNITMLGVYISMIKTLEENIEKILKAIRSLIAEDMAKDTPVLALILELLQSIPGIGLLSAATILAEIGDFSAFSKPSKLVAYFGIDPSVMQSGEFTGTRNRMSKRGSKLLRRVLFTIALANIRTKRDKTACNPVLFEFYK

SEQ ID NO: 310476 - protein, 419 aa, unidentified
MAFKIFRKNCCGLDVHKTWIYACIGITDTNGRTEYKQARFSSFSKGLKELADWLAKYSCTDVCMESTGKYWIPVFNILEKSCFVTLAHPKYTKPQKGNKTDRKDAKWICDLFMCDMIKPSFIPPADIRQLRDLVRYRTKLTNILTSEKNRALNCLTVSNLKLDDVFSDVFDKSSRSIINYILEHPGQSFDVTPFVDRRCKKPIEEIQAAVDGAVSHEQATRLKECLNHIDEIRTHRQNIEFVIQHLAEPYAYALELLQTVPCLNSDPITAISVISEIGVDMSVFPTSKHLVSWAGCCPRNDKSDSKVKSTRISKAGTYLKPLLVQVANAVIRSDKHPEFKERYRRLKARRGHKKAIIAICRMLLTAIWNILSKLEPYSPNGYLKDKLTEHSVVISKAEGLALLRKRGYFFKDEVVSSSP

SEQ ID NO: 310477 - protein, 337 aa, unidentified
MSIIRIGLDTAKHVFQVHGVDQMERAVLRRRVGRNEVARFFAKLPPTRIGLEACGAAHYWARVLQALGHEVMLLPPQYIKPYVKRGKNDAIDAAAICEAMSRPGMRFVPPKSAEQQAALMLLKTRELLVKQRTMLVNAMRGHAAEFGVVAPKGVAKAGELLQRAHTAEAGVPALALEMLRLLASQVEALEAKLKVIEAKLMAVHKENPVSQCLATQPGIGPIGAVSFALKVTDPRAFRSGRHFAAWLGLTPKENATGGRSRPGRISRQGDEGLRRLLVLGATAAIQFAKPGRASPWLIQLLARRPKKLAAVALANKMARILWAMMVSGELYRRPQPV

SEQ ID NO: 310478 - protein, 312 aa, unidentified
MKSISVPVGADVSEGKIDVSIDGGRPTAFDNDRKGVRALVRRLPRRAAVYMECTGAYGRLLRRELLEAGVEVAQLDPLKVRRLAQARGVQGKTDALDARLLAWAGPLLRPVRSKSPGHEGLADLSRHIQGRKAQCADDKRRRGQPGLCPCVRRSLDRGIRALEKEIARLEREFLGLVRESELARRHALLLTVPGVGPALARTLVCELPEDVGGLGPGQIASYAGLAPMDRQSGNSRKPSRIRKGNVRLKAALYMPAMCCVRSQEWARDLYRRLKGSGKTHEQAMVAVMRRLLVRAFAVIRHERPWQNCQPGA

SEQ ID NO: 310479 - protein, 326 aa, unidentified
MQGKEVSEQETAVKSNAGIDVSKSWLDVHVVPGGATLRVTNTRDGIRKLKRWLMQFDLNLVVIEATGKWHREVRRSLHAAGIAVAVVDPFRVRMFAKASGVLAKTDRIDARVLAQFAAVMAPAVRAPAPEVLEQMAELVAARVSAVTEETALKNQLSAAMARFLKGQLARRIKRIGKDIEALEREILRCIHADPGLARRYDILISITGIGPVAATTLIACLAELGTCSRRQISMLAGLAPVADESGERQGVRVVWGGRPNVRRVLYLAAVTAARFNADLKAFFDRLTADGKAAKLAIIAVARKLVVLANTLIAENRPWQPHSPKYA

SEQ ID NO: 310480 - protein, 387 aa, unidentified
MIYVGIDIAKLNHYASAISSEGEVLLEPFKFTNDNDGFYTLVSKLNKFEKDKVIIGLESTAHYGNNLLAFLVPKGYNVCLINPIETSTMRKNNIRKTKTDKVDTIIICKTLMMQPHRFITLYDIGLMQLKNLGRFRQKTVKQRTRLKIQLTSYVDQVFPELQYFFKSGIHQKGCYALLKEAPSPDAIASMHLTHLTNVLKSSSHGHFKKETAVELRVLAQKSVGTSDKSLSIQLTQSIEQIELLDRQLELIESEMEDIVKSLDSVIMTIPGIGYTNGGMILGEIGDITRFSNPSKLLAFAGLDPSVYQSGNFEAKHTRMSKRGSRALRFALINAAHNVVKNNKTFSDYYDQKRSEGRTHYSALGHCAGKLVRIIYKMLTANVAFNLD

SEQ ID NO: 310481 - protein, 412 aa, unidentified
MIKREKIELVKGSDIYAGIDVASDIHRVRFIDNLGQEVIKGISFSNDRKGFRELEEHMKKFGIDHNIIFGLEPTGDYWKPIGYYLRRKGYKVVLVNPYHIKRTKEIIDNSQQKDDRKDSYLIADLVKQGKYFFPIIPEGIYGEMRELSISWRRTKQQITRLKCYLSNFLAKYFPEYKSIFSDILGKSSFYILSHYPLPEDIKRIGKKRLTKIIKRISKGKIREEKIDRLYERARDTVGIKEGRESAKMFLKEILKELERLMGRRKKIKEKMKELLKISGYGDYLLSIKGVGVVNACLFLGDIGDPRRYERASQIEKLAGYNLVEESSGKKKGEKQISKRGRKTLRYVGYLVANVAIAKNKDIRELYRYKVDVLKKNRIKVMVGIAAKMLRIMFAVCKNKEYYNSEKVRANFI

SEQ ID NO: 310482 - protein, 351 aa, unidentified
MKDCIEMVVGIDLGDRRSHVCVLRGDGKIDKTRVVETTRQALGGCLRALPRSRVVMEAGTHSPWVSQEASEAGHEVVVADPRRLRAVSQDARKSDRKDAETLARLARSDLGLLRPVRHRSAQAQQDVALLRARDAAVRARKQVLTTVRGAVKPLGERVGSSSAESFPKKAREQLSQATCGLVEPALLAIEELTRTIRRYDEEVERICEERYPETKRLRQVAGVGALTALAFVLKIEDPARFRRRRLIGAYLGMVPGRDQSGDRSPELPISKTGDAHLRRLLVSAAHYVLGPFGPDSDLRRFGLLKAGGSKSAKKRAVVAVARRLAVLLLALWATGETYEPLRHANRAANAA

SEQ ID NO: 310483 - protein, 339 aa, unidentified
MRLYAAFDLHSNNSYVGIVDENGKRTFKRRLRNDPAMIRETLQPFKDDIVGITVESTYNWYWLVDVLMDEGFQVHLANPCKIQQYSGLKHSDDEDDAFWLAEMLRLKILPEGYIYPKEQRPLRDLLRKRGHLVRLRTSLIVSLQNILARNVGAKMKTSSLKALKEDRVTPLLAGNDVISLAGKVSKDAIDALTKQIRAIEVAVEKKIKIRKPYDLLLSMPGVGRVLALTIMMETGPIKRFAHVGNYVSYCRKVPAGRFSNDKKKGNGNRKNGNKYLSWAYAEAAELARRFDSEARAYYDRKQRRTNAPIAHSALAHKLSRAAYHIMRDKVPFMPEKTFA

SEQ ID NO: 310484 - protein, 344 aa, unidentified
MKHYNVIAIDLAKSVFQVCVITYQGKVLFNKTMSRAKLLAYLVQQSKALVAMESCGGSSYWGRMASSFGHDVMIIPAKQVKPFRTGHKTDANDALAIAVACRAPNILKARCLSIEEQGMQSVDRMRSLVSRQKLQLSNQLRGLLLEFGIVINKGESAFKTRLPEILEDAENDLPPVMRKSLYQLWQLYLRIGLDYDELDKNVKRVAKQDHQCQRLTQLEGIGPIGAIQLKLQLVQDHFKNGRQASACIGLTPQQHSSGGKTNLGGIKRLPSEHPLRSTLFLGARSVVSRLKSRPAKTVKERWLKAIIDRRGSNRAAIALANKNVRTAYAMLKNDSDYCSTVIAT

SEQ ID NO: 310485 - protein, 519 aa, unidentified
MAKGKRYKRRQHLHNVKGRRFTDEIRNLDLEKVLVIPIDGGKNAHKALVANYFGDILVDTFEFPNSKSGVFMFDSIVKTVSQKVEAQRVVPGLEYTGHYCENLMYSLTQLGYDTIPINPYSVSCQRNGQLNWCKTDEIDLCAIGQVIIDNQGTETKLGTGLYYNLQIAERMRRDEVRKQASLKTQIRCIVDRVFPGLQKANIFSDFWGKASLLLLEHYPTPWDITRLGIRNLAEFFQKHNTKLGVTTATRLVKLAQDSLTRNPQDLEMHLLNLQFKLKDLRHARERIQLIEIETAKYLARTPGFLLLSIPYVNVASASEFVGETGAIANFVKNTKVIKLAGLNPRKFQTGEYEFEHGGVTKQGRASLRYIVSVISQDLLNGNDYFIAFYNRLVNEKGKNERLAKTAVGNKFIRIACVMMRDKKLFNPPTWTGRYLTDNPVAKFEKFLKERQAKDVFDILKPIILGWIPKKSIVAKESTRTKFEGGGFQALPESLVSVGDILPRVMKSISTRSTNVSSVK

SEQ ID NO: 310486 - protein, 347 aa, unidentified
MDHIGIDVHKKESQICILAEGGELLERRVPTQGRRFAEELGARPHARILLESATESEWVARCLEGLGHEVVVADPNFAPMYATRTRKVKTDRRDARALAEACLLGAYRPAHRLSDAQRHVRARLTVRDTLVRTRTRYISLVRALLRQHGWPVPTGSAEGCPRRVLALPLPGRPRSEVAPLLAVMRHLQQQLAYSDERIAAVTQTDERVRRLQSVPNVGPVTAAAFVAAIDDVQRFRRAHEVEAYLGLVPRELSSGETQRRGRITKAGSSRVRWLLIQAAVSMLRLHDPRTAALREWAGRIATRRGTGIAVVALARRLAGILFALLRDGTVYESRQRALATVPQAVPA

SEQ ID NO: 310487 - protein, 392 aa, unidentified
MYIVGIDIGKNHHEASIVSPEGKQIGRSLRFATTHKGADSLMSFIFKNIGNSPCVFGMEATGHYWYPIYSFLKAKGYTIYVINPIQSDSLRKMYIRQTKNDSIDSFLIAEVIRFGQFGTTSMADENILAMRQLCRYRDSVISSRTEIKLRIGTIMEQIFPEYEKQFSSLWVSTSMGILEKYLTPENIENAPIDELFEIIKDKSHNRLTRAKAISIKEAAADTFGIKIAQDAFSFQLKQLIDRMNFLDKQIEALDCQILEYYEKFDCYLHSIPGIGMIGAATILAEIGDISRFKNSSALVAFAGIDPTVRQSGEFNSTHNHMSKRGSPYLRHAIFLAATTCSFHNSPLNAYYKKKRDQGKHHLTATGAVARKLTTVIYAVLRDSKPYEPKKFC

SEQ ID NO: 310488 - protein, 344 aa, unidentified
MERKFKLIFGIDISKLTLDATYFFEGTSRYFQITNNAKGISQLVDTIKELGVNEKDVLICCENTGNYTEKLAMVMKSLDVTFWVVHPVIMKGYSLDLQRAKNDKVDSMKIAEFALAHQHKATNFHHPDQKTKELKELYLLRKQLISLRQRTLNFIASENDKAIPGILNTVVYDQLKHFIADLIKDVEKSIRLLIKSEKTIKSYYNILLSIPGIGPVIAQHILAVTDGFKKIIDYKAFACYVGIAPFGRSSGTSIRYKPRTSKKANQELKAEMHQGALSVIREGQVFHNYYKTMINKGKHHLWIINSIMNMIAKCIFILVNKMVPFNTETFVNNKKSWQNNLVMS

SEQ ID NO: 310489 - protein, 343 aa, unidentified
MGQYIGLDVSLKDTAISIREDGKRIWRGKCPSDPGIIAQAVRKHSDDPLSVVFETGPLATWFFHALTGEGLRAICIEARHAQKILGETMNKTDANDAEGLAKLAETGFYKAVRVKSFEAMLIRSLVAARTQLLAITTQLTNQIRGLMKTFGLVVPKSKGRVFIEKVNDLLDGHVELKGIIYPLLEAWQAVRERASTLSRQLLLAARQCQSTRLLMTIPGVGAITAVSYVAAIEDPKNFPKSRSVGAWLGLTTRRYQSGEMDFNGHISRRGDQRLRGLLYEAATSLLTRTRAETVSDLKTWGLQLRERLGFKRAAVAVARKLAVIMHSMLKTGQTFIPTREELA

SEQ ID NO: 310490 - protein, 310 aa, unidentified
MASHEFIGVDVAMDWIDVCYLSNGRHERIKSTKQSLAKFAKTANDAVVVLEASGGYERPLIEALIKAEARFIRVNPRQAREFARATGKLAKTDKIDATILARMGKALDLVPSPIPDPDRVRLADLVARREDLVAAIQAERNRLGTSRDGWVRQEIQRLVAILEDHLDAVEKEIARHIAASGSLLEQARRLRTAPGIGPALVAVILARLPELGRLKAKQIAALAGLAPQACDSGLSRGKRRVWGGRADIRRALYLAGFVASRFDPTLAAFRARLQDSGKPPKLAITACARKLLTIINAMARDATDYVSAVS

SEQ ID NO: 310491 - protein, 418 aa, unidentified
MQTQLSQYTAVIGIDWADKKHDVCVQDMATGKRRASQVRHRAEDLDEWARSLHRRFGGPIAIAVELSKGPIINVLQKYDFFVIFPIDPSKLANHRKTFTTSGAKDDPTDAEFALDLLSKHTEHFKPLQPQSVGMRTLMTLVEHRRQLVNDRVRITNRLRNALKQYYPQPLEWFDHIDTLLFCDFIRRWPSLPQARRARRATLERFFREHNMNRKPLLERRIKAIKSAMPLTTDDAVIVPHRLHALALVAQLEVTLECIKQYDVEIASLAPQHPDYELFDPLPGAGPVHTPRLMVAFGEQRERFNNAAEVQKYGGLAPVTKRSGQSTWIHWRWQCPTFLRQTFVEWAAQTINKSYWAGLYYQQQRRKGCSHQAAVRALAFKWIRILYRCWKTRTPYDESRYLRALQERGSPLLKIAEAA

SEQ ID NO: 310492 - protein, 411 aa, unidentified
MYIAGIDIAKRTHVGAIIDDTGKRYGKAFKIDNSVEGFNILLDKIAEISQDISQFVFGMEATGHYWLNIYTWLCDRGFTVHIINPITSDAARRLEIRRTKTDPIDAFLIAEVIRMGKYTKTQLADDDMMSMRDLCRQRFYIVDMASDVKKKVICLLDRMFPEYQSLFSDIFGRTSRELLKEGASPEEILALDTTKLAEILRKASKGRFDKEKAEELQNQARNSFAVLLSSQTVSLLIKQMIEQIELLESQIDEIDKLIADLYSSFNVKLTKIPGIGTTLAAAIYSEIGDISRFEKPKQLVAYAGLDPELKQSGDKRGEGYHVSKRGSPYLRRALWLASYCVIIHDKSFAYAYQHKLSQGKTKMQALAFISHKLLNVFFTILKNNIDYVPVFPPDVDVSKLAQKALDSQSSN

SEQ ID NO: 310493 - protein, 368 aa, unidentified
MKQYTLKAAPAAEAKEIKNQKAAKAKLIAVGLDTGLGNNQASRKVDNAAIGPVQNLRNETEVALYIDKQLELAEQVVVVYEAGPFGYGLYRQLTARGAKCLVCAPDSTQQKRKRRKNNPIDSRTLTSNLSNYLNGNEAALQLVRVPSEEQERARLVSRQHDQLVEERKRLGAQGNALLLSQGFGSWKNWWRPKAFHSLQRVVPAWLLEMLRTWVDLLKVLDEKIQKAKAAQAKGWSGPRPKGAGANSLVQLQSHVLDWNLYPNRRKIACLAGMVPSEWSTGKSQRLGSITKVGVPAIRRIITEMVWRMILFQPHYRPVHKWQEVLRGTNKTLKKKAVVAIGRQLIVDLWRLQTGRSTAQELNLIMIGG

SEQ ID NO: 310494 - protein, 399 aa, unidentified
MTHYIGVDISKDNFHFCILNHEAKTLSSGKLSMSLQGFSDFFNLLKTLSDPIVVMESSGRFHIPLYCFLVEKDIQTFILNPKIVHRFFEFISANNPSKYDTKDAKILALFALNNPEFLKSYPENSELRSASRLIQKLKHELAEAKTQIKYALTVLFPEAEKHFNIYSHSFLNILLKFPSAKTLKKAKPNEISEIIKSSVPKGKTPSFSPDEVINLAKNSIGVDNPYLSQTLIIYIEKLFFLEPRIKKLEEMLVEKMDEDQQEQIKLISSIKGISSKLASLFLAEIRDVKRFSNAKKLIKFAGTDPVTKQSGKYKAKMSISKQGSSFLRNVLFQMAVGVVKWNFYFRSYFIRKKKNFGSYKKAMISVVNKLIRVIYAICRKKTFFNPAFSKFPVLEVSHV

SEQ ID NO: 310495 - protein, 312 aa, unidentified
MADIVRLAGIDVSKDKLDVHVLPSGESRTVAYDGRGLAGLRRWLIGLGVALVAVEASGGYEREVSEMLEEAGLIVHRLNPLRVRRFAQMKGRLAKTDRLDARTIAEFACACPQERQPRRDPRRERLAEHLLVRRHTQDAILDCINQLEHLRDGQLCRLVKARKASLERVRDKLDRCLVELIAEHDDLAELSERLRSVPAVGPVLATTLIALLPELGSLTRRQVASLVGVAPFDRSSGRQNGPKSIEGGRAFVRKALYMAAMVASRHNPVIAAFYERLAGKKGKVRLVACMRKLIVTLNAVVRDGAQWQPRPA

SEQ ID NO: 310496 - protein, 350 aa, unidentified
MKITTIGIDLAKNVLQVHGVDEQGKVALRKQLRRSQVMDFFAQRAPCLVGMEACGSAHAWARRLIKMGYTVKLMAPQFVKPYVKTNKNDAADAEAICEAVRRPNMRFVPVKTEEQQAVLSLHRARQGFVRQRTAQANQIRGLLAEYGIVIPQGIGHIGKCLPEILEDADNALPGLFRQLLRQLGEHLKTLTQLVEEMEQQIQQWHGRNEASRKLATVPGIGALTASAMVASVGDARNFSNGRQFAAWLGLVPRQHSSGGKATLLGISKRGDRYLRTLLIHGGRSVIQAAERRKKPPVEEPLSQQRSWLQALVLRRNKNVAAVALANKNARVIWALLAHDRNYQPGYTVAA

SEQ ID NO: 310497 - protein, 466 aa, unidentified
MKHNRGKGPGKPRVSPTVLDRINPNVAGIDCGSAEHFVAVQPDRDPTPVQSFTTFTSDLVRLADWLTACRVTSVAMEATGVYWIPIYEILEARGFEVLLVNARHLKNVPGRKSDVSDCEWIRELHSVGLLRGSFRPTEAIVALRAYLRHRQTLIEGAGTYVQRMQKALVQMNLQLPLVVSDITGVTGLRILRDIVAGQRDPQHLAEHRDHRCRASKADIVAALTGHYRPEHLFVLQQNLELFDACQTQLAACDRAIDAHLQPLSAAVATPATPLPTPRVTKKPRENEPRFEIRIPLHQLTDGVDLTQIDGIAPYTALKLISEIGTDVRRWATEKHFTSWLTLAPKNKISGGRLLSSRTQPSANRAAAILRMTAMSLGRTQTALGAFYRRLAARIGTPQAITATARKLAILVYRALKGTLVYRDPGADAYDGQQRTRVLRRLRQRAATLGFELVNRETGEVLPAGVS

SEQ ID NO: 310498 - protein, 356 aa, unidentified
MKYYTSTTQFNCGIDLHARQMYVCVMDRQGKKLLHTNVKNNDFDYFLKLVQAYRHDLTVCCECMFGWYWLADACQAAGLTFVLAHALYVKAIHGGKNKNDRIDSEKLTHLLRSNLIPPAYVYPTEKRPLRALLRQRLFYVWSRAELLARIHSHQLAHNRIVVRQQTRRHREPWEEQLLAREDHPLRQMTLKNDLAMIRHYDTQINALEEQLHKLTKELAPRDYALLQTVAGIGEHLGMTILYEIGDIQRFPTVKDFLSYCRLVKGTVASAGKIKGLRGAKLGNPYLRWAFGEAAVIAKRDHFRIGPLAQRLEERMNGNKFKANTVIAIKLARAVYFMLKNKTVFDPDRLVAVLAKP

SEQ ID NO: 310499 - protein, 345 aa, unidentified
MELMYYIGLDVHKQKISYCVKDSGGKVYAEGSLPATRIDLDLWMKTLPQPWSAAMEATMFTGWIYDHLKPHAAALKVAHPLMLRAIAAAKKKNDRIDANKICDCLRCDFLPECYMASTAIRERRRTLRYRNLLVRQMVQMKNKTSMLLMEAGVSCNKQRLHKAGYFRELLATNPDIDEGLVPLLPLCRETVVRLQRTESALVRSLERDSLLMDRVERLMTIPAVGPITALTWALEVGDVQRFSSIKKAISYCGLCGAEKSSANTVQRTPLSKQRNKHLQTTLIEAAKMAPRNSSELAMLYDTEKQKGNANRATLAVARKLVAYLMAVDRRQRDFHVVETSDGIAA

SEQ ID NO: 310500 - protein, 364 aa, unidentified
MEQITRGECGRVVVRVGVDLAKRVLQVHAVDAAGKLVTGRTLARDRFIAWCAQLPAGCVVAMEASSSAHHWARKLRSMGLDARIIAAHLVKPYRKQGSGGKNDANDAAAICEAASRPSMHFVPIKSIEQQSILCVHRLREGVKEERTACINRIRGLLAEFGLVFAQSPKVLRLVLADVIEDASNEMGTLARLTLQRAQAQWRELDEHLAWCDECIAEHVRANEQVKTATTLLGVGPITASAVVAAVGDFRQFRNGAQFGAWIGLVPKQHSSGGKARLGRITKQGDTYLRTLLIQAAKSAVLTAHRRSDRISSWLCALRERSGWQIAAVALANKNARILWALMTKGAAFDANHLGVKPGMSPQPA

SEQ ID NO: 310501 - protein, 388 aa, unidentified
MLPSVHHANTEQTASDSPDLTFYASLELSRATWLVTCLLPERDRMSKYSTPGGDGGALLGLLERMRARAQQLTGRPVKIVVIQEAGLDGFWVHRLLEANGIESHVVDPASIAVPRRRGRAKTDAIDGETLLRTLLAWTRLEPRVCAMVVPPTPEEEDCRRVCRERAILLQERIRHTNRIKGLLAGQGITDFNPLHKDRRQLLDAARTGDGRPLPLQLKAEILREIELIELLLRQIADVEAAREVLAGPKTAKVPSPVVLLKQLKGIGPEIASVLYFEGLFRSFGNRRQLAAYAGLAPTPWRSGTVDQEQGISKAGNPRLRHTMIELAWLWQRHQPASTLSRWFHTRVGNERGRIRRISIVALARKLLIAVWRYVTQGEVPEGAVLKAA

SEQ ID NO: 310502 - protein, 391 aa, unidentified
MIEAMSNPHELVSKMDRPSKVCVVSEAEEGSSSLGCGRNETRMEGQPITNSPHTARRFRMTEYIGIDVSKQTLAVWDGTHEEEVPNEKGLKTLKKLLKKRYGINWNEAVRFIYEPTGPYSNYLRAFAAEHEVRVYEVNPKKSANFAKVLGNRSKTDVIDAKMLTTFHALLTEEDFCIPVMDEIAEQLGAELGSYEMIQKTRIMLSNHVQSLEYKSGVTRKLKESLEKELGRLGTMEDELEKGMEAVAEDHEETREALHNLLSIKGVGAISAINLLYLFRKYPGANRNEITALAGLDPGGRQSGSSLNGGRKISRAGDPMLRKVLYLACMNSIQHNECIQAFYKHLVTDNHKKPKVALVACMRKLLLIAHHLYVTKSQYRTLEHDANPCLTS

SEQ ID NO: 310503 - protein, 349 aa, unidentified
MLIIGCDYHPSFQQIAFMDTGTGEYGERRLEHMEGAGQFYRDLRARGVEARIGMEASGYTQWFEQLLAVSFELWIGDAAAISRKRVRKQKTDKQDAELLLQLLIEDRFPRIWVPSREERDLRQLLWHRHRLVQMQTRLRNQLHAVALNEGVRLKKRLWRRKGRAQLESLALMPWANRRRHDLLELLDQVDATIAQLSASIEQEAEKRPQVVRLMTHPGVGALTALAFVLILGTPERFARSKQVSSYLGLVPTEESSGERRHLGHISKQGSTLLRFLLVAAAQITVRSDPDWRRYYLHLAMRRERAIAKVAMARKLAVRLYWMWRNGWEYAQLPKLGSHAGQPGNRLGRQ

SEQ ID NO: 310504 - protein, 442 aa, unidentified
MPNRTVNRLSRGDRRRNAKLRDLRSLVRPDLAILAVDLADANQAAVVADHDSVVLGRRMFRCSAWGIDQILDWAIPIAQQAGFAGVVVACEPTGHRWKPVAERARARGLNMVCVQPLLVHRAREAEDFTRDRSDYKDATIIARLTSERRCYRPEVTTPTWARLRHLGQRRAAVLQAATAARQTLRDLLGVGWPSVLDAAAQPLDSLTFRACLAVATDPTPIVAMGYDAFAGAVAAELPRWGGKRRRHQILRAVFAAAQAPGGVAAERVGAAERARFAVADWHRALQQLGEVEGRMVAVLDQLGLTRLVTTITGLSAVGAAAILAETGDPARYDIARTWAKHAGLCPRDNTSGRFQGQTTTSGRGRPGLRTAAWRAIWGLLPHNPVFAARYAHLTGRAHNPLNDGQARAALAAGLLRQLHAVCTRQVAWDPKIAAGEVTATAA

SEQ ID NO: 310505 - protein, 355 aa, unidentified
MQRQISVKNSDYQNVYIGLDVHLAHWNVCIIQGGVMRKPFQQSPSASVLYKHLCTHYSGMRYLSAYEAGFCGCTAHYELKALGIDNIIFNAADVSQTHKEKTRKTDSVDAAKIARSLSHGDLRCIHIPPQWRLEDRNLLRLRDSQLSDVKRSKMRLRHFMHTNGIRIPPEYSTGWTQAFYEWILSTASGLNNTTGEALELMCKGLMTAVNEHKAINRRLAQLMGTDRYRNDYALLRTVPGVGCLTAITLLLECGDLTDFKSAEAFCSFVGLVPDAHQSGAHSADCGITRRRHKVLRYMLTECAWRAVSRDAHLSDLYVAYSRRMPKQKAIVKIANKLAKIIKFVLKNKKAYAPPQ

SEQ ID NO: 310506 - protein, 358 aa, unidentified
MSHPRSKSTAAFPALTIGLDVGDRTSYLCVIDADGQRVEQQSLATTADALRKYFSRCGPARVVLEVGTHSPWMSRLLRSLGHEVIVANPSAMYGSKRRRKRNDQSDAEYLARQGRADVALLHPIQHRREDAQVHLEVLRARDQFVGMRTKLINHVRMTVKSVGHRLPKCSAEVFVRRVMSEIPEALRPALAPMLVTITSLTATVAQYDAQIATLTTTQYPEAQHLQQVAGVGPITSLAVVLLIDDPQRFTSSRDVGAYFGLVPKLDESSDQQPQLGITKAGDEFGRRLLVSAAHYILGRFGPDCDLRRFGLALMVRGGKNAKKRAVVAVARKLAVLLHHLWITNATYDPNRLQSRRAA

SEQ ID NO: 310507 - protein, 389 aa, unidentified
MKIYVGIDIAKLNHFAAAISSDGEIIIEPFKFTNDADGFQLLVSKLESFDKNSLIIGLESTAHYGDNLVRYLVTELYQVCVLNPIKTCQMRKNNIRKTKTDKVDTYVIAKTLMMQDNLRFVSFFDLDMMDLKALGRFRQKTIKQRTRLKIQLTTYVDQVFPEIQYFFKSGLHQHAVYALLKEAPSPKEIASMHMTHLANLLKVNSHGHFTKEQAKELRVLAQKSVGANDSAISIQITQTIQQIELLDSQLEKIEAEMTDIMKFNDSVIMTIPGIGYINGGMILGEIGDIHRFSNPNKLLAFAGLDPTVYQSGNFQAKTTRMSKRGSRVLRYALVNAAWNVVRNNATFKAYYDAKRAEGRSHYNALGHCAGKLVRVIWKMLTDEVEFNLE

SEQ ID NO: 310508 - protein, 388 aa, unidentified
MFKTVERPDAPAAIRVDIGAIFVSLELSRSTWLLTSVSPGAGEKISQHATPAGDLRRLFECLAELERKARARAGKSYPIIVIQEAGLDGFWIHRALEKEGAESHVVDAASIAVPRRRRRAKTDRIDGKTLLRTLMAFKRGEPRVCAMAKPPSVEEEDRRRLGRERKTLIAERVEHVNRIKGLLFTQGAVDYQPLRRDRRARLEALRPGLGDPLPARLKGLISRELDRLELLLAQIKAVETERGALLVEQSRQAPAAAPMLLAFKGIGPEFATVLWLEGLFRSFANRRQVAAYAGLAPTPWRSGSIEREQGASKAGNPRLRATLIELAWLWRRHQPRSALTLWFEDRVKANGGRAKKALIVALARKLLVALWKYVTTGLVIEGAVMKTA

SEQ ID NO: 310509 - protein, 431 aa, unidentified
MKYKQSKKQNQRIEQITESALVVGADIAKETHVARGIDYRGLELGKDCVFHNDQAGLLKLVSWMKELERQHAKTDVIFGIEPTGHYWFTLAEFLKSEGIKLVIVNPHHVNKSKELEDNSPTKNDYKDAKVIADLVRNGKYTQPHLLEGVYADLRILMNLREKIMVGLGQVQRRIQNWLDRFFPEYQQVFKDWEGKASLITLAEFPTPQEIIRQGASAILKRWKQDVKRAVGMKRAEKLVQAARTTIGLKEGLTAAKIELAAMLEQYELFSRQIEAIMIQVEQLLEQIPGTEEMLTVPGIGIVTLAGFLAEVGDLQGYEHGQQIIRLAGFNLKENSSGKKKGKSTITKRGRSRLRALLFRAVLPMVAKNAEFKALHHYYTKRNHNPLKKKQSIVALCGKLIRVLHTLGTKRIRYNATDVLGPVRQSQLQMAA

SEQ ID NO: 310510 - protein, 351 aa, unidentified
MKTTTLPNTETQARIQQLKLGVDWHADHFRVARMCDGQSPQPAQRFTPASFLTFVQKQLALADQVFVVYEAGPGGFDLHRQLTALGVTAFVVHPQKLDPQHKGVVTDKTDARELTLNLDRYLRGNLRAMSVVRVPTPAEEQRRALSRQREQLRRERQRLAAQGRSLCLTQGIRLRGEWWKAPLTLPDWLAARLDIWRQLINAVETLLEALTQQVEALSPKERPKGLGPLTLGLLIAELCDWSRFRNRKQIGSYTGLCGGVSSSGQSHCDLSITKAGNARVRWALIELAWRMVQFQPQCKSVQRWRHLLLNPKAAARQKKRALVALARQLAVDLWRWQTGRVTPQQLGWVMV

SEQ ID NO: 310511 - protein, 403 aa, unidentified
MNAVGIDVSKGKSTVAIMRPFGEVIAEPFEVSHTDTELRKLACFLEKLPGETRIVMEYTGSYWQPIAKVLHDAGFFVSAVNALLIYKYGNNSIRKGKTDKLDAVKIANYCLDRWTDLERYSPTDQIRQTLKTCRRQYDQYIRLKVNLKNNLIALLDGTFPGINTLLKSAPRDTDGHEKWVDFAGKFWHRQCVCGNSEKAFANQYRKWCAKAGYRFNAEKAVAIYSHAGSQVDTLPMSSAIQSLITHAVSQLNMIIETISAIQHEMLTLASQLPEYPIVMRMFGVGPVLGPQLMAEIGDVRRFHCKQSLVAFAGVDAPPCQSGTFESKNRHISKRGSPRLRKTLFQVMSTIIQHAPADDPVYQFLDRKRREGKHYYVYMTAAANKFLRIYYGRVKEYLATLPES

SEQ ID NO: 310512 - protein, 395 aa, unidentified
MKISACLITIDSDGNEQLEIKEFGAFTDDLISLRAWLFSNNCPVVAMESTGIYWRPVHNVLEHYMEIILVNARHIKNVPGRKTDISDSKWLASLLKHGLLRGSFIPEKDIRHWRELTRQRRKITESLSDYKKRVHKVFETANIKIGSVVSDLFGKTGMNLIERLCDENVRLAEVDIAECACGRLKSKSSELYRSIQGFFEDHHRFQLCSLMRIISTLESELGILSDRITGLMGSYDDVISRLEKVPGVGTRSAQIILSEVGHDLKTFPTTASFASWAGLCPGNNESAGKRKSGKTSVQKHPFKTIMVEIAWAAVRTKGCYYKDKYYRLRSRRGAKKAIVAIAHRIAKAIYYIIKHGEEYRELGDDYLLKKRHDNNLKSLQQRAGSMGMQLIPLAA

SEQ ID NO: 310513 - protein, 396 aa, unidentified
MISVGIDVSKGKSTVCILKPYGEIVSKPFNITHTQKDLSELSSMLFRLNDEVKIVMEATGIYHLPVLTYLQEKGFFVSVINPYLMKSYRNESLRKAKTDKIDSRIIANYGLDHWFKMKEFQISGVIYEELKLLGQQYRHYMKLHLLSLAELTHLLDLTMPGIKNLLASWNETNRKDKRSDFVERFWHYDVITSMSEQEFTEKYILWAKEKKYVPSQEKAKVIYTLAQESIPTLPSETSSVKMLVTEAVRVLKEVDATLGLILSRMQEIAKTLPEYSVVREMGGVGNTLAPKLIAEIGDVRRFRNGKALVAFAGIDPPPYESGQFVGCNRKISKRGSASLRKVGYETMRSLKMRSRPEDPVYRYVVKKESEGKSKKNIEISRKIYRACLKNHFCNTF

SEQ ID NO: 310514 - protein, 352 aa, unidentified
MRVGVDLAKRVIQVHAVDAAGHVLASRALARDKFIAWCAQLPAGCIVAMETSSSAHHWARKLGALGLDARIIAAQPVSPYRKQGASGKNDANAAAAVCEAAGRPQMHFVPVKTIEQQSMLCVHRLREGFKAERTACINRIRGLLAEFGLVFAQSPAVLHAVLADVLEDASNEMNTLARLMLQRAQSQWRELDEHIAWCDERIAVHARDNPAVKKAATLTGIGPVGASASVATVGDFKQFRCAAQFGAWIGLVPRQHSSGGKNNLGGITKRGDTYLRSLLIQGAKSAVMTAHKRSDPISKWAAALRDRSGWQKAVVALANKNARILWAVMTKGEAFDARHVSRKPNLPTTKPL

SEQ ID NO: 310515 - protein, 400 aa, unidentified
MYSFFVGIDIGKWNHQAAFIDYFGAKAADDIAFENTSEGFQSFLKSLEAFDKEQIVVGLEATGHYWLALFSFLVDNSWTVKVINPMQSDALRNINIRKTKTDRKDSVLIAEVLRFGRYTETVLPDEGLLQIRELSRCRVGHVDLIGNLKRKILGILDRIFPEFASCFSTVFGTTPTELLQEYADPEELANCDIEKLVKLLEKQSRGRHSKTKAQELKDKAAKSVGIRMALCALKFELKLLLQQLEFIKSQIKELDQFLKKLMKEYDIIFSIPGISMTLGAALIGEIGDINRFGTPQQLQAFAGMDPSVHQSGNFQGTQGRMSKRGSPYLRRAAYLAANAARRYDSVFKEHYEKMIARGKHPNQAIGAVATKLLRVIHAVLKTKKPYDPAKLVFSATKSSV

SEQ ID NO: 310516 - protein, 410 aa, unidentified
MNNTLFVGIDVSSKDNVACIMKPDGEKHSVFSVPNNRPGAELLVDKVVSVLRQLLIPKVVIGMESTSVYGDNLMYFLRETGKFSEFEKKLYMLNPKQVKKFKDAYSDLPKNDQVDAFIIADHLRFGRITKEVYMGDYRYEALKALTRARHQTVQSLTREKQRFLNQLFMKFSGFTQENIFSNNFGTAATAVLEEFSSVDELAYMDTNELAAFIQKHGRGKFDNVEGMVSDLQKAAKNSYRPPTVIADSVNQILAISMSTIRLLQGQVKEYDKAIEKQLSAIPNTLTSVKGIGLVYAAGIIAEVGDINRFPSQASLAKYAGLAWTQHQSSEFEAEDTRLIKSGNHHLRYYLCQAANSLRTCDPEFRRFYNLKYREVPRHKHRRALALTARKLVRLVYALLKTNRLYIPPEE

SEQ ID NO: 310517 - protein, 350 aa, unidentified
MRKNSRVIERHPAETIGVDLGDRTSHYAILNEEGMVVEEGSFRNNADSIAKHFGKKERGRVALEVGTQSAWIAREFNKLGHEVIVANARELRWITSSDTKNDRNDAVKLARLARADRNLLAPVEHRTAEQQAELAVIRARDALVRSRTLLVNTARSLAKGFGLRLPASITHTFGARALALLEENLRAAMQGILEQIDALGVKIRDYDQRIAEVSAKHPDVERLASVPGVGALTAATFVLTLGRKERFAHSRDVGSFLGLRPRQKQSGERDPQLGISKGGDKYLRKLLVQCAHQILGHWGKDSALRQWGLSKSTGSPSKKRAVIAVARKLAVLLHRMWTTGEIFKPFPQMA

SEQ ID NO: 310518 - protein, 357 aa, unidentified
MHTAQQISFAKVHFFIGLDAHLRNWKVTIRLDGLELKTFSMNPAPLELLAYLQKHYPDGIYHIVYEAGFCGFWALRIFRQHNIDCIIVNPADVPTTNKEKVNKSDPIDSRKLARTHENKDLHGIYIPDTFHEELRMLMRLRYRIIQSQTRSKNRIKGLLYCQGIQIPLQFSGNARWSHNFILWLKQLHLNTDAGNFTLQNLILQLKEIREHNKNILNQLRTEARHPDIAPIMKALQGVPGVAFITAMYLYTEIMDMKRFANDNHLVSFVGLVLSTQSSDTTVQVNGISVRQNPFLRTMMIEAAWTAVREDPAMTLKFKELTKRMNQQNAIIRIAKKLVTRVRHVWLKQEEYVYALVA

SEQ ID NO: 310519 - protein, 389 aa, unidentified
MKIYVGIDIAKLNHFAAAISSDGEIIIEPFKFTNDADGFQLLVSKLESFDKNSLIIGLESTAHYGDNLVRFLVTELYQVCVLNPIKTCQMRKNNVRKTKTDKVDTYVIAKTLMMQDNLRFVSFFDLDMMDLKALGRFRQKTIKQRTRLKIQLTTYVDQVFPEIQYFFKSGLHQHAVYALLKEAPSPKEIASMHMTHLANLLKVNSHGHFTKEQAKELRVLAQKSVGANDSAISIQITQTIQQIELLDSQLEKIEAEMTDIMKFNDSVIMTIPGIGYINGGMILGEIGDIHRFSNPNKLLAFAGLDPSVYQSGNFQAKTTRMSKRGSRVLRYALVNAAWNVVRNNATFKAYYDAKRAEGRSHYNALGHCAGKLVRVIWKMLTDNVEFNLK

SEQ ID NO: 310520 - protein, 355 aa, unidentified
MKNQAIQYLALDVHQATTVATVRDEKGSIRMRSTVPTEAGAVIGLVRGAGPRVHVAFEEGTQAQWLHDLLQPHAERVVVCNVRGRSETMNKSDRIDADWLSEMLRLGSIKPVHHASTSLLTLKELVRCYTNLVEDSTRVMLRIKAIFRARGVATPGKSVYRASQRKKWLNEIDSRGARTRAEALYEQLDLLSRQRPAAKAAMIAEARKHHGWKILRSIPFIGPVRAAVILAIVATPFRFRTKRQLWPYAGLAVVTRSTGDQELVAGRVRRRKRAPLTRGLNRNHNPVLKSVLKAAANAAAATNGPLKDFYDRCVERGVREEMAKLTLARKIASIVLRLWKKGELWDPAKLTMQMT

SEQ ID NO: 310521 - protein, 309 aa, unidentified
MAYKVAGMDVHKKVLMVVVCEASDPEREPERRRFGTTTSELNRLAAWLRERGVQEAVRESTAQYWRPVWYALEPQMRLHLAQAFSNRAPRGRKHDFRDAERLVRRLVADELTLSFVPPPEQRAWRTITRMKVQLTEEKSRLHSQLECLLEEMRLKLSSVISDLLGASGYRILRALARGQTEAQRLADLGSDLLKCTKQQLLEALTGDPQPVHCQLLTLYLDRYDVLVGQIAELERLAAQALQAHPEAVVRLAAVPGFGVDSAQQVIAEVGATAKTFPLPGNLAAWVGTCPGEDVSAEENHSTRSPKGNR

SEQ ID NO: 310522 - protein, 336 aa, unidentified
MNDSTVFVGLDYHQDSVQVCVMDGRGRVLRNDVYENDALVIATVVENYGKVVHTAIESCTGAADLADELAQRPGWSVDLAHPGFVSRMKQNPDKTDYTDARLLADLERVGYLPRVWLAPQEVRELRRLVRYRQQLVDERRRIKLRISALLRDQRVRCPFASGSKGWLSWLKTTKEVSEESQWILKRHVRRLGSLEREIREVEVRLTRVTKKDPLVAALKEHKGVGSVTAWMIRAEIGRFDRFRKGKQLSRFCGLSPRNVSSGTRVADAGLIKAGHRQLRATLIEAAHRLIRYDHSWKDFADKLLSRGKPKCVVVAAVANRWMRRLFHEMQPDRLVA

SEQ ID NO: 310523 - protein, 454 aa, unidentified
MATRKKSISLKPGKGREALRITFPNAAGIDIGSASHFVAVPPDREDESVREFPSFTADLHAIADWLTSCKVDSVAMESTGVYWIPLFELLESRGFKVFLVNARHVKNVSGRKSDVLDCQWLQQLMTYGLLAGAFRPAEEVCVLRALWRQRGMLLKTQARSVQHMQKALAQMNIQLANVISDVAGETGLKIIRAILTGERDGHVLAALRNARIQASPEEIAKSLQGSWRAEHLFALKQAVDSFDFTGTQLAEVDHELERQLLVLKTDEGEPAKGKRRGKTRNSPKFDLRTQLFRMCGVDLTRIDGIDVTTALAVVSETGSDMTRFPKVGNFTSWMGLCPGTKITGGKVMSGKTKRCSNRAAQALRLAAASLRTSQSALGAYFRRMCSRMDKPKAITAAAHKLARLIYTMLTKGEEYTDQGQDYYEKRYREHVVQNLAQRAAKLGMKMVPLEVAGS

SEQ ID NO: 310524 - protein, 484 aa, unidentified
MAKVKLSAFDRLRLGARLNRKDRRDVEQRLSAADPGLEIVNRDAAGIDVGNESHYVAVPRGRDAQPVREFGSWTAALVEMAQWLVRCGIRTVVMQSTGVYWIAVHDVLQKHGLEVNLVDARGTKNVPGRKSDVQECQWLMRLHTYGLLRACFLPAPEIHGIRTVWRLRDQHVKDAGRCIQHMQKSLIAMNVQLHNALSDIGGTSGQAIIRALLAGQRDPKTLAALRDRRCMASEDEIVHSLQGVWKPDVLFELQQAVDAYDFYRQQMAQCDEQLKQYMALLPARRVETIVSSAEPSPTNMSKKSRSRKPCKPQGNEPAFDLGAELERILSVNATTIDGINVMTVQTVLAEVGPDLSAWKTEAHWSSWLNLAPKRDVSGGRVIRHVREHRTNRVGNAFRMAAQALIRSHSYLGARCRYLRAKLGGQKAVKAMARVLACLYYRLVTKGQRWVDQGIEEFNRRSEQRELALLQRKAHKHGMQLVPTA

SEQ ID NO: 310525 - protein, 401 aa, unidentified
MVSDFKKGRYNLMKIFVGIDIAKLNHFAAAISSDGEIIIEPFKFTNDADGFQLLVSKLESFDKNSLIIGLESTAHYGDNLVRYLVTELYQVCVLNPIKTCQMRKNNVRKTKTDKVDTYVIAKTLMMQDNLRFVSFFDLDMMDLKALGRFRQKTIKQRTRLKIQLTTYVDQVFPEIQYFFKSGLHQHAVYALLKEAPSPKEIASMHMTHLANLLKVNSHGHFTKELAKELRVLAQKSVGANDSAISIQITQTIQQIELLDSQLEKIEAEMTDIMKFNDSVIMTIPGIGYINGGMILGEIGDIHRFSNPNKLLAFAGLDPSVYQSGNFQAKTTRMSKRGSRVLRYALVNAAWNVVRNNATFKAYYDAKRAEGRSHYNALGHCSGKLVRVIWKMLTDNVEFNLK

SEQ ID NO: 310526 - protein, 352 aa, unidentified
MINGTIYVGLDVHLRQITPAVIEADGAERVLGQIPNQPKAIRRLMDRLSPDRSRLQVVYEAGPTGFVIARQLEGLGIACTVAAPAQLAQRPGDRVKTDRKDARKLARALRNDEVSAVAVPSPELEALRSLSRLREEAMHERHRCRQQLLKLLHRLGMTEPAGMRRWGTRYDAWLDALALAEPVDQLVLTETLAELRHRGERLDRITAQLLAAAADGPEAELITRLQALHGIGPLTAIGLVAELGDLRRFAHPRKLMAFAGLVPSEQSTGEAVRRGGITRTGNAHVRWLVTEAAWHSARPSPRPLASPVAERARTRLCQRYRDLRARHKHPNVAVVAVAREVLGFIWEVAVTA

SEQ ID NO: 310527 - protein, 355 aa, unidentified
MDSVKYIGMDVHKEAISIAVLNSSAKLVMECVIETKAITILDFLKGLRGSLHVTFEEGTWAAWLYDLIKPHVTELLVCNPRRNALLKEGSKSDRIDARKLAELLHSKMLRSVYHGEHGVRKLKELARSYLAISKDLGRVMSRVKAIYRSWGIPCTGKQVYAPRYRSEWLDKIKEAGVRRRAEFYYQQLDALRPLRQQVRQELLAEAKKHSAWKLLRAIPFIGPIRAALLMALIQTPHRFRTKRQLWSYSGFGIQTHSSAEQRFINGELRRAKKPVSIRGLNRNHNHDLKNLFKGVATVAAAKAGPFQEYYDALVAKGIRPEMARLTLARKIASITLIIWKKGARFEAQHLKPQTA

SEQ ID NO: 310528 - protein, 320 aa, unidentified
MMAQNDLVVVGIDVAKDKVDACIRSLSQRQTFPSTAEGRRKLIVWLRKHKVGKAVMEASGGYERDWAKALREANLEVRIVDPKRVRSFARSAGRLAKNDAIDAEMIAWFAETFGEAPAQAYDAERERLAQMVNARQGLLDMQTELQNRSEHSVPDVVQKMQARLLKKITLEVAKLEAAIAAMIKATVRFAELAEIIESVPGLGAGTSAGLIAAMPELGQVSNKIAAALLGVAPYDDDSGKRRGERQIRDGRRKVRNLFYMACLGAATRHNPVLKAFYRRLIAKGKEKKVALVACMRKLIAILNTMIARRQKWNPNLLVVS

SEQ ID NO: 310529 - protein, 320 aa, unidentified
MTTKRAKPYIGLDVSKKLLELAVYESDYRCCYANKASAFGELIAELVTLQPALIVLEATGGLEKPVVAAMHTAGLPVVVINPRQVRDFAKAVGQLAKTDRLDAQVLAHFAAAIKPPLRPIKSAAEQDLDALVGRRGQLVDMLAAEKNRRGTAPNDTVRDQIDEHIKWLEGRIAALDRQLKELMKTSATWNHTNQILRSVPGFGPVVSFSMVANLPELGKLNRQKISKLVGLAPLNRDSGQKRGVRHIYGGRASVRSMLYMATLTAIRHNPVIKAFYERLIANHKLFKVAITACMRKLLSIVNLMVRNGTTWKTPDARVSA

SEQ ID NO: 310530 - protein, 419 aa, unidentified
MTDPQAFAAFVGIDWADAKHDICLQAAGSEHMESTVLEHKPETIDAWARALRQRFGARPIAVCLELDKGPLVYALRKYDFLVLFSVNPSTLAKYRAAMTPSGAKDDPTDAALALEFLTKHPERLERLNPQSPALRALAQLVEYRRRLVDDQTRITNRLTSALKNYFPQPLDWFGEKSTTLFCDFLERWPTLKALQQARRCTLERFFREHRVRGAGLIERRIQAIKAATALTRDEGVIAPNALLVQALVTQLRATLKAIAQFDQAIAEHAHPHPDFALFNALPGAGAVFAPRLLVAFGEQRQRYRCAAEVQKYAGVAPVTERSGKTSWVHWRWQCPTFLRQTFVEWAGQSIKHSFWARAFYQQQRERGKSHQAAVRALAFKWLRILFRCWQNRDPYDESRYLEALKRRGSPLIHNLAEST

SEQ ID NO: 310531 - protein, 371 aa, unidentified
MDDSSKTLFVGLDVHKDTIAVAYAPEDRGAEVVSVGMIGTRQYDIDKLIRKLESKSATLVFAYEAGPCGYWLFRYLTRRGLTCSVVAPSLIPRKPGDRVKTDRRDAMTLARLLRSGDLDSIYVPTVDDEAIRDLSRAREDAVRDLKRSKVRLKAFLLRQDIRYEGRANWNAAHLRWLARVVCPTPAQQIVFQEYVHTVTERMDRLRRLEGELHTAVKTWRLQPVVDAVQALRGVDLTGAVTLIAEVGDLTRFDTPGKLMSYLGLTPSEYSSGASRRQGGITKAGNGHARRALVEGAWAYRYPAKVSRHLQLRLEKVPTEVRAIAWKAQVRLCKRYRLLSARGKHVNQVVVAIAREMAAFAWAIARTVPIAS

SEQ ID NO: 310532 - protein, 318 aa, unidentified
MKKAFFCGVDVSKDKIDVCFLTSITSEKAKFETLPNNHELIKVYFDSFKNDEILVVFEATSNYHLALQKALSDLGIRYCVTNPYKSSLFLKHLSTIKTDTSDSYGLAVYARTFKSEIAPDKYNAEYLEIKSYNSTLNLLQKINTQLKNFKSSQKTLNNKVIDDVIANLIKEIAKLQAMLQKLAFDLVKKTIPETEEIIKENKGFGIDLALNLFPQLHFNRDKSEKQFISFIGLSPRIFQSGSSVHRSQKINKMGNANIRRILFMTALCAIRFNAKFKSRYERLLANGKKKMIAIVAVMCAIVRYLKSLFPFNPEIKAI

SEQ ID NO: 310533 - protein, 345 aa, unidentified
MNYYAGIDVSLKESSVCVLDAKGKVIREAKVASEPEALIAWFAQLGLAMELIGLEAGPLSQWLFAAMKEAGLAVELLETRHVRNALKTMPVKTDRKDARGIAQLMRIGWFRPVHCKSMSAQETRAILTARKLVETKLHDVEMSLRGILRGFGLKVGKTTPTRFASRIRELVSGHANLQVIADSLLAIHEVSLREFKGFEKRVRTMARHNEQARLLMSTTGVGAVISLTYVAAIDDPARFENSKVVGAHYGMTPKKYQSGETEYDGRISKIGDASVRMALWQAAHVILTRPVKGSALKSWGLSIAKRRGMAKAKVALARKLAVVMHRMLVDAKSFDHALPNRAAAA

SEQ ID NO: 310534 - protein, 416 aa, unidentified
MKLFVGLDVSSEKLDACFMTDDSTCSVLKEASYGNSQLGASQIKEYILEFSQKFEIESLVIGMEATSLYSFHPAMFFKEDLELNQLNLMVSVEQPNKIKKYRDIFEENKNDQIDAFYIADYFRIQRQVNSIIKEEEYLALQHLTRTRYQLIKQLVRTKQHFIENIYYKCNTLSKELKAEGGSVLSATLVTLMTEDYTMDQLAELSLEEFANLIQKLGKYRFKNPEGIAKAISKAIRSSYRLGKVHQDSVDIVLGVLAKEIRSLEKLIKDLDKAIDDLVVVLPEYQCLTSIPGIGPVYAAGILAEIGPINRFSDESKLAKYAGLYWRQNQSGNSEYENTPMAKRGNRYLRYYLVEATNSVRRYEPEYHAYYKKKYAETPKHKHKRAIVLTARKFTRLVDTLLRNHQLYMPPRSVIDK

SEQ ID NO: 310535 - protein, 339 aa, unidentified
MQVTTVGLDLAKNIFQVHGISENGDVVFNQALRRAQLIAFFEKLPPCLVGMEACGSSHHWARQLSKLGHDVRLIPAMYVKPYVKRGKSDAVDAAAICEAVTRPTMRFVAIKSEDQQGVLFLHRARDLIVRQRTQLSNMLRGLLSEFGIVIAQGVGSAIKFAKGVLDGDKPGIPDVAIDVLANLSNQLVALHLRVRWYEMRMRLQAKQDPRVMLLRTIPGVGPVTASAIVATAGDASQFRNGREFAAWLGLTPLNRSSGGKERLGRISKMGDRYIRRLLVTGMTSRLRQMKTHPERADPWAQALLDRKPVRLATVAMANKTARIIWAVLTKNEYYRPRTA

SEQ ID NO: 310536 - protein, 365 aa, unidentified
MKSIFYVGMDVHKDSVRIAVLKGTGKETVYEGTLGNDLNKIVKIVSGYREKGTVIAGYEAGCMGYTLQRSLAAAKVDCRVIAPNKVARLGSQRIKTDTRDAILIARMLKNNEGESIHVPTKDDEAARDLLRCREDIRLQAHRIKQQLTKFLLRNGHIYEAKRQLWTKAHRDWMTGIEFGSDVLKETFLQYWCSFLEIEDRLGRIEAKVVEIAESAAYREPVARLRCFKGIDYITALALVCEVGDYRRFGSAASFMSYLGLVPSERSSGPKRRQGGITKTGNAHLRRLLVESSWHYRHRGNPSAALQARRMGMDERVIAYADKALSRLQSRFAHLVYKGKSSKTVVTATARELAGFVWGTMVGVYC

SEQ ID NO: 310537 - protein, 396 aa, unidentified
MRNDVTIYVGIDFSKEKFNACLLMEQGVMGESEFPNSKTGYLKLTKWVKNTSELGRSFASSLVLFCGEHTGTCSIGLCEYLYAKGMKIWLESALKIKYGSGLKRIKDDKADAEMIAYYAKRFYEPGSCALFEPDSADLKTLRTLYQFRNRVVCDRVAIGNRISSGAFDCSTLVRNRMVKHHKEAQKDEKDIEKEMVKLMETSEELASNYHILISFKGIGPITAAALIIYTSNFKKFDNPRKFACYCGIAPFGKQSGTSINTKPHVSRFAHIGIKAAIVQACKSAMQHNAVIKAYAQRLYAKGKHEGIVMNNVKNKVMHIIFKMIQTQTLWEQEYQQKHMKECKAIPGKNGIGATEAAPIINATLKTSSSVVECTFLEEHSFQKNSKKTSSFSCVET

SEQ ID NO: 310538 - protein, 417 aa, unidentified
MGEALRLFVGDDWAEDHHDVELMDVTGRRLAKARLPEGVAGIARLHAMIGEQLGEDADEDDAGQVAGGIETDRGPWVQALIAAGYTVYAINPLQASRYRERHGVSGAKSDAGDAHVLADMVRTDSHQLRAMAGDTALAAAVKVVTRTHKTLIWERTRCTQRLRHALRDYFPAALEAFEDLDAPDTLELLARAPDPASAARLTSAQISAALKRARRRGIAGKAERIQAVLRSGHLGQPDVVAAAYAASVRALIAVLTTLNEQVKTLQGQVEAYFGQHPDAEIITSQPGLGPILGARVLAESGDDPGRYASAKARKNYAGTSPITRKSGKKKTVLARYVHNDRLTGALMSQAFAALQASPGARAYYDHQRARGSGHNPALRQLANRLTGIQHGCLKTRTLYNEATAWPQHAAEAGKTAA

SEQ ID NO: 310539 - protein, 342 aa, unidentified
MLGEKGEVLEEGSVGNNRAALSELGGRYPEALVVMEAGCHSPWVSRHLEQAGCEVVVSNPRKTRAIYQHERKSDRRDALMLARIARMEPALLYPVRHGSEEAQQDLLRIKLRDSLVRARVALINSLRFTLKSLGYSIANPSTERFHKVIQSALPQSVAQVIAPSVQALEELTLRIKLLEREISDQARSKYPDTAWLEQIPGVGPITALYFVLKIEDPARFKRARDVGAFLGLCPRRDQSGENDPQLRISKRGDAYLRRLLVSSAQYILGPFAPPSALRQYGLALATGATARAKKRAVVAVARKLAVLLLTLWKNKSSYQAFPQRSSREKMRTNDLERLRCIA

SEQ ID NO: 310540 - protein, 320 aa, unidentified
MQSPSAVLSIGADVAKDAIVVACSEGSFPVREVVNQRTAVLAFLKGLPAGSRIGVESTGTYHELFAETAHQLGFRVFLLNPKDTRHYAKAVGLRGKTDRVDAELIARMIAHEHTKLHAWNPPTPQQREIDRLIKRRATLISLREAVEMSLHDLGGFADELKALRTRFNQLIARIDLRTKALVEANPDRKQNFTRVCTITGVGPVIGTALVNTLERVPVKSADAFVAFAGLDPRPDDSGQHRGKRRLSKRGPGELRRLLYLAAMSAIKTKTWRPLYDHYRAKGLSSTATLVILARRIARTAWSIYTHKTEFDPLRLTNPLT

SEQ ID NO: 310541 - protein, 327 aa, unidentified
MEQRVLGIDVAKETLDIALSDGIHLNNGQFSNDQKGYDELERWLRKHSNSSIHICLEATGQYGDGVAEYLFAHGHLVSVVNPARIKYYANSKLRRNKTDKADAELIAEYCLRENPAIWTPPPASFRDLQALIRHLDALQGAYQQQSNRLQSGVHPLFVENNLVSLCDFFDLQIKETKKAIQDHIDQNEELKRMQNLIITIPGIGKLTAAKLLGEIRNILDFRSARQLAAYAGLTPRNFLSGTSVHKKTRLSKTGNSNLRKALYMPAIVAIKRNPIIHAFCVRLSQSGLQPMEVVGAAMRKLLHLVYGVLKTERPFDPNYLNQMQVFS

SEQ ID NO: 310542 - protein, 383 aa, unidentified
MRAKRRGPGPSSVLITPDHAGNVVGVDPHKRTLTATVVDPRGGILAGEHFRVSGDGHRALEAWARQFGPIARWGVEGASGCGRHTAMFLTGRGYDVRDVCANRTPRNDRARQRGKSDMLDSERIARETLAHPLLPKAFKRAAADSGPDEQHQLLALWHHRRRSILTSRQHLVNEAESLLCELPLDLREQLPDSKAVRPRLAALARRNRRRRYDAPTSLRLRMLDDYRVQITALDREEKEVVAHLRALVQASGSTLGELCGLDTRSVAELLVEVGDPRRFTEGGFARFNASAPLPASTAEGPGEPVRHRYNPGGNRRINAILYRMAVTQLRCEPRAQAIFANARAHGHTKKEARRVLKRHLSDVIYRRMTRDLASHSAQPLLAA

SEQ ID NO: 310543 - protein, 368 aa, unidentified
MLYLAIDQHSKQLTVNLRNETGEILLRRQVSTRGEAPRQFLEDVRQRSLAEGGYVTIVEVCGFNDWLLELLPTCGCRETVLVQADRRSKRKTDRRDANKLGELLWVNRHRLSSGQPISHLRRVRILARREREDRRVTQMRKNIGRELTRTINAIKTILRRENLEQHCPTKGIQTKAAERWLKTLPLAPLDRMEMNLLLARWKLLREQKLQIEEEIARRAAAHPDVPLVQTLPGVAAYAALALAARVGPIERFPRPRSLANYWGLTPGCRNSGETTDRLGSITKEGSSLARFILGQLVLHVLRKDPVMRAWYKRLKQRRGSKIARVAVMRRLATIIWHMLKKREPYRIGGPPRKKLKRHQPAIAESSTA

SEQ ID NO: 310544 - protein, 386 aa, unidentified
MRTSDVSTPIAERISTIFVAIELSQKSWLVTMHCPDKDKISHHKLEGGDHGGLLALIDRMRARVARALGAVPRVVSCYEAGYDGYWLHRLLMAAGITNHVFDPASIAVDQRARRVKTDRIDGEKMLRTLMAYLRGEPRVVRIVRVPTAEMEDARRASRERARLTKEQTAHTSRIKALLRLLGMAVGNPRRRDFPSWLSAQRDWQGQAVPPRMLAEIRHEHARLMLVRERLDALMEPQPTVDLPPAAAQMAERGALLLGLKCLGPAFATTLSSEVFYKDFRNRREVASYFGLTPSPWKSGGIDREQGISKAGNPRARCAAIELAWLWLRHQPNSKLTQEYRRRTLDASKRIKRVAIVALARKLMIALWRYLTTGLVPEGAVLKAVQM

SEQ ID NO: 310545 - protein, 427 aa, unidentified
MKEAPVAGFDISKSSSDICVLAPGNEVVWRSKMAHTSQSMAQVARRLTDIGVQYGAAPVIIMEATGHYHRIVLQFMKNEGFDVVVVNPIQSGALKNISIRKVKNDRVDAYRIALLYRLKAAKRTNLPTDLIADLRSLCRQHYDLTQDLIAYRSRLHAQLDQCFPGFAGVFSSLVNLSALSVLERFPLPSLILSASDQDIEGAILSVVTRKSAYLQKKIHALRQAARNALPIAISTPSCAVIMKNLVSMLQILKKSIREVDLQIRALIRSDAGLRTDAELLKSIPGIADYAAAVILSEIGSVSPFQSAKQLVAFCGLDPTERQSGQFTGTRSKISKRGSKYLRCILNMSAHISIQPGCKGTYANPVLAEYFQRKRQSKPYKSALCAVMHKIVNIIFAVLRDQKPFELRSPELHCQIMRDRAAKLSLAA

SEQ ID NO: 310546 - protein, 351 aa, unidentified
MVVVGADVHKRSHTFVAVDAVGRKLGEKTVKATTEGHHVALMWARDQFGVELRWGIEDCRNMSARLERDLLGAGQAVVRVPTKLMAQTRKSGRTRGKSDPIDAESVARAVLREPDLPVASHDEVSRECKLLTDRRDVLVAQRTSAINRLRWNVHELDPERGPAPRALKAAKHQQALQAWLQTVPGLVAELARAELGDVIRLTSEINALQQRLSQRVREVAPALLQIPGCGDLTAAKLVGETAGVSRFKSEAAFACHAGVAPIPVWSGNTEGQMRLSRSGNRQLNSAIHRIAVTQIRMPDTEAHAYHQRRIANGKTKAAARRCVKRGIARRVYRALLADHHTRTQPHQPTAA

SEQ ID NO: 310547 - protein, 408 aa, unidentified
MNTLYVGIDVSSKSNVVYLMLPNGDKHSNFSVANSHEGSTQLVKRILSALTSLSLDTVLIGLEATSVYGDNLVYFLREDASLAPFHRKIHVLNPKQVKKFHDTYNDLPKNDYVDSFVIADCLRFGRINKEVYLGDYRYKALQNLTRARFFAVQNLTKEKQRFINVLFKKYSTMTQEKVFSDTFSTTALAVYDEFDSAEALANMDLHELTDFIIEKGKNRFPDPDAVAKAIQKAARSSYRLPKTVNDSVNQVLSISITSMKALESQIKEFDKAIKAQMELLPNVLISIPGIGPVYSAGIMAEIGDINRFNNQAALAKYAGLAWKQHQSGGFEAEVTRLIPSGNRFLKYYLCEAALSLVRCDKEYSDFYHLKYKEVNRYQHKRALALTARKFVRLVFRLLKDNRLYCPAK

SEQ ID NO: 310548 - protein, 411 aa, unidentified
MDKIYDKCCGIDVHKKLIVACFRCGKKQEVREFGATTRELLELADWLKDGGCEMVAMESTASYWKPLYNILESSNLNAIVVNARHMKAVPGRKTDVKDAEWIADLLQHGLLQPSYIPDKDQRELRELVRYRKSLVGERTRELNRLQKMLEGANIKLSGTVSDINGKSARSILEYLLTGKSIDGSKYDEMYEQKIIAHNLKATKEQIVDDLNGVMSPLQRRMMKELLVHLDELNIHIKNLDDEIDNFMKPEEKQASQAIQDVTGIGNTSAQAIISVIGSDMSRFPTDRHISSWAGLCPSDNESAKKRKSGKTRKGNALLRTTLITCAHAAVKNKKSYFYAQYVRISAHRGPKRAYVAVAHSMLISIYHILKDGVVFKDLGADYYNQFNKERKINAYLKKLKALGWEAPIVAA

SEQ ID NO: 310549 - protein, 318 aa, unidentified
MAIVCVVIDLAKNVFALHGVDEAGKPALVRPTVPRAKLVEAIAALPPCLVAMEACSGAHHWAREFQKLGHAVKLIAPKFVIPYRLSGKRGKNDAADAAAICEAAQRPSMRFVPIKNVEQQGQMCLHRVRQGFVEQRTALINRIRGLLSEFGIVLALKAATVRREALLHLEDLPGWANLAVGDCLSEVSRLDERIRDYDRHLAQLARQNESARRLMQLSGIGETTATALIAAIGNGHDFQCGRQLAAWLGLTPGQYSSGGKTRLGRITKAGDAYLRSLLVLGARAVLASAKNKADPISRWAMSLQERRGYWRAVVSMAA

SEQ ID NO: 310550 - protein, 407 aa, unidentified
MDLLKTVFGIDVSSRKSNVCIMVNGQKVNDYAISNDMVGFHQLLGDLKQVTKPQIIFEATGVYSRRLQAFLDMHELRYVMMNPLEAKRKTKDDLHQNKTDKLDALYLAKLQSEHPQRLAYVQNKEYQELMANNRIYEQASHDLITNKNRLHKAVQLTFPEIEHLLANPRGKNYWSIALRFPHPDIVLETKEADIIDFLKGLSGIGKKRANDITQNLIRLAKVACPAVKKNSAHIRGLKMAINNILSAEEECQTALQEMAKLAPKRDLEILTSIPGIGENTALRIISELGDIRRFNNPSQLNAFVGVDPQVYESGNLTAHLSISKRGTAIGRKVLYLAINQIQSAKKAGNPCHIADYYEKRKRSSETASHKKAAIASIHKLLRTIFALIKNDQLYSYDVAKHNQRLLS

SEQ ID NO: 310551 - protein, 357 aa, unidentified
MNVQTAVGWDIHRKFSQLSVVERSEQGEIRVMKRMRLEHADRAAMREELAKLPPATPVAMEGAFGWPWIADLLDELGLDPHLGHPPAIKVLAKHEAKADRVDADRLGRFWLRGIFPESYLSTPEVRNLRERLRYRMALVHLRGGIKSRLQAILHRQGILHDFSDLFGKGGRAFLTTLSVPEACRAALDGWLAQIDLLNTHLAEVETWMKQRLEEDEITQLLQTIPGIGLILSHVIQAEIGQLTERFPSRRHLTSYCGLAPLADDSADRHGKRHIAPACNHTLRWALIEAAGCMLKCKDCPDNLRRLHNRLTHGGRDNKQQAKVAVAREICELVYVIWKKGEPYREPNSPARPKRAKR

SEQ ID NO: 310552 - protein, 347 aa, unidentified
MRFYNKQHKYYCGIDLHTKKMYVCILNSNGETVAHRNLRTDSNAFLEFIAPYRENIVVAAECMFTWYWVADLCAREGIPFVLGHALYMKAIHGGKSKNDKIDSQKIALLLRGGMLAQAYVYPAKMRATRDLLRRRNHLVRKRAELYAHIQNTRNQYNLPDPLGNLGRSKNREGVAKRFDDPSVRKNMEVDLEMIEAYNRIIVPLEREIVKSAYGHNALGYNLLQTIPGVGKILALVMVYEIETIDRFETVEDFASYCRLVKCSKESNGKNYGSSGKKIGNAHLKWAFSEASVTFIKGNEPGKQYLDRLAQKHRKEKALSILAHKLGRAAYYMLKNKVAFDQDKFLSH

SEQ ID NO: 310553 - protein, 348 aa, unidentified
MDVTTVAVDLAKDSFEVVMATATRRIVSRRRLTRAQFERFLTELAPGTELVMEACGTAHHWARYGQAGGLRPRLLPSQYVRPYVRRNKTDRCDAEALLEAASCGGIQSVPVKTPEQQSIQALHRVRTQWQGARTARINVVRSLLAEHGIAIRRGAAAALHAIPVLLDETDRIPSYLREVLGRVYEEIRSLEERIREVERLLRAIAAQHPIAPRLQQVPGIGVLTATACVGSVGHIHAFRRSRQFASWVGLTPREFSSGRRRHLGRISKCGDAYLRCLLVHGARSVIVAAQRTARTRPERLTRLQQWAIALVQRRGHNTATVALANKLARILWAVWHHDVDFTSTAAVT

SEQ ID NO: 310554 - protein, 391 aa, unidentified
MIYVGIDVAKDKHDCFITNSDGEVLFKAFTISNNLDGFSELYQKIRSVMDDVTKIKVGLEATGHYSYNLLEYLIDKGLPTYVINPLHTNLYRKSLSLRQTKTDKVDARTIASLLMSDVNLKSYSDTSYHNEELKSLTRYRFDKVKERAKLKTSISRLVCILFPELEKLVPQLHMASVYAMLSEFPGAKQVANAHLTRLTNLLSESSKGHYGKETAITFRDAARVSIGSNMPAKSLELKHTIKLIQELDSEIDEIENEIKIIMDKINSPILSIPGISYRMGAMIIAEIGDFSRFDSPDKILAYAGFSPSTYQSGQLDGAYAHMEKRGSRYLRYALYNATKYVCHWDPTFAAYLAKKRAEGKHYNVAISHAAKKLVRVIYHLEKTKQQYIKAA

SEQ ID NO: 310555 - protein, 354 aa, unidentified
MKQQAIQYLAFDVHQATTVASLRDESGRVVMRATVPTEAKAIVRLVESAGPRVHVAFEEGTQAQWLHDLLLGCAERVVVCSKRGSSPVVNKNDGLDADRMSDDLRAGKLREVYHGSAGMQTLKELVRNYVALVSDATRVMQRLKALYRARAIPVKGNAVYRKADRKGWVEKLQGGARVRATSLFRQLDILLELRGPAKTAMIAEARRQPGWKVLRSIPYLGEVRVAEIQAIIRTPHRFRTKRNLWPYVGLAVVTRSSADQEIVDGNLRKKKRPPITRGLNRNHNRLLKAAFKGAANAATVRPGPLRDWYEASLKRGVREELAKVSLARKIVSIALRLWKKGELWDPDKVTIQAT

SEQ ID NO: 310556 - protein, 344 aa, unidentified
MKHYAGLDVSVKETAICIVDENGRICREAKVVSHPEDLSKALTETGFRIERIGLEAGPLSQWLFEGMARAGLPVICVETRHTKAFLKAQINKSDRNDARGIAQMMRVNLYRQVHVKTLASQKRRALLRARKLLQEKAIAIENDIRGLLRNFGLKVGIVGAAKFEARIKELIEDMPDLEEFIDVLLAARRKLRDSFSRLHDKILELVGNDAACKRLMTIPGVGPVTALAFISTIDIPARFRSSRSVGPALGLTPVLKQSGESERVGRVSLCGDGMMRGLLYEAAQSMLTRVKKWSWLKAWAMTVARRGGLKKAVVALARRIAVIMHRMWIDGSEFRWSREGAAEI

SEQ ID NO: 310557 - protein, 401 aa, unidentified
MSMPTIVGIDPHKKAHSVCVLNERGRPIREFEIGNSSADYQKLGNELSNGGGRTIIGLEDTEQYGLNLAIYLSNLGLPVKVVNPIYTKRERFYSPEISKDDRRDAELTASVLWREFAKDNLPGFTNSTQANFSRDLKGMIGDYRSLIHSQTRLKNQLHQLLNMTYGNGYEQFFSSCFSSTALEFFFQFPSLNYFLKSRNEKWEKVVTSVSHYRLSNQLEHIKNLRGKLKKEGVMVSEMSHITTQRLIRKIAELRFIQNQAKEVKGELAEMTSKNQQARSLMNLNGIGLILASIILSEIKDIHRFSRDSKLASYSGCAPRKYGSGGKYKYYSNKRGNRKLNWAIHRMTLSQLGNRGNKTTKDYYQKKLKLGKTKKQAFVACKRQLIKVVYQTLKKETSASNF

SEQ ID NO: 310558 - protein, 361 aa, unidentified
MSESMALVGLDVHQAQTVAAVLDPLTGELRVERLRGEPAMVVPVFLEELDRPVRAVYEAGPTGFALARVAEERGLDVRVVAPGSIPRAPGDRVKTDRRDAKRLVRLFAAGELSYAFVPSETDEHFRDLVRCIEDARKDLMRSRHRLSKFLLRRGHRFPCKAWTQPHEQWLGKLSFEDAISQATFVDYLCAVQGLVQRRRVLIDALEVAVPESSHAQTVARLRCFRGIDTLTAAGLSAEIGDFTRFAKPALLSGFLGVVPSEHTSDEKRTQGQITKAGPPHARRLLVEAAHHYRHQPAVRLGLQARQAGQDPRVVQIAWRCQRRLHERWTHLAGTRGKRTGTVAIACARELAAFCWEAATLN

SEQ ID NO: 310559 - protein, 347 aa, unidentified
MTIVEETRPITGGVDTHAGTHVAAALDPVGGLLGVREFPATTAGYARLLGWLGGFGTVCLVGIEGTGSYGAGLARHVTAAGIRVVEVDRADRQDRRRQGKSDPLDAVSAARAAQSGRARGAPKGRDGAVEAIRALMVARRSAAGERTRTINQARALVLTGPDDLRARFTRHTPAALIAGLAALRPRPGDVVGYAVRVALRELGRRARFLDGQLQRLDELIVPLVTARAPGLLALYGIGPHTAALLLIAAGDHPGRLRSEAAWAHLCAAAPIPASSGKVTRHRLNPGGDRQANHALWRIVFTRLGSDLATRAYAERRTAEGKSKAEIIRCLKRYVAREVYPHLRPAGG

SEQ ID NO: 310560 - protein, 412 aa, unidentified
MQDILTCAMGLDIHRDVIVACLAKGELGTEPEIEIRSFSTLIPEMRKLRDWVLETECRHVAMESTGIYWQPIYEMLEPCFDGEINILVVNARHMKNVPGRKTDMRDAQWIATLLRAGLLKGSFIPDKAFRELRHLTRYRKSIVHDITAQKNRIDKFLQSSGFRFTAFLSDAFGASGRNIIRHLMEYGSISREALDKCLKTQTRKRIDEILIALNGSLSEHQRSFLRMVFGHLEALEQHRRTVEDAIVEEITKHEEALSLLCSIPGIDVTAAAAIIAEIGTDMSAFPDSQHICSWAGLSPGNHESAGKRKSAHINKGNPYLKSMLCEVGWVMSGKRALYLSGWYWRIKQRKGAKRATIALARKLLALIYTMLKTGTPYNEECFEIRRKQSERKRASRMVNELQKLGYLVVAPG

SEQ ID NO: 310561 - protein, 357 aa, unidentified
MRKRLNADTINVNGKTVTVGIDVHKLSWHVTALVEGVVVESVTIKPCYSVLKKLLAPFRSGKIRIAYEAGPAGFNLYDDLTADGIDCIVVPPSLLPVESGNRVKTDKRDSRKLAQYLENNLLKRVYVLSKQERAHRQFVRTRRQLSNHRTDVMRQIKSLLLFHGISLPGGDTGFWARPVLRSLRVVETNEYVSRSLNTLIDLYEYLTQQVKQLTKEVRILARTETYARRVELLQSIPGVGVLSAMEVLTELQDVSRFTTADQLAAFLGLTPSQYSSGQHVRMGKITHAGNHRLRTRMVECSWIAIRKDPGLHKTYETLKKRRGAKRAIVAVSRKLIIRIRRILLDGVTYRTECAIAA

SEQ ID NO: 310562 - protein, 451 aa, unidentified
MSKPQVIDDEEHERVHERVAAVDVAKDSGMVCTRLPHPSRPGARQSTVWTVKARMGAVGKLGRQLKDSGIELVTLESTSDYWRIWFFVLEACGLAVQLVNAAQAKNLPGRPKTDKLDAQWLARLTELGLLRASFVPPAAIRALRDYTRARTRLVQERTRCYQRLEKLLEGALVKLSSVASKLTTESAKDMVKAMIAGQRDPRTLAALARTRMKAKHDDLVEALDGMFDDHHGELAGLLLDQIAFLDQRVAQLTARITAAVAAMPEAWGVDGDGTAGPDAGAGPDAVVLPAAARLAEIPGVSQDLARAIIAETGLDMSRFPTAAHLVSWAGLCPSARQSGPRSRAGKKSQGDTWLRGSLGQAATGAARTDTFLGERYWRIARRRGKAKAQVAVARSILVIIWNLLKDPAARFTDLGPGYYQARTDKDKKIKNHIRQIEALLGHPVTITPKAA

SEQ ID NO: 310563 - protein, 445 aa, unidentified
MEVVYRCCCGLDVHKASITACVLWAEGGGRVRKEKRRFGTFTSDLLQLADWLGACGVTHVAMEATGVYWKPVWNILDGQFTDVLLVNAQHIKAVPGRKTDQKDSEWIADLLQHGLLRGSFVPPQPTRELRDLTRYRVSLAQECNRIANRIQKVLEDANLKLASVATDALGASGRAMLRAIIAGEEDVATLANMAKGLLRNKIPALREALAGRVTEHHRFMLRELLDDLDHAEGKMTTVEQEIDRRLRPFQDDVARLCTIPGVDRVTAWGVLSEIGFNMDQFPSAAHLASWAGMCPGNTESAGKRLSGKTRKGSAFLRRHLCQAGWAVSTKKNTYFSALFRRVARHRGAKRATMAVGHAILVVVYHLLKRKTTYVDLGPDYFDRRSDHEGTKPGSYESFRSCAMVFRVTGSIISGATSASGSRTNRRSRNCGCGTRRPLSLMIASP

SEQ ID NO: 310564 - protein, 409 aa, unidentified
MITTLFVGIDVSKKSNVVHVLDSDGNTLCRFAAPNNLDGAGKIADKLKSILLNTDFSKILIGMESTSVYADHLAAFLRNNDFLKKWECKVFILNAKQVSKFKEAYADLPKTDDVDAFVIADYLRFGRLPRDVRQDEKYTALRNLTRARFQAAQNLSREKNRFLETLFYKFSALDSSDVFSNTFGAASLGVITEFLSVDDIIYMPIEELAAFINEKGKSHFVDPTQIARELQAAAKSSYRLSKTVNDSVNQLLAIRLVGIRAIQNQIKDLDKAIESFMALFPNVLTSIGGIGPVYSAGLLAEIGEVTRFPNHAALAKYGGLTWKKHQSGGFEAANTKLILSGNKYLKYYLLEAANKVRVHDAEFNRYYHCKFKEVPKHQHKRALALTARKLVRLVYSLLSANRLYRPPTA

SEQ ID NO: 310565 - protein, 468 aa, unidentified
MKKNPKKSQRQKSLKKLKAGTGRVIEARASGELNRINERAAGIDVGSESHYVAVPPGLSDHPVREFGVFTKDLYAIAEWLKGCGVETVAMESTGVYWVPLFEVLEERGFKVKLVDARKVKNVSGRKTDVLDCQWLQQLMSFGLLAGAFRPDGKVCALRALVRQRETLIAGQAQQIQRMQKALTQMNVQLVQVISDIAGQTGQDIVRAIVAGERDARKLAQLRNYRVHASEEQIAKSLSGNWREEHLFCLAQALTLFDTHQQLLEQADAQIEAMLGHLQRHAPGAIKPDKNKGRAKHAPRFDVRAALVRWAGVDLTRIGGIDVCTALKVLAELGTDLSKFKSAKHFASWLGLCPGTRITGGKRISGATKRIANRVAQALKLAAHGLHRSHCALGAYYRRMAARLGAGKAITATAHKLARLVYAILTRGEEFIERTQDHYEDQVRSRTIRYLQKKAASLGFKLQPNAVCP

SEQ ID NO: 310566 - protein, 331 aa, unidentified
MKFDNFIALDWAQRNMAVAHMTKHSNEISTIDVASNIKALKLYLDQMKGTKILTFEESSPAQWLYTELVDHVDKIIVCEPYTNHLLKSGPKTDKTDARKLLKLLRADMLKPVFHCTEEFINIRKVVSAYDDLIMSTVQLKNRKAALYRSAGKRIGSEFDKKEEIFILSGLESMIENHELLRLKYEAEYRRLKRENPMIGNIQSIPGIGPINAVKIAATIVDPSRFTHASAFWRYCGLQKHELISGGRSYGRRSPRYSHTMKTVFKTAALVCSRTDNGPLKSYYDYLIKVKNFPEYQARHALARRIATLTLGVMKSNKALDENDLAKKELAG

SEQ ID NO: 310567 - protein, 343 aa, unidentified
MYEYFVKIFLKTLLFILKMKQIIHYYGIDVSQVSLQVSHQTSEGIWQDFEVKNEILSLTEWLSTFDLSQNHFVYEYTGNYSSRLSYVLNLLEAQFSILTPSQSKGFRATLKSTSKTDKQDARMLCLYGQKMQPEQTVLPDVKLDQKRQKYKYLATLKAEKQAFTNRLDALSYLPNADKTIKESLMNTIEFFDTQIQTITQEVFTLDDDNFRRIYDLMIQVVGIGKITANALIIATNGFQDFENAKQLAKFIGVAPSDKQSGSSLKAKGHISKSSCTALRTSLYMAAQNAARFNTTCKDIFTRLRAKGKPYKVAIIAVINKLIKQTFAVVKNKAKFDNFLVLTK

SEQ ID NO: 310568 - protein, 318 aa, unidentified
MYYIGLDIHKKTISYCIKDVSGQVQREGTIPATRTDLDSWMKTLPKPWTAAMEASIFTGWVYDHLVPQAAQVKVAHPVMLRAIAAAKKKNDRIDAGKIADCLRCDFLPECHMVSTEIRDRRRTLRYRHLLVRQMVQMKNRVSGLLLETGVSHNKQRLHKVKYFRELLATNKEVDESIRPLLKLSRESIERLQKTDYALVSSLERDPLLAQRLKNLRTVPGVGPITALTWALEIGDVSRFHSVKQAVSYCGLCGDEKRVQQINCCGHRSPNSATSIFSVFWWKPPSWHRSRVTNSPWCTRRPSRKETRIAQPLRWLERW

SEQ ID NO: 310569 - protein, 458 aa, unidentified
MAKGQRKQPKIGFDEGLKQIRHDAAGLDVGASEVWIDVGIENDAEPVRRFETFTADLNAMADWLKSCGITSVAMESTGVYWIPVVQILEANGIEAILVNAAHVKNVSGRKTDMLDCQWLRTLHCYGLLAASFRPAKDIVVLRSYMRHRQMLIESGAAHVQHMHKAMTQMNLQLQHVISDITGATGMRIIRAIVAGQRDRQQLAALRDIRTKADEQTIAKALEGDYRPEHVFALQQSLELFDFYQKQIGGTDQQIADHLRRMESKVEASHKSLGPARRKSRKRRNHPQWNVREEAFRISGVDLTEIDSINESAALSLIAEIGVNMSPWRTEKHFASWLALCPNNKISGGKVLQRRTRKSASRARDILRLCAQSLKDCRSALGAYCRRMCARLGTPKGITATAHKLALLVYRMLKFGRHYVDIGQDRYQQMYKERTLKNLARKAKDFGFQLVPIAATQVP

SEQ ID NO: 310570 - protein, 338 aa, unidentified
MTCYSGIDLHSTNSVVVVSDEADRVLYERRLPNDLLKIRAALEPYRGELAGVVVESTYNWYWLVDGLQAAGYAVHLANPAAMKRYEGIKHSGDETDAAYLAHLLRLGILPTGYICPPVERAVRDLARKRSQLVRTRTAQVLAVENVFARETGGRMSANVIKRLEVAGLGEYGLGEDVTCSLAANVAVIQALTAEIEKLEARLRQRVRPRPQYRLLKTAPGIGEVLTTTIMLETGPIERFATVGNFASYARCVDSKRLSNGKKKGEGNVKNGNKYLAWAFIEAANFARRYCPEAKRFHDRKRAQTNGVVATKALAHKLARACYHMLKDGQPFDVKRCFA

SEQ ID NO: 310571 - protein, 357 aa, unidentified
MYIVGIDIGKNHHEASIVSPEGKQIGRSLRFATTHKGADSLMSFIFKNIGNFPCVFGMEATGHYWYPIYSFLKAKGYTIYVINPIQSDSLRKMYIRQTKNDSIDSFLIAEVIRFGQFGTTSMADENILAMRQLCRYRDSVISSRTEIKLRIGTIMEQIFPEYEKQFSSLWVSTSMGILEKYLTPENIENAPIDELFEIIKDKSHNKLTMKKAISIREAAADTFGIKIAQDAFSFQLKQLIDRMNFLDKQIEALDIEIMKYYEQFDCYLHTIPGIGIIGAATILAEIGDISRFKNSSALVAFAGIDPTVRQSGEFNSTHNHMSKRGSPYLRHAIFLVATTCSFHNSPLNAYYKKKREQ

SEQ ID NO: 310572 - protein, 362 aa, unidentified
MKQYIGCDAHRKYSVFRIQGESGPMGPAIRVNHERGELERFLGSLEPGSPVALEAGLNWMWMVEQIEKANLEPRLTNPLEAKKRMGGVNKLDSSDAAGLLTLLRSGTLPEVWIPRGGQRDLRGLVRSRLVLRRHVSGLKCRIHGVLTQYGLKPLADEEDETEYRDWFTVKARAALLNAMEELPSATREAMRQEYLAMWELERHVKSLETAIQARAGSLGWMRLLRTMPGVGLILGATIWTEIGEVRRFANAERLAAYAGLTPRTHSSGGKTWRGPTPRAANHYLKWAFVEAANVIAAQRRKMEKKHPHAVRLYERVKGNTKLSGKAKVAVARHLAEASWWVLTTKQFYREPTSAAVASSNNG

SEQ ID NO: 310573 - protein, 408 aa, unidentified
MEVLYARCAGLDVHKDTAVAAVRCVSEPEHREVRTFPTTTSGLLELSEWLSSHGCTHVAMEATGVYWKPVWHILESNFELVLANAQHIRNVPGRKTDVSDAAWIADLLAHGLVRSSFVPPAPVQELRDLTRTRKQLVREVAQHTLRIQKVLEDANIKLASVLSNILGGSGRAIINAMISGEEDPERLAELAQGKARKKQKALVEALRGRTTSHHRNLLKLHMQLIDALEAALGEVDAQVGKALAPIQDGTKLLKTMPGVSDIVANVIVAEIGVDMSRFPSAGHLVSWAGLCPRNDESAGKRRSTRVRKGAPWLKTTLVSAAWAAVRRKGTYLQAQFLRIKARRGAKKAIIAVAASMLGAAFYMLRDGTEYRDLGPDYFVRRDKSKTIGRLVKRLRDLGCQIELKTAAA

SEQ ID NO: 310574 - protein, 474 aa, unidentified
MFVLGCDVSRGYVDITVVNERGELALPPSQADASAQGESRIFRQISALRKNYPQETVIAVMENTGGYEANIAQCFRQHGVPVSVLNPKNIHSFRQLELHHAITDPSSARDIALFALQHLDAIKTEVEGTSERALKRLAHILDALSRDMTRLKNRLDNLLFTVRPELLSLTRGDKPRWLLQLLLQYPIPQKLARGRMSRVTRIPSITPDKARNLISLAKSSRGADNHPDFAPLIVYLATRLLQAMDQEKTLRKELEQRFNRIHPSCPLPTIKGVSSYGAAIILAHIGNVHRFHSAKALVAFFGLDPLVRESGDLQHRRHISKRGPGMVRRVLYMQCLSMCSDPDHPIGRFYARLTKQGKPHYYAITACMRKLTVILYAMLRSGNAFDPNYEDSSKALKQSERDRGRKKLRVAKHARTSLALDVPISTREAKRRKRIIALQNKKREGPHVSCDTSAGSCPKNLNEVTFPWYNVALS

SEQ ID NO: 310575 - protein, 404 aa, unidentified
MWYVGVDWADTHHDLVVLDEAGRRVGSRRVAHSKEGLDELKHFVLSIASDPKELACIIETTHGLLITFLLEAGIPVYPVNPKSANQLRKAAGAKTDQIDAYLLARIGRFELAELRRLEPDSPIVQELKTLTRDQDALIQMQTRLVNQLTACLKEYYPAALHLFSKLRQHSTLVFLQAYPTPERAASASVIQIEATLRTGKHPNPRAKAARIVAEVQRPQLSANAVTSRTKSRLMLSLVKQLLVVIEEITSYDKEIARLFLSHPDKEVWSSLPGAAKRLAPRMLAEWGDDRTRYADASSVQALAGTAPVPFQSGNYAQAHQRLACLKPLRNALYQFAWQSTQQEAWALAYYQRKRAEGKTHSVAVRALANVWARIIYRMWVNQTSYQTATFEAARLAHAPRPHAA

SEQ ID NO: 310576 - protein, 361 aa, unidentified
MKREQSNKLDFKGQNIYVGIDVHLKSWSVTVLSEHSVLKKFSQNPDAEALHKYLTGNYPGANYNSVYEAGFCGFWIHRRLVGLGINNMVVNPADVPTKGKEKQQKTDAVDCGKLARELRSKSLTGIYVPDEAVLEMRSLIRLRSSIVKDTTREKNRIKSLLRFHGIEIPGEFTKHSVGNWSKHFLKWLGEVELSTVYGRKTLDLHIEQLVRLRGMLLQETRTIRSISRQEPFGETIRLLTSVPGIGMTTAVLLLVEIDDINRFANSDSLAAFIGLTPMCHSSGEKDGTGDITVRKHESLRCSMIEAAWVAIRKDPAMTLAYEGFRKRMIAQKAIVKIARKLVNRIFFVLKRKQEYVSCVIR

SEQ ID NO: 310577 - protein, 380 aa, unidentified
MVKAYIGLDVHKTTISIAIAFLGNDAPVSYGKCSSDINRFLTSLRRLMKKHSFEKKDIMLCYEAGPCGFVLARHLLRLGFYTVVIAPSLIPRQSGNKFKTDKRDAKELARHFRSGNLTAVHIPDESDEVIRDLCRARTDAVDNSRRSRQRMLSFLLRNGHHYTGKSHWTAAHMRYLRELVLQNPSQKMILEEYLQTIDSNMQRVADLEENMRTVQAEWSRRKFAEALQGFRGFQLVASMIITSELGDLSRFSHPRKLMAYLGLVPTEDSSGDRRRQGAITKCGNSHARWILVEVAECYRYDPKISRALSYRQEGLSKAVKELSWRAQKRLNQRYVRLAMRRLHKNKIKVAIARELAAFIWELGRIIEKEYSVADFQRQAA

SEQ ID NO: 310578 - protein, 341 aa, unidentified
MEYCGIDLHSEYSQICILDEGGEVMETSRVRTSRKALERFFARDRMRVVIEAGGTSPWVSRLLDSLGHEVVVCSPRRVRLIAESSLKNDKVDAEVLARLVRLDPEFLKPIQHRSEQAQLLRANLKVRSAMVEARTKWINTVRGLLRGFGYKVSGKAPHSFVERVNRMKLPDELSAVITPLLEQLDLLTGEIDRRNEHLEEMVKDLPEVEHLREIPGVGPVVATYFVLTIDDPDRFKNSRDVAAFFGLRPSMRESASVTHFGRITKEGDPDMRRLLVQAAHACLLTKADSELKRWALALAERKGKGKAVVALARKLAVLMHRLWVTGEVYQAFPNNRAAHAA

SEQ ID NO: 310579 - protein, 343 aa, unidentified
MKKITTVGLDLAKSVFQVHGIAEEGDVIVRRALRRSQVLDFFRTLQPCLVGMEACGSAHYWAREIQALGHTVRMMPPAYVKAYVKRNKTDAADAEAICEAVTRPTMRYVPAKTQDEQAAGMVLKTRDLLIRQRTQAINALRAHLAELGIVRATGLVGIVSLAAIVRDDSDLRLPGAARMALEELVEQIETVTARIERLDRKILEAVRKDDSARRLTAIPGVGPIIAATVRAVVPDPAGFKTGRDFAAWIGLTPRAHSSGGKERIGSISKRGNQQLRTLLVAGATSILKLARRGLQPSPWIAAMMLRRPFKVVAVALANKIARIIWALLVRGDNFRGAKMIVQA

SEQ ID NO: 310580 - protein, 346 aa, unidentified
MQSYVGLDVSLRKTAVCVVDEAGKILREGMVDSDPEVIAVFIQSNARNPVRIGLETGATSTWLWTELKKRGLPVICIDARHAKAALKMQINKSDRNDAAGIARIMQCGWYREVRVKDRDSHAVRALLASRALLVELKRDLENQIRGLLKNFGLIIGRAKMTTFTTRATELIEGRPELGVAIEPLLKAREALAGQIEGLDRKVLRLARSEPQARRFMTVPGVGPITALCYLATIDDPSRFKKSRSVGAYVGLTTRRYASGETDRTGRISKCGDEMLRSYLYEAANVLLTRVTKWSTLKAWGMRIAKRRSMNKARVAVARKLAVILHRMWIAGTEFCWTKEGDAMQPT

SEQ ID NO: 310581 - protein, 411 aa, unidentified
MEAAVITAVGIDVSKSKSTVAVRRPGGEIVLRPFDVRHTNSDLKKLTSTLKKLGGDIRIVMEHTSTYWRPIALTLKEAGFFVSVVNAMLIHDFSDNTIRKLKTDRADALKIANYALTFWDILPPFNNEEETRLLLKMQSRANERITATATALRNGLIALADQTFSGVNIAFAPNTKNANGHEKWVDFFLRYWHKDCVCQYSMEAFTESYRGWCKRKNYKFRTDTAHKIYLLAQESVATLPKCESTKMLITQACKSLNAVCEAKQSTQLEMQRLAAMLPEYEVVMQMEGAGPVTGPALMAEIGDVRRFKNKKALVAFAGIDAPPFQSGAFESKSRHVSKRGSPHLRRTIFIISNIILTRSNPENAVYCFMDKKRSEGKHYYVYTVAGSAKFLRVYYARVTEFLRSQPSPDAC

SEQ ID NO: 310582 - protein, 415 aa, unidentified
MTHPKMQYTYVGIDSHKDTHTAVFIDCFFEKLGEITFDNLPVMFGDFLANAQKFLTNGTTFMFGFEDTSSYGRTLAVYLKDHNYRVKHVNSLLVARERKNQNIVQKSDSIDAECAARVLLSKFGELPDADTQDMYWVLHSLVARRNFLVKNKASSKRQLHSFVTQHYPNYRRFFDGIDSKTALSFFDRYPSPGLLKHTTVEELTAFLQLTGSGRYTLDFAQLLLDTLQETGVQHQQYRDTVIQSTIRQIRFAMEELERLEEAMRIFLKEFDCTLTSMVGIDTVTAARMLAYIGDIRKFSTPAKLARYAGVAPVTYASGKKDAQYANHRGNRQLNTLFFNLALRVSYAVGSTHKVVNSFFYDYYNRKISEGKTKKQALKSVQRRLVNIVWTMLTNGENYVNPPMYDLITEQDSSII

SEQ ID NO: 310583 - protein, 367 aa, unidentified
MKKHSSIDQSLSSTDLSACTTLAVDLAKQVFQVAGEDVLGQVRFEQRIKSREAFYEFLQKLPPHVVVLMETGPGAQAWARQLQDQGNSARILPAGLVAKHRSGPKNDRNDALAILRAGRDEKICAVPVKSVAALAMQALHRARQGYVRRRTAVSNQMRGLLLEHGVALAQGDVAISQKIPRVLEDATQPVPALLRELIDELLAEWRHLGERISVLTGRLEVAANADMTAKRLMTVRGIGPVTATALVAKETKPERFPNARKFAAYFGMVPDQHSSGEKIRLGDMTKRGDAYLRSLMIQGAHAVLQQLRPDSQQPDDRRLLHWMSRLGRKEAAIRLANRNLRIVWVLLQNDQTYRRHAGDGQQATMSH

SEQ ID NO: 310584 - protein, 468 aa, unidentified
MPTNRTPKKRPLDDLACVYPNAAGLDIGSAEIVVAVPPERDAEPVRVFATFTADLHALLAWLLACGIDTVAMESTGVFWIPIYELLEQHGIVPYLVNARHVKTVPGRKTDWNDAQWLQKLHALGLLQASFRPDAEIRTLRTLVRYRAELIERRAPHINHMIQALKHMNIQLNLVLTDITGVSGLAMLRAIIAGERDPQHLAEFRQPGCKHSEAEIVKALTGHWDDAQLFVLQQAVDLFDYYTTKIVECDAKLEQHYQAMESRWEPDAPLPDLPPAKPDSKSKNALTFNARAQIARVIGVDLVAVMGLSAVTVQTILSEIGTDMERFPTVKHFCSWLGLAPHNDISGGKVLRSRTMKVRNRANQAFRQAAQSVAKSDSSFGAYYRAMRARLGPKQAIVATAHKIARTVYQLLKTGESYREESAADYDHKRRERERRQLERRAQKLGYTLTALPPNVSESRPEPRSDGSF

SEQ ID NO: 310585 - protein, 338 aa, unidentified
MRAYAGIDLHSTNNYIGIINDKDQRLFKKRMPNNLDVILSALEPFQQDLHGIVVESTYNWYWLVDGLQDHGYTIHLANPSAIKQYEGLKHTDDRWDSFWLAHLLRLNILPEGYVYPKEERPVRDLLRRRMMLVRQRATHILSLQSMITRNLGINMSGNAIKRLTGDDAEQLFKDSCLVLAATNNISVMKFLKERVRLIEQSVLPRVKLRKGFAPLLTLPGVGKILGLTIMLEVDNINRFPKVGNYSSYCRCVKSERLSNGKKKGTGNTKNGNKYLSWAYVEAVHHAIRSYPHAKSFYQRKKAQTNGIVAVKALSNKLCRASYYVMRDQVPFDKEKLFR

SEQ ID NO: 310586 - protein, 347 aa, unidentified
MSLRPSTVGVDLAKNVFQVHAIDDVGEVVVRRALRRRQVVPFFSKLEPCLIGAEACGTSHFWARELCQLGHEVKLMPPAYVKPYVKRGKTDAGDAEAICEAVTRPTMRFVAIKSREQQAMLALHRARALLVRQRTQLVNMIRSQLAEFGIVLAKGIQHALKLVEQLLDGKVLDIPELAAKVVITLAEQLRALQARIADLEKDLVIWSRDDPVVKCLQTIPGIGIITASALVASVTDPHQFTSGRQFAAWLALSPKANSSGGKERLGRISKMGDQYLRRLLVNGTTSRLRWIRRHPETHPWAASLLQRKPAMLVAVALANKVARVVWADMTRGEYYRSPQPSIQEAEA

SEQ ID NO: 310587 - protein, 395 aa, unidentified
MYSLLVGIDVSKDFFATAGIDSEGKESFSGFYSMDSNGFGDFLKTITSHGEDLSKVIVAMESTGCYHINLFSFLTCQGIRTMVVNPLLIANFAKLSLRKTKTDKKDASTIAKFLWVHQERISQLSVSQDLQDLRDLLRERESLCHLMSATQVEIKRVLRTTFPELESIGNLYTGAMLRFLLQYPSARLVRGAKRRAIAKALKGPYVGDKLTYSSEDILRAAKTSIGTVSSAKEIILQGKIATLLHLQERLDEMTKLLADLCKATRIDDLKILRSIKGVGLKTAAPFLAEMGEVQNYASHKKLIAFTGIDPSVHESGNYIGMSKLSKRGNRHLRRAVYLMTAAVVSQNAFFKAYFLKRKREGFPPQKTLFATAHKLIRVIFAMPTQRTYFKPKEVI

SEQ ID NO: 310588 - protein, 328 aa, unidentified
MHYLGIDVAKAKLDCSLLLDPNSAKRKAKSVANTQAGFAELLQWLRKQDIALSNIHAILEGTGVYHEQAAMALCDAGLAVSIINPAQVRDFAKGLAIRSKTDGIDSQVLARYGALVQPGLWTPPSPQARTLQALLSRREAIAQDLQRERNRQEKADATDTPELIRQSLADSIHFLQMQLKKLQQDIDDHIDRHPVLKDDLVLLNSIPGVGPQVGRHLLSVLHRHHFDHAEQLAAYLGLVPVEWQSGSSVLGRARLSKAGPAHLRAVLYMAAVVATKYNPHVKALYERLLTRGKCKMAALGAAMRKLVHLCFGVWKTRQLYQADYAKVS

SEQ ID NO: 310589 - protein, 387 aa, unidentified
MARKRTLSTLDTSIAYEAVGLDLAKEDVALAAFDSEHKEPYLIDRISYDKLYELLADMAPTLVAMEPCSGAHQICEQIEALGHEVLMISGRHVQAWGKDHCNGQKTDLNDAFAILNLAYDRWLTPIRGKTREECRLLALQASYRQLKGQRTKTLVHVKATLHAWGFPIRTGSFNQKVLHELIDANREAFGDEMAETLHLMINRVRDLDHDIATVLKLLTEATKRDPRASLLRSIPGFGILTTSRWCAVIGDIARFDSPKQTMAFVGLVPNNRITGHHTETSSGREARGQGRMSKRGDKMLRSLCILGAGALCLMVRNDRLPDCPFVASIKERLASPRPWFKVLVYVAAKLVRIATALLKYGETFSYEKAGISKAVLKQWELEQAKAA

SEQ ID NO: 310590 - protein, 460 aa, unidentified
MNDYFLGVDASKGYSDFVMLDGKKQIVIENFQLDDTFEGHSQLYELLRRFNQDYPQATIYAAVESTGGYENNWFQSLLNFQGSLPIKTAHLNPLGVSHNSKADLKRNVTDKISAQNVAEYMIAHPEKVSYQHQDSLASLRKQWGFITMLTKQCTQLLNQLESLVYNANPEILAYCKDRTPQWVLKLLTRYPTARRLSRAKVNSLARIPYVSTERAKELIATAKKSVGSANDKVTEQLIVSTVKQILHLKKLIDTQTEILANQCQIPEVELLKTFTGIGDYSAIGLMLQIQTVERFLTSKKLSSFFGIHPEYKKSGDGTYKYRMSKKGRKEGRRILFTVAMTAIQSNPLIREIYQQAVDRGMEKMAAMGLCMHKILCIIYGMLKHNKPFDPQIDLKNRQKKPPRQKKAGPDQNRRYQDFDSKAPVSRRQKMKRKERKQSQNAVDVKHGISEAPVPTDQLAN

SEQ ID NO: 310591 - protein, 387 aa, unidentified
MIKKRGRVIGLDVHPDSFAGAVVEGSDPASAQVLSTSTRVELERLEQWALRHTRTEDTLVLEASGNAFSVAERLGAIGRKVEVLDSHCAGKVGKVYCANDRVDAVKIARIYLSALSPIVWQPDPKTLERREVFSAYQAVVKESTRAKQQLRSMLNEHCVRLEKGFRLCHPNALMRLLALREWTPARTMLLQQLHGSLVAARARRTLLRRHMAQEIVAEEALLRLTRLCGINLITLYGVVAAVGDVRRFSHSKKLVAYLGLNPSVSQSGNFEGSTALKRHGRGALRALLIQSGKKLLQVTNPLQKWGLVVAARRGRNKAAVAVARKLCVALWHVLMGHAIGALERLDTLETKLSKFATEMGPAALHAFGFNNKADFVKKKLYVLRSYP

SEQ ID NO: 310592 - protein, 449 aa, unidentified
MQEPQEIQDEEYEQLVARVAAIDVAKASGMVCTRVPHASAQGRRVTKVWEVPATTGAIIELGGHLAGLGVEKVTVESTSDYWRAFFYLLEAAGLRVQLVNARDVKNVPGRPKTDKLDSVWLAKLTERGMLRPSFVPPAEIRQLRDYTRLRLDLTRDRSRHVQRIEKLLEDALIKLSTVATDIMGKSGRAMLEALIAGERDPKVLAGLARGRLRVKHAALVQALTGRFDDHHAELARMLLDQYDALTAQIDRLTARIEALLAAIPAAEGVDADGTTGPGAGADPGAAVLPAIQRLDEVPGIGRHAAQVLLAELGLDMGVFPTPGHLVSWAKLCPRTIQSGAKRRAGTTGKGNPYLKGVLGEVAAAAAKTDTFLGERYRRIVKRRGKLKALVAVARSILVIVWHLLADPAARYHDLGAGYYADRIDKGKKARNHIRQLEALGFTVTLAPAA

SEQ ID NO: 310593 - protein, 380 aa, unidentified
MKQNTIAVLESKQEFGLTVGLDLGDRMSYYCVLDGAGQKQAEGKVATQKVALEQWLRQLRPSRVAMEAGTHSPWVSRVVQACGSEAIVADVRQVAAIWQNRRKSDRVDAEMLARLARADRQLLHPIQHRGERAQQDLAAIRARDALVRARTLLINTVRGLVKGLGQRIPRCSAECFARRVAEAVPRVLQHILRPCLRALEELNRDIRGYDRKLNAVTRTRYRETRFLRQVQGVGPLTSLAYVLTLENPRRFARSRTVAAYLGLTPRRDQSGSREPQLGISKAGNEYLRRLLVGSAQHLLGPFGRPCELRQWGLHLAQRGGKNGKKRAVVAVARKLAVLLHRLWISHAKYEPWRRGSPPESSTGGRLIPPPVLAEAVSAAA

SEQ ID NO: 310594 - protein, 435 aa, unidentified
MRLQEYGRNPYKRKEYVCHPDLLLVGVDVSKAKHNACMGTQTTMSGRKFEFTHTREGFQRFEQTLKAHLVRNRCQRLLIAMEPSGIYWQALYERLHGCGYEVCLVHCQAVRNNRKTMQEGTSKTDDTDAYSVFDLLRQGKFFLPVARDPELKAAYRLMQRHMALKKRISQLRNQLRAALHLAFPELNPLIKALSQPTALRFLQTTPTPATVLHNGCTAFLERWQRRRHCGQWRADKFHTIYDLAQGSIGLPDPYHLNAFEITALAQDLADALAKHQMYLDKVLELLAPRPDFQLLLTLPRIGRPTAAAILTAIGDIGTYTNGKQLVKLAGLDIRLFESGSSIRKLPQISHVGSAYLRYWLYHYAKRLVAHEPHFRVYYQRRKQQSPGKGAGQRALVAVADKVIRMIYRILTAKEAYTPTKDQMIAQYYAAQRKAA

SEQ ID NO: 310595 - protein, 342 aa, unidentified
MSNRTVISADIAKNVFQCVQYKNDRQVGKNKTYKRDHFAKLITNSRPGKLVMETCSGAQHWARLAKAHGHEVVLIPPRIVTPYRQGQKTDANDAQAIYEASMRKHLKASPHKTVEQQALGVLESVRAHYQSRKNKLSNAIRGHLAEFGLIIPKGYKSLRCQLPLILEDAENGLPMPVRMAINIYWQDWQLAHQKVMALEKEKLTELNQIKAAKEILKIEGIGPVCASGLICTLGDGSVFKRGKEAAAFIGTSPKQHSSGGKVIMVGISKTTGHKKLRSALIQGARSVILKLKARKEPSSEKERWLVQLIERQGENRAAVALANKNVRTAWALLAHNQKYIAA

SEQ ID NO: 310596 - protein, 310 aa, unidentified
MTLKAHTIIAIDIAKESLQIQSPDQAWSLDYEDGALKELIKRLKTLAPILVVCEATGGYERKLLTALHRAKLPVCLVNPYRVRAFASSEGIRAKTDPIDAQVLLRFAQEKKLHPTPPPSPKRLALTALLDRRSHLTSMITQEKNRLKNSSPLIHSMIRKMIRLIETQLQSLEAKLKKGLSEDEEYRNIDKIIQSVKGIGPVTSWTLMAHLSEITSLGRNQIVALAGLAPFNRDSGKSRGKRCIQAGRGKVRKCLYMAAQTAARFNPVIRDYVNRLIERGKPYKWAMVAAMRKLLIHIQSLLKKNKLSLAS

SEQ ID NO: 310597 - protein, 400 aa, unidentified
MISPQLQVAVDVGCHRHRVAVGDVGGELLEEFDVEHSVVGLADFFARIERLRLKLGWPVAVAMEGYNGWARPLDRQVLLRGWRLYNVNNLKLARYKEIFPAPSKSDAIDTRRMLELFRLRGQLRVARNVLQEVGAVAVENDKLKRLTRRRRQLVGEKGRLLNRLQADLQAVCPGLLAITGEADNLWFLSLLACREDLGKIAGLRKSTLLSLEGVGRKYAAVIQAWQKQAVFSPETEWVGPMIVIDAQRVLELKGQIQALDQTIAALVGRSEMARRIDTIPGFGSTCSGELAGEIGAQERFASEASLALYLGMATLDNRSGDSDGTKPPRQVNMRAKAAMMVAVARHVEQVTTSRAFYEKKRAQGKTHNQAVRALGRHLVRVIWSMLKHGRDYELRTVAHA

SEQ ID NO: 310598 - protein, 457 aa, unidentified
MPARGKQPRSGAGSPAHTIDPNAAGVDIGATEIYIAVPTDRDPHPVRKFSTFTEDLLAAADWLKQCGIKTVAMESTGVYWIPLFQILEAGGMKVCLVNARHVKNVPGRKSDVCDCQWLQHLHSAGLLRASFRPEQQICAVRSLVRYRDSLVQLSAMHLQHMQKALDQMNLQLHHVISDLGGKTGMAIVEAIVAGERDPHQLATLRDPRTRASKETIAKSLVGDYRREHLFTLRQSLTGFRQNDQLIADCDVEIESLLKEFSSGEGPGAEAVPEPQAELKRKPRRNEMNFDLRTQLHRIFAVDLTEIPGIDTLTAHTLFTEVGRDLSKFANVAAFTSWMGLCPDNRVSGGKILHAQTRRVNNRVAKALRMAAQALSRSHGWMGQYYRRMRAKLGGPKAITATAHKLARIIYHLLTTGQAYDETVFAQQEAQNNQRNEKRLRHQARKLGFELTLIPTEV

SEQ ID NO: 310599 - protein, 348 aa, unidentified
MRHIGVDLHKTNFVVCFLNENDTSEVETFPLSKAGIACFTGQLKSDDAVAVEVTQNIYYFYDQIKASVGRIVLVDTYRFSVIAKSKKKTDKADALALARFLKLDHLPEVSVPSEKVRQLRHLLQARETLVGLRTKLKNLGHAALTRNGIALSRSAFASQTARERLRKRDDLSAADAVILAAALRQIDELDQEIGRLEDEIVRLGKPMKGIKRLLQLHGMNLLSAISLLAEIGSIESFETSKQLVAYSGLATSVRQSNETVRQGHITKQGRKRLRTVAIRAVLSMVNRTHTPLMSFYQKKKREKGSGKAICATARKLLTIVFVMLKKELDYWYLEERLYNRKLRLLNAA

SEQ ID NO: 310600 - protein, 402 aa, unidentified
MNAVGIDVSKGKSMVAIMRPFGEIVSAPFEIKHTASGINSLVELINSVEGESRIVMEHTGRYYEVLAHQLSKANLFVSAINPKLIKDFDNDSLRKVKSDKADAVKIARYTLDKWQNLKQYNVMDELRNQLKTMNRQFGFYIKHKTAMKNNLIGILDQTYPGVNTYFDSPARSDGSQKWVDFASTYWHVDCVRKMSLNSFIDHYQNWCKRKKYNFSQSKAEEIYGKAKELVPVLSKDAITKLIIKQAVDQLNSASTTVESLRTLMNETASKLPEYPVVMAMKGVGTSLGSQLMAEIGDVSRFTHKSAITAFAGVDPGVNESGSYEQKSVPTSKRGSSDLRKTLFQVMDVLIKTHPEDDPVYQFLDKKRAQGKPYYVYMTAGANKFLRIYYGRVKEYLSSLPES

SEQ ID NO: 310601 - protein, 343 aa, unidentified
MTKLNVIGVDLAKNVIQVSVLSPSNQELRNSALTRRKFAEFLGRQRPSLVAFEACATSHYWARVAQRHGHDVKILPAKAVFPFRQGHKTDENDALAVAEAARRPKVKLAPLKTVEQQGMQAIQRSRELLVHERVSLSNHLRGLLMEFGIVIPQGFASLYRLLPEILEDGDNELPDLYRPTLDLLYGRLCDLREDLERLNREIEILVQANPVCRRLTALEGVGPIGSVLLYATLGTGEAFVNGRQFSAYLGLTPKQFSSGGKVNLIGISQRVANKRLRAVLIQGARAYVYHMKEPKTAKDRWLWAIVVRSGKCKAAVALANKNVRTAWAMLTQNTEYQRYPLAA

SEQ ID NO: 310602 - protein, 410 aa, unidentified
MEHRIITAVGIDVSKYKSMVAVRRPGGEVVMGPFEVQHTAAGIAGLVSKLAALDGEVRVVMEHTGMYWRPVAMALKQAGFFVSVVNAILIHRFSDNSLRKVKTDKADAMKIANYALAYWSDLRDYSETDETRQLLKVQCRLYERTIKTAKSLRNSLISILDQTFPGANNFFPTSYRNAKGHYKWVDFVRRFWHKDNVAAVSIQSFSESFRKWCKRTGYHYSQADAERIHRHARESVATFKKNDSTKLLITQAVDSLNAVYEAAEALRGEMYRLASLLPEFDVVMNMQGAGPITGPQIMAEIGDVRRFTHKGALVAFAGVDAPPFQSGTFDSKNRHVSKRGSPHLRAALFRVCSVILQCKDEGNAVYAFMDRKRAEGKHYYVYMVAGAAKFLRIYYARVKECLAAGGEGWV

SEQ ID NO: 310603 - protein, 406 aa, unidentified
MAVIIGVDPHKASHTAVAIDDKERPLGELRVRSSADQVGRLLSWAARWPKRTWAVEGAGGLGYLLAQQLVSAGETVLDVQPKLGSRVRLLATGNVNKNDPNDARSVAIAALRSKSLRPVAAEDHAAVLKLWSKRRRDLGSLRTQAVCRLHSVLCDLVPGGHPRKEITAAQAARILASLEPLGAVAQARYELAVDFLADVRRIDAQMAEAKKRLEVAVKASGTTVTEVFGVGPYVAATVIGYVVDVGRFADRDRFASYNGTAPIEVSSGGHKVFRLSRRGNRRLNHAIHMAAVTQVSHRHSEGRAYYDRKVKEGKTTKEALRCLKRRISDAIFAHLVADTKRKAEAAKAGPRGQRGNGSVSSVAGSHPQRQLFGQATPRPVPTLRRPASSRGRDTQEPARKKSRKAS

SEQ ID NO: 310604 - protein, 343 aa, unidentified
MKITRVGVDLAKNVFQVHGVNRAGRCVWKRQLKRSNWLQVLTETLEPGCEIGMEACGGSHHWARELRSRGFVVKLVSPQFVKPFVKSQKNDANDAEAVCEAISRPSMRYVPIKTAEQQDLQAMHRVRDTLMRHRKAKANQIRGLVAEYGIVAPKTIVPLRRAIPDWLEDAENGLSDNFRALLYGLWEDFQQLEQRVKDVDRQINIVSNTNPDAKRLKQLRGVGPLVSTALVAQFGDGRQFTRGRQASASIGVTPRHAGTGGKNLIYGITKRGDPYLRSILIHGARAVVSQAKRRDDALSRWVTDLADRTHTNVAAVALANKTARMAWAMLRYGTDYDPELARA

SEQ ID NO: 310605 - protein, 398 aa, unidentified
MTESSDCESVQVFIGVDVGKDTHHAVAINRSGKRLFDKALPNDENKLRSLISDLKQHGQILLVVDQPATIGALPVAVARSEGVLVGYLPGLAMRRIADLHAGEAKTDARDAAIIAEAARTLPHALRTLKLADEQIAELSMLCGFDDDLAAQTTQASNRIRGLLTQIHPAPERVLGPRLEHPAVLDLLQRYPSPEKLASLGEKKLAAQLCKLAPRLGKRLAADIAQALAEQTVVVPGTNAAAVVLPRLALQLITLRKQRDEVALEVEQRVLAHPLYPVLTSMPGVGVRTAARLLTEVACRAFASAAHLAAYAGLAPVTRRSGSSIRGEHPSRRGNKALKRALFLSAFAALRDPLSRAYYTRKMSQGKRHNQVLIALARRRCDVLFAMMRDGTFYTPQGS

SEQ ID NO: 310606 - protein, 320 aa, unidentified
MYKNNEFIGIDVSKDTFDVWSPAFGHLCFSNTTVGFKAFVKQISSHSWCVMEYTGSYYQLLAHYLYDKGIAVSVINPIVIKRFIQMKLQHNKTDKSDAKMIALYAQEQSLEAWIPDPAYINECKVLNTTIRLYFKQSTALKHKIHSLESKGIKGLLIQSLKRQIKQLKKEIKYLEGNVEILIKDHEPEMLSNISSISGIGKKTAIMLIASTYAYKSFDDYKQLTAFFGLSPIERSSGSSIRGRSRISKKGNPLVRNYLFLCSFTACQYNPQCKALYERMVAKGKSKKLALIAVCNKLLKQSFALAKSGLAYDPAYKSRLV

SEQ ID NO: 310607 - protein, 375 aa, unidentified
METTRQALMNDTSVVRILYMALELSGDKWKVAIADGQRAPSQRSIAAGDTSELLQVVEKAKTRCRLPGVVRVLSCYEAGRDGFWLHRWLLEQGIENVVVDSSSIEVNRRARRAKSDRLDAAKLYEMRIRHSVGEKRLWRVVRVPSVQQEDERRVHRELERLKRERNAHLNRMRSLAVLHNVRLGKVGGRGWSERLPQLKEQLPAGLWAEIERESVREQLVCQQMHTLEKSRQEQVKHMSAGPLVALLKLRGIGLTSAWLLTRELFGWRGFGNRRQLAGCAGLNPSPYDSGDCQREQGISKAGNRRVRALLVELAWYWLRYQARSALSAWFTRRFAAGGKRMRRIGIVALARRLLIALWRYVEHGVIPEGAQLKSA

SEQ ID NO: 310608 - protein, 476 aa, unidentified
MVLPNKEPKKSRKPKDPAKPKKSRERSLPVPVPASSAGLSVVNPDAAGIDVHSNMHMVCVPADRDADPVRQFGANTADLHEIVAWLKKCRVRTVALESTGVYWIPLFELLESEGFDVNLVEPGQLSRCGARPKTDVLDAQWIQRLHSYGLLRGSFRPSESVLALRAYWRQRQMQVRYAASHVQHMQKALEQINVKLAEVVSDITGLTGMSIIEAILGGERDPVKLAKLRDERCHCSEDQIALALQGTWRPEHLFELRQAYELYQFHHKQITECDNQVQAELAQFPNRAGEKTRTHKPRKRGRKSNDLRFDATGPLFKALGVDLTLIDGIDVGTALVILGEIGVDVSRFPTEKHFASWLRLCPPQDESNNTKKRRRRRKNTSRVATALRLAARSVGKTMTPLGLFYRRIRSRIGALGAVKATAHKLACLIYRMLKYGHEYVVQSLEEYEAKTKANMLKVLQRKAAAMGFQLTPIPTQ

SEQ ID NO: 310609 - protein, 343 aa, unidentified
MPELYYIGLDVHKKTISYCIKTRDGTIVARGTIEATRAALTAWAGAIHHPWVGALEATLFTGWIYDHLAPYAVELQVAHPAMLKAIACGKKKNDRLDASKICDLLRCDLLPRCYLAPPAMRELRRVLRYRHLLVSEAVRMKNKISGLLLEAGEPYDARRLHGRKYFHEHLDSLRDTPESVIELLTITRGSLEMFDSLQRRLLRGLDRHPLLRERVELLRSIDVVGEVTALTWALEVVEPRRFGSIGRTVSYCGLCSAQRESAGKAQRGPLSKQRNKHLQRVLIEAAKLAPRWNPQLRAVYERELKRGPRNRATLAVARKLVAYLWAVDTSGRPFVPRVEGEAA

SEQ ID NO: 310610 - protein, 413 aa, unidentified
MALKIVYQICCGIDVHKTFVVACIASTNKGVTTYKSHRFSTYTKGLKELLKWLCENNCNDVCMESTGKYWIPVFNVLEDSCNITLAHPKYVKAIRGKKTDKKDAKWIADLFKHDLIVGSFMPPLAIRQLRDLMRYRFKLTNFMSSEKNRLQNSLTVSNVQLGNVVSDTFGKSSMNIINKLLENPLDISFDIEPLIHGSMKNKLPELELAIDGFITPEQAKKIKVIKQHYEDIKSRKDDLEKIILSLSVPYAEEINLILTVPSFKNIFSAIAVISEIGVNMDVFPTAKHLCSWAGLTPTNNESAGKKKSVRISRAGCYIKPLLVQCATAVVKSEKHPEIRNRYLKLKQRRGHKKAIIAIARMLLTAIYNILKKKEPYNAELYRKSDVLPASREITVEQAILLAKTQGYRIKAAS

SEQ ID NO: 310611 - protein, 395 aa, unidentified
MVSLFVGVDVSKDFFSAAGLDGEGKELFSGFYEMVSNGFSEFLKTLSSHDENLNQVLVAMESTGCYHINLFSFLHDKGIHVVVINPLLISNFAKLSLRKTKTDKKDAKTIARFVVAHQDSISQLSLSQDLQDLRDLSRERESLCHQITATKVEIKRVLRTTFPELESIGNLYTGAMLRFLQQYPSARLVRGVKPKAIAKTLKGPYVGDKLTFSPEDILRAAKTSIGTVSSAKEIILQGKIATLLHLQERLDEMTKLLTDLCKATRIDDLNILRSIKGVGLKTAAPFLAEMGKVQHYASHKKLIAFAGWDPSVRQSGKFVGISKLSKRGNRHLRRAIYLMTASVVSQNAFFKAYFLKRKREGLPPQKALCATAHKLLRVIFAMLTQRTYFKPKEVI

SEQ ID NO: 310612 - protein, 358 aa, unidentified
MNRNAGMNVGQIIGTMNGQQVIGLDIAKHVFQMHTVDMGTGEVINVQIKRAKVLEHFANKSSSLIAMEACGGAHHWARALVVLGHTVRLLHAKAVRPFVAGNKTDATDARAIWLAVQQPGVKFVGIKTTAQQATLTLHRQRELLMKMRTMQTNALRGLLYEFGATFAQGRKALFKDMEQTLEELSAQLPQMVTDSLREQLERVKALSQDIQLIEKRLGLQLKADTQMQRIAQIPGVGLLTATAAIATMGQASAFKSGREFCAWLGLVPKQTGSGGKVRLGGISRRGDTYLRTLLIHGARSVLSHAREPGPWLAQIKARRPANVVIVAQAAKMARTIWAVTAKEQAYQLGFKSVRPLAA

SEQ ID NO: 310613 - protein, 348 aa, unidentified
MLIIGCDYHPGFQQIALVDTETGEADERRLTHREEAEQFYRALKTPRVRIGMEASGHARWFERLLMELQFELWIGDAAEIRTKRVRKQKTDRQDAQLLLKLLMEDRFPKIWVPDAANRDLRQLLWHRHRLVQMRTRIMNQLHVVALNEGVRRKKALWRPAGRSELESLVLAPWASRRRQDLLDLFDHLTPKIHDLTRALEEEAQKRPVARRLMTHPGVGVLTALAFELVIGTPERFGCGKQIASYVGLVPTEESSGDRRRLGHISKQGNALLRFLLVEAAQVTVRSQPQWRSKFFHLAMRRGRKIAKVAMARKLAVHLYWMWRQGLDYGQFEKLGSHAGEPGNRHGAQ

SEQ ID NO: 310614 - protein, 342 aa, unidentified
MTVIGIDAHKRSHTCVAVNDAGAKVAEKTVASTSAGHAQALRWALTRFGTDLSWGVEDLRSMTGLLERELLAAGQKVVRVPPHVMARHRGSARAWGKSDSLDALAVARAVLREPNLAAAFHDPISWELRLLVDRREDLVGQRVAVTNRLIGRLHQLSPDRPKPAHLERTKSQLALAEYLREQHGLLAELARQELADIGHFSRGISTLTEDIVRRVRELDSTLLQLQGCAELTAAKLISETANMDRFRNEAAFARYVGVAPVPHSSGTEVGRVRASRSGNRQCNTAIHRIAIVQLRLKGPGREYYLRRRNEGDTAYTAIRCLKRRLCRIVYNRLRADYQHRNL

SEQ ID NO: 310615 - protein, 428 aa, unidentified
MADPINATPADNLVAIDVARYWNAVLIETSAGKRHRFKMANTAADFDRLVKFLHALPGTCRVALEPTGDYHRPIAHRLLVEGFEVVGINSVAQSRYREAMFNSWDKNDPKDAVVILEMLKRDAVQCYVDPMLAGNHDLQELAKTYYQVSRARTKVQHSLINHSLPLYFPEMHRYWATTRNEWFVRFLLHFPTPAHVRACTCEQFIAAAWDLVGRKVNKRAKLAEIWEMAATTTALPHDLDCLAVETFRITLRRYQALNALRAELEQRAERALAESADFAHLKTLPGVGSVIAMTILAEAGNMRRFRHHRQFLKYCGLDLAKTQSGMQRGQEQLSKRGNARLRLSFWLAAVAAVRMKENSFRDKYERYIRAAPDDRDLRRKALTAVAAKMARVAYSIVKTNQPYRRFFDQGLPSGSIPLSAAVGAHATP

SEQ ID NO: 310616 - protein, 408 aa, unidentified
MQIEHPVCCGIDVHKDMLTACLRRVDTNGQVSKEGREFATTYPSLLALSDWLVEQHCPVVAMESTGVYWKPVYHVLAGVVEVFIGNAHEMRSRPGKKTDKRDAAWIAELLAHGLIRPSFVPPPDICALRDVTRTRVALVQTRSQSKNRVHKLLEATNLKLGSVVSDLFGVTGRRMLAALVAGERDPQVLASLALGALKHKRPQLELALTGQFTDHHGTLLGLLLELIEVLDRQIATLDQQIGTLVAPLQRQIAQLDSIPGVDIIAARDILAEIGTDMSRFGDAARLASWAGVCPGNHESAGKRYRGKTCKGNRYLRRVLVQCAWGARKTPTFLGRTFRRLEVRIGKKKAALAIAHKILVIVYHLLMLGTSYEEARYDQYNPRQEARERQRALKALERLGYTVTLERAA

SEQ ID NO: 310617 - protein, 342 aa, unidentified
MDYYAGIDVSLECSSVCIVDGGGKIVGEDKVSSTPEALIGWLACFGHELGRIGLEAGPLSQWLYAAMKQQGLAVELLETRHVRDAFKAMPVKSDRNDARNIAQLMRLGWFRPVHCKSLAAQEVRAMLTARKLVQSKLLDVENSLRGILRGFGLKVGNTTRRRFAGRIEELVAGHPSLQMIAQALLRARAVLLAEFNGFDKQVRQASRLDAKARLLMSTPAVGPVISLTFASAIDDASRFTSAKQAGPHFGLTPKKYQSGETDYSGRISKIGDASVREALYEAAHIILTKPIKGCAQLKSWATRIARRAGMAKAKVALARKLAVIMLRMLKDNMPFNPAAKAA

SEQ ID NO: 310618 - protein, 384 aa, unidentified
MDQASPSTASANILHCALELSKKSWLLAIQFPDREQPSLYPIAGGDAEKLMAKLTQARDRWAKTSGALPMITLCYEVGYDAFWLARCLKARGVECVVIDPGSLQVSRRGRRVKTDRVDVKTLLRTLIAWCRGERHVWSLVRIPSIDEEDLRRSHRERSRLVRERTAHINRIKGLLFAQGIRDINVKSRYKTLAVDELVTGDGHRLPPRLAGEIAREIRRLATVQEQIAEIERERDAAPTTCEATERKRDLLSQLKSIGPAISAFLSREVYYRQFANQRQVGSFLGLTPSPYDSGDEERCQGISRAGSGHARAVMIETAWLWIKHQPKSALSRWFVERTAGQSKRVRKIMIVAVARKLAIALWRYVELGLVPQGAILNPRMKARS

SEQ ID NO: 310619 - protein, 349 aa, unidentified
MSQNLNSAVAVIGIDIGKNSFHVVGLDNRGAIVLRQKWSRGQVEARLANMPPCLIGMEACVGAHHLSRKLKGLGHDARLMPAKYVRPYSKGQKNDFRDAEAIAEAVQRPTMKFVATKTADQLDLQALHRVRERLVSQRTGIINQIRAFLLERGVAIRQGLRFLRAELPRVLAKPSDVLSARMVHVIESLTEDWRRLDERIDQLSGDIAALARQDAGCERLMSVPGIGPIISSAMVAAIGAGEVFSKGRDFAAWLGLVPKQISTGDRTILGKISKRGNRYLRVLFVQAAWVVLIKPQSWDRHGLKAWLDAAKKRLHRNVLAIALANKLARIAWSVLARGRTFEASKLQAA

SEQ ID NO: 310620 - protein, 457 aa, unidentified
MSKRKSKAKRKSFNVPKLPRHLQHMNLNAAGIDIGSEQHMVAVPEGRDTVSVREFGTFTTDLEAIAAWLKKCGVTTVAMESTGVYWIPLFELLERRGFEVKLVDAHHVKNVSGRKSDVLDCQWLQQLHTYGLLAGAFRPADEVCVLRSYLRQREMLVQTCSRHIQHMQKALQQMNLLLHNVVSDITGVTGMKIIKAILAGERDPRRLARNRDEGCHNSAATIAKSLVGNYREEHLFALRQAVDLYEIYQAKIADCNQAIIKQVEKQPDISDDEPPPPEKQVQARDRIREGVDVRDLLFKKSGVDLFAVPGLAADTLLVLASEVGFDMTPWKTEKHFSSWLGVCPGTKKSGGKVLNNQAKRNPNRATQAFRMAAASLHHSQTALGAFFRRIKSRAGGPYAVTATAHKIARIYYAMLTQGTSYVELGQQAYEKRYKERRIDQLKVQAKSLGFQLVPCVS

SEQ ID NO: 310621 - protein, 382 aa, unidentified
MDVLHACCAGLDVHKKTVVACVRRVDPAGKVSQSIKTFATMTADLLDLSDWLAGQGVKVVAMESTGSYWKPVFNLLEPRFEVVLVNAYHIKQVPGRKTDVRDSEWIAQLLQQGLLRPSFIPPRPTRELRDLTRQRTQLINEKTAVINRIQKVLEDANVKLGSVASNALGVSGRLMIEAIIRGEYDPVKLAELARSRLRKKIPQLRQALRGGVTEHHRFLLRTQMNHLDHLEQLIIQYSQRIEEALDPFAAVLARLVTIPGVDFRVAEVVVAEIGLDMSRFPTAGHLSSWAGLASGNHESAGQRRTGRTTPGNIWLKTSLVQAAWAAFRAKRTHLSRKFRRIAGKRGQKRAAVAVAHTILVIIYHLLKEETTYQEIAGESEAA

SEQ ID NO: 310622 - protein, 413 aa, unidentified
MEGYYVAGIDVHKAVLMVAVSEVKPGESEFQRRRFGTRREQLREMVCWFRELGVQEVVLESTARYWRPVWIALEEAGLKRHLAHARSNGARRGRKSDFRDAERLVHRLVAGELVLSYVPEDEQQGWRLLTRTRYQLVCERGRVRSQLEGLLEDAQIKLSSVITDLLGASGRRILEALAQQQGPYDAEKLAELGHWKLRASREQLVEALDGRWLDRHRLLLKLHLERIRQLDLQIEQLQLQTAVAMQSCQAAVARLIQIPGIRTEGALQMLAEIGPTAAAFPSPGHMASWVGVCPGQQESAGRCYSQHSAKGNWQMRRLLSQAAHAASHAKGSFFESLYRRLVVRIGPQKAIWAVAHRLCRLIWKILHQGVQYLEPGTSILAPKAIRRKQQRITAEFRKLGFQVHFTPLLRVTQ

SEQ ID NO: 310623 - protein, 371 aa, unidentified
MKRTIFVGLDVHKQWINVAVLLPGQDTPIEWRIVNEPQAIRRMLKRVAELSPGDVRYCYEAGPCGYALQRQIISWSDASCMLVAPSLIPRKPGERIKTDRRDASKLAHLFRAGLLTEVHPLTEEDEAARDLSRARDDLREDLTRARHRLSKFLLRRAITFTGKKAWTNAHRRWLESLRFDNPADSAVVADYLLAIEHIEQRLKSLLVHVERLGHDPRYAKAVATLRCFRSIDTLSAVGYAVELHNFERFTSARRLMSFVGLIPGEHSSGEKRRQGSITKTGNSHVRRLLIEAAWNYRHRPHVGASLRERRKGQPPRVIALADRAMLRLHRRYERLTHRGVLPQKAVVAMARELAGFIWAALSPLASQAAAH

SEQ ID NO: 310624 - protein, 350 aa, unidentified
MIIVGCDFHTRFQQIAMVHPQTGELVECRLEHETGEARRFYASLSEPARVGIEATVNAQWFEKLLREYHHELWVGDAAEIRAARVRKQKTDSRDALHILDLLLTDRFPQIWIPSPAQRDVRQLLRHRHKLVGFRTSVMNQLHALAIGQGLCRKQKLWSKVGRIELQSLVLDPWANRRRQDLLQLLDQLNPWIAELDRAVMKEVQSRLEAVQLMNEPGVGPLTALAFVLTIGPIARFQRSKQVVSYLGLNPIEESSGGKQRLGSISKQGNPMLRHLLIEAAQAASKFDPELRRDYQRLKFRRGSGVAKVAIARKLAVRLYWKLRETAQPNTATRMQGSPMNAVVDQSPSPK

SEQ ID NO: 310625 - protein, 387 aa, unidentified
MARKRTLSTLDTSIAYEAVGLDLAKEDAAIAAFGPDHEGPYLIDRIPYDKLYELLADMAPTLVTMEPCSGAHQIAEQIQELGHEVMMISGRHVQAWVKDHCNGQKTDLNDAFAILNLAYDRWLTPIRGKTREECRLLALQSSYRQLKGQRTKTMVHVKATLHAWGFPIRTGSFNQKALHELIDANREAFGDEVVETLHLMINRVHDLDHDIATVLKLLTEATQRDPRASLLRSIPGFGVLTTSRWCAVVGDIARFDTPKQTMAFIGLVPNNRITGHHTETSSGREARGQGKMSKRGDKMLRSLCILGAGALCLMVRNDRLPDCPFVASIKERLASPRPWFKVLVYVAAKLVRIATALLKYGETFSFEKAGISKAVLKQWELEQAKAA

SEQ ID NO: 310626 - protein, 347 aa, unidentified
MNYIGVDCHITSLDFAVVNEKGHTTRRAKVETSVKEFMKFVKNVAKPRRIFIEEGELASWLLETSLTFGEELIITDPKTNKWIGKSGQKDDAIDAEKLAQLARGRYVKEIYHPVNNRRRFKELVYAYHDTVKSQTRIKNKTKAKFRREGIRCNGATVYSEKHRKEWRKKLPGNKVVHLIINELWGQLDQIQNAREELKRNIRIHGKQYPEIKRFRNVPGIGLIHASTISAIIETPHRFANKKKLWMYAGIGLAERRSGEKVYSRRLTREYNRLLKNAVKQASEAAIYSKDNQFRRQYLRLTIEKGIPSHRAKLTVARSLLAALYGMWKKGEAYDPEIDNKRRKENKK

SEQ ID NO: 310627 - protein, 485 aa, unidentified
MAKVKLSAFDRLRLGARLNRKERRDVEQRLSATDPGLEIVNRDAAGIDVGNESHYVAVPRGRDAQPVREFGSWTAALVEMAQWLMGCGIRTVVMQSTGVYWIAVHDVLQKHGLEVNLVDARGTKNVPGRKSDVQECQWLMRLHTYGLLRSCFLPAPEIHGIRTMWRLRDQHVKDAARCIQHMQKSLIAMNVQLHNALSDISGRSGQAIIRALLAGQRDAKSLAALRDPRCMASEEEIVHSLQGDWKADVLFELQQAVDAYDFYRQQMAKCDEQLKQYMALLPARKVETVVSSAEPAATTDRSKTSRSRKPRKPKGNQPAFDLEAELERILGVNATTIDGINVITVQTVLAEVGPDLSAWKTEAHWSSWLNLAPKRDVSGGRVIRHIREHRTNRVGNAFRMAAWTLLHSHSYLGARCRYLRAKLGGLKAVKAMARVLACLYYRLVTKGQRWVDQGIEEFNRRSEQRELAVLQRKAHKHGMHLVPTS

SEQ ID NO: 310628 - protein, 340 aa, unidentified
MKLYTGIDLHSSNSYVGIIDEPGKRVFKKKLPNDPATILDTLAPYQNDIVGIVVESTYNWYWLVDLLMAEGYTLHLANPTAIQKYSGMKYSDDQHDAFWLAEMLRLGILPVGYIYPKEDRPIRDLLRKRSHLVKLRTSLVISLQNIINRNNGFKLRGNKIKALTTDHVAPFLETNEDLALAGKVSKDSIDFLTRQIKVIEATIEEKVELREPYGKLLTIFGVGKILGLTIMLETGPIRRFEKAGNYVSYCRKVSSKWLSNDKGKGKGNKKNGNKYLAWAFSEAAELARRYYPEARAYYNRKMQATNFMTAHAALAHKLARAAYYVMRDQVPFMPKKLFES

SEQ ID NO: 310629 - protein, 332 aa, unidentified
MNLNLQGGAANRERGLNAGIDVSKAHLDACWGAEQLRMTNDPVGWGALVAKFKEAKVDLVALEATGGYERGIVAALQGAGFDVARLNARQARDFAKSLGRLAKTDRVDARVLRDFADVLARHDARHKFITPVPDPQREQLNALMTRRRQLVDIRVEEGNRLESAHRLARRSILALLKTLDKQIETIDKDIGDRLDQHFKEQRKFLDSVKGVGPVTILTLTAALPELGQLDRRAISKLVGVAPLCDDSGPRNGKRRAWGGRSQVRTVLYMAALSAKKHNPVIKAFHDRLIAAGKPKKVAIVACMRKLLTILNAMLRDHALWDPTKHIERPKTA

SEQ ID NO: 310630 - protein, 346 aa, unidentified
MNLLKQVLGIDVAQKELVVSLGRMNADLSIDLYAKRVFANKESGFIALIKWVGKLTDESIAVHYVMEATGVYHQKFAYFLDGKGYQLSIVLPNKISGYMRTLDNKTITDSTCADAIAQFGLERKLDPWQRPNILYKKIQQLTRERSQVVDERVIAKCQLHAENAEAQPNDNSIKRLKSRIRFLNQQEKEIKQDIEACIKEDDAITKNIKNLTSIPGIGRLTAAIVLAETNGIELIRNKKQLTSYAGLDVREKQSGTSVKGKPRISKKGNRNLRKSMYLPALTAVKHINDYKELYARLVSKSGIKMKGLVAVQRKLLELTYVLFKNNTTFQNDYKQEKSATAKADTL

SEQ ID NO: 310631 - protein, 339 aa, unidentified
MAILYVGIDLAKNVFAIHGVDEHGKPALVRPSVPRARLHQLVAALPPCTIGMEACSGAHHWARLFAKQGHTVRLMAPKFVAPYRMSGKRGKNDAADAQAICEAVQRPNMRFVPVKSQDEQARLCVHRVRQGLVEQRTATINRIRGLLSEFGIVLAQKAATVRREAAAHLEDLPGWANTAVGDSLSELHRLDERITEYDRHVVHMAREDERSRALMQLSGIGSTTASALVSTIGNARDFKNGRQLAAWLGLVPGQYSSGGKTRLGGITKAGDGYLRTLLVLGAKAVLAAARTKHDRLSRWAMALEVRRGYWKAVIAIAAKNARMAWAVLAKGDEFKPLVA

SEQ ID NO: 310632 - protein, 319 aa, unidentified
MSTIIGVDVSKDSFDTAFEKDIKKYVQGKFDNCSEGFCLFYDSMPQGDRVIVMEATGPYYLKLAYFLHEKGEKVAVVNPLKIRRFAQMRFERVKTDKADARIIASYGRNEELKLWEPLEEHIVDIRQICSVMERMVKDRTAWKNKHEALKNDPKHSLMAMREIEEMMAYITKKLEDLENKLDKIIKDHFDDQNKIIRSIPGIGPKTAIILLALTNGFTRFDNYKEFISYVGLSPRIYNSGTIKGKTHICKLGMSRARQLLYMAARAASKYNTACKLLYERLLEKGKAKKLALIAVANKLVKQAFALTSKSELYAKDFAL

SEQ ID NO: 310633 - protein, 459 aa, unidentified
MRARQGNGQLVSVCDTSCPQRHPIGRQESTQREEGHLHATYAGGETGRYVGLDVHRRYATVAAVDSQQQVVVTARRVNFEDFELWIRKHLRPTDAVTLEATNNAWYLHDLLVPLVASVTVANPIQVALIARARVKTDPRDALALARLLAAGLLPSVWVPPHEVRELRALVAHPVRLVKQRTQVRNRLRAVLFRHNLVAPPGEVFGPEHRSWWNELTLSTSEQLRVRHDLTILDCLELLIKEVEAEVVRQSSLEPWAERVAFLVQLPGIGVLNAMLLLAAIGDIGRFATASKLVGYTGLGASIHSSGQEHYGGRITKQGRREVRSTMVEAAWVAVRSHPYWKAMFERLADRLGRPKAIVAIARKLLVVVWHVLAEQVADREAQPERVAGKFLDWSWKLGRANRAGLTTAAFIRRELERLKLGDGVTAVHRGNRTFRIAPPEPSERSGAVPSGERAVLPSG

SEQ ID NO: 310634 - protein, 348 aa, unidentified
MTVTIVETRAITGGVDTHADAHVAAALDPIGGLLGVQEFPATAAGYAQLLDWLGAFGTVCLVGIEGTGSYGAGLARHVTTAGVRVVEADRADRQDRRRAGKSGPLDAVSAARAAQSGRARGAPKGRDGAVEAIRVLMVAKRSARAERTQTINQARALILTGPDDLRARFSQHDTADLVAELAALRPRPGDVVGYATRVAVRELGRRAEFLDGQLGRLDELIVPLVTARAPGLLALYGVGPDTAALLLVAAGDHPERLRSEAAWAHLCAVAPIPASSGKVTRHRLNPGGDRQAGHALWRIVITRMSSHPPTRAYVARRTEEGLSKKEIIRCLKRYAAREIYPHLRAAAR

SEQ ID NO: 310635 - protein, 465 aa, unidentified
MTPHTDAFPDPRPPAPPLPQPSVLSEALQVCHPHAAGIDIGEAEHWVAVPPGCDPQPVRRFSTFTADLDALADWLIDCGVTTVAMESTGVYWIPLFELLEARGVQVLLIDPRQAKRAPGRPKTDRLDCKWLQRLHTYGLLAGAFRPDDQVCVLRGYLRHRQMLLTYAAHHMQHMHKALEQMNLKLTQVVSDITGVTGMAIIKAIVAGERDPVTLAKLRNPHCQHGEDEIAKALQGTWRAEHLFALRQAVELYQFYHQQVALCDQQIKAHLETFADKSAGQPLPPKAHRHKKTNEPHFDARTPLYRLAGVDLTTIEGIEENTALVILSEIGTDMTRWPSVKHFCSWLGLCPQHQISGGKVLSRRVRPGAHRVTVALRLAARSLHHSQSALGAFFRRMKARLGTPKAITATAHKLARLVYSLLQHGSAYVQQGLEAYEAQYRERKVTTMAKQAKALGYTLVPLVAQG

SEQ ID NO: 310636 - protein, 317 aa, unidentified
MAQNGTIVGIDVAKGKIDAAIRFGAEASFANSAEGHRELLAWLNEHGVCKAVMEASGGYEKSWARLLRGAAVEVVIADPNRVRHFAKSAGQLAKNDPIDARMIAWFGAVFGQASGQPHDEERQELDQIVTARLGIVRLKEQIESWREHEQPKAVQKAQQALLKAVALQLAKLETIIAAKIDKTERFAQRAEIIQSVPGLAGTAAAGLIAFLPELGLVDRQAAAALLGVAPFDADSGQRHGPRHIQGGRHKLRKLLFMPILSAATQHNPVLKARYQRLIAKGKKAKVALIACMRKLIGILNAMLARGAKWDPAKHAVA

SEQ ID NO: 310637 - protein, 358 aa, unidentified
MVIGIDPHKQTHTAAAVERATGELRGERTVKARAQGHEQLLVWARALDGERLFALEDCRHVSGSLERFLLARGERVVRVPPRLMGEARKGGRSVGKSDAIDALAVARAALREPGLPAAFLAGSEREIRLLHDHRADLVAERTRIQNRLRWHLHDLDPEHEIPAGALDRRLWLDRIGRRLARLAQTAQVRISRELVGRCRELSRRITELERELEALVAAEAGELLELVGCGPLTAAQLVGEVAGVERFATDAKLAKHGGSAPLPASSGQKQRHRLNRKGNRQLNCALHRIAVNQGRHYEPARAYLARKEAEGKSRREALRCLKRHLTRVVFRILKAIAARRTSQPSTTPTVPQIAVGLT

SEQ ID NO: 310638 - protein, 356 aa, unidentified
MSRDVKYIGMDVHKEAIVIAVLNDGGKLAMESIIETKASTLLQFIHGLRGELHVTWEEGTWAAWLYDLLKPHVHQVLVCDPRRNALLKEGNKSDKVDARKLADLLRTGMLQPVYHGEHGLRTLRELGRSYQTISKDLNRVMNRVKALYRGWSIPCAGTQVYAPRCRQEWLDKIEHAGVRRRAELLYEQLDGLQALRRTLRPELLAESRKHKAAKLLRQIPCIGPIRAARLIGLMQTPHRFRSKRQLWTYSGLGIETHDSAQYCYVNGQLQRSKKPQQIRGLNRNHNHEMKEIFKGAATRASCGVGPLRDFYVTLLDKGMKPEMARLTLARKIAAIALTLWKKEERFDAEELKTQAA

SEQ ID NO: 310639 - protein, 390 aa, unidentified
MAPGDKIIRRPFDVKHTKEELQPLVDEIRVQAKYDEIKVVMESTGVYHLSIAYFLQQNGIFVSVVNALKVANFNKAENFRHTKTDSIDSTNIARYGIAYWAKLPQFDLNGDKYFLLKRLCDAYLNFSEERSRILLQLQSQLEQTMPGIFDLFGGFDINSGKDKLLDFLERYCHIEDIIAKPEAEFIASYCGWAKEKGYRSNESKAATIYAQAKNGIPSIPNNPIVRETIMWYVGLLRRADETLMASLTRMEDIAKDLPEYELVGEMGGVGRVTRVALIAQIGDVRRFKNKHSLICFAGLTPSIHESGKFRASQNHIVKKGPARLRKVLYQVMMSLVMHKIPKDDAVYRFIKKKEAEGKYKKVAKVAGMAKFLRIYYGRVMHLYRDLGLAA

SEQ ID NO: 310640 - protein, 351 aa, unidentified
MDVHALSVVAHAVDEETGKVARARLCPDHGEVLGWLHQLRAPVRVTYEAGPTGFGLARAITGAGMECLVAAPSKLQRPAGDRVKTDARDAAHLARLLRLGEITAVRVPEREIEAVRDLVRAREDARADLMRVRHRLSKLLLRQGIVYSGGTPWTCVHEEWLRRHRFDDIHLKAAFDHSFDAVLAATAARDRLDEQIMVVAASPRFADPVNRLGCLRGISALTGLALTVEIGDWSRFSGSSIGAYVGLVPCEYSSGNSRVQGSITKAGNTHVRRLLIESAWHHRKSYSTSGPTLRARWAKVDPALRARGHAGNRRLNKRWRSFTERGKNPLVANVAIARELAGWCWSLATMH

SEQ ID NO: 310641 - protein, 387 aa, unidentified
MPSMQLRRDDVIVGVDTHKDNHVAVAVDGLGGRLGDLVVPATLAGFEELVAFCVAFIGPEGRLVAFGVEGTGSYGVGLARYLRRQGHEVHEIARPARAVERRLAGKNDTLDAEHAARQLLAGHGLSTPKTADGEVETIRLVKIAYDGAVQARTTAMITLKATLATGSEALRTELEKLTDHQLVLACAALEGPTPLPPVRRGAPAVVLPIDPDAAMRHVLSSMARRWLSLHEEAKAHAASLKALTAAAAPRLVEAVGVGYDTAAQMLITAGDNTDRIKSEAAFAKMCGACPIPAGSGKTNNRHRLYRGGNRQANAALYRVIIVRMRWHQPTIDYVARRTAEGLSKREIIRCLKRYLARELFRLLPAPDTTPPPETRNSRWSPDRLDDL

SEQ ID NO: 310642 - protein, 409 aa, unidentified
MQVMHARCAGLDVHKKTVVACVLISLPNGKFDKHTATFGTMTSDILALSDWLKNHEVSHAAMESTGVYWRPIYQLLEGQFTLLVANAQHIKRLPGRKTDVTDAEWLADLLRHGLIAPSFVPAQPQRELRELTRHRSNVTGRRAQCINEMHRTLEGTNIKLSSVATDITGVSATEMLQQLVAGQTDPNFLAELARGILRKKIPQLQRALQGVVRPHQQLILSQLLADIAACDEAIQALNREIAQRLQNERELIERLDEIPGVNQKVAEVIVAELGTDMKRFGSARRAAAWSGMCPSNRESGGRRYRARSRFGNKHLKSGLTEAGRAAGRSKNTYLGAHYRRICARRGGKRAALAVGHSILTIAYHMMDRGMRFQELGADYFDRRNPERVRDRLVQRLEKLGYKVSLEQAV

SEQ ID NO: 310643 - protein, 352 aa, unidentified
MRIPQAFMVGIDVSKAHFDVAVEGKSAVGRFDNDAPGRTALATAIAGAELVVVEATGGYEMAIVRALMAAGIPIAVVNPRQVRDFARASGRLAKTDQVDARVILHFARAMRPAQIPHIDDGRIALAALVARRRQLIDMAVAEKNRLEHAPQAVAALIGETLAALKSQLARVDAAIALAIEAEPDMAARRDLLLTVPGIGEVGAAVLIAELPELGAIDDKKLAALVGVAPVAHDSGTWRGQRHIAGGRATVRCALYMATLSAIRCSPTIKAFHKRLRDAGKPPKVALVAAMRKFIVMINTIIKRRTPWSELPTTRLLRRASQRPNPRRTRRNACVLRSSTVHQRVRHSWTTRS

SEQ ID NO: 310644 - protein, 370 aa, unidentified
MAQSTPLFVGLDVHKDSIAVAHAAGGGAEPPVFVGAIGPRQADLDRLLRRLQGKASALHFAYEAGPCGYGLHRYLTGKGLTCQVVAPSLIPKKPGDKVKTDRRDAVELARLLRSGDLTAVYVPSVEDEALRDLCRARDAARITGKDAKLRLKAFLLRLGRHYVGRATWNDAHRRYLAKVVCPTPAQQIVFQESVRAVDEQVDRLHRLEAELVERAPAWRLYPVVQALQALRGVQFLTAITVVAELGDLTRFDSPRQLAAFVGLIPSEYSSGGTRRQGGITKAGNGRARRALIEAAWAYRHPAKVSLHIQQRIDHLPKPLQDLGWKAQVRLCTRFRRLVARGKHPNVAVTAVARELIAFMWAIAKAVPLAA

SEQ ID NO: 310645 - protein, 414 aa, unidentified
MEGAINKSCGLDIHKHFLIATILSRSGEKQQQRFARDDNGISDLKRWVTSEECDVVACESTSDFWVPIYDSLINHLPVIVGNARDMKAFTHKKTDKIDSEVIAKLALNQMVQPSRVFPKNHREFRSFVRLRLTLVRKRTDIKNESHAILSSEMLHLGNVLKDIFGKNGRAILSGISSGKAVDQIIESLSPNVRKKSTQIREILDREISHTAAIRLQTCLNLIRHFDDEIKLLEREIFNYAYGKHKDKMEILMSVPGIGEIGAATLIAEINDFNDFSSGDKLASWLGLVPNVYQSADKYHNGRITKRGSKVARWILTQIAQAAARKKNSKLKEFFSHKKKSIGHAKAVIALARKIVTIIWHLIKKNEMYEDETGYEKGEIQKRKIIETDVFSVDERIRIISGIFAIMGKEGREST

SEQ ID NO: 310646 - protein, 348 aa, unidentified
MRESTTFSCVSIFAGIDYHKSFSLVTIGNEAGEVITQCRLPNDRIAIKQFFANYPTAICAVESCRGYEWFVDYLRELGHTVHLVNAYKAKLIAQSKCKTDKIDSRILMQLLAKDFLPTCYQPSPAERRLRERLRWRAHLVRYATRMKVRIHSILDKENAGLSAPQLFSAEGRIFLKDIQLSGERKVLLNEHLSMLEFFEKQIAAEDTWVKQAVKANSNAKLLTTIPGIGNLTALVILAELGDITRFKTTKQVVSYAGLAPSIRSSANTCHVGPLTKQGSKMLRWMLIQSAWVAVRTCPQLGMSFAAVKSRNGKNPGAVSVARKLLKIAYRVLRDQKPFNAALVSNKSA

SEQ ID NO: 310647 - protein, 336 aa, unidentified
MTELTRIAIDTSKSVFTLHGTDADGRAVLRRNLRRQDMVPFFARRPPMEVVLEACGGSHHWGRVLAGLGHTVRLIPPQYVKPFVKRGKNDRNDAEAISEAAARPEMREVAVKSADQQANAMLLSVRELLVRQRTQLVNALRGHAAEFGHVGRLGRQGVAKLLADVAEDAELPTPARDALALLGAEIGRLDARLAEVDARLVAQHKQTPTSKMLAEVPGIGPIGALSLVLRVDFSQFKSGRHFASWLGLTPREHSTGGKTRLGGISRAGDERLRQLLVLGATAVIRQAKPGKASAWLIALLARRPRKLAAVALANKMARIVWAMMTSGEAYRQPATA

SEQ ID NO: 310648 - protein, 363 aa, unidentified
MASESETVMLITVGVDTHVDVHVAVALDPLGRRLGWLTFPTTPAGYAELLSWVGRLGVLERVGVEGAGSFGAGLTRWLRARGVVVLEVARPNRQLRRHAGKSDRIDAEAAARAVQAGAALGRPKNTDGQVEMLRALRVARRSAVKARTQAANQLHALVITAPDPLRGELRGLALPRLVARAVRLRPGPQPQTPATATKLALRLVAVRYQQLSAEITELDQHLHRLVAAAAPQLLALKGVGTDIAAALLLAAGDNPQRLHSEAAFARLCGVAPIPASSGKTSRHRLSRAGNRDANRALYMLAVSRLRWDPRTRAYVARRTQEGKTTPEIIRCLKRHLARETYRALTVAAPTLQPAADRTLNRVG

SEQ ID NO: 310649 - protein, 408 aa, unidentified
MRVIGLDIHRVFAEAAALERGSLVRLGRIEMRRDRLAAFARSLTHDDHVVIEATGNAAAVAEAMRPHVGRVVIANPQQVRLIAHAKIKTDRIDASVLARLYASGFLPEVWIPDERTQALRRQVTRRNQLVRQRTRLKNIVQSILHSHLIPPCPTADLFGPKGRAWLAQQTVPADERFAIERHVREYDRLGDDLSVVERDLAGNVLADEHAKRLITIPGIHMVVAVGIMAAIGSIDRFANPQQLVSYFGLNPSVHQSGTGPVHRGRITKRGRGHARGMLVEAAWVAARVPGPLRAFFLRIRARRGQHVAAVATARKLAVLIWHMLHRSEDYAWVRPALHARKIRAVELSAGHPARRGQRGAAYAYNLSTVRQRERRRIEQAEKAYERLVKGWTQHGPKVRIGAAKEERR

SEQ ID NO: 310650 - protein, 344 aa, unidentified
MEHYAGIDVSLESSSVCVVDASGRIVREAKIASEPAALIAWFREIGLAMARIGLEAGPLSQWLYAAMREAGLAVELLETRHVRDAFKAMPVKTDRKDARGIAQLMRLGWFRPVHCKSLPAQETRALLTARKLVQSKHHDTEMSLRGILRGFGLKVGKTSQRTFASRVHELVAGHPTLLLVAEALLAARAVLGEQLSKLEKRVRSLARHDRRVRRLMSAPGVGAVVALTFVAAIDDPARFRSSKAVGAHFGLTPKKYQSGETDMTGRISKIGDAGVRTMLYEAANVIMTKPVKGSLLKSWAMRLALRAGMRKAKVALARKLAVVLHRMLADDTEFVADKAATATV

SEQ ID NO: 310651 - protein, 343 aa, unidentified
MEAYAGLQFVGIDLHRRRTVIVRTTEAGEVLEAVRIVNDVQRLASVMARAGDCPEVVLEATYGWYWAVDALQAGGASVHLAHPLGVKAFEYRRVKNDFRDAQDLADLLRMGRLPEAWIAPPPTRELRELVRHRAKLVGLRSRCKAEVHAVLAKCGVQVVMSDLFGVWGTELLDGLELPAPYAARIASLRRLMDDLDFEINVFAGIIRGRMAHEPGYTAVQKIPGIGPTLGAVLVAEIGDITRFASASKLTCWAGLTPKHHESDTHVRRGRITKQGSRLVRWAAIESVKTVSKTSEVGVLRERVADRRGRNIGSVAAARRQLELVFYALRDGHVRALEHLPRAA

SEQ ID NO: 310652 - protein, 358 aa, unidentified
MEYFAGLDIGMEATAICVIDREGKVVLETSVTTDPDAIFEVLKPYVARLRRVGHEAGSLSPWLQVELRQRGLPAICLEAWHARAALSAMRNKTDKADARGIAHIMRAGWFCEVHVKSEESYRLRLLLTQRRNLKRKFLDIENAIRHSIKTFGIRLGKVSRGQFEARVRELVAGDALIAGLTDCMLRARAALWQEYVRLHKVVVAIVRRDELCRRFMRIPGIGPINALSYKTSIDDPRRFRRSKTVGAYLGLTSRRWQSGTSINVQGHISKAGDGDVRHPLYEAANIMLTRYRGFCSLKAWGLKIAKKRGHKRACVAVARKLAVIMHAMWRDGSEFRFKEPKASAGRSTTAPKLISVAA

SEQ ID NO: 310653 - protein, 407 aa, unidentified
MLFVGDDWAEDHHDVCLQDGAGRVLAARRLPEGVAGIARLHELVAGHLDGDDPGQVVLAIETDRGPWVRALVAAGYRVFAVNPKQAARHREVVAVSGKKDDTFDAAALADMARTRRHQLREIAADSDEAEAVKVAARAHQKLVWERTRHALRMRSALREYFPAALEAYAELTLTGPDTLELLAKAPDPAAAARLTIPQISAALKRARRRDVAGKAQRIQAALREQHLGQSEIVTEAYAASVTAAAAVIAVLNEQIKTMEARVESLFRRHPDAGTYLSQPGIGVITGARMLGEFGDAPGRYADAKARRNYASTSPLTIASGKKKTVHARYIHNDHLVNAMHDQAFAAISASPGARAYYDELRARDIDHTDALRRLANRQAGILHGCLKTGTAYDEHTAWGHRSQPAAA

SEQ ID NO: 310654 - protein, 337 aa, unidentified
MQITTIGLDLAKHVFQVHGCDAAGNCGVKRRLRRNQVLEFFAGLAPCLVGIEACGTAHHWARELRALGHDVRLMPAHYVKAYVKRGKNDAADAAAICEAVSRPSMRFVPIKTREQQVVLTMHRTRDLLMRQRTQLINAVRGHLAEFGIVEPQGVWHLGRVLRHLEVDDEVIEPARQVIGLLASQLNDLEGRIKEVDKQIALWHKASPTSQRLATIPGIGPVIASAIAATVPDAGVFRSGREFAAWLGLVPRQRSTGGKQRLGRITRDGDRYIRRLLIMGAQAVLQRSKAARANPWIQNLLARCPRLKVAVALANKTARIAWAVMTKGEIYRQAAASA

SEQ ID NO: 310655 - protein, 354 aa, unidentified
MSRKTARTEPVATIGIDIGKTAFHLIGLDQRGAIALRQKLSRSQVEARLANTPPCLIGMEACVGAHHLGRRLKALGHDVRLMPARYVRPYSKGQKNDFRDAEAIAEAVLRPTMKFVAIKSVEQLDLQALHRVRERLVCQRTSVINQIRAFLLERGITVRQGPRALRSELPIILAMTDKLSPRMIHTIEDLGSDWRHLDARIESVTCEIEMLSEADDGATRLKTVPGIGPIISTATVAAIGTGEVFRTGRDFGAWLGLVPKQMSTGGRTILGPISKRGNRYLRMLFVQAARAVLLRPQSWERHGLKHWIAAAAKRLNRFKLAIALANKLARIAWGVLHGGRNFEVRPMTPAPHSA

SEQ ID NO: 310656 - protein, 349 aa, unidentified
MSEPYAGRQIVGFDLHRRRSVLVRMTEAGERLETVRISNDPEYLREVMTRAGEAPEVVLEACYGWYWAADTLADLGATVHLAHPLGVKMFSYRRLKNDERDAADLADLLRMGRLPEAWIAPPATRELRGWVRHRAKLVGLRSNLKCQVHGILANAGITVPMSDLFGASGQRLLATADLATESRSRIDSLQRMITALDFEVELFAKLVAGRLRTHPGYQAIQLIPGVGPILAAVFVAEIGDITRFRRPEQLASWAGLTPKHHESDTTVHRGRITKQGSRLVRWAAIEAVQRLPGHTRIGQVRDRVAARRGRNIGVVAAARELTELVFYGLRDHRVHALAVHSPARTPLPA

SEQ ID NO: 310657 - protein, 412 aa, unidentified
MYYVGIDIAKRSHVACVMREDNSLEIRPFEFSSTKSGFEKLRAQLSSLACDVSEVLIGMEATGLLFDNLYRFLRSLHYRVVLLNPYQSAKFREMDTMKRVKNDNIDAQMIAALIKSGRFSEGYVNDDQLQSLRTLYRHRASLEDQLKSIKRQTQTILTVVFPELEQVISDPFNITGLALLEKYPTAKHYHHASVDRILKTFRGIKGNNFNKAKAEKLLALAKESIYSGAGKEGYEATIRSNITLMRLLKEQMRSVEDAMLTLFETKKATKEEQEEMAELIDNLRTIPGVSDKTILALLAECGNLDRFHNAKALTGYLGLYPTLEQSGDSQKNGRLAKRGARLAKKAIYLAAIAAIRHNKELRQVYMNYRSKGRAKKECIIITARKLLAIIYAIYTRNMPYDPQRVFVAQPNQ

SEQ ID NO: 310658 - protein, 306 aa, unidentified
MLCAGIDVSKPHLDLALVSTTAKPTRLRFPNTPEGRQALLAALAHHRPTWVALEPTGAYHLPLLQLLAEKGLQVALVNPYHLAAFRRATGERHKTDRQDALLLARYAQVYGESLRAYTLPPKALQELKALVGYREDLAQRERAILNQLEAARWAGSEEILVLLQRELACVEGLLGEVEARIQALLAALPEAEVLMGLPGVGPQVAAAVLALLPPHLWGRAKAAASYAGLIPEREESGKSVERSRLSRKGPPLLRRKLFMGALVAVRHDPEMGAFYRRLLSRGKRKKQALVAVAHKLRFGAPTPNEP

SEQ ID NO: 310659 - protein, 401 aa, unidentified
MNAVGIDVSKGKSMVCVMRPFGEVVLEPFEVLHTAQNLNDLAGKLKALDGETRVVLEATGNYHKPVAFVLHNAGLFVSVVNPVLIHDYDNNSLRRVKTDKKDAVKIANYTLDKWTRLRQYLPEDEARLALKNCYRQYQQAVAIRTMLKNNLISSLDLTFPDANNLFSSPAKSNGCEKWVDFIGEFWHSGCVSSLSADAFAKKYLKWCQKHRYNFTRSKSDEIYSCAVNATSLPKSPTSKLLIQQQVAQLKAVSKSVAAFQQEMLRLSQQLPEFDTVMEMYGVGPSLGPQLMAEIGDVRRFSSKKSLIAFAGIEPQPNDSGKIVGNDKGISKVGSAVLRRTLFLIMTVILQTQPQDEPVFQFMNKKRSEGKPYKVYMMASANKFLRIYYARVKAVMDSERSQ

SEQ ID NO: 310660 - protein, 427 aa, unidentified
MLEETQEREEIIERIAALDIGKASLVCCVRLPHPARPGRRLQEVDTYSTMTRSLMRMTDRLRDLGVTRVVMEATSDYWKPAFYLLEAAGFETWLVNAHDVKHLPGRPKTDRLDAVWLCKVAERQMLRPSFVPPPEIRMLRDLTRYRVDLVAAQGAEKNRAEKLLEDAQIKLSVVASDIFGVSGRTMMAALIAGERDPKYLAQLARSSLRRKITTLEEAFVGHFTDHHAFLLAKMLARVDAIEADIADVDAQIEVHIAPFSPAAARLEQIPGIGPVAARAIIAEIGTDMSRFPTPAHLASWARFAPTVKESAGRKKGNGATGHGNPYLARTLGQVAVGAARTPTFLGERYRRIARRRGPKRAIVAVGRSTLVIIWHLLSDAETAFHDLGTDFYDSRINPERRARNHIQQLEALGYTVTIERPELPAAA

SEQ ID NO: 310661 - protein, 344 aa, unidentified
MRIRKITGPGPRGKSLRGRDFEHVIGLDWSETTMAVGHISTADSIPQVWETKADIIRLQGFLKSLTGRIILTVEESTTSQWLYGKLVAYVDRLIVCDPTFNRLLCRGPKNDLVDAGKLCLLLYHDSLKEVYHSTSKWYDLRLLVSAYDDTIRSGVAAQNRLKARLRARLTEGAAAKFVIEQLQDTIARYKQAKLEFEQEFHRWAKRTPLIRALAKLPGIGERSAVKIVGTVIDARRFPTRRHYDSYCGLVWHKKQSGGNYYGRRRPQYSRLLKSVYKTAALAAIHGQNEIADYYKQLLARGLAPYNARHAVARYLAHVCYGILKSGIPYDPNFKNTQSGKHNNS

SEQ ID NO: 310662 - protein, 322 aa, unidentified
MSVPILGMDIAKQKVAVALLIDGKVKNKTFKNAPEGFEDLALWLGKLGIQRVHACLEATGNYGEALAIFLHEAGHTVSIVNPARIKGFAQSELVRTKTDKVDAGIIARFCLAMKPDPWIPPSPEIRSLRALVRRVDSLIDMLTQEKNRLGTAHESVIPRIKKHMEYLDREIEEVRNQIADLIEKDPDLRHKKDLLASIPGIGKATIAVILAELDDLDKFSHVRELVAFIGLAPKETLSGSSIKGKPRLCKTGHARLRKALYMPALVSIRYNPLMIAFYQRLQERGKNGKVIVCAIMRKLVHVIYGVLKSGKMYDPNHKPVFA

SEQ ID NO: 310663 - protein, 269 aa, unidentified
MELYVGMDVSLKETSICVVDDDGVIQCEGTVISEPEAIAEFIRTKAPGAKRIGLETGPTTTWLWHELRALGVAVICIDARHAKAALSMRLNKSDRNDAVGLARIMQCGWYKEVQVKSVMCHEIRAVLNSRAQLVKIKRDLENEIRGLLKNLGLVIGKAGGKVFHRRTEELLGSQGHLRDAVRPLLEIREKVSREIAALYRKLLELARNDEDVRRSMTVPGIGPINAMAFHSMIDDPSRFKRSRDVGAYIGLTSRRFASGEIDWSGRISK

SEQ ID NO: 310664 - protein, 321 aa, unidentified
MTGTVVIGIDVAKDTVEVALRPAGTTWRAATTPIELRRLAERLIGLHPTLIVLEATGGYEQPVVAVLSVAELPVSVVDPARVRHFARATGLLAKTDRIDALILARFAEQLRPAVRPLPDAAQRELALLVQRRRQLLDMLAAEEQRLDQQALFPRSPITGSLAAHVAYLRQQLADTDQALTTHLTAHPRWDTTHALVRSVPGVGPVTAATLLAEVPELGTLSRQQIAALIGVAPMARDSGQRRGARMISGGRATVRQVLYMATLTAVRCRQSPLRAFYHQLRARGKEFKVALVACMRRLLVILNAMVRDGRPWNPALCAAKT

SEQ ID NO: 310665 - protein, 377 aa, unidentified
MKRILKIGMDVHSTNYTLCAMEPVFGADDRIYATIQVSPDYKNILLFIEKVKQKLDPNDTYDIECGYEAGGLGYSLYNQLTSAGVKCVILAPTTMLTQQGNRIKTDTRDALMIAQCLSYGGYQPVYIPTEDDDSVKEYLRMRDDHKIALKKVKQQINAFCLRHGYHYPQGKWTQMHLDWLTAIKLPPLYQETLDEYMATYFELTDKIEKYDTRIDEIAAQEKYADKVKKLGCFIGVKTHVALSLIVETGDFKRFAKGNAYAAYLGLAPGEHSSSDKINRLGITKAGNSNLRRLLVEAAWGICKGNIGYKSKDLKKRQQGNSVQVISYADRANSRMRSKYYRLIRHGKKKNVAIAAIARELACFVWGMMTDNIEAKAA

SEQ ID NO: 310666 - protein, 375 aa, unidentified
MTFKEWILDLKEKHEKDKVVPGMEPTGHYWFNLGKYLQDNEMKPVLVNPHHVKKSKELDDNNPTKNDRKDPKVIAGLVREGRYMIPYLPDGVYADLRTASNIRFQLQSELTRIQNRISRWFNIYFPEYKTVYGKPDAKSGMLILKEAPLPEDILTLGIDGVDQIWRDAKMRAVGKARAKTLIEAAEHSVGSKEGAVSARMEIRMLLEDYESRNMRLQEVMVLIEELVKQIPMAEKLLEIKGVGIKTVSGFLAEVGDISRFNSPKELQKLAGLALVENSSGKHKGETTISRRGRKRLRYLLFEVAMSLVAKNPEFRELHNYYTTRRLNPLKKMQSLMAIAAKLIRVFFAMLTKGVDYDPKKMVSDIKKPAVYLQAA

SEQ ID NO: 310667 - protein, 344 aa, unidentified
MLYVGMDIHRDSTVCDLFDPELEPKRQHRTITVPTTREGLESVLVPLNQQCRVAYEVGTQAQWVASILRPLAAEVQVANPSRIPWLFRDGKKTDRLDARKLATLLYVKQLPTVHLPAMDVSAWRALINHRRGLVKRRVALKNRIRAILRAFGQRCPHRSCWTRPGMDWLLSLTFDDARELMMKMLLADLRNISGQIDQVEVHLDSIAASHPQVTLLQTIPGIGPRTAEAVVAFADQIDRFGRGKQFASYFGMTPTLDESGHYSRYGHISKRGPSVVRWLLVEAIHRVIWRCPALQAWFNRVWRGKKDRYKKALVAAGRKLLTIMFAMLRDNRAFDPEQAAQLAA

SEQ ID NO: 310668 - protein, 430 aa, unidentified
MKSNTQNAKIEAITEKTLVLGIDVGSEMHYARAFDYRGIEYSKKPFKFSNTEAGFLTFKEWIRDIKERHEKDKVVSGMEPTGHYWFNLGKFLQDNEMKPVLVNPHHVKKSKELDDNNPTKNDRKDPKVIAGLVREGRYMIPYLPEGVYADLRTASNIRFQLQAELTRIQNRISRWFNIYFPEYRTVYGKPDAKSGMLLLKAAPLPEDILTLGIDGVNQIWRDAKLRAVGKARAKTLIEAAEHSVGSKEGAVSARMEIRMLLEDYESRNTRLQEVMILIEELVRKIPMAEKLLEIKGVGIRTVSGFLAEVGDISRFNNPKELQKLAGLALVENSSGKHKGETTISRRGRKRLRYLLFEVAMSLVSKNQEFRELHNYYTTRRLNPLKKMQSLMAIAAKLIRVFYAMLTKGVDYDPKKMVSDIKRPAVYLQAA

SEQ ID NO: 310669 - protein, 342 aa, unidentified
MKIHTIGIDLGKTSFHLVGLSERGEVIVRKHFSRAQLLRFTANRKVHVIGMESCGGSHFLGRALQEQGHEVRLMPAQYVKPYVKTNKNDYVDAEAIAEAVGRPTMRFVPIKNDDQLDLQSLHRVRERWVMRRTAVINQIRGLLLERGITVRKGRRYIEAALPGILEDADAKLSGTLRLLLAQLKGELDQTALRLEEAEALIEQTVQKNEACQRLVKIPGIGPVTATAVIAAIGNGAAFRKGRDFAAWMGVVPREYSTGGKQKLLGISKRGNRYLRKLFVQCARAVLQQKTKQTPGLKAWLEKLTAHTHRNVAGVAVANKLARMAWAVVATGEAYRAPLPAAA

SEQ ID NO: 310670 - protein, 320 aa, unidentified
MSVSNEPIYVGIDVSKSKLDVCLLPSKQTFTFENTAAGVKQLVDLLHRQRQVVRCLLEATGRYERRCAADLMDGGFAVAVVNPRQARDFARSMGKLAKTDAIDARTLAEFAMLPHVRPSEKTPENRQILEDLLARRRQVMQMLIAEKTRLDGLVHKLAVASIKKVVRLLEQQREDMDREIAKLIESDDNWRSKRDLISSVPGVGTATANQLVIDLPELGQLNRQQIAALVGVAPLNHDSGYMRGKRAIFGGRVAVRTGMYMATLAAMRCNPIIKRFAERLTAASKAFKVVATACMRKLLTILNVMLKNNQPWRTPAIKIA

SEQ ID NO: 310671 - protein, 343 aa, unidentified
MKIIGCDFHPSFQQIAMVDTETGEQGEKRLTPQEAVPFYSQLQGQKVVVGMEASGNTLWFERLLAGLGHQMHLGDASKIRAMEVRKQKTDRRDAELLLKLLLEDRFPEVWVPSLEMRDVRQLLLHRHKLVGMRRQVKNQLQHLALNQGVQKKWKLWSRAGRQLLQELPLSGWTARRRKDLLRWLDELDQEIAELDRAVEQEAGQHAVARLLQTHPGIGPVTSLAFVLTLGKIERFQHSRQVVSYLGLNPAENSSGGRQRLGGISKQGNPMLRSLLVEAGQSASRGDTELKRAYQRLRQRKHSAVAKVMVARKLAVRLYWMWRTQQPYSATRMQGSPSHPVAAV

SEQ ID NO: 310672 - protein, 345 aa, unidentified
MNQIIRIGMDTSKYIFQLHGVDASEQVVLRKRLTRKAMVEFFAKLPPTVVVIEACGAAHYLARELGRLGHTAKLIAPQLVKPYVSRNKNDGRDAEGLCEAASRPRMRYVPVKTAEQQAALMLLGMRDQLVARRTQLSNTIRGYAAEFGLIEAKGLDKLAAFLTAIEGDERVPALARELFAMLARQYEQVQVELKAIEAKLLAWHRANALSRRLAQVPSIGPVTAVALVMKAPDPHAFRSGRLFAAWLGLTPKDHSTAGKTRLGKITRAGDERLRQLLVVGATSVVKQAAAKGRGPRWLIELLKRKTPKLAAVALANKVARIAWKLMTTGESYDSARIDAQMASAA

SEQ ID NO: 310673 - protein, 322 aa, unidentified
MSLTVLGIDIAKQKFDVALLADGKIKNKTCRNSTEGFEVLKMWLEKQGIQKVHACLEATGNYGEDLAVYLHEVGHTVSIVNPARIKGFAQSELVRTKTDKLDAGVIARFCLAMKPEPWIPPAPEIRSLRALVRRVDSLIDMRSQEKNRISTAHESVIVLIKEHIVYLDQEIEKIRKQIADLIKRNPHLKQRKELLDSIPGLGKATVPHLLAELDNLDKFTHVREMVAFIGLAPKETISGSSIKGKPRLCKIGNARLRKVLYMPALVSIQCNPVMIAFYNRLKEKGKNGKVIVCAIMRKLVHVIFGVLKSGKMYDPNYKPTFA

SEQ ID NO: 310674 - protein, 340 aa, unidentified
MNIKRIGLDLAKNIFQIHAVDHHEHVVLRKTLRRDRMIAFFTQLPPCLIGIEACGSSHYWARELTRLGHTVRIIPPQRVKPYLKGQKNDANDAEAICEAISRPGMRFVAVKTERQQTLQAEHRVRARLIRARTALSNEIRGLLAEFGLILPTGIRQLRKALPEILSQQEQWDDRFMRLLCELSEELKILDERIARHDGRLQQAARDDIRIKRLLAIEGMGPVVASALVAAVGDGRQFKNGREMAAYLGLVPRQHSSGGKERLGHISKRGDSYLRTLLIHGARAVLNACKNKTDRRSRWLQALSERRNRNIATVALANKNARIAWAILSREEDYHGLQAAG

SEQ ID NO: 310675 - protein, 350 aa, unidentified
MSTVTIAVDLAKNVFEIAVASRAGTIRERKRLSRPQFERFWVSRGPCRVVMEACSSSHFWARFLIARGFQVTLLPPHYVRPYRRRNKTDRADCEAILEAYRCGGIHPVAIKSEDQQALVALHRVRAQWIQSRTARINSMRALLREFGVIVPLGSKRFLNDLHQLLAERHDRLPHRVRQTLVVLWEEVRELEQRIDALADELEAVALQEPVVQALLQIPGLGVLTATALFATVGDIHAFKNGRQLACWFGLTPREFSSGSRRRLGRISKQGDPYVRMLLIHGARAALTAARRAAQAEKPLTELQRWALERAGHAHANKAAVALANKLARIAWAVWYHERQFNGNHALRFAA

SEQ ID NO: 310676 - protein, 422 aa, unidentified
MKKRTYRATNVKQANWQKIAGLAAGQPVVLGVDVAKEDFFAVLMKTDRGVIDTIKWVHPQQSVEMVEHLLERVDRQALQVVMEPSGTYGDALRGYLGDRGIAVYRVSPKRVHDAAEVYDGVPSLHDAKSAYLIGRLHLDGASEPWEALSASRRDHHALIAELDLYQGQHQANLNRLEAHLSRHWPEVLRILDLNTVSLHTLIGEYGDPSQVCADREQAGQLLRRIGRGLLSAEKVEQVLASSETSLGVPCTPGERHWLQVLGQELLRTHRALKAIEHQISQVVEEDRVLRRMANVVGKTSSLVLETTQGTPLDYANPHSYLKALGLNLKERSSGKHAGQLKITKRGPGKARKYLYFAALRWSHQDAVIEAWYQNKVKRDGGLKSKAITAVMRKLALSLWHVARGEAFDSGKLFNTRTLDIAA

SEQ ID NO: 310677 - protein, 387 aa, unidentified
MQKPHDDSKACLTAFVQDSTLTVVIEMSLRSWLVAGMVPGVNREPRKKIAPNPELLLQLLYRWRDEAIKAGKEITRIAVAYETGRDGFWLARWLRARGIDAHVIHATSVAVSREHRRAKTDRIDTAMLQRGFLGWLRGERGHCSMAIVPTVAEEDGRCPHRERETLIKQRTSTANRMKSVLIQFGVRNFNPSLRKAPKKLDSVRTPEGIPLPSNAVAALQRHMERFRIINEQIKAIERTRLQRLQRDPAEKFNAMVFLLVRIIGLGVETAEQLVREILSRNLRDRKAVARYAGLTGSPDESGSMRREKGLSRSGNGRVRNILIQLSWRLLKFQPQSDLVLWFKNRTANAQGSRKPMIVAFARKLIIAIWRYVNTGVAPEGFQLRSAA

SEQ ID NO: 310678 - protein, 322 aa, unidentified
MAMLSFGGIDVSKDRLDVMVLPEEQCSWVSNDAAGWDKLIEQLCGSSIAAIGIEASGGYERGVMRALLAADLPVRQVNPFKLRQFARASGVLAKNDPLDARMIASFVAIMPTRPAQRPAPAAERLTEMLAVRRQLSAEKVAAENASRLLEDAMLQRLSRRRIARLAADIDMLDERLVEVVATDDALVHRYRLLTSMPGVGAVLACTLLALLPELGHMNRKQVAALVGVAPYAFESGTLKGRRCIWGGRAHVRQVLYMAAMSASNWNPAFKTFHDRLKAAGKLPKVAIVAVMRKMITTLNAMVRDDVMWADRLTGRHSVPTAR

SEQ ID NO: 310679 - protein, 350 aa, unidentified
MKKICIGIDVSKETLDVTVIHIESYELMEKLGYSKFENRPSGFRSMTAWVRKVIKSRGQMDEALFCMETTGSYDLPLCHWLHKNGLNVWRESALQIHCSKGFQRGKSDKEDSEIIAQYAARYQNRYTAFVPDAEAIADLKELICYRDSLVERRKECKVRLANKKETLVNKNSKVWKCIERLSKAEIKRLDKVIGECDEEIRNLMKEDEEMEKNYQHLTSIVGIGLINGAALIAYTGNFKKITTPNKMSCYCGCFTFYEDSGTSVHRKSPYRNACCKMLKGYLRMAAKSAMLANTELRKYSERLREKGKPYAVILNNVANKLLHIMFSLVKHDYDYEYNHEIVRRMERGIA

SEQ ID NO: 310680 - protein, 349 aa, unidentified
MISTCKRVKRYTHFIGIDVSKNEVDFAIMNEKNLLFHEEVKNDITEIIPFIVRLKSMPKFSIAKSLFCMESTGIYCNHLLYCFKLFKANIVVENPIHIKKSLGLVRDKNDKADAIRIAQYALKNKDALRLWVPKRQVIFDLANLAAIRSRLLSTQIALKTPIKELNMFVNEEVIQRSEAMCHNSLLALKNDLKNVDDNIQLLILADPRLKRLHEIITSVPNIGEKTALQLIISTNEFKDIKDPKKFACYAGVAPFIQESGIFKGKAKISHIANKKIKTLLHICAVSSLRKGELKDYYTRKVAEGKSKMGVINAIRNKLILRIFACVNQDRLYQDQYNREMQSLQSITMA

SEQ ID NO: 310681 - protein, 360 aa, unidentified
MAKARTLVGLDVHATKIVAAVLDVETGELEFFRISGDVNEAAGLCAGLPRPVRAAYEAGPTGYGLARELARRGVQCVVAAPSKIPRASGDRVKTDRRDAELLVRLLLAGKLHAVRVPGPEEEALRDLVRAREAIRVDLMRARHRLSKLLLRHGIRFDEGSAWTSRHRAWLAGVTLPYAAAQATLQDASGAIDALAHRRDAVQREIVAMLPSSPWHVQVGRLRCLRGIDTLSAVGLCAEIGDFERFAHAEQLMSYVGLVPCESTTGQQRRLGSITKTGSSHARRLLVEAAWHYRKRPQVGKALAERQDAQPAEAVAVAWSAQRRLHRTWTRLEARAKRRTIIAVAAARELSGFCWAITRIE

SEQ ID NO: 310682 - protein, 333 aa, unidentified
MTTMTPVSTYAGIDVGAEELVLVLRQQGTSLKPQHFANTTADRTRLLKKLIKFPGLTVSLEATGVYSMDLAVALHDADIRVMVLNPKASHHFAKVLLRHSKTDGVDADTLAQYAERMPYQPWARPSHEALALRVFARRLHALTRQKAAAKNQLHALSVAAGTPPAVRRDLQLAIAQLEERIAALTQEGRTFIDAQATLREPFALLLTIKGIAQTSAIALLGELLLLPAGLTHKQWVKFAGLDPRHFQSGTSIEKRARISKSGNRYIRHALYMPALSAKAHDPHVKAFFEHLLVNGKTPLQAVCAVMRKLLHAIHGMLRNNQPFDNTRFYAIPV

SEQ ID NO: 310683 - protein, 403 aa, unidentified
MKYGVGIDISKGKSTVAVMSIEGKTIETPFEITHNDEGFELLEKKIKNIKKEDLKIVMENTGTYYLPVFCYLLEKGYFVVTKNALEIKKYLDRGLRKAKTDKKDAYKLAEYTCENWYKLKMARKHEEIYDNLKLLSRQYFSIISVQMKQKINFSNLCDLTFPGYYQLLDNNNFILGLEIFKKYYHTNIVKNIGENKFIKEVDKIAKKLGHKSAGINLGYKIYALAQIAIAPYSNNNYTKLSAVSCVETLISTLKASNAIITEMDKLARELPEYDVIKDMPGCGEKLTSRVIAEIGDIRRFKNAGSLIAYAGLDAPPYQSGQFEASNRHISKRGNKYLRKTGYEIMQSVIRSCSDKSEIKIYILKKEAEGKLKKVAKVAGMNKFLRIYYGTVKRRYKELNIWSA

SEQ ID NO: 310684 - protein, 389 aa, unidentified
MEARTVSSLPTAAPHHDVVRCLLAIELSKASWIVAVHTPLLDKISRYTLEGCDWKGLLELIERIHKRVTREFGPSVEMISCYEAGYDGFWLHRLLEGHGVRNHVIDPASLQVDRRVRRAKTDRIDAARLLRSLMAHARGEPKVWSVVRVPSVAEEDDRRLHRERDRLINERGQHVNRIKGLCAVHGIYDYEPMHSKRMLRLERLRTATGDQLPRRFKEEINRELQRLELVLRMIKAIETERDAIASAKASTHTNANKIHKLVKLRGIGAEFATVLVGEVFFRPFSNRHHIASYVGLTPSHFQSGSTSRDQGISKAGNPKARTTMVELAWMWLRHQPGSSLSAWFRGRVGVLKGRIRRITIVAVARKLLITLWRYLEAGVLPTDIALKKG

SEQ ID NO: 310685 - protein, 381 aa, unidentified
MKKDSIAKLQGRESQKRRMAAKQRLTVGLDLGDRSSRYCILNEAGGKAMEDQLPTTKAGLNSIFAKMAPCRIALEVGTHSPWVSRQLAAMGHEVIVANPRKVRLITQSVKKNDRMDAEQLARLARVDPKLLAPIRHRGPEAQGDLAVIRARAELVDCRTALINTARGLAKPMGERLKSCDADYVKESLADGLSEATQNAIRPLLKSVEEITKQIGVYDKKIQEIEKRYPETKVLKQVNGVGTLIALTFILTLEDAERFAHSREVGPYLGLTRKLRDSGESQPELGISKAGDMLLRRLLVQAAHCILRDGAPDSDLKVWGLTKVQAGAGKKGSKRRKKKAAVAVARKLAVLLHRLWVTGEVYDPQYNRKAVEAAKGKGKAAA

SEQ ID NO: 310686 - protein, 424 aa, unidentified
MAGVVIGIDPHKGSHTAVALDVHEKQLGRLRVRASSRQVDGLLEWASGWPRRRWAIEGARGLGQLLAQQLIASGERVLDVPPKLAARVRLLDSGQINKNDPNDARSVAVAALRAHELPELAAEDHAMVMRVWARRYHDLARLRTQVVCRLHAVVCELVPGGVRKYLRASQATDVLDRIVADSPVAQAKLELARELVADLERIDAQRREAKGRTARAVAATRTSINDVYGVGPIVAGTVLGYVCDIRRFPTRDRFASYNGTAPIEVSSGDRKIYRLSRRGNRQLNHAIHMAAISQIRHHDSGGRAYYEKKIAEGMTGKTALRALKRKISDALYARMIDDARRLAAKDPGGHTGNDSASSAAGSHPETPALRKSHSRATPNSKTGTTQRPLRLRPAPDRRRTSRRATGVQVEPRPGPHRGRRQDRP

SEQ ID NO: 310687 - protein, 400 aa, unidentified
MDETQRFRWFLGIDVSKETFDGCCINMKGERLFRLSTSMNREGFEELTKQLSGLSVSQESALVGMESTACYHVNLYSFLISLGYTVMVMNPLLISNFVKLQLRKTKTDRKDAYVIAQFLLLNRDSLCQTILSSDISDLRDLSRQRESLVDQMSSTKSEIKRLLTMTFPELEHIAGIFSKSMLRLLCHYPSAASIKQAKRSKVAKILIPGSYGKQTDVSVNRIVKAAQVSIGTSSATKEIILRQKASLLIQLEQHLQELTDILIELSEGKIQGDRDILTSMKGIGEKSAVNFLIEIGGDIKQFESHKKVIAMAGIDPALYQSGKIDRKGKISKRGNRHLRRVIWIMATKVIQFNERFRQYYLKRIEDGLPYKMAVMATAHKLVRVMFAMLKNKTLFDPRMN

SEQ ID NO: 310688 - protein, 413 aa, unidentified
MKATTYRRCCGMDVHKDTIVVCVLPPVGGEGKIARKTYGTFRNDLIRMRVWLKQLKVTEIAMESTGVYWRPLWNVLEDEGFQLLLVNPAQVKALAGRKSDGRDAQRIAEYLQDGRLDASFVPSAEVRQLRSMLRHRVSLLEQRNEVHNQIRDLFGTASLKLSSVVSDLMGVTGCRIVEALIAGEDSPEILSWKVRGKLRKKEAMVKESLKGYFNEFHRMMLESHYKHYQFLTNEVALFEQRIEKAMEPYADKTALLVSIPGVDRIVAWHLLAELGVDLNAFPDAAHCCSWAGMVPGENESSGKHKSNRCRKGNKTLRRVLAQAAWAASHCKKGYLRAFFHRTKSRRGWGKAVVATGHKVLTISFQMLDTNTPYRELGDDYFDHLNPARTTRKLIQRLEALGHQVHLSPLRSNA

SEQ ID NO: 310689 - protein, 385 aa, unidentified
MQKLNDLSRSSSPLDPNGTLIAVIELSLLSWLVAGIVPGVERQPLKKLAVDESALLKLLHRWREEATKAGHRIKRIAVVFEAGRDGFWLARWLRARDIEAHVIHASSVAVSREHRRAKTDRLDTELLKRSFLGWLRGERDHCKMVAIPTIQDEDAKRPNREHESLVGEQSRIVNRMKAALIRLGIRGFNPKLKKAAERLDGLRSPEGEPIPPNTLAELRRDMARRRLVSDQIRQIEDARLERLKQAPNDGPHAMVHLLARVIGVGVETADMLVQEVMSRSMRDRRAVARYAGLTGSPDESGRKRREKGLTRSGNARVRRGMIQLAWRFLMFQKDSTLAQWFRARTENARGTRKTMIVALARKLLIALWRLVREGVVPDGVVLRPA

SEQ ID NO: 310690 - protein, 334 aa, unidentified
MENIALIGIDLGKISFHIHCQDRRGKAVYRKKFTRPKLIEFLATCPATTIAMEACGGSHFMARKLEELGHSPKLISPQFVRPFVKSNKNDFVDAEAICEAASRPSMRFVQPRTESQQAMRALHRVRESLVQDKVKTTNQMHAFLLEFGISVPRGAAVISRLSTILEDNSLPLYLSQLLLKLQQHYHYLVEQIKDLESQLKRKLDEDEVGQRLLSIPCVGTLTASTISTEIGDGKQYASSRDFAAATGLVPRQYSTGGRTTLLGISKRGNKKIRTLLVQCARVFIQKLEHQSGKLADWVRDLLCRKSNFVVTCALANKLARIAWALTARQQTYVA

SEQ ID NO: 310691 - protein, 318 aa, unidentified
MSHGYDKFIGIDVCKDGFDVCCATSGPQGRFDNTADGVSRLLPLLPAVGNCLIVVEATGGYERQLVGDLMTAGHQVSVVNPRQVRDFARAFNILAKTDRIDAAVLARFAEKVQPIPREKAGRIDELRQLVTRRRQLIEHRTAEKNRCAQGVSPFVRKSILRLIETINKDIKAIDKALLSLVQSDDDWKNKFDKITEVTGLGPQTATTLVAEMPELGKVNRQQAAALVGVAPFNRDSGQFKGRRTVWGGRQSVRNVMYMAALSAMKHNEVIRDFAARLYAKGKPPKVVITACIRKLVVILNAILKTNQSWQPRLAASTP

SEQ ID NO: 310692 - protein, 341 aa, unidentified
MQITTIGLDIAKNVFQVHGIDAAEKVVVRKQLRRGQVLKFFAALPPCLIGMEACATAHYWARELTKLGHEVRLMPAKDVKAYVKRNKNDAADAEAICEAVRRPTMRFVGAKSAEQQGRLMQHRTRDLLMRQRTQVINALRAHLAELGIVAAQGREGLKQLLTIIADEKDARLPIDARGSLIVLAAQLQALQTMIGSVEKRLTMQHRANEASKRLESVPGIGTIGASAITATVTDPNAFRSGRDFAAWIGLVPRQDSTGGKQKLGPISKQGDRYLRRILVVGAHSVLRRAKQNPEKYPWLTQLLARRPFKVVAIALANKMARVAWALLARGGTYRVPALAAA

SEQ ID NO: 310693 - protein, 373 aa, unidentified
MKKVRFLGLDVHAETIAVAVAEPDGEVRSLGIIPNREESIRKLVKKLGPAEQLQACYEAGPTGYVVYWQLTALGIKCEVVAPSLVPVKAGDRVKTDRRDATKLARSYRAGDLTAVWVPNEEHEALRDLVRAREAAKQDQLRARHRLSKFLLRHGRRVPAGIKVWTQRYQDWVKEQVHFEQPAQEYTLLDYLHEVEHVGDRIRRLEKAIEEAVKLAAQRMREVIQGLQALRGIAQISAVTVVAELGEISRFPGARQLMGYSGAVSSEHSSGKRIQRGQITKTGNAHLRRIATEAAWAYRHRPTIGAALRKRQEGVSEEVKEIAWKAQHRLHKRYRNLLAAGKEKQKVVTAVGRELLGFIWAIGVQVERSSRPVA

SEQ ID NO: 310694 - protein, 312 aa, unidentified
MAMLSFCGIDVSKDRLDVVVLPEGWFFSVSNDTAGWGELVARLRPLTVSAIGLEPSGGYERGIIRALLAAGLSVRRINPNKLRQFARARGVLAKNDRLDARLIAEYVAIMPTRVVQRDAAVERLAEIVTMRRQLCDEHVAAENQAAHLEDAMLRRLSKRRQTRLEADIRLLDKRLAEMVAANVALAQRYELLTSMPGVGPVLAFTLIALLPELGKMTRKQIAALVGLAPYDFDSGKLKGHRSIYGGRMPVRNVLYMAALSASRYSPALKAFHNRLADADKKSKVIIVAVMRKMITTLNAMLRDNAAWQPQSA

SEQ ID NO: 310695 - protein, 359 aa, unidentified
MKIVGCDFHPSYQQIAVLDTETGEVLEKKLMHANGEAEKFYRELQGPALMGMEATGNARWFELLVQKLGHELWIGDAAKIRASYVRKQKTDKRDAAHILKLLVEKRFPRLWVPDGQQRDIRQLLTHRHKLVSVRTRLKTELQHLALNQGVQKKRQLWNEKGRALLASLPLQGWTQQRRKDLLQLLAVVEPQIVQLDKAVEQAAKTDPQAVLLMSQPGVGPITALAFSVTIGDVSRFERSKQVSSYLGLIPTEHSSGNKRRLGSISKQGNVFLRALLVEAAQSVVRHDPGFRKEYQHRCHHKEKGIAKVAAARKLAVRLYWMLKSNKSYSELVLNGGSPRHPVAAKAKAVQLNGHPRISH

SEQ ID NO: 310696 - protein, 377 aa, unidentified
MKRIKFVGLDVHAETIAVAVAELEGEVRSIGVIPNRCESVRKLVKKLGPVEELRFCYEAGPTGYVLYWQLTALDAKCEVVAPTLVPVRAGDRVKTDRRDALKLARSYRAGELTAVWVPDAAHEALRDLVRAREAAKRDQLRARNRLTKFLLRHGKRPPEGVNPWTLNYMNWVRKDVHFEPLAQQATLLDYLHEVEHMAARVTRLEQAIEEAVQLAPQQMREVIEALQALRGIAKVSAVTIVAELGELSRFGEARQLMAYSGTVSREHSSGESCKRGGITKTGNVHLRRIVVEAAWAYRHAPAVTACLRKRQERVSEEVKEIAWKAQHRLHGRYRKLTARGKNTGKVITAVGRELLGFIWAIGVKVEAEQRKALGQAA

SEQ ID NO: 310697 - protein, 439 aa, unidentified
MKTKKAFKIIHPYAAGIDIASKEHFVAVNPELEDEPIQSFGAHTEDLYALSKWLKKCKVDTVAMEATGIYWVSLFLILEEAGFDVVLVNARHVKNVHGKKTDVKDAEWIRQLHSCGLLSSSFQPDNYTRTLRSYVRHRKNLTDMAATHKNRMHKALELMNIKVQHVITDITGKSGQEIIRGIINGERNPELLAKYCDGRIKKSKKPEIIKSLLGVWKDEHIFELRQSFDLYYIYQKMINECSVKIDALLKQKLAENIQSVQVQPQLQEPQMSDPKDVLKSILGVDITACYGLTEKNSVEILSEIGFNVHKWPTAKHFTSWLNLAPNNKITGGKVIKTRRDKKRNYAGQLFKIAANSIQRSDHWLAHFYRRIKARSGAGKANVATARKLAVIFYNMLKHKMEFNPLPNAEYIKRQNQQQLKRMNKQAVRLGMILVPIPTS

SEQ ID NO: 310698 - protein, 353 aa, unidentified
MHVTSAAWTDGLIIGGVDTHRDTHHAAVIDQVGRHLADAEFPATLAGYRHLLEWLAEHGRLERVGVEGTGAYGAALTRFLRERGVAVVEVDRPDRKDRRTRGKSDPIDAYAAARAALSGAASGHPKARDGRVEAIRVLRVVRRGAVKARTQTMNQLKGLIVTAPADLRESLRGLPTAGLIATCARLRPGSGDRPAAVMSQCTKLALRRLARRYQQLSREIAELDAELQPLVRITAPALLELPGVGAEVAGQLLASAGDNPDRMRSEAAFAHLCGVAPLPASTGRKDRHRLNRGGDRAANTALHTVVLTRLRYDPRTREYMRRRTGQGLGKKEIMRCLKRYVAREVYRVITAST

SEQ ID NO: 310699 - protein, 394 aa, unidentified
MKWTRPLCGPASISQNEFKTSETIQPQEASPVKHPMSVLGSDIAKRVFHVVGMHKRGQIVLRKRLSRHDLMPFIATLPPELIGMEACGGAHYWARRFREHGHEVKLMAPQFVKPYSKSNKNDMRDTDGIGEAVTRPTMRFVPTKDVDQQDIQALHRVRERLIGARTALGNEIHGLLHEYGIVVPKGVSKFRQTVVGKLEVEKATLTPLSQEMFGKLVEEFAVLDQQLAYYQEKLATVATTHPACQRLMTIPGIGPLTATALVAAISDASAFKNGRQFAAWLGLVPRQHTTGGKERLLGISKRGETYLRKLLVHGARATIRWGGRKTDRRSQGMRQRLERRGNNRTAVAVANKNARIVWALLTSHQDDQPATSEGEQTRVGVTANRSLTRIGAAL

SEQ ID NO: 310700 - protein, 324 aa, unidentified
MLPTLGIDISKDSFQVELSVNEKLRHRKFANRKEGFAELCVWLVKHKTVRVHACLEATGPYSEDLALYLQQQGHTVSVVNPAQIKAFGQSELLRNKDDRPDAGLIRRFCEKQRPAAWIPPPPHLRELQALTRHLENLIETRQQQLNRLEGTKTKGVIKSLRKLVAYVETEIARTEKQIQEHIDNHPDLKQQCELLESIPGIGKRTAAKLLAEIGDIARYKSARQVAAYAGLTPRNNRSGTIRGKTRLSKIGNARVRKALFLPAITAKRYNPIVRAFCQRLASHGKNKMQIIGAAMRKLIHIAFGVLKSGKQFDSNHELLLNPVS

SEQ ID NO: 310701 - protein, 466 aa, unidentified
MELILGIDVACRAAHQASLARPDGTFVWTGRRFFTRPDELEKLWTACGLKKRDTVRIIMEPTRNAWAPLASWFRHRGARVSMVPTTQSADLRAYYSKHAKNDHLDSKMLARLPLLHPEGLRDHTGGGPAEPLRRIVKIRSSIVKRRTAVFQRLDAQLELLGPAWYDALSARFGKTALELLARYADPNTVIRLGHARLTRFLIRHSRGAWRETYATAILAAARESLQLWGSGDDARIDFAELAADIAVEAEQALALTEQIDDLDERAANLYAEADPNGIIASAPGVGPIIGAVIAGRLGDPHRFHSLAAIRAYSGLIPKLNQSGQTHQQTGLTKAGDPLLREALFAAADHARKTDPQLAAKYKRLMQTERHHDSALCHIATILLTRIATCLRTGQPYKMRDIDGRPIHADEGRKLVTAHHRVDQKIRVKAADTRRTQRLKGRTGRGQQESPSAPIHRPVNHSLEAAS

SEQ ID NO: 310702 - protein, 318 aa, unidentified
MSDSVFIGIDVSSQTLEIASSDQTKTWQVANDTSGIEQLVSQASALAPGLIVLEATGGYEFEAACALQAAGLAVAVVNPRTARDFARAMGALAKTDALDARMLAAFARVLHQHPERERFVKPLADAELQQLQALVLRRRQLVQMLTSERQRLRLAHAAARPSIERVIELLKKELGDSQAEVAAHVQHHHAHLAQALASVPGIGAASVAVLLAELPELGKLDRRRIAALVGVAPLNRDSGQMRGQRSIWGGRADVRRTLYMATLTAVRHNPALKACYERLLAAGKRKKVALVACMRKLLTMLNAIAKHGSTWDSTMHIA

SEQ ID NO: 310703 - protein, 349 aa, unidentified
MSQNLNSAVAVIGIDIGKNSFHVVGLNDRGAIVLRQKWSRGQIEARFANMPPCLIGMEACVGAHHLSRKLKALGHDARLMPAKYVRPYSKGQKNDFRDAEAIAEAVQRPTMKFVATKTAEQLDLQALHRVRERLVSQRTGIINQIRAFLLERGVAVRQGLRFLRAELPRILATPPDVLSTRMERVIRDLAEDWRRLDERIDHLSSEIAVLARQDVGCERLMSVPGIGPIISSAMVAAIGTGDVFSKGRDFAAWLGLVPKQISTGDRTILGKISKRGNRYLRVLFVQAAWVVLIKPMSWERHGLKHWIEAARKRLHRNVLAIALANKLARIAWAVLAGGRTFEASKLQAA

SEQ ID NO: 310704 - protein, 312 aa, unidentified
MDAIFVGIDVSKDRLDVAVQPIGESFSVSRTGAGIEELAERLKAMSPKVVAVEATGGFETVVAAGLAGVNLPVVVVNPAQVRAFANALGKRAKTDPIDAAVIAHFAEAAKPQVRQLPDETTQMLADLVARRRQIVEMIAAESQRARRLTSARLKKSIARLRKALEKELADLDGEISDHVRGSPAWAEKEDLLASVPGIGPTIARSLIAELPELGSLDRRQIAALVGLAPWTRQSGQWRGKSFIGGGRANVRRVLFMGAMVASRFNPTLKLFRDRLVAAGKPKLVAIIAVARKLLTILNAILRDKSPWQLKNA

SEQ ID NO: 310705 - protein, 366 aa, unidentified
MKTDTKNNEKVQALLQEKAGRIYIGVDFHKLTCTLCITDFFGLEKDTVTVDTDKLVAFLESYKGSEIAIETTGGSNHMVSVLVANGHNATLVNTNKTKAIGLGGQKNDDKDAEVLSDLLRTEYLPKVHLKSLLSREVKTILVQREMLVQTRVSLMCHVRGILREFGITIEAGPKNFYKFAPKAVSDISNEVIKKSLEENVEEIQKLKSREVAIEKSLRVFCETNHPEFFKKVERLETVPGIGSTTAMLMVAVMDDVERFDDAQKWGSYLGLTPREFSSGEMKKMGSITRSGCEMLRRYLIHGARAVMKTVQFKKEKTMIDNWALNKKKKIGMNKATVALAHKLARVGFAILRDDEDFKSVQFKKSA

SEQ ID NO: 310706 - protein, 343 aa, unidentified
MEHTTIAVDLAKSVFQVAVSHRAGRVDAERRLSRDRFLAYFAQQPPATVLLEACGSSHHWARQLEQFGHIVRLLPAHDVHRYVRRNKTDRTDAKALLEAARNEEIHPVPVKTVEHQAITSLHCLRSTWLATRTARLNTLRGLLREFGLFIPVGAQHVVPRVRELLGEPNAVPVLMRTTLASTCDETGVLEANMRDVERQLTALARQLPDVTLLQTVPGVGLLTATALIALVGDIRRFDSGRHFASFVGLTPKEDSSALRRRLGAISKQGDVYLRMLLIHGARSFLWHAKRRVHPHALQTCARATEQRRGHNVAAVAVANKLARIIWAVWREQRPFAANHGTRT

SEQ ID NO: 310707 - protein, 414 aa, unidentified
MKVIYTICCGIDVHKTFLVGTIISTTDGVQPHYQKKRFSTYNSDLNRFADWLHSNNCLDVCMESTGKYWVPVYNILEERKIRVTIANPKWVKAVKGNKDDTKDFKWIGDLFRLGLVPGSFIPTKDIRILREFTRYSYKLTSMKSSEKNRFQNAFTVCNVALDSVVSDMFGKSATAITDYLISEDTFNPEYCVSLLKHSLKKKSESVLESIEGYSITQEQKLRIRIVRSHLNYIESLISQIDSAIDVMVAKHESLISLLCTIPGVDRNSAITIISEIGNDMSQFGSSKRLCCWAGLTPGNNESAGKKKSVRITRAGVYLKPALVQVAHAAVKAKDNSYYRLKYEQISKRRGKKRAIIAIARMILTAIYQMMSTGEVWNHTDLFKVDMPETLKEKQLSKAVKQATKFLEKQGLTVA

SEQ ID NO: 310708 - protein, 309 aa, unidentified
MTTSSYAGIDVSKDRLDVAVLGEEQEKQVCNTQAGIEELVQWMLGLQPELIVVEATGGYQRAVVEALFRAGLAVAVVNPARVRQFARGCGLLAKTDKLDAWVLAVFGQRVQPRRYAGKSEAETQLSALLARRKQVEEMLKAEQNRLRTVSPSLRSSLERIIAILKEEKKRLDEQIRELMKEQKAWQEQTEILSSAPGVGPVTTATLLADLPELGKMDRKKIAALVGVAPMNYDSGKKRGYRKTKGGRADVRCVLYMSTLVATRYNPLIQAQYQHLLKHGKEKKVALTACMRKFLTILNAMMRDQQPFRG

SEQ ID NO: 310709 - protein, 385 aa, unidentified
MNSVGIDLHRKRSHIAALDEAGMQLLSRRIVNDPQTFLALLEGLGECRIALEATYGWEWLADVLQDAGYELHLAHPMRTKAIASARVKTDAVDARTLAHLLRADLLPEAYIAPRELRDLRDLLRHRVALTRMRSALKNRVSAILAKNGIQRPYSDLFGPAGTRFLAELELREGPRRRLDSTLALIADFTREIDATSREIDARAKDDPYVEVLCQIRGVGRYIAMLVIAEVGDITRFPNARRLCSWAGLTPTVRSSDGKARLGHISSQGSPALRWALVEAAQHAGSGGGPLHDTYERIAKRRGKQIAKVAIARQILTLCYYGLRDGEIRCLAPRATTRAIRPPAVSMTRRADHAPPARGAAIPRASSAVVNGLARPTRQADGRPLD

SEQ ID NO: 310710 - protein, 351 aa, unidentified
MMIIGVDYHPSSQTIAFLDQETGECGERQLNHSDGEAEKFYRELKQRGVSVRVGMEATGHSRWFERLLAELGFELWIGDAAEIKTKRVRKQKTDREDARLMLKLLLENRFPRIWVPSPENRDLRQLLWHRHRLVQMRTRIMNQLQAVAMNEGYRWKKKLFSEKGRGLLEKLPLAPWASRRRKELLELLDQLDPKIAELTAAVEQEAKKRPEVLLLMTHPGVGPITGLVYVLVIGMPERFPCGKQIGSYTGLIPCEDSSAGRQRLGHISKQGNTLLRFLLVEAAQAAARCNPDWRRRYMHLMMRREKRIAKVAMARKLGVRLYWMWRNNWQYSQLVEFGSNAGKLVLVHGVK

SEQ ID NO: 310711 - protein, 388 aa, unidentified
MQVIADRPEAPSAIRSDLGAIFVSMELSRSTWLITSLSPGGGEKMSKHSVPAGDICTLLTRFSVLKQKAFARTGKSFPIIVIQEAGLDGFWIHRVLQNEGIESHVVDPASIATSRRRRRAKTDRIDGEALLRTLLAYKRGEPRVCAMVKAPAPEEEDRRRLCRERKVLIAERVKHVNRIKGLLFSQGVSGYEPLRRDRRRRLDELRTGDGRALPMHLKVQISRELDRLELLLEQIKAVEAERDALLAAQQVAAPGPVAMLLDIKGVGPEFAAILWLEGLFRHFDNRRQIASYAGLAPTPWQSGSVDREQGVSKTGNPRLRTTLIQLAWLWLRHQPQSALALWFEERVRRNGGRLKKTTIVALARKLLIALWKYVTAGVVIEGAVMKAA

SEQ ID NO: 310712 - protein, 387 aa, unidentified
MPQLNDLSRSLVALDQDSTIIAVVELSQSSWLVAGVLPGIERQPRKKLEPSAERLLGLLHRWRDEAVRAGRNITRIALAFEAGRDGFWLARWLNARGVEAYVIHPSSVAVSREHRRAKTDRLDTELLKRAFLGWLRGERGHCSMARVPTIAEEDAKRPNRERECLVGERTRIVNRMKGTLARLGIRNFKPTLRKAADRLATLHTPEGMPLPPNVLAELRRAMARLGFVVSQIREIEQARQKRLEQQPETGPHAMVRQLSRVVGVGIETADMLVHEVLSRPMRDRKAVARYAGLTGSPDESGTKRREQGLARAGNARVRRGMIQLAWRFLLFQKDSALALWYRARTADSRAGTRKTMIVALARKLMIALWRFVTTGETLEGVVLRPAG

SEQ ID NO: 310713 - protein, 340 aa, unidentified
MFTNFVGIDVSKSKFDLALIKGQDKDHFIQGVFDNTHKGIKTMSKFLEKEHNVQLSETIFCMEFTGVYCRPLTSFFVEQDCHVWIEMPVNIIRSLGLQRGKNDRVDAHRIALYAYKNRDDIKLWKPQRDVILQLRDLLALRERLITSQKALTNPIEELIAMGAKSAAASVRKNCHKTLSAIENEIGQIDKNLDEIIKDDPQLKELFQLATSVPGVGKLTALFMICFTNEFSMYTNPKQLACYCGVAPFEHSSGSSVRGRTRVSHMANKVLKRMLHMGAMSVISRDPELRDYYQRKVAQGKNKMLVINAVRNKIIHRLCAVIKRGYGYQSEIIFKERLVLS

SEQ ID NO: 310714 - protein, 429 aa, unidentified
MTRISVGVDVSKNRSTVCIMDQDGKVIMRPFLVWHSTEELDFLADTLKRLNGEVRVIMESTSIYQYPIALHLKEKGIFISIVNAYKVKKFANTDFRGGKTDKKDSRTIASYGISYWYKLVEWQIPKDTYFNLDLLNRTYMNAKKHRQIILQELQHYIDCAMPGMDKELHSLNLNTKKDFMLDFVEKFWHRDKIVNMTEAEFTEVFTAWAKEKGYRPGKGKAAKIYAIAKSCIPYYPANPTVKTILQCIVDKLSGVNRTLVTIVTQMIEEAKKLPEYQIVREMPGVGDPLAARFFGSAGDIRRFKNSKALVAYAGIDSPPDESGDFSSTHRHITKKGSKVFRDTGYEIMMALRAQKRTWEKVRKNPDVYDYMLRKEAEGKPPKVAKIAALNKFLRIIYARIKELYDNMALAERAKTKTRSKTRAKTKVTA

SEQ ID NO: 310715 - protein, 322 aa, unidentified
MSGSILGVDIAKKKFEVALLINGKLKHKVFTNDEEGFEELELWLKKQGANHVHVCLEASSTYGDELAAYMHDAGHSVSIVNPARIKGFAQSELMRTKNDKVDAGLIARFCLAMHPEPWTPAPPEMRQLQSLVRRVDALINMRTQELHRLGTAHKAIEHSIREHVAYLDTQIDVLKRQIADLIKNDPDLKAKKDLLKSIPGIGEATIAAILAELHMFERYDSVGKVVAFIGLAPRQFISGSSIKGKPRLSKIGHARLRKALYMPSLVSIQCNPIIQVFYHRLKENGKNGKVVVCAIMRKLVHLIFGILKSGRPFDPNYTTNQA

SEQ ID NO: 310716 - protein, 422 aa, unidentified
MLHDSEDTEEIIERVAALDIGKVELVACIRVPNPDSPGRRVQEISTYSTMTRSLLGLGERLRELGVSRVVMEATSDYWKPVFYILEAQGLDPWLVNAKDVKHLPGRPKTDRLDAVWLAKVAERQMIRPSFVPPPRIRLLRDLTRYRVDLIKARTAEKNRVEKLLEDAQIKLSAVASDIFGVSGREMLAALLTGERDPVVLAQLARASMRAKIPVLEQAFVGRFTDHHAFLLRTMLARIDETSADIAAVEARIEELVAPFAQAVTKLDEVTGIGRTAAHIVIAEIGIDMSRFPTAAHLCSWARFAPGIKESAGKNKGRGSTGHGNPYLARVLGEAAVAASRTDTFLGERYRRIARRRGKKKAIVAVGRSILVIIWHLLSDPEARFHDLGSDFYDNRIGPERKKRAHVRQLEALGYKVTLEPAA

SEQ ID NO: 310717 - protein, 358 aa, unidentified
MTLHSPDKGKLSRHKLEGGDHVELLALISRVRERAARALGGIPAVVSCYEAGYDGFWLHRLLLAAGITNLVFDPASIAVDQRARRVKTDRIDGEKMLRTLMAYLRGEPQVVRIVRVPAPEQEDARRASRERGRLIKEQTAHTTRIKALLRLLGMAVGNPRRRDWLNWLAAQRDWQGQAVPPRMLAEIKYEHARLMLVREQLEALAQASAQADPAPAAVQMTERSELLLRLKCLGPAFASTLANEAFYKDFRNRREVASYFGLTPSPWQSGGIDRDQGISKAGNPRARCAAIELAWLWLRHQPESALTRWYRSRTHNNASKRNKRIAIVALARKLMVVLWRFLTTGLLPEGALLKAVKA

SEQ ID NO: 310718 - protein, 349 aa, unidentified
MNVIAIDIASEVSSVCILDSKGRIKLEERIPTKISKLKALIKQVPRPRKLVFEEGTQAAWLWRELNFLCDDTLVCDPRQAANLSGHFKNDKNDARNLGLRAQANLLKPVWHGGAELQALRESVRTYQLFTEQSTRLKNQLKAVFRGVGLRVGTEPYSSKARKEIVKDLKMPIHRERVQRTGAVLDEVTKQRILALKTMVRLARKSQFYKPLKTIDGIGPIFAAMFISEVGDPHRFRTREQLWSYSGLAVSTHSSSEFEIKNGALVRKTKSVQTRGLVTAYNTTLKYVFKQSALTLSRTKWLEQHRKLLLNSKNPNNALLTLARKLASVMLHIAKTGEKYDIAKAFKDTK

SEQ ID NO: 310719 - protein, 389 aa, unidentified
MGSSLHLNTPAACGEHGTMFVAFELGKTQWKLGIVLPGKARLSRYVIDGGDAEAAWQLIAKARARAEKQLGGPVRVMSCYEAGYDGFWLHRWLLARGVDNQVIDPASLQVNRRKRRAKTDRLDLEQLIGALIRLLWGDRLACKVVHVPSPAQEDDRRAWRERERLVKERTAHTNRIKGLLHGQGVRDALPRAKAFGSWLGSQRTGDGLALPAHLVDELKREHGRLMLVEAQIGEIEAQAEAARKAAAPSPLAVRINQLIELKSLGPVSSQTLVGEVFFRDFKNRRQVGSYFGLTGTPFDSGDKTREQGISKAGNPRARTAAVELAWLWRRHQPASTLSRWFEERVGHQKGRVRRIAIVALARKLMVALWRFLEHGVVPEGANLRAAPHG

SEQ ID NO: 310720 - protein, 363 aa, unidentified
MKIMTGIDLHSNNALCGLMDESGRRLVHKKLPCELPAILQLLEPYKERIATVAVESTFNWYWLVDGLEDHGYHVVLANPARMKPYDGLKHTDDVSDAFFLTELLRLNILPTGHLYERKTRPVRDLLRRRLLLVRQRTSLILSFKSLNERTLGERVPLARVKSLSADEARARFTAPADQLLSGTEIELMGHLHKAITQIEEHVLGVAGKWNTYQRLQTIPGIGQILGLTIALETGDAGRFADAGHFASYCRCVKSLRTSNGKKKGENNRKCGNRYLAWALVEAAHFACRYDERCRRFYDRKKQQTNPIIATKALACKLAKAAWHVMKEDVPYDAARVFGAGKKSDLGETGREPAKGSGPMSQEN

SEQ ID NO: 310721 - protein, 344 aa, unidentified
MIWVGLDVHKGFSRMGMFDPASGAVQDLGTVRNEPCALEEKLSELPAPKTVVLEAGRSSYHMAGLLEAMAEQVWIVDPGEVRKLQRRVAKTDRRDAAALAWWAAKGVLTPQWRPDAELLDLRELTRGKTVLIRLSTQVRTRMRGLLARHGYECPHRDLLGERGQLWLDEVELEGHAGQLLAALGKILVVIQAKADEFERLVEQESSTHPVAHRLRTIPGIGPFLGLALAAEIGDINRFPSPPHLRGYSGLVPAVYQSGDKDARGPLTKTGNAWLRYAAVLATQRMAQMRHPDPTLKRIFLSVAFRHGRNPGKVAAARRLLDLVYHLLKEEEDYQAPIARAASTI

SEQ ID NO: 310722 - protein, 370 aa, unidentified
MKKYSEAFVGLDTSKKKHALAVADGGRNGEVRYVGELDSSPATVEKAISKLADRYRKLHVCYEAGPTGYGLYRQVTALGHDCTVVAPSLIPKKPGERVKTNRRDAVTLARLHRAGELTSVWVPDATHEAVRDLARAREGGSEDLRKKRQQLLAFLLRHGRLFSGRQHWTLAHLRWLAHQSFEHPAQQIVFQDAINAIEDAAARLQSLDRQLAAIVPNWSMAPVVAAYQAMRGVSFLVAVTFVAEIGDVRRFDNPRQLMSFLGLVPSERSTGEAVRRAGLTLAGNRRARRVLIEGAWTYRYPARVSETLRARLEGLPKSVRDIAWKGQVRLCARYRRLVAAGKKTPVVIAAIAREMAAFLWAIGHQVEPLT

SEQ ID NO: 310723 - protein, 397 aa, unidentified
MRSQTLCSMHYVGLDVHSRQSSIEILNDRGQTVKRQTIHGTPDAVVAELAKWPHPFSICYEASCGHGTLHEKLSPLAKRVVVAHPGQLRLIYKTRRKNNRFDAGKLGKLLYLDVVPAVHVPKLDVRQWRGAIEFRHRLLGRRVALKNQIKGLLRGLHIEAPRGLWLRKGMKWLKELGKELGKEPASDQAENEVVDQKTDPASKQKADQTAAPTPVIRLSGMDALRRDLLGEELGEINGKIKRVEIELAKIADKHPGVQLLMTIPGVGIRTAEAVVAYVDKIERFSRMKQLGTYFGLVPCQDASANVNRLGHITREGPATVRKMLCEAGWQAVRRSRKIRGWFDRIVGNDPDRRKIANVAVARKLIVVMGAMLRSGEAWREQDQAEGSSDVKTKEPCK

SEQ ID NO: 310724 - protein, 372 aa, unidentified
MVEREFHLHGSKADLMGRKIWTGLDVGVETTQICIIDDHGEVLQEAACATSLPSVDQEIRWLRRRRSARLGMEASSGSHLARGLRSRGYSVDLYETRALSKFLRLRRNKTDQGDALGIAEAGRLGATVVSRVHLKSFECQCLQSKLTIRRNLIRQRVALINLLCRQLELFGGRVSRSTRSMQLRPAVEAEFKKVFGRAAACPVDEFYQLLSYSEQLLAYQMSVDRELRSIAAENDVCRRFLEIPGVGPICALTFFAAVGDPYRFSSSKDVGAYFGLCPTIHQSGLTCRVGRISRMGNVAVRSLLVQASMAFVRHRNADKQLLAWVAGVEQRRGKRKATIALARKLAIVMLAIWKSGDHFRSEPRSEAAGLVI

SEQ ID NO: 310725 - protein, 421 aa, unidentified
MYYVGIDVAKSFHVVSVIDDEEIKVINKPFKIKNDTKGFEKLLTLLESVSLDKEEFTIGLEATGIYGENLLEFLKSKEYLVKLLNPFQTTRYREQITLKKVKNDEIDSLVIALLLKSGKFSSGYITDDEYQSLRTLYRNRSSIQTDMKDVKKRILTQITVTFPEFEDFINPFTISGLALLDKYPTAHHYKHSSVDRVMKLFRHIQGNNFTQSKALQLLELSRESIYSGKAKDARAIAIRSSIRLLQMYLSELDIIEKEILSLLENSSSSIQTNSTTSVDEVGKEIEKTNSLIANLKTIPGVAEKTIAAIISECGDLSRFPTIPKFIGYLGLFPTENSSGNSKSIGHLSKRGSPLVKHALYMSAVSCLIHNTQLKQLYDTKRSQGKSKKESLIAVSRKIATIIYSIFKYNIPYDPNRVFAKS

SEQ ID NO: 310726 - protein, 361 aa, unidentified
MIVIGTDTHKASHTAAALDEGTGRVLADRTVRARRRSFDDLLLWGRGLDTERVWAIEDCRHVSGALERFLLARGERVVRVAPKLTGRARDSARERGKSDAIDAVAIARAAIREGLDTLPVAQLAGPELDIRLLVDHRERLVATRTRLTNDLRWNLHDLWPELEIPPRGFIAVHWPQRVAGRLARAEQTTRVRIARDELRRIRDLTKTIDELQRELALLVAKVAPRLLAERGCGVLIAAKIVGEVAGVTRFATDAKLARTAGSAPIPASSGHWIRHRLDRGGNRQLNCALHRLAITKGLHDPNTAAYLARKQAEGKTRREAIRCLKRHLARRVWHLLQPANTAPTAITTIHCNTPYNSFSLT

SEQ ID NO: 310727 - protein, 341 aa, unidentified
MSIVYYGGLDVHQESIVAFLFSPETGECFEDEVPNDRKHLERAAKRWRKRGELRLCYEASSAGFVVKRWLDELGIPCEVVAPAFIPKGPGDRIKTDRRDARRLALLYQSGMLRPVRVPDEREEMARSVVRHREDLTRDMTRTKNRILKFLGLLGLRYTQGRNWTEKHRKWLRSLNLEPLQAMVVESHLRVLEQLEAERREVDQKIAEIAETPFYREKVQRLMCLRGIALHTAMVLITEIGDAHRFRGSPELMSYLGLVPQEYSSGERRRSGKITKVGNSHARWVLCEAAWNQARPLGRSDRLAKQHATNRRRWLRSPRRQSGGCITNSGKSRCAKTGTRQR

SEQ ID NO: 310728 - protein, 361 aa, unidentified
MTTEEKRHTMFVGIDVHKDTHTAVGVSPFGEKLFEITVGNYEKDFLSLSERIREVGSTSVLSPFVGLEDCSGFGERLALYLHEDGYRLVHVPPVLVDRDRKRQTHPEKSDSLDALGVAKVMLASSDTLPVYTVSENSKNAKILKELSHDRDFLVSERTRLKNQVHILLHRIYNTEYRTYFKDPFSLKALRHWAKVRPQCDEHVLRTLKRKVRRLLDIRTEIQELEKDMEAVMEKRAYTLDTASGCGTVLAASIIGEIGDIDRFKSPAALAKYAGCAPRSHSSGKTERHRKTRSGNRKLNRSLHRMALSQISRSGNDAAKKYFEKKISEGKSKSQALVCLRRHMVNVVYMMLKHNEEYRQPA

SEQ ID NO: 310729 - protein, 352 aa, unidentified
MSEQYAGHQIVGMDLHRRRSVLVRMTETGEHLETVRISNDPEYLRAVMARAGEAPDVVLEACYGWYWAADTLAELGATVHLAHPLGVKMFSLRRVKNDVRDAADLADLLRLGRLPEAWIAPPACRELRGWVRHRAKLVGLRSQLKCQIHAVLAGAGVQVSMSDLFGVAGQDLLASIQLTPESRARVDSALRVITGLDFEIELFGKLVAGRLRADPGYQAIQAIPGVGPVLAAVFVAEIGDIGRFRRAEQLASWAGLTPKHHESDTTVHRGPITKQGSRLVRWAAVEAVQRVPAHTRLGQIRDHVGQRRGRNIGIVAAARELTELVFYGLRDHHIRALPGTPSTASSTPSPAA

SEQ ID NO: 310730 - protein, 401 aa, unidentified
MSKKNTRRSLDTSISYAVIGLDLAKADAAVAAVPCSNDEMGLIDRMDYATLFEQAEKLPPTLFAMEPCCGYSHICLRLQSLGHDVKVISGRAVKNWIATHKANQKTDLNDAIALAKLALHDDALTPIRVKSVEQCRMATVQTIRRQLRTQATKSLVCFKSTCQSWGIVIPRGSLSTKKMEAAIAGAEDMLGAEVTSSLKILLDAYKVTVQSINELDKKLDALVQNNEQARLMNSVLGIGTQTAARLATITGDIQRFQTPRSYVAYIGLAPRNIITGHCGTPTPKKNGASRPVSNRGQGKVSRNGDRVARTYVIQGAASIYMQNCKNQLPECQLRRWLEEQIKRGKPYGKIIVSLAAKLLRIVWALLTYKEEFNIHKAGVPRSVLAAIERPQESTVAAEAAA

SEQ ID NO: 310731 - protein, 366 aa, unidentified
MIVIGTDTHKRTHALAAVDEGTGRIRGNREIKADEAGHLAALKWARGLDELRVWAIEDCRSVSRRLEEALIAAGERVVRVAPHRMGASRRGEREPGKSDEIDSLAIARAVVKDGVECFPAAFLDEQAMEIRLIADHRHDLVVERTRMQNRLRWHLVTLSPELEASLKRGALADARQLDRIDRQLRRIAIGARVKVAREQITQIRSLTRQVNTLKDELAILIAAHRPALLAETGCGALTAAILIGRTAGAERFATDASFAQQTGTAPLKCSSGQRQQHRLNRGGDRQLNHALHIIAITRARYDPATRAYLARKQAEGKTTKGALRCLKRHLARRFHHLLAQPPTPEMGSTDHDQREQPKNTELANNT

SEQ ID NO: 310732 - protein, 340 aa, unidentified
MQVIRFGIDLAKNVFQVHGVDATGRVVVQRQLRRAQVAKFFAAQPPALIGMEACGSAHHWGRTLRALGHEVKLMPPAYVKPYVPRNKNDARDAHGCCEAVSRPDMRFVPIKTVEQQWARALHRTRDLLVRQRTQLANAMRGMLYEMGQTSAQGAAGLEALLQRVEAADEAIPEALLICLTPLAGQWRALDGEIGKLDKQILAQVRQQQAALRLTTIPSVGPIIAHATIAAIGDGRQFTSGRDFAAWLGLTRKSHDTGGKHKLTGHISRAGDRDLRRLLILGASSWLRQVRAKPDRGSPWIRGLLARRPVKVAVVAQAAKTARIIWAMLSSGQEYRAPVAA

SEQ ID NO: 310733 - protein, 410 aa, unidentified
MELLHPRCAGLDVHRDSVVACVRLAHAGGADQHVETFGTTTTALERLSAWLAGHGVTHAAMEATGVYWKPVWAVLAEGVDLVLANAAHVKNVPGRKTDVNDAMWLADLLAHGLIRASFVPPMAVQALRDLTRTRKQLVREKAGHVQRIDKLLQAANIKLGSVLSNIMGESGRAILDALADGETNPEALAGRVHTRVRASHGEFVEALRGRMAPHQCLLLRLHLAQADAIDTAIAEIDNEVGERLEPFRQAVARLNTIPGVSEVAASVIVAEIGFDMDRFPTAAHLVSWAGLCPKNDESAGKRRSTKLRKGAPWLKTLLVQAAWAATRRKASYLRALFHRIATRRGQRKAIMAVAAAILTAIYWMLKRGQPYRELGPDHFDKTNRARLAARLAKKLDELGFDVAIAERVAA

SEQ ID NO: 310734 - protein, 410 aa, unidentified
MRLCVGDDWAQDHHDIEVMDEAGQVLAARRLPEGVAGIGQLHELIGAFVPAGEDVEVQVGIETDRGPWVTALLAAGYVVFAVNPLQASRYRGRRGVSGAKSDGGDAHMLADAVRTDAHQLRPAAGDSPAAEAVKVLARTHKTLIWQRSAVVLRLRAQLREYFPAAVAAFEDLDARDALELLGKAPDPARAARLTRAQVSAALKRAGRRKIAERADAIVAALRSPQLGQPAALTAAYAATVRSLTAVIATLNEQVASLQGQVEAHFGQHPDAEIYRSQPGLGAITGARVLGEFGDDPHRYATAKNRKNYAGTSPITRASGKKKIVQARFVRNDRLIDALMLQAFGALRVSPGARAFYDAQRARGCAHNEALRNLASRLVGILHGCLKTRTRYDEAIAWGHRENIPQSDAAA

SEQ ID NO: 310735 - protein, 342 aa, unidentified
MAHYVGLDVSLEATSICAVDEKGNTVWQGKTSSMPQVIAKTIATNVPEAVKIGFETGPLSTWHWHDFKEMGLPIVCLDARHAKAALSIQVNKTDANDAHGLAQIVRTGWYREVEVKSIDAHLNRTLLIARSKLVEVRTKLSNQLRGVLKTFGLLVGKYSGRGFERRVRELIVGQVGLESIIDSLLNVWRCTCEQVQILDRFIRTQAQSDEVCRRLMTAPGVGPVTALAYSAVIDDPKRFKKSSTVGAYLGLTPRRYQSGEMDKTGRISKCGDILLRNYLYEAANVILSRVRKWSKLKAWGTKLTKRIGNRKAKVAVARKLAVILHRMWVDNTDFKWSDAQTA

SEQ ID NO: 310736 - protein, 419 aa, unidentified
MSKNMLCGCDVSLENNTVWLMLDDGSQPTKLFNADNNQLGAETLVERIYSIAKEHCVSDILIGTEATSMYDWHLLEYLAESKLALEFNLKLYRFNAKWIKNFKKSLAPRGKTDPIDSFAIAERLRMGRLPKKYIPDTKYQPLRKLTRFRFHLMQQIAREKNFFLANLFLKASAYSQIKPFGSTFSATSLSVINDFFSLDELAAMPIEELTEFILEKGKSHFSQPGEIVDNLKRVARESYRLKPELAPTVNLILASTFNNIRCYKDQVKLVDQAIAENLKAFKHTLESISGIGPVYAAGILAEIGDVHRFSNDSSLAQFTGLTWPKHQSGKFQAEETRMSHAGNQYLRYYLVEAANSVKRCDATYKAFYEKKYKEATKHHHKRALVLTARKLVRLVWTLLTRGVLYQPGYCSFEDLSKIG

SEQ ID NO: 310737 - protein, 382 aa, unidentified
MACKGAGKWLSSPALMKNTIVHDEGAAPLEVAVNKIKLSGSVIKIGLDVHARLYVAVAQYDQLLPKPARRLAPSEFVPWVRQLLRAGHVVHVVYEACGFGFNLYRELKALGVHCYVIAPRKLDEGYTRVKTDPRDATTLCQRLSRYVEGNTRELAVIRVPSEAEEQARHVSRQREQLVRHRQKLEAQGRSLLVSHSLPAPAHWWKNQTWSRLSKLLPSWICLRLEVHRPALLTLEQQISALSTELEAAAPADVPAGVGKLTTVVMTREICSWERFRNRRAISSYTGLCPGEHSSGTKRIPGSVTKRGNPRLRAALVECAWRMVRFQPNYAPVKKRLSVLAKGARATGAQRKKAIVAVARHLAVDLWRVHTGRNTAAQLGLTI

SEQ ID NO: 310738 - protein, 338 aa, unidentified
MKAYAGIDLHSSNNYIGIMDQDYKRLFGRRQPNDLTNVLKVLEPFKADLEGVIIESTYNWYWLVDGLQEHGYTVHLANPSAIKQYEGIKHTDDRWDSFWLAHMKHLNILPEGYIYPKEQRTVRDLLRRRLFFVRHRTANILSLQSTITRNLGIKISNNEIKKLNMDDAYKLFDSSNLVFMAQNNISAIKHLGKIIKGIEKQVKSQVQLCKEFLMLTTIPGIGTILGLTIMLEVGDIGRFSKVGNYSSYCRCVSSKRLSNGKKKGENNKKNGNKYLAWAYVVAAHFAKRYIPKAQKFYQQKMAKANGAVATKALANKLARASYFIMRDQVPFDEDMLFK

SEQ ID NO: 310739 - protein, 410 aa, unidentified
MDLLRREVPASALVVAVDPGKAFNRVWLTTGERGMIGEPVSLPVLRDGVDELERLIDASGVIGAPVIGLEATGALHRAWAAEIERRWPGSLRLFAPSETTAARAQLGSRRFKTDDRDCAALVWLVRQGAGRRAEADTVEALRATVRHRAQLVDARRVLQQRLHDQLNALCPGLSAPPGHGRALKLESPTGQSVLACAAAFAGRPPSARSLLARAPGRMTRATAVFWAQRWKRLLAPPADAELRAERVGRELRRWQELQHDIERAERQLEALLGQTAGQILTTVPGVGIVRAAAFSAYTLPIERWPTAEHLYSATGLTPATYQSSTVTRRGRISRQGLPEHRDALMGIAWGLSQHSDAFGARDAELRARGFAPIQARVALARNACRLCWRLLQTQQPYDDRRYARARRRGR

SEQ ID NO: 310740 - protein, 431 aa, unidentified
MDQVIIGVDPHKLSVTIEARDNREILRATGRFGTDTRSYHQLLKVARQWPERTWAVEGANGIGRPLAQRLLADGERVLDVPAKLAARARVFDTGQGRKTDATDAHAVVMVALRDKGLRELRIDPELMVLRMLCDRRDELSRARAQALNRMHRLFLELLPGGAPVKKSVRQYQGLLATVRPRDLAGKTRRRMAAEELDDLHRLDAKLKAMKAELKAAVQATGSHLMDIHGIGPAGAARILADVGDIARFPDRGHFASWTGTAPIDASSGQHLRHRLSRAGNRRLNHVLYMAGIVQLRHDTPGRAYYRCKRAAGKTSMEAMRCLRRRLSDAVYRQLVTDAATRDAGPGGHSGATLSSSAAGLPPGTGTSDQPLPGPAPKTLPPPPEELKTPAAPAAATSRRRAKGVNVERPTGRTTLTPTSAVAHSTAPGPRT

SEQ ID NO: 310741 - protein, 357 aa, unidentified
MKIVGCDLHARQQTIAMVDSETGEFTEKTLFHEGNAVREFYATLEGPVVVGIEATGAMQWFLELLEELGIECRVGHPAKIRAKETRKQKHDRRDARLILELLIEDRFPEIWMPSTEQRDVRTLLRDRHQWVKMRARLQHTLQAIALNHALRQGHALWSAAGRGALQALALPPYTSQRRTELLSLYVQLQKRIQELDQVVEAQARQRPQARRLLTHPGVGAVTALATEVFLGDPSRFATANQVASYIGMIPCEHSSGKRQRLGKLTKEGNSLLRYLWTEATMHAVGKDPELKRFYRRKLIQKGMGKARIAAARKLGIRLWIMMRDRIDYEEFCRRGKLRQTGEAHAGMPGFNSGPARQ

SEQ ID NO: 310742 - protein, 422 aa, unidentified
MKTSCEIPFTAFVGIDWADAKHDICIQAAGDERREFSRLSHKVEAIDEWAQSLYRRFGGPIAVALELSKGPVVYALQKYDFFVIFPVNPSSLAKYRETFTPSGAKDDPTDAEFVLDLILRHAEHFAPLNPQSVEMRTLVSLVEQRRCLVNDRVRTTNRLRNTLKQYYPQPLQWFDRIDTPLFCAFIERWPTLVQVKRARKTTLQRFFHQHNMRSARLLEARLTSIKAASPLTLDEAVITSHRLQALVLVDLLRVTLAAIKRFDEAIAELAPQHPDYELFSPLPGAGPSLAPRLLVAFGEQRERFKNAAELQKYAGIAPVTERSGKKHWVHWRWQCPTFLRQTFVEWAAQTINKSYWAGLYYRQQRDKGCNHQTAVRALAFKWIRILYRCWQTKTPYNETLYLKALKRRGSPLLNQIEITIST

SEQ ID NO: 310743 - protein, 326 aa, unidentified
MTYPLGIDVSKAKLDVALLKADGKYRSKVFSNDETGFAGLLQWIEVHVPGGKADVHVCMEATGSYHEALALFLHDQGIAVSVVNPLLVKRFVEVDRVRNKTDEGDAKSLARFCEMTTPELWEAPSVGVRTLQALIVRLDTLQEMRQGELNRLEVAHISVQQSMRDVIAGLEGSIRDVQDQIRQTIDDDPDLRQRRDLLQSIPGLGDKTIPQLLAYIGRPERFKTVKALIAYAALAPLIRQSGSSLNKHRGMHPQGHRELRSALYFPAMVAGKHNPLIAAFWQRLKAQGKPGKVIVVACMHKLLAIAYGVLKSGKPFNPDHLKPTIA

SEQ ID NO: 310744 - protein, 366 aa, unidentified
MKKISTVAMQGIQIFKENQLTIGLDLGDRFSHYCILNEAGEVIWEDKLPTTPKGIEEVFGRISRSRIALETGTHSPWVSRQLNQLGHEVIVAHARNVRLIGESSRKNDRLDARTLARLARIDPGLLGPVRHRSAKAQIHLTVIRARATLVSARTALVNAARGLTKSYGQRLPKCDTEQMNWEMAQGLSQELREALDPLLREIESLNERIAEYDGRIEQIAKEVYPQVAVLKQVKGVGPLIALTFVLTLDDPYRFRRSRDVGCFAGLRPGRRNSGMSEPQLHISKEGDRYLRTLLVQGAHYILGPFGQDSDLRRWGLKLAERGGKNAKKRAVVAVARKLAVLLHKLWVSGEVYEPLRNNRKGMAAVA

SEQ ID NO: 310745 - protein, 451 aa, unidentified
MSKSMKKKKSKVKNLNEFNIINPNAAGIDISSIDYVVSVSEDRCKKNIQTFGAFTCDLKKIALWLLSCKIETVAMESTGVYWKQLFVVLQEHGLEVFLVNSRHVKNVTGKKTDEDDAHWIMRLHTCGLLTNSFQPEEQIRTLRELLRHRKSLNRNKTIAVNKMTKALNSMNVKLNIVLSDLTSVSGQKIIMSINSGERRPKELVKLVHHKVKASKEDILKALEGVWREECLFELKHATEHYYFLQNQTSECDKKIEEQMVLITAKYNDGDITGLKEKAIKKYSRKNELNFNINPYLQEIFGIDISRIYGFSDDTALTLFAEVGSDLSCFGTANRFTSWIGLAPNNKISGGKIISSHLPKKKHAIKKALIQAANSLYRSDNALGDSYRRLKSRMGPKSAKCAMARKLAIIYYTMVTKKDEFNIELLNLHQSSFKEKRIKFLENQLAELKSVA

SEQ ID NO: 310746 - protein, 315 aa, unidentified
MTISRKSRSSVNVGVDVGKDMLDICIHEKGIHWQEVNTREGVARVLRRLSHYQVERLVMEATGHYQLLLAEQAFLKELPVCVVKPLSVRRYAGAIEQLAKIDKIDAAVIAEFAAVIQPRPAPAKSRKLILIKDLLARRRQVMQMRTQELNRLQIMGKHVAPSCKRLLVTLDKEVVRLEKLLDEQVDTENEWAEKKSLLKTAPGIGNTMVYTLLADLPELGTMNNKQASALVGVAPINRDSGKVRGKRRVYGGRAGVRTTLYMATLSATQCNSVIRKFYQRLVAMGKHKKVAITACMRKFIVILNAMLRDNMAWQT

SEQ ID NO: 310747 - protein, 320 aa, unidentified
MKHKVGKDNTLARFIGIDVSKQWLDLATLPERETRRFSNDGAGQEQLGAWLVELAPELIVMEATGGLETRVATVLAAEGLALAVVNPRHVRDFARAFGILAKTDRIDASVLAAFAEKVHPPVRPLPDEDRRELIDLVDRRRQLVTMRAEEKTRLSQATASARQDIKEHIEWLDERLRRLDIDLTAKLRSSSLWKAKEEILISVPGVGRVTVLTLLARLPELGALNRRAIAALTGVAPFARDSGQHRGRRMIWGGRADVRSVLYMAAISAARINPVIKSFYLRLKQAGKPAKVALTACMRKLLTILNTMLRNNQPWHAPTT

SEQ ID NO: 310748 - protein, 387 aa, unidentified
MTVCTVNHLPAATHGETARCLFAIELSRKSWVIGIITPLSAKISRRILSGGDWRGLLELIEEVRARVSRETGRAVEVISCYEAGYDGFWLHRQLEAHGIRNYVIDPASLQVDRRVRRVKTDRIDTERLLRSLMAYLRGEPKVWSVVRVPSVAEEDARRLHRERDRLVSERVQHVNRIKGLCALQGIYDYQPLRPQAMAGLEQLRTAQGAALPPRLKSEIKRELHRLELVVEMIASLEAERDTIVEDKASTHVNAKKIQNLHKLKAIGPEFAAVLVGEIFHRDFNNRRQLASYVGYAPSPFQSGNVAHDQGISKAGNRKGRTTGIELAWLWLRYQPDSDLSVWFRARVGTVKGRIRRIAIVALARKLLVALWRYLETGLVPRGAVLKG

SEQ ID NO: 310749 - protein, 360 aa, unidentified
MVIARWTCGQFRRLHVDWQTGVATVPCSRSFWYERAHRRNAPRRSCRSEPQNLAIVEFVKSKAPGAVRIGLETGPTSTWLWTEIKDQGLPVICIDARHAKAVLKMQINKSDRNDAFGIARIMQCGWYKEVRVKGVDSHAIRALLESRALLVKMKRDLENQIRGLLKNLGLIIGTARGQTFHARVQELVEGGPHLAVAVLPLLETRMAIVRQIADLDRKVLMLARNNNQVRSFMTVPGIGPITALCYRATIDEPSRFKRSRGVGAYVGLTTRRYASGEVDWTGRISKCGDAMLRSYLFEAAGVLLTRIQKWCALKAWGTRLAKRVGLRKAKVAVARKLAVILHRMWMDGTEFQWSASKVAA

SEQ ID NO: 310750 - protein, 416 aa, unidentified
MTDQRQWYAGVDWASENHHVRITDGGGRDIGEKLFRHGGEGLAEMAGWLLATSGAIDAGQIHIAIEVPHGPVVETLLERRFNVYAINPKQLDRFRDRFSPAGCKDDSRDAEVLASALRTDPRCFRLLAVADPIVIELREWSRITEDLVAERTRLTNRMREQLWRYFPAMLELENDLGAEWLLDLWQLVPTPHKAARMREASVAKIIKRNRIRRFDAAHVLSVLRTQSVTVACGTTEAVSGHVATLIARIRLVNQQLKDAHQRLDSLTQRLALSQETEPGQQRQHDAAILASLPGVGRIVLATLLAEAWDALQRRDYAALRSLTGVAPVTKRSGKSRIVIRRHACHPRLANAVYHWARVAVQHDPRSRLKYATLRGRGHSHARALRSVADRLLNVACAMLRAGTTFNPSMVPENASC

SEQ ID NO: 310751 - protein, 315 aa, unidentified
MAEEKKEVFVGIDVSKMQLDVAVGEDGAFWSVTNDSEGIQELVERLKAVSPTLVVVESTGGLETPVVAEMAAAGLSVAIVNPGRVREFAKSVGLLAKTDKLDARLLTRFAAAVKPPASRLPSEEEQYLTGLVRRRRQLLEMRTAEKNRLNTTRIALRERIDNHIAWLNKEVEALEDEIDDFIRQSPLWAKKEAILKSTPGVGPVTSCTLLSELPELGQLDRKKIAALVGVAPMNKDSGPRRGKRCIRGGRVSVRSVLYMAALTATRFNPTIRAFYLRLLENGKEKKVALIACMRKLLVILNAMIRDLEPWHPNPV

SEQ ID NO: 310752 - protein, 413 aa, unidentified
MVKREKIELVKRQRIFVGIDIAGSKHRARFIDNMGEEQIKPLSFFNDREGLEKLERRVNEIPGIGDDIIFGLEPTGDYWKPVAQYLREKGYPVVLINPYHLKRTKEIIDNSQDKTDDKDSYLIADLTKQSKYFFPVIPEGVYAELREVSINWKRTSQQLARLKCHLSNFLAKYFPEYKGIFSDILGKTSLYILKHFPLPEDIERLGINKLYRVMKKVSKGSIKEGKIQLLYEKARTSIGLKGGSQTAKVLLKEVLSDIEILKKRKEKLTKMMDELLYQSGYRKNLLSIPGVGIVTGSLFLGEIGDPDNYERASQIEKMAGLNLVENSSGAMKGEKKISKRGRSTLRYVGHLVTTVAIGKSPEIKALYRYKVEECKKEKMKALTGLSAKMLRIMFAVCKNKTFYKHEEITRYFR

SEQ ID NO: 310753 - protein, 340 aa, unidentified
MGVSLKEISICVVDGEGAVVHRSTVPTDPEAVAQHFAEKGIAPDRIVHESGQLSIWLQRGLVRLGLPAVCIDARLAHRAMSAKLNKSDRADAEGLAQLARTGWFTEVHVRSEKADRLHTLIAARERVIRLRKDLEGHVRGVLKTFGIRMSGIWHGRLRASFREQLAAAGETDPALAMIADGFCAAHETLCAAAEALEDDLKAIANESKLARRLMTVPGVGPIVSLGFIALIDDASRFRKASDVGAFLGLTPRRYQSGETDWSGRISKCGDALMRGLLFEAANSLILRVKRSSPLKSWAVRLAGRKGFRKAGVATARKIAVLLLTLWKSGTEFRWTKGAAT

SEQ ID NO: 310754 - protein, 462 aa, unidentified
MQDPREVESRRRRQVEGLPVIRPGVAGIDLGSERHWVCARTADGAGREIADFGATTPELIRMGKWLKARNVESVAMESTGVYWIAPHEVLEAEGFEILLVDTRQLARVPGRDKKTDPTDCEWIQRLHSCGLLKSSFRPREDVCMLRTLVRDKANLVAESGDWVRRMQKSLDQMNVRVHRAVSDIDGVTGMAILRAIANGERDPRQLAKLRDPRCRKNMEEIAEQLSGHWREDHLFSLRQSLQMYDAIQQRIADYDHEILRKLAEMERDESRGQPTPPVKNPQKAKAIKKRGEEQMRQALYRMSGVDLTSIDAIGVETVQVVLSEYGPDLSRFPTEKEFVSHATLAPRRPMSGGKPVRKKRRNTASTRVAAALRMAALSLRNSTTALGAYYRKIARRIGGDVAVFATARKLATLIYRLLRWGQPYVDEGADAFEKRYLDKRIRFLQAKVKELGYQLVQREVTG

SEQ ID NO: 310755 - protein, 315 aa, unidentified
MAQAVCVVSYGADVDSRYIQINRHGESTVDKIENSPREIRAWLKSITGPARLAVEATGAYHLELVDQAHQAGLTVYVVNPRAIRQYRESVGQRAKNDRCDARLIARYIDREHDELRPYTPLSARQRRVWQLLKRRATLVKSKQQVQQSLAGLTGLRDPLHQTLSRLDALINLLENQTEDLLKEMRLWELVECCQSVQGIGEVTAMALVIAFDRGEFTSADAFVAYLGMDVRVRDSGKFTGQRKLTKKGDSECRRLIFNAARTAGRFAFKPYLERFKNRGMKSTQAHVALARKLIRIAFALMKKREQFDPNRLKLA

SEQ ID NO: 310756 - protein, 446 aa, unidentified
MLRRPARADIADGKIAIEQAPRPHPDTISPGEGAMKVVIERCAGLDVHKKTVVACVRTPRPGRGKRRRRETRTFKTTMKGLEALREWLASRGVTDAAMESTGVYWRPVWAVLEDGFRLLLVNARHVKHVPGRKTDVRDCEWLARLLECGLLKGSFVPPAEIRDLRDLTRLRKTLVRERSSQVNRVGKILELANVKLGSVVSSVMGVTGRAILEAMIAGEDDPKALAGLAKGSLRGKRRELAEVVPGLVRDHHRFLLRRHLDMIDELDRQIATIEARILAETTGPFEAALDLLESIPGVAQRSAEAILAEIGDDMSRFPSAAHLASWARVCPGNHESAGKRKSVSTGKGNGWLRDALSQVAWAAARTKGSYYRALYYRMKARGGSKKAIVAVQHAILVAIWHMFTTGSTHEDLGPDHFKRRDDERRKRHHLNQLRKMGVEFEVREAA

SEQ ID NO: 310757 - protein, 329 aa, unidentified
MSNLLKKVIGVDVGAKFLTVSFNDHCDNDQVRNIENNQRSIFAFLKKVSTEDYCFVIEATGNYSSRLLHLSLSKGFESSLINCMSVKHFSRMKNIITKTDAEDAKLIRLYGEMFRPEIYVPKSIEIEHLDQEIKLLNDLEEEKRRYAVKLKALRYNPHLNPDTEKHYEKRLKQLEKEIQEVEIRLPQLQDEEFKEIKNLIQSVSGIGEKTSLQLMTATSGFKNFDSAKSLVKYFGLAPRIYQSGKKSYSPGKCRTSKTHIRGMLYVCSWTAMKHNTSCKELYLRLLAKGKPKKVALIAVCNKLLRICFAVVKNKTAYQQDYQKNLKILT

SEQ ID NO: 310758 - protein, 331 aa, unidentified
MDHCAIDLGGRKSQVCVRSPDGRLLFEGPYDTRSLPEFLRLLPRSRVIVETTAEAFRVADAAKEAGHEVRVVPATLVRSLGVGARKTKTDRRDARALSEVSCRIDLPSVHIPSARSREWKAICGMHDALITARTKLINNLRGWLRGQGLRIGKGKAETFAERMAKFESLPDYVRSQLEALAALTEKIRGSDKRIESLAKDELCQRLMTVPGIGPSSAVRFVAAIDEIARFESAHKLESYLGLVPGESSSSERQQRLSITKAGSSSVRWVLGQAAWSLQGRCQDPAARPLQLWAAEIARRRGGHIATIALARKLAGILYALWRDGTKYEQRP

SEQ ID NO: 310759 - protein, 345 aa, unidentified
MPIVGGLDIHRKQITFDYLDTATGQVRRGQIAPADRVHLRAWLARFAGRDDVAFALEGCAGWRYVAEELAAAGITAHLAEPADTAFARGRKRHAKTDKTDARHLRMLLAEGRLPECWIPPARILECRALLELYNDLRRERTAWAQRIHAVLFHQGAPALGEGALRTEQGAAGLRAAAAAHLSPAGQLQVATALEVIDALEARLHVVRHQLLDAARHLAGAKALAARLYGVGPVTALAITCWLGGAGRFSSSRQAVRFAGLDITVSSSDRKGPPGKLSRQGPPVLRWAVYEAGKAHARTSAPDHRYYATVKDRKNSKRACLSEARKILRQAHHILAELGDDALAAA

SEQ ID NO: 310760 - protein, 347 aa, unidentified
MKKDSRSEAWKQEEGLVIGVDLGDKESQVCVLGADHEIRHEVRVRTTREQLRSWFGALKPCMVVMEAGSHSPWVSRLLEELGHPVVVCDPRRLKLISQSDSKNDRADGRMLARVAAGMPELLKVVKHRSAEAQKDLTVIRSRARLVEVRTKLWCSLRGLSKSLGHRLPRRVSAEQLGEHEEILKPLWNALEDVSKRIEEYDEQVKELEKKYPAAGRLRQISGVGPLISLTFVLTLDDHLRFRKSRQIGAYLGLRPRQRDSGQQQPQLRITKAGDRYLRSLLIQGAQCILRGPDTDLQRWGLRLAARGGKNAKKRAVVAVARKLAVLLHRMWVDQSPYEPLRRSQHAA

SEQ ID NO: 310761 - protein, 346 aa, unidentified
MSQPKISLIGIDIAKHVFQIQAVDAAGTPILQKRVRRMALLETLSRVPACIVAMEACATAHHWAREITALGHVVKLIAPQYVKPFVKTNKNDAADAGAICEAALRPTMRFVPAKTREQQSLAMLHKTRDLLIRQRTSLAVALRSHLAEFGIISAQGIRNGIKAAQAISMGEYNDLPELVKEVVEVLHHQLQDLNARIQVLESRILAWHRQSPMSRRLATIPGVGPIIATAIVALVGDPGQFKSARQFAAWLGLVPRQMSSGGKERLGSISKRGNPYLRRLLIVGNRSTLRWLRSRPADGSAWLMSLLDRKPINVVATAMANKTARIIWAVMTRKVNYIPPAYRTVA

SEQ ID NO: 310762 - protein, 430 aa, unidentified
MEQVNGSRLAEFCRFKKEIRGSTEYLIVGLDIAKERHNAFFGTATGRTLHKGMFFDNTYDGFQKLLIQTDALKVQHGLRQVVFGLEPTANYHKPLGEYLIKGGHLVVLVSAAATVKNRELMDGRWDKHDAKDSANVADLIAQGKCLYYDCPGEDLRSLRGLLSLKKRLKKEEHGLRVRIRNQLLAQYFPEMDQHFGSIASLNVVQRCLDPSLISIMEYDEFCRTVAPGKVNLAQQRRLTQIWRAAKQSIGCLVGEAVSVEAQIMVMGLHRVRETIKLVEDKIEDICLKFPEYSFLLMIPGFGPDVSAKVLASIGDPERFTSGKQVLKMAGFDLCASRSGKTSNSATPVISKHGKSDLRYALYQAAIISSLNYKEFIIYHTNKIRGREREKGIGTKMRVKLAAKLLIIAWTLMKKKEPFDPKYLNQGDSKA

SEQ ID NO: 310763 - protein, 349 aa, unidentified
MVPTTTKEVVMNVMIGIDPHKASHTAVAIGGDEDQLSSFKVRATLRQVDQLMSWAEPFEKRTWAIESAGGLGYLLAQQLVARGEDVLDVPATLASRIRVLATGRSNKNDPNDAHSIAVAALRAPMLRSVERADHGEVLRLLAKRNMDIGSHRTRVVSRLHALLAELAPGGIAKKMNVSDAETFMANLCPETPAQQMRFDLALELLDDVRRLDAQLKESHRRIGVAVKASGTSLTELYGVGPVNAATLIGYSGDITRFANRDTYASYNGTAPIEFSSGGRIVHRVSTRGSRKLNHAIHMAAVTQIRNSGTPGRIYFERKVAEGKTKKEALRSLKRQTSNAVYRQLIFDAQ

SEQ ID NO: 310764 - protein, 349 aa, unidentified
MAAKKGTGSLDLFIGIDLHKQRWHVTITTGDVELFSGSIPGQWVALCRILDRYKGHRIQAVYEAGYFGFWLYDRLMEYGCDCCVTPPSLVPKEYGNRVKTDRRDSCKLAHLLAKGLLKRVWVPSEEERFHRQVIRRRQLVGDRVRVQNRIKAELYFYGVDFTAPMGKWTKDFCETLKAIEFNNRWMTESFHRLLEEYEFLCNQIAKQTTLLEELSETELYRERVEILRSVPGIGTLAAMELLLELHDVSRFHRAEQVAAYVGLTPSQYSSAEHIRMGRITCIGKNSLRATLVQASWQLIRKDGVIREKYERIKVRAGGKKAIIAIARTLLLRTRRMLIDNQPYVVGLVA

SEQ ID NO: 310765 - protein, 421 aa, unidentified
MQSKGHKQSQSREIRQDTLIVGVDVGSQEHEANMTTISNKNLGTLKFTNNRRGFDEFWSAIMKAKWNAGCRDILLGFESTGTYGEPLQHYLLEKPVKLVQVNPMHTKKHKDICDNSPLKSDKKDSQVITDIIKIGRWISLVVPTGDKAILRRLSHTREKLVRDRTAHYNRLLQQYGLIFPEFSSVIKNIKSKTAQYLLSKYPTPDDYGFLSAEELSKELRKVSCGRFGMKQAEALLEAANSSIFIKQGLYGILFEIKQILKQLEYTNSFIAEVEAEIKATLERVPDSKEIVRIPGLKAMTVAAVIGEIGDFSAFRTAKEVQKFAGLNLYEISSGLHKGQVHITKVGRGLLRKTLYFAALNTVRKGGIMHDYYKRLIDKGKPKTKALIAVSRKLLRIIFAIVRDNSKFIENYQETKIMKKAA

SEQ ID NO: 310766 - protein, 356 aa, unidentified
MGNSNKLDFTGQPIFIGLDVHKKSWSVSIHSAVCEHKTFSQPPEVDILVNYLRRNFPGATYRSVYEAGYSGFWVHDQLIEKGVACTVANPADVPTKDKERRKKRDRVDCRKLARSLRAGEIEGIYVPCREKLEDRSLVRTRQSMVRKQTRCKNQIKSILLFYGIAIPEDWAERRWSGPFVRWLESLPMERASGEVTLRIHVEELKHLRQILARLDREIRLLAQTGEYGVQVKLLRTIPGISTLTAMILLTELQEIGRFRSLDELASYVGLIPDTHSSGETEHTGELTQRRHAQLRASLVEAAWVAVRKDPALLMAFEESCQRMRKTRAIVKIARKLLNRVRYVLKNQTPYRMGVVQ

SEQ ID NO: 310767 - protein, 352 aa, unidentified
MDYFAGLDVSLEMTSICIVDADGVVMKEAKVASEPDDLVAFFAQCGMAMKRIGLEAGAPSQWLYGGMADAGLPVVCIETRHAKAALSAMPNKTDRNDARGIANIMRTGWFRAVHVKTQTAQELRFLLVARQTLVRKLMDIELAIRGMLRSFGLKMGVVSKRNFEARVLELAGDRAMLMRALNPMLTARRALAVEYANLQKVAMDFARDDEVCRRLMTVPGVGPIVALTYRATIDVPSRFRRSKSVGAHLGLTPRAHQSGEVDWTGRVSKSGDAMARAALYEAAHILLIRVKRWSSLKAWGMRLVKNRGHKRAVTALARRMAVLMHRIWVEGTTFIWKTGDGQAIAPKPIPAL

SEQ ID NO: 310768 - protein, 403 aa, unidentified
MIFVGDDWAEDHHDVHVMDEAGVRLAARRLSEGLTGIRQLHELIATHGQEPDQVVIGIETDRGLWVAALTGAGYQVYAVNPLAVARYRDRHHIAGAKSDASDAKLLADLVRTDRHNHRQIAGDSTEAQATKVLARAHQSLIWERTRHTNRLRNALREYYPAALAAFDDLHHGDALGVLGRAPTPQQGARLNLAAIQSALKRGGRQRNIATRAREIQAVLRTEHLAAPAAVAAAFAATTTAAVGILTELNRHISELETSLAAHFETHPDADIYRSLPGLGVVLGARVLGEFGDDPNRYTTAKCRKNYAGTSPLTIASGKKRAVLARHIRNRRLYDAIDQWALCAISNSPGARAFYDQQRHVKVPHHKALRALGNRLVGILHGCLRHQQPYNEHTAWAHRRTAAA

SEQ ID NO: 310769 - protein, 343 aa, unidentified
MTKITTVGLDLAKLVFQVHGADQDGRPVVRKKLRRGQVLGFFAELPPCLIGLEACASAHYWARELQALGHEVRLIPPQYVKPFVKTNKNDASDAEAICEALIRPTMRFASIKSAEQQSVLMLHRARELLVRQKTMLINALRGHCGEFGIVVAQGASRVAELIAIIEDQEDDRIPALACEALGYLVSQLRMVQAQVLGLEKKLKTWHRANEASRRLETIPGVGVITATALVATIGDASQFRSGRQLAAWLGLVPRQHSSGGKERLGRISKRGDGYLRKLLVHGARTVLLWSRRKKETRSPWLEALLARRPTNVVLVAMANKTARVVWALLSRSETFRTESQLAA

SEQ ID NO: 310770 - protein, 355 aa, unidentified
MDSRKFIGMDVHQASISIAVRDAAGKLVIESLIETKAATILEFLQGLKGTLCVTFEEGTSAAWLYDLLKPHVANVVVCDPRKNALLKAGNKNDRVDARKLSDLLRAGLLTPVYHGESGVRTLRELARSYLTLTKDLTRVMNRLKALYRSWAIPCGGEKVYSPRHRSVWLEQLSEAGVRRRAEQLYQQLDMLLQIRREARRELLRESWKHPAQELLRQIPQLGPIRVALLIALIQTPHRFRTKRQLWAYCGLALQTRSSGEYRFTAGQLQHSNKLPALRGLNSNHNHDLKNVFKSAATHVSTSPDALGDFYRSLLAKGMKPAMARLTLARKMAAIVLTIWKKGERFDPGELKRQAA

SEQ ID NO: 310771 - protein, 349 aa, unidentified
MSPKLNSGIAVIGIDIGKNSFHVVGLDRRGAIVLRQKWSRGQVETRFANLSPCLIGMEACVGAHHLSRKLTLLGHNARLMPAKYVRPYSRGQKNDFRDAEAIAEAVQRPTMKFVATKTAEQLDLQALHRVRERLVSQRTGIINQIRAFLLERGVAVRQGLRFLRAELPRILATPCDGLSPRMVRVLEELACDWRRLDERIEGLSSEIEVLARRDAGCERLMSVPGIGPIISSAMVAAIGTGDAFTKGRDFAAWLGLVPKQISTGDRTILGKISKRGNRYLRALFVQAAWVVLIKPKSWDRHGLKPWLEAAKKRLHHNVLAIALANKLARIAWSVLARGRAFEATKIQVA

SEQ ID NO: 310772 - protein, 368 aa, unidentified
MKTNTTASLVTTSTPAVVSGFTLGLDLGDRAHHVCVLDATGQIVCESSLPNTRPALARLLADFPRATVALEAGTHSPWISRYLTDLGATVLVANPRKLHAISRNERKCDRRDAQMLARLARVDAALLHPIEHGTAQAQHDLLGLKLRDALVRTRVNLINAVRFTLKSLGHPIGNPSSESFHKTVLADVPADCLPVVQPLLSVLSQVTEQIKGMERELVQRSKKDYPATQRLQQITGVGPLTALCFVLKIGDPQRFSRGRDVGAYLGLCPRRDQSGGTDKHLRISKCGDGLLRRLLVSAAHYVLGPFGPPCALREHGQRLAGTGSAREKKRAVVAVARKLAVLLLSLWKHGTDYEPRATASPALVMTPA

SEQ ID NO: 310773 - protein, 345 aa, unidentified
MDHIGIDVHRRESQICIITEDGEVIEQRIRTTRDRYQATLGERPGARILIEASTESEWVARLLEQQGHEVIVGDPNFAPMYGTRRRRIKNDRVDARALADACQSGLYKRTHRRSEDQRRRRVLIVVRDKLVKTRTSQITLLKALLRQYGISLPSGSPETTPARVRAMDLEEWFQEQVYPLADGCERLNELIADADRKLAKIGQEDELVSRLQTVPGVGPVTSTAFVAAVDEAGRFRNAHQLEAYFGLVPGEHSSGDVKRSTSITKAGSTLMRTLLIQAAMGLLRSKRPNAAPLQRWYERIKQRRGAKIARVALARRMAGVMYAMMRDSTPYDLQRLRGATEQAAA

SEQ ID NO: 310774 - protein, 347 aa, unidentified
MKITTLGIDLAKNVFQVHGVDERGKAVARKQLRRAQVLPFFANLPPALIGMEACASAHYWARKLAALGHTVKLMAPQYVRPYVKTNKSDAADAEGICEAVGRPNMVFVPVKTAAQQAVLALHRARQGLVKARTAQANQLRGLLGEFGVIVPQGLSALGTRVPEILEDGENELPGSLRLLLARLHQHLQHLDAEVGVLEDEIKRWHREDEASRRVAAIPGIGVLGASALVASVGAASTFGNARQLAASLGVVPRQHSTGGRAKLLGISKRGDCYLRTLLVHGARSVLQQAVRHPERADPWLRQLLARRPVNVAVVALANKNARIAWALLAHGRSYERDYRSQCVKLAA

SEQ ID NO: 310775 - protein, 338 aa, unidentified
MSVIKVIGIDLGKSVFHLIGHDHSGREIYRHKLSRVKLVQFISQQETTTIAMEACCGAHWLARRCQEYGHNVKLIPAQYVKPYVKSHKNDFIDADAIAEAATRPNMRFVSPKSEQAQISTVIRRIRTGYIRERTSCMNRIGSILLEFGISFPRGHANMKKLFQWLADKDAVIPPLLILELRDQLDYYNQLNEKITAQDQKLIELNKENELYALLQTIPGVGPMTASCCLSSVGDPKDFANGRNFAAWIGLVPFQYTTGGKPRLLGISKRGNKELRELFVHAARAVMWRDASAERYFGSWLINLKCRKPFNVAVVALANKLARIAWSVMNSHKAFEVKA

SEQ ID NO: 310776 - protein, 335 aa, unidentified
MNKINHFIGIDVSKDTFDTVLLSAEEKESKTLNHKQFENSVSGCKLFLKWSLKQGVDIDRCLVCAEHTGMYVNLIAAFLVEHKINFWLEMSYRIIRSSGNQRGKTDKIDAYRIALYAKKNQDQAVYFKPKRPVIVQLAALLNLREKLIQQKTALLKVTNEYQKFDKEIAKLLGKHQVSSIKAIVKNITQIEATIDNLIKSDLQLKKLYTQITSVTGVGKITALTLIYFTNEFKNFDKPRQLACYCGVVPFEHTSGKSVRSKPRVHFMANKQLKKLLHMCALSASMHDHELMAYYQRKVEEGKPKMLVINNIRNKLIHRICACVRDERMFVNNFAA

SEQ ID NO: 310777 - protein, 355 aa, unidentified
MRYLGIDVHSKACVWCLLNAQGEIVEQGSTETTIPALQALVTRLGKDDELLAGQEVGAMAYLVHDALKEAGVRLLSFNAAHLRMIAASRKKTDRRDAYWIARALQTGMTPHAVYIPVGEVRELRGLLHRREVIQRDFVRWRHRAKSQLRASGLLVSPGLRNLRGAIAAQIESCTEGVDGLLLDGIGLCERNMELLSEELAHVDAQLRRRTEHIEAIQRLMTIPGVGDIVATTLYACIGDVTRFPNAKSLAAYVGLVPSVRQSADTNVLGRITKQGAPQLRRLLVQAAHAVSSRCQTDAARPIQSTYERIRGTRGRRKVALVALARHLLRLGYYILRDGTCYDAERLGAERTAAAA

SEQ ID NO: 310778 - protein, 431 aa, unidentified
MNAIHNSQSGNLRDKTLDHDSTQYAALVGIDWGDKEHAFHLKSDDGTFESGTLRHSSETLFQWLSKLEERFGSRPVAFAIEAQSPPLLAAIRQFSWAVVFQIHPITSKRLRTAFTPSGAKDDLPDAKVLLDLLISHRDKLRPLPEPASPKTRILDGICRERRELVDQRTKWCLQTRAALKAYFPQAFELFSDELFRPVVSKFLARWPDLISLKAEKSSIIKRFYTSNGYRNVALIDQRLEIIKTSIAIEIDPSRISEYTRKVKHILERIELANRQIKELDLQMSTVFKEHENWQFFRELPGAGPSLAPRLLCAINMAPENNAQGMQKYFGTAPVKEKSGSRVWTHRRWNAPRFFHQTWGEWAGLSVQHSRWAKEFYEQAKARGKGRYTALRALAFKWMRVIARCLETKTDYNEELYIQSLKKRQSPLAQHL

SEQ ID NO: 310779 - protein, 345 aa, unidentified
MFYCGIDVAMKSSYLYITDGEGLVRAKGELPTTAQALRDRLRRFVPGGLKVAVEAGPQTAWIHDLLVEIGAEVNVVNPNKVRLIAESRRKTDKIDAKLLCELLRLDGLPHPVHVPDKETRSLRGLLVARRQLVSARTKVCNVVRGMLRQEGISLPSRFLTSLAAWQRLLEVEFTHSHLRPIVEAYAETFKTLTRSLQALDRELAQREKSDDRAARLQTMPKVGRIASLTFLAAVDDVNRFSSSRKLVGYSGLAPTVRSSGERTEYGSISREGRRELRAVWVQIAQLVAMDTGRDTAPLRKWFAKVAFHRGKKTAIVALARKLLTIAYQLLKQQTVYDAKKLRRAA

SEQ ID NO: 310780 - protein, 343 aa, unidentified
MQAAKTIGLDIAKSVFQVHGVDADGQVVIRRKVKRRYGLAFFENLPPCLIGMEACATSHHWSRELQALGHRVRLMPPTYVRPYVKRQKNDAADAEAICEAVTRANMRFVETKTVEQQSCLVLHRTRHLFIRQQTAVINAIRAHLAEFGIVAPVGRKGLEQLLDVVANAKDKRIPDVARACIAALGAQLRALKAQILEFDHQIMLWHRSHETSKRLDEVPGVGAALATALVASIADPKAFRSGRDFSAWIGLVPKQHSSGGKDRLGSISKRGDRYLRSLFTAGALAVIRYAKIYGTKHRPWFTALLARRPTKVAAIALANKLPRMVWAMMTKGERYKEPVALAA

SEQ ID NO: 310781 - protein, 415 aa, unidentified
MSDQKRCYAGVDWGSRSHCVFLTDDAGRKVGEKLFKHSGEGLSEMAAWLIASSGPTELSQIYVAIEVPHGPVVETLIERGFNVHAINPKQMDRFRDRFTMAGAKDDSRDAEVMASALRTDPRCFRLLALVDPVIVELREWSRIAEDLGVERNRLANRLREQFWRYFPALLELEDDFGAEWLLELWETAPTPQKAIRLREATIVKLLKRHRIRRFDAATILKTLRKPPVQVAAGTVEAASAHIAALVPRLRLLNRQIKDAHRRIEALTARLIPSEETEPWQKKQHDAEILASLPGVGRTVLATLLAEAWDALRRRDYAALRSLTGVAPVTKQSGKSRVVLRRKACHARLANAVYHWARVAAQHDPRCRSKYAELRRRGHSHGRALRSVADRLLNVACAMLKSGTTFKPDLAAEKNT

SEQ ID NO: 310782 - protein, 388 aa, unidentified
MQFAADRLEAPTAIRTDLGAIFISLELSRSSWVVTSLSPGGGEKMSKHTVRGGDVAGLLKRFAQLREKAKGRTGKVFPLIVIQEAGLDGFWIDRVVQNEGIESHVVDPASIATSRRRRRAKTDGIDGEALVRALLAYKRGEPRVCSMVRLPTPEDEDRRRLCRERKVLIAERVKHVNRIKGLLFSQGVSGYEPLRRDRRERLDALQTGDGRPLPPHLKAQVHRELDRLELLIAQIKTVEAERDALLAVEQTTAPVPPAMLLGVKGIGPEFAAVLWSEGLSRPFENRRQIAAYAGLAPTPWQSGSVDREQGISQSGNPRLRTTMVQLAWLWLRHQPDSALALWFHDRVKRNGGRLRKTTIVAPARKLLVALWKYVTAGVVIEGAVMKTA

SEQ ID NO: 310783 - protein, 389 aa, unidentified
MKYARVHVLPETSPGGLTAGIDWGSADHAVCVVDAAGQVHARFTVCHDRAGIGKLIAGLRAAGVREAAIERNDGVLVDALLEAGLMVVVITSRQMKNLRSRYGSAGAKDDRFDAFVLADVLRADRARLRPLAADMPATAALRAAVRARRDLVAHRIAACHQLRAHLAVVFPGAIGLFAHLDSRISLAFLARFPSQDAVDQLREEDLAAWLCTLPHRGKAPRPGQLHARLQAAAHGTSGADGAARAPVTAALVATLTTLTAQIKALEAGIAAQLAAHPDARIFTSLPRAGTVRAARLLAETGDCRARFPDPGSLAGLAGVTPVTRRPGKHISTGFRRAVNRQLRDAVCDFAADSRHANPWAAAIYDAARARGKDHPHAVRIPARAWIYVL

SEQ ID NO: 310784 - protein, 451 aa, unidentified
MGRKKKLELEIINPNAAGIDVGSRSHFAAVGQNLDEVKEFGVYDEDLKKLSAWLIENNIDTVALESTGDYWQNLHAQLLEDGLKVILVNGKFTKNIKGKKTDVLDCMWIQKMHTLGLLSGSFLPDDITMQLRTYCRQRLNMLRWSAQASSKMQKYLKFLNFRLDVVVSDVCGLTGLKIIGAICDGNLNPNELAKMRHYNCRKSEEEIEKALQGNNRKEYLFGLKQEFESYQFFKQKIKECEEQIKEFLETYFLSQEFPIDDMPSKKPYKRLNKNAPKNIDLNVASYQYFGGVDLMAIEGVSHSTLLTLMSEIGPDGMKKFGSAKQFASWLRLAPNNKISGGKTLSNRTPRGSGRLKIALRNSANAIGNLKEGQLAKFFKRIAYKKGRQIAITATARKLAIIIWKMVTNKEEYQPTESHMFLDEKRKLGIVKRMKKKIAKLGITNQDLGLET

SEQ ID NO: 310785 - protein, 377 aa, unidentified
MRAASSDAQGDEVRVTVGVDTHTDRHVGVALDQFGRRLGTRSVPTTPAGFAALLTWAGDFGVIERIGIEGTGSYGAGLTRWLRARGVAVIEVERPHRHDRQARRRRGKSDPLDAEAAARAVQAGTVIGQPKAGDGQVEMIRTLRLARRSAMKARTQAANQLHALVVTAPDDLRARLRPLPMAELITLVAAFRPVRTGTALGTPLAAAKLASKGLAIRYRQLGAEIDALDVHLEQLVASAAPELLAVKGVGTDIAGALLVAAGDNPDRLHSEAAFASLCGVAPIPASSGKTNRHRLSRGGDRDANRALYLLALGRMGWDPATRTYVTRRTADGLSKAEIIRCLKRYLARELYRLLVKPPALLSPPADGNEARPSTIAS

SEQ ID NO: 310786 - protein, 361 aa, unidentified
MIIRERISVGLDVHAHSVVGAAIDTDSGELITRRLGPEPEGVIEWLRSLPGPAVVTYEAGPTGYVLARALDEAGISCVVAAPSKIRRAPGDRVKTDKRDAELLARLLLAGDIVAVTVPSVAQEAARDLVRAREDARKDLMTARHRVSKLLLRHDVRFEGNAWTQRHLTWLRQQRFAQAGLQAAFDAGYDALMAVLERRDDLDRAISEMARASEFTPVTNRLACLRGISTLTAFGLTVEIGDWTRLGGRSIGSYLGLVPSEYSTGKSRSQGGITRTGNSHARRLLIEAAWQHARPYNPYSPTMKRRWDLVSKEARDRGHAGNRRLHQRWQAYRARGKRNVIANTAIARELAGWCWSLAVMTG

SEQ ID NO: 310787 - protein, 398 aa, unidentified
MLSIGIDVSKGKSTVCGMKPGGEIVYTPFEVQHTREGMSELVSLLRGSGEEVRVVLESTGSYHCPVVAALLENGIFVSVVNSLRMKRFCSQSIRRVKTDQIDAMQIALYGLAYWQELQPTRLPENTYRELQLLARQYYQMTSMLIKAKVDFNAICDQVLPGMQELMSDHAGRHKLSDFVLRYHHTTHILEMGETRFRKDYCKWAEKKGYRNCERMAALIFATAQNGIPVLPNAPSTQIVITEAIRVLHTVEASRDAILTQMQALAKTLPEYSLVREMPCIGDTLAPRLIAEIGDVRRFHSKRALIAYAGIDAPPYQSGKFCANNRHISKRGNRYLRKTGYEVMQSYVMHKPANDPIFTFIEKKRGEGKSGKLAMVAGLNKFLRVYYGKVTELYRSLPQ

SEQ ID NO: 310788 - protein, 466 aa, unidentified
MAHKRKNVKSKERKRSPRSLKAIQPNAAGIDLGSREHWVAGPPQEDGTPNVQCFATTTPELLRLADWLKEQGVETVAMESTGVYWIPLFEILDSRGFEVVLANARQISNVPGRKTDMIDCQWVQLLHACGLLRGSFRPSDGICQLRALIRERNTMVEQRSDWIRRMQKYLDQMNVCVHQAVSDITGVTGMAIIRAIVDGERDPHVLSRLRHPCCRKSEEQIAEHLTGNWRSEHLFNLRQALKMYDQLCAVIADYDSEILSYIKTLQPADTRDASAPPPTSNTKAKNLVKRGQEPMRQALYGLCGVDMTTIDGIGVDTATVIVSELGMDYTVFPNESHFISYLRLAPNLSISAGKKVPKKFKASTSTRVATALRMAALTLRNSKTALGGFYRRVAWRKGASVAVFATARKLAQLIYRLVRYGQAYVDTGVEAYEARFNQRRLKSYTKALNAMGYNVEPLKTEEAILA

SEQ ID NO: 310789 - protein, 333 aa, unidentified
MKNEPIKEFVGIDVSKLTLDVHLYVKNLHCVFSNDSKGHRLMFSWIRKQCIKNEELRFCFEHTGIYSLELAMFLKKNSQVIYIVSGLAIKRSMGLKRGKSDKTDAKEIAKYLFQNHYAIKPTELASDAIQELQMHLSFRSNLVKKLASFKMHRKEFGKIVESKGYDQIDQVTAEIMDALKKGIKEIEKQIQEIIYTDEALKNTFENISSIKGVGPILAATMIVITRNFTSFETSRQLACYAGIVPFEHSSGTSYRGKNRISSLGNRDLKSLLTMAAISSITYNPELKIYYQRRISEGKSKMSTINIVRNKLVSRIFACANRNSKYVEIYKFAA

SEQ ID NO: 310790 - protein, 344 aa, unidentified
MEDFDVAGIEVSSESFLVRVVRDGRLGSPQTFPNTVEGRLAILRLLTRAGARVRVCLESTGLYGLDLALTLHEKAVIEVMVANPRSVRHFGEAMMQRSKTDPLDAALLCEYAARMPFQRWQPPTLTARQLCAITRQIHALTVMSTMDKNRLHAANLSETTPKIVRDELEHNLAAQKASIGRLTRAALKLIDTDPELKRRFALLVTGPQKAPGIAQTSALQILGELVLVGPDFNVHQWVAYAGLDPREYQSGKSVHKKVRISKVGNSHLRRALYMPALVAVRCNAHFRAFYQHLLAKGKLKMVALVAAMRKLLHALYAMMKYNQPFDGSKLFPNACPPLSEATRA

SEQ ID NO: 310791 - protein, 387 aa, unidentified
MARKRTLSTLDTSIAYEAVGLDLAKEDVALAAFDSEHKEPYLIDRIPYDKLYELLADMAPTLVAMEPCSGAHQIAEQIQELGHEVMMISGRHVQAWVKDHCNGQKTDLNDAFAILNLAYDRWLTPIRGKTREECRLLALQSSYRQLKGQRTKTMVHVKATLHAWGFPIRAGSFNQKALHELIDANREAFGDEVVETLHLMINRVHDLDHDIATVLKLLTEATQRDPRASLLRSIPGFGVLTTSRWCAVVGDIARFDSPKQTMAFIGLVPNNRITGHHTETSSGREARGQGKMSKRGDKMLRSLCILGAGALCLMVRNDRLPDCPFVASIKERLASPRPWFKVLVYVAAKLVRIATALLKYGETFSYEKAGISKAVLKQWELEQAKAA

SEQ ID NO: 310792 - protein, 320 aa, unidentified
MAQQGRIVGIDVAKLKADACIRSLQLRLSQPSTAQGQQDMITWLRRNEVGLAVMEASGGYERVWAEALRAAAIAVRIVDPKRVRYFAKSAGRLAKNDPIDAEMIAWFAETFAAAAEPAHDADRDALNRLVTARSLLVRLATPIRQLGEHGQPRVVENAQRAILKTIKAQLAKLEAAIEAKIAANAQFLARRAIIASVPGFGDHFVAGALAWLPELGRISNKAAAGLVGVAPYDDDSGQHRGERHIKGGRRDIRTLLYMAALGAATRHNPVVMAYYKRLRARGKKTKVALVACMRKLVVILNTMLARGEMWNPTPRTTAVA

SEQ ID NO: 310793 - protein, 343 aa, unidentified
MQLTTIGLDLAKQVFQIHGVDATGSVVVRRRLRRAEVLRIFSATEPCLVGMEACATAHYWARELVALGHRVKLVPPAYVKPYVKRGKTDAADAEAICEADTRPTMRYVPIKSAEQQAALMLYRSRDLLVRQRTMLAHAIRGHFAEFGIVAPQGIGRIGELAALLLDDSTANLPVVMRQTLTTLIGQLQGLGDRVAALEAQIVAAHRQNEKSRRLASTPGVGPITASALVASVSDARQFKSARHFAAWLGLTPRSHSSGGKDRPGGISKEGDPYLRRLLVTGATCVIRHARTKAPGEAGWLKALLARRPARLVSVALANNMARIVWVLLTRDEVHAPPSIRAAV

SEQ ID NO: 310794 - protein, 406 aa, unidentified
MTAVMIGVDPHKGSHTAVVIGVAEQSLGKLRVDASAGQAGELMAWASEWPERTWAVEGAAGLGKLLAQQLVAAGERVLDVPPKLASRVRLPEAGDTNKNDPNDARSVAVAALRSRAVRQVAAEDHGAVLKIWARRHRDLARARNQVACRLHAVLCDLIPGGVRKEISAGHAAKVLDKITPTGPVETARRDLAAQFLEDLRRLDSQLAETKKKLAAAVRASGTTVTEVFGVGPVNAGTIIGDAGDISRFPSRDHFAAYNGTAPVEVSSGNRKIYRLSLRGNRRMNHAIHMAAITQIRHAHSDGRAYYDRKIAAGKSHKDALRCLKRKISDAIYARLRADAAITSAPAGKGPGGQKGNDSDSSAAGSHPGRRLFGQATPGPATTLRPQARTPRQQPRTRRLKDLEKTR

SEQ ID NO: 310795 - protein, 368 aa, unidentified
MEVTTIGIDLAKSVFAVCGADSSGRVVMRRQLRRPQVLSFMRGLPRCVVGMEASGGAHYWARQLTALGHEVRLMSPALVIPYRKGNKTDRNDADAILEAVTRPSMRFAMVKSVAQQDLLALHRVRAQLVKSRTALCNQLRGLLRERGVVVRTGAGALKRSLPAALADDRSELSGEMRELLCEMSQWLRTLEQRIASCEARITRKFKHDERCQRLAAVPGVGPLTATALVAAVGNAQRFRNGRELSAYLGLVPRQHSSGGKTVLLGITKRGDRYLRTLLIHGARSALRQCKDDARSGWVRRIRAERGPNVAAVALANKNARVLWALLARGDRYRSTNVATRAVLRAGSPPPVNRARSAKLRVRKDCVGS

SEQ ID NO: 310796 - protein, 289 aa, unidentified
MPAVIGCDAHKQFSVFVTIDGKGKTSPAVRVEHHRQEYIDFLHTLPPGSEIALEATGHWYWMVDEMEKAGHHPHLANPTEAKKRMGKTNKTDALDAKGLAILLHNGTLPESWIPPGELRDRRELLRTRMALRDLRSSLKHRIHASIAVALKPSPEVRLLRTIPGIGEILAPLVWLEIGDIDRFPRAENLAGYAGLVPRIIASGGRIRHGGTCRNINHYLKWGFVEAATCAIRIKAYCDSHVGLLYQRLAPGKGHGRAIVAVARHLAEASYWVLRKRQPYKSPGRRTAEA

SEQ ID NO: 310797 - protein, 344 aa, unidentified
MKITTIGIDLAKNVFQVHGVDERGRAVLKKQLKRDQMAAFFAKLPACLIGMEACGSSHHWARRLQGFGHTVRLMAPQFIKPYVKTNKNDVADAEAVCEAVARPNMRFVPVKSVEQQAVLSLHRVRQSFVKARTAQANQIRSLLGEFGLVMPKGITNVRKRVPEVLENATDKLPAAFRHLVERLLEHLKELDRQVGQLEAQIKAWHRSSELSQKLEKIPGIGPLSASALVASIADARSFDNGRQVSAWLGLVPRQHSSGGKPTLLGISKRGDVYLRTLLIHGARSAIVAAQRNARVNPWLAGLLRRRNPNIAAVALANKNARTVWALLAHDREFRPDYVPTLAAL

SEQ ID NO: 310798 - protein, 362 aa, unidentified
MFRPHTLYIRIRIVRKVSEPAFAMKDQDVTDVIRRKQQTAMRYIGIDVSKATFVVAYSSDKGGEIRTFNNTTTGIKQFIGALPKDSSIHCVMEATGNYSAMLLYLLNVAGIAVSMENPLKIKNFARAMLSTVKTDKIDARLIALYGEKMNPQPFKIQGEAILRLRQKRTVIRQLTKQITAMSNLRGSLACLPVPDKGATHTVDETIEFLEKRRDRLQSELTDLVEVEFSRQLALLTTIKGIGITLATALIITTGGFTYFQNAKQVSRYIGICPTYEQSGTSVNIRGHINRNGDAYTRGLLYVAAWTASRFNTKCGETYTRLRQNGKPGKLAMIAVANKLVRQAFAVVTHDKEYVDGFVSNRP

SEQ ID NO: 310799 - protein, 389 aa, unidentified
MRLLDAGVLQEKLEQLGVPPEQVLIGLEATSRYGENLYHFLESRGYQLCLLHPRQTHQFAQQRGLRAKTDHLDATTIARVLLSGEARRGYVPSDLIATYRELVRLHTQLSDEVARYKNEIQALLTVLFPEFSQVFADPCRATALALLKLYPSAQAIATAGVEAIAAKLHELAPRNYGRSTAEHLVQLAQHSVSRGFAVAARSTSLKILCDQREHTQANMAQLEREIDNLLETDAGAKGLISVPEFGHKTVAVLRAELGDVTRFQRTDQVVAYAGLDIEVKESGKWKGQAKLSKRGSGRLRRILYMATVRCIRLPGSAFGAYYHRLVARGMKKCDAMMAVMRKMLIVAYRLLRTEETYDPTKVCAVVVTQPVELPPLHTPSSTKVVAAKA

SEQ ID NO: 310800 - protein, 407 aa, unidentified
MEVVYRCCCGIDVHKKVIVACLVNGGEQELREFGTTTSEIKTLANWLTESGCEMIAMESTGVFWKPLYNLFELMDLDAMIVNAAHMKALPGRKTDVKDAEWIADLLRHGLLKASYIPNREQRELREITRYRKSLTEERCREVNRLQKILEGANIKLDSVVKDITGKSARKLLQRIIDDDIPDSDEVSKLVHGRMRPKLDQIVASIEGITTPLQRKLLAQIIDHIDDLNRRIGELDKLVQEYMAEYEAAIEAIDEIPGIASRSAEVILAEIGLDMGRFPSAAHLCSWAGVCPGNYQSAGRRKHGKTTKGNKALKTILTQCAKSAKTVKSSYFFAQYQRISARRGKNRATLAVAHSMLIAIYHILKNKTAFHDLGSDYYDSFNRDRKINSYLKRLKALGWEPDAIPSSA

SEQ ID NO: 310801 - protein, 402 aa, unidentified
MNAVGIDVSKGKSTVAVMRPFGEVVLSPFEVSHTDKDLSALAEKLKSLPGETRVVMEHTGYYHAPVALALHESGIYVSAVNAMLVHDYGNNSLRRAKTDKKDAVKLANYALDQWLSLPRYHPEEDTRLMLKTCYRQYEQFSKMRTMQKNNLISLLDSTFPDANRLFTSPARTDGSEKWVDFIEQYWHCECVCEMTQKAFAKSYEKWCRKHGYNFSEDKAVDIYASAAGHFCFMPKCETTKLLIHQAVAQLQASSRALAAIKRQMQDLASTLPEYPVVMGMYVVGATLGPQLMAEIGDVRRFHSKSALVAFAGIDSPPYQSGTIDVRSRSISKRGSAKLRRTLFLVMSTILQTSPADEPIYQYMDKKRSEGKPYKVYMMASAIKFLRRYYATVKAYLEQLNFA

SEQ ID NO: 310802 - protein, 343 aa, unidentified
MEYYVGLDVSLKQTSICVVDQSGSVVREGVVDSDPEAISVYVRSKAPGAVRIGLETGPTSTWLWTELKRLGLPVICIDARHAKAVLKMQINKSDRNDAIGIARIMQTGWFKEVHVKDIDSHTVRALLASRALLVKIKRDLENYVRGLLKNLGLVIGRAKFNVFAVRAEELIEGRPELIAAIRPLLEARTAVEQQVSELDRKVMKLARHDAQVRRFMTVPGVGPITALAFKATIDDPARFARSRSVGAYVGLTCRRHASGEVDWSGRISKCGDAMLRSYLFEAAGVLLTRVPKWSAVKAWGVKLVKRNGLRKAKVAVARKLAVILHRMWIDGTEFNWSKKEIAA

SEQ ID NO: 310803 - protein, 354 aa, unidentified
MTSHHDQPTQTFASIGIDIGKDVFHVVGFDTSGKVVLRKKFKRLALEAELAKLPPSIAGLEACLSAHFVSRTLRRLGHQPRIIPAIYVKPFAKGQKNDYNDAEAIAEAALRPNLRVVQEKTQDQLDLQALHRVRSRLVSRRTATINQIRAFLIEHGIAVRTGAHALRSSLFAILEKRADELSPRMSDLIVGLYEDWLWLDERIETLTGEIEQISHREANCKRLMSIPGVGPMISTAVVAAIGTGEAFERGRDFGAWLGLVPRQYSTGGKSILGRISKRGSRYLRTLFIQAANVILMRPQNWEQFSFGAWLKAAQPRLHRNKLATALANKLARIAWSVLRHNTAFDAHRVEVVAI

SEQ ID NO: 310804 - protein, 362 aa, unidentified
MDKVIKDGTGATIGVDLGDKWSRLCVLDEHGEVCEEGRIASTADAMRKRFSTEAPCRIVIEVGTHSPWVQRLLQELGHEVITAHTQSVRLIYGGTNKDDRLDAERLARLGRVDPRLLHPIQHREGSVQADRAVIRSRYVLVGCRTKLINHARGMVKSMGGRLPTCTADCFPKRVREALPKELKPALRPVLETIAALTTKIRRFDRLIEDLASKRYPETDVLRQVSGVGPVTSLSFVLTIEDPARFRRSRALGSYLGLSPRRSQSGDEDPELRITKAGDDDLRRLLVGSAQYILGPFGPDTDLRRWGLALAARGRKNAKKRAVVAVARKLAVLLHRLWVTAEVYEPLRNPADKPDSIAQAVPA

SEQ ID NO: 310805 - protein, 349 aa, unidentified
MQIKSQIRSIGIDLGKTTFHLVALGTRSQIVVRKKFSRSQLLIYTANLPASLIGMEAGVGSHFLGRALREQGHEVRLIPAQFVRPFVKSNKNDYRDAEAIAEAVERENMRFVPIKTEDQLDLQALHRVRDRLVARRTSVINQIRAFLLERGISFRKGPASLRRQMPEILETVDAKLSPGMRRLLDFLWQEWKGLQAQIESLNTDLEQIASSDPSCVRLQQIPGVGPLVSTAVVSAIGNGAAFKRGREFAAWLGLVPRQWSTGGKTKLLGISKRGNPYLRKMFIHGARAAVLRVKREGSTLGRWMSGLETRAARNVVIVATANKLARISWAVLASGNDYHPMHKAAVFSN

SEQ ID NO: 310806 - protein, 308 aa, unidentified
MTTIYTGLDIAKLNLQLHLAGRIHDLPNTAAGHRRLLKLLTAQPGAHVVCEATGGYERDVVAALHAAKVPVSVLNPARVRHFARATGQRAKTDDIDAAVLSAYGQALQPKPTAPRTEQEQQLAELIRRRVQVLEILVAQRQQAERLTVPALRRQAQSLVRRLERDVAQIEEQLKALRTQTNTLDERLQKLEAITGVGTITALGVLAELPELGTLNRRQAAALAGLAPHPRESGQWHGRRSIGGGRAPVRRALYMAALVAARSHRQLKEFYQRLRAAGKPAKVALTAVMRKLIVLMNQLLKNPNFALQN

SEQ ID NO: 310807 - protein, 358 aa, unidentified
MMREPQEIDDEEHEQILQRVAAVDVAKASGVVCTRVPHPSAQGRRRTRVQTVDATTNAVLELAGYLAAEQVEKVTLEAAGDYWRIWFYLLEAAGLDVQLVNARDVKAAPGRPKTGKLDAVWLAKLTERGMLRPSFVPPAEIRRLRDYTRLRADLTRERTRYFQRLEKLLEDSLIKVSSVASTLSTVSARAMIEALIAGERDPRVLAGLARGRMRVKHAALVEALTGAFDDHHAELARMLLDQIDALSAQVGRLTARVEEQVATISAAWGADAGGATGPGAGLGEGATALPALDRLDEIPGISRDTAQGIIAEIGLDMTRFPTPGHLVSWAKLSPRTVQSGATNRAGKTGKGNPYLMGM

SEQ ID NO: 310808 - protein, 428 aa, unidentified
MVEGVGLLEQARDEEQIITHVAGLDIGKASLVCCARVPDVARPGHRLQEVRTYATMTRSLAGLAERLAVLGVTRVVMEATSDYWKPVFYLLEAHGFEVWLVNARDVKHLPGRPKTDKLDAVWLCKVAERQMIRPSFVPPSPIRMLRDLTRYRVDLVAEAGAERNRAEKLLEDAQIKLSVVVSDLFGTSGRAMMAALIAGQRDPHTLAELARASLRRKIPALQEALTGHFTEHHAFLLGKMIARIEAIEADIREVDARIEAQLAPFAPAAAQLLDIPGIGPAAAAAIIAEIGVDMTRFPTPAHLAGWAKFAPGVKESAGRRKGNASTGHGNRYLARALGQIAVTAARTDTFLGDRYRRIARRRGAKRAIVAVGRSVLTIIWHLLSDPEARFRDLGASFYLSRTDTERRKRNHIRQLEALGYRVTLDLAA

SEQ ID NO: 310809 - protein, 339 aa, unidentified
MKLTTVGIDIAKNVMQVHYVDVETGEIVNKPIKRAKFLEYFANRGPYFIGMEACGGAQHWARQLIQMGHQVKLLPAKFVKAFNIRNKNDAADAQAIWLAVQQPSKAVAVKTEAQQAVLALHRMRQQLVKFRTMQINSLRGLLTEYGEVMGKGRAALDKAMPVVLARIADRLPSLLIDTLREQWNGLPQLDAQIAEIEKRLREWIKEDRTAKALMEIPGIGVLTASAAVATIGNAKVFKSGREFAAWVGLVPKQTGSGGKVKLEGISKRGDTYLRTLLIHGARSVLVHAKQPGLWVEQMLRRRPLNIVVVALANKMARTIWALLAHNQSYQKDYVSVKPA

SEQ ID NO: 310810 - protein, 412 aa, unidentified
MEVLYRSCCGLDVHAKTVVACLLKDGHKEIRTFATMTDELLALSDWLASEGCTHVAIESTGVYWKPVFNLLEGQQQVLLVNARHVKAVPGRKTDVRDCEWLADLLRHGLLKASFIPPVEIRELRELTRYRQTLVKEQAAVANRVQRLIESANIKLGQVASNALGVSGRLMLRAVADGETDAAKLAEMARGTLKQKRAELARALEGRVTAAQRFVLAELLTRWDELEAALARVGTAIKEEVAKCHDPFVAEAVALLQTIPGVGERVAQTIVSEIGVDMQRFPSDGHLASWAGMCPGNNESAGKRKSGKTTKGSVYLRAALVQAAWAATHTKETYLAAQYRRLVKRKGKNRALVAVGHSILVIIYHVLARHASYSELGGDYFDHHQVAQQRQRLIRQLEALGLKVSIEELPAAA

SEQ ID NO: 310811 - protein, 346 aa, unidentified
MNATTHILGIDIAKHKFDVHLRTLVDAEARHSATFINRAQGFKALQSWLKAHGVGQPATLHACLEATSRYGDGLATWLHAQGYPTSLVNPRRTRHYADSRLARTVNDRIDAGLIADFCAAHREQLSLWEPLAADHRQLQELTRARQSLIEHREGFANLLETAAGLARKGFQRQIQHLEKEIQRLDKAIKSSLEQTPELQRQVALADSVPGVALITAATVVAELPPIHKISRANQAVALFGLDPKNKTSGQSVHTPARLSKMGSRRGRRALYMPALTALRCNPDIRALGQRLKDKGRSGKYIVVAAMRKLLRQIYGVLKGGKPFDPHWSQRPAKKLPILATVAPTLP

SEQ ID NO: 310812 - protein, 360 aa, unidentified
MTSLPADPPGVIVGVDTHRDVHVAVALDALGRRLGELQIAATTSGYGQLVSWVRELGPAARFGVEGTGSYGAGLHRYLRRHGLAVVEVNRPDRSTRHRRGKSDPIDAEAAARAVLAGTATGIPKAGDDQVEMVRLLKLTRDSAVKSRTQAINQIKGVLVTAPAELREALTGLSGTAQLDRCAALRPGPVTTPTAAAKQALRSLAHRAIALAAEAAALGTQLDELTTAVAPALRALTGIGPDGAAALLTAAGDNPDRIHSEAGFAALCGTNPIPASSGKTTRYRLNRGGNRQANAALHRAVITRLRHHEPTKAYMQRRLTEGKSTKEILRCLKRYLAREVYHQLNPTTPSRNRPNDLPASA

SEQ ID NO: 310813 - protein, 337 aa, unidentified
MKITTIGLDIAKRFFHVVCCNEQGRLVKKKMLKRAQVLSFFQQHTTCLVALEACATSHFWAREIRKCGHEIKLIPPQHVKAFLVGNKNDYNDALAISVASKQHHIKSVCIKSVEQQDNQAQHKARELAVRQRTALCNQIRGLTAEYGIILNQGVNTIRKSIPLILEDENTGLSGAFKAVLKQLETQLSNLDSCIETYSTLIVETAKNNDICQRIQTIPGFGPMVSSAYFNEVGNGSNYKRGRDVSASLGIVPRQHSSGGKDTLLGISKRGNSYLRCLLIQGAKAVVSRAKTKNDKLSQWINRLVQTRGHNRACVAYANKMARMAWAISASGESYSPV

SEQ ID NO: 310814 - protein, 316 aa, unidentified
MSALQVFVGIDVAKAQLDIALRPTGEGWTVTNDEPGIATLVTRLQEIAPQLIGLEATGGYQRAVVAALAAAALPIVVVNPRQVRDFAKATGQLAKTDGLDARAVAHFAEAVRPTPRPVPDAQTEELRALLARRRQLIAMRTAEHNRLEHAPHRLRADIEAHIAWLDQRVAALDNDLDTTLRASPVWRERETLYRSVPGIGPVCARTLMLDLPELGTLSRQRIAALVGVAPFHRDSGTLRGSRTTWGGRAHVRAVLYMSTLVAVRYNPVLKRFYERLRTAGKVAKVALTACMRKLLTILNAMATHQKPWHVQEVQSA

SEQ ID NO: 310815 - protein, 407 aa, unidentified
MEKIEKRYIGLDVHKYYLIALGVDENLEVVMPARRVELSNLESWMKKNLTKQDEVVLEMTTNTWQLYDELVAYAGSVTVVHPPHVALITRSQVMNDKIAASILARLLAKGLLVGIWVPPQEVRELRGLVAQRQKMTRLSTQAKNRLHAVIQRHHLKPPEGNPFAKTNNGWWESLSLGRLEKMNLQSDLETLQFAEKQEVRLQEEMTGIAAEDEEIGRLLHIAGFGVITAVTVYAAIGDIGRFVEPKKLVGYAGLGARVHDSGLTTRTGKITKAGRRDLRVSLVEAAHVAANNHPHWKAELARLEPRLGYNKAIVAIARKLLITVWHVLARKVADRFAEPEKVSKKMLHFAYEVGKENRAGKSAAQFTRERMDTLGMGQDLTSIPWGSKKPIPLPPSKLKKESAVPNK

SEQ ID NO: 310816 - protein, 403 aa, unidentified
MKKVCGLDVHKDSIFCAIYNGDKYSEVKEYETTTVSIYSMGEYLQCENVTEVAMESTGIYWVAVWDLLLEMGFELTLVNPFLIKQMPGRKSDAKDAQWIAELLHKGMIRSSFVPPPLIQELRVYSRKYSKLQQQITRVLVGMDNILIMCGIRASSCLSRITTKSYMLIVDALIKGYTEPGYLVSLVYGNTKNKQSGKLKESLTGNVKEHHRKQLEWSKEEYDMYQKQIADCLKEMERICDANFEMAVKLLKTLPGISKIAAMTIIAETGGDMSVFENSGKITGWAGLRPRNDESAGKYKSTATTKGNKYLRSILVQCAWAASRMKGSYFKEKFARLAMRKPRKKALIGIARKLLVVIWNVLTSSVEYNPKLVPVYDPVKMKARMAYHKKEYEKTANLLNINIK

SEQ ID NO: 310817 - protein, 360 aa, unidentified
MTLHHLVPATHTAILIGVDTHKQTHVAVAINRLGARLADCSIAADGAGYAELVAWARALGTVEAFAIEGTGSYGAGLTSFVRRQAIRVVEVSHCDRRKRRKDGKNDTMDAESAARSVLAGIATAIPKAADGAAEMVRQIKIARDSAVKAKSAAIITLKTLLVNAPSELREALAPLTDRALLERCARLLPGAVVTPTASVKHAVRALANRWQALALAIREHDTVLDAITAAAVPTLRAAFGLGPDAAAEMMIVAGDNPDRIRSESAFAKLCGVCPIPASSGVTNRHRLFRGGHRQANAALYRIVLVRMQWHQPTIDYVLRRTRQGLSKKDIMRCLKRYVAREVYAALLRDHVAAAQPSAAA

SEQ ID NO: 310818 - protein, 339 aa, unidentified
MKNLTTLGIDLAKNVFQLHGTDERGKCVLTKRLTRGALAEFVATLPSCLIGIEACGSAHYWARRFKEMGHTVKIMSPQFVKPYIKSNKNDKNDAAGIAEAVTRPGMRFVPIKTVEQQDILLLHRTRELAIKQRTAQANQIRGLLAEYGVVIAKGKHHIKKLPEIIENNKEQLSEKAQAVFKQLHEHFRVIETQVEYYEKQIKQFTQTDALCNELMELEGIGPITASAAVATIGDAKAFKNGRSTAAWIGLTPKQHSSGNKERLLGISKRGDSYLRKLLVHGARSVVRTCESKTDKKSLWVADKKKRCGQNKAAVALANKNARIIWAIMATGECYRKAVA

SEQ ID NO: 310819 - protein, 321 aa, unidentified
MKPIGIDISKKSFHVAVLVGEKQLNKTFDNSRAGHEALQSWLVKKGVSPDGSQLCMEATSTYYEALALFLAEEGWRVSVVNPLQIKAFTESRLIRQKTDRADAHTIALFCQQQEPPLWHPPAREVRELQALLARLEAVQGMRVQESNRLHDARQVTRDSIERLIETLDEELRLLRKQIDDHIDRHPGLKQQTDLAKSIPGVGDALGNYMVAWLPVERLADAKAAVAFVGLSPKARESGTSLRGKAMLCKMGHGRLRKILYMPAMTAQRFNPAAKALAARLRDAGKPGKLILGAIMRKLVHWIFGVLKSGRAFDLKLALARA

SEQ ID NO: 310820 - protein, 379 aa, unidentified
MKKTYYIGLDVHKQTITIAYTFSGSRKDALYYGECGGSNPSVVRALRRLAKKLGVPFKDLKVCYEAGPTGFVLARRLRQLGLDCVLMSPSKAERKPGEKIKTDKRDAMKIAKLFRNGDITEVRVPPALDEALRDVCRARTDASDDLARAKQRLSSFLLRNGFHYSGKSKWTPAHMRYLRELVLPDPAQKIVLEEYIQAIDSCIDRVARLAQKMKELLLGWEWEPMVRALMACKGFKEVAAMTIISELGDLRRFSHPRQLMAFLGLVPSENSTGSRRRQGGITKCGNSHARWMLVECSQHYRKAPKVSKALTTRQEGQPRQVKELAWRMQNRLHKRYVKLKMRGKRENKVIVAMARELSAFIWELQNKLSLPIPESGPLK

SEQ ID NO: 310821 - protein, 426 aa, unidentified
MDTVAGLEPIAFVGVDWASEEHAVCVLGTDGRKSSSYAVAHSRDGFEQLVRRLASLGPVAQVPVAIERPDGRLVDALLEAGHPVVAVSPNAIKAWRESEVLSGAKDDPGDAEVIAEYLRLRAHKLSVLAPFSAETRALRAVVRARDDLVDQRVAAHNQLQACLDAFWPGAKAVFADVCSEIALAFLERYPTPASARALGDKRMAAFLTKHGYSGRRPASELLERLRAAPEGIADGPEAEARRDAVLGYVRVIRALNTSIKSLDRSVAAHLGEHPDGEIFASLPRSGRINAAQMLAQWGDCRQAYDRPEAVAALAGVTPVTKKSGKYEAVHFRWACDKRFRRAVTTFADNSRHDSPWAADIYRRAIARGCDHPHAVRVLARAWIRVIWRCWVDRVAYDPAKHTAAARLLANSERATGPAVGTDQQAA

SEQ ID NO: 310822 - protein, 313 aa, unidentified
MLFIGIDVAKAQLEFACRPSGETGTVPNVDEGIRELVTRCQALTPTLMVLEATGGYEAALVAALATAGLPVVVANPRQVRDFAKATGQLAKTDALDAQVLALFAERVRPVPRPLPDAAIQALDALLTRRRQLVEMLTAERNRLLLARSAVRRDLQQHIRFLERRLREADDDLHTAVKASPAWRVKDDLLQSVPGVGRVVSLTLLAELPELGRLSHKEIAALVGVAPLNRDSGTLRGKRLVYGGRAPVRAVLYMAALVASKCNPVIRAFYLRLRAAGKPAKLALTACMRKLLTILNAIARDGTPWQPEPIPVRT

SEQ ID NO: 310823 - protein, 343 aa, unidentified
MAHYVGLDVSLKRTSICVVSDTGSVVREGVVDSDPEAIAAFVRSKAPDTVRVGLESGPTATWLWTELRRLGVPVICIDARHAKAVLKMQINKSDRNDAIGIARIMQTGWFKEVRVKGLDCHAVKALLTSRALLVKIKRDLENQVRGLLKNLGRVIGRAKFNGFAARAAELIEDRPELVAVVAPLLRAREAIEKQIDDLDRKVLKLARHDAQIRRFMTVPGIGPITALCFKATIDDPARFKRSRSVGAYIGLTSRRHASGEIDWSGRISKCGDAMLRSYLFEAAGVLLTRVPKWSALKAWGMRLAKRNGLRKAKVAVARKLAVILHRMWVDRTDFTWSNKEAIA

SEQ ID NO: 310824 - protein, 401 aa, unidentified
MTTMQDNVQRVKRFREVKATLRTEHQRLLVGIDIAQAEHVVQVRHAHTRIVGPTLTIPNTSRGFTQLWARIQQAQRATGCREVVCGLEPTGTYHQAVAAFLEAQGATVVLISSSVAYWNRRTQDGTWDKHDRKDAANCAELLEQGKVLFYSQPDGPLAALRHLVKLLRRARAELASCKARWRTTLRPALGPMGEPLPNRLRAELPAVLQPWERAAPGRPAVAKGRLPLGLATACADLGAQVTAVQARIAAIEAALTPLAERLPAYALLRTIPGIGPTVGAILLAEIGDVAWFTQFSQLRKLAGLDIIRVQSGQFAGQARISKCGRGLLRWALYQAALGQARTAAGRARLAALKAKRQGDRFAGLKATVELAAKVLRVVWGVWRSGTPYDPRRMGGLQRQAR

SEQ ID NO: 310825 - protein, 406 aa, unidentified
MSAYRFYVGLDWATEAHRVVVQDAERQGVAERTVPHEGGALEAFAAWLSELAAGVPRDVAVALESPRGAVVDILLANGFHVFALNPKQLDRFRDRYTVAGAKDDRRDATVLATALATDQPAFRRLAPEHPLVIELRELSRLEDELQQELQRLTNRLREQLHRYFPQLLQLVPAANEPWLWALLDRAPTPSAAQHLSRAALRTLLTRHRIRRVDADAVRTLLQHPALPVAPGTVQAAQRHLAVLLPRLRLAHQQRAECATLIEDILERLGEQQEHRDVPILRSLPGVGRVVAATMLAEASRLLAARDYHGLRTHTGVAPVTKQSGKHWVVLRRSACNRRLRDAVHYWGQSVVRHDPRSRAHYDRLRARGHSHGRALRGVVDRLLRVLIAMLTTQTLYDSNRRLPIAA

SEQ ID NO: 310826 - protein, 345 aa, unidentified
MEIVTLGIDLAKNIFALHGVGADGKVLLQRPAVKRAKLLELTASLSPCLIGMEACSGAHHWAREMTRQGHTVRLIAPKFVAPYRMSGKRGKNDAADAAAICEAVTRPAMRFVPMKSIEQQSELFLHRARQGYVEQRTALINRIRGLLSELGIVLPQKADTIRRELAKLLEDLPGHCNTVVADAITDLERLDARVGEYDRHIATCAKANADARRLMQLSGIGPTTASALVASIGDGHDFESGRQFAAWLGMVPGQYSSGGKQRLGRITKAGDRYLRTLLILGARSVLQSGKKKEDAISRWTRDVESRRGYWKAVVAMAAKNARLAWAVLRRGEDFKLYGQKVPAGA

SEQ ID NO: 310827 - protein, 319 aa, unidentified
MSTERTVRHVGIDVSKEHLDVCSLPDGEIFSVANDRAGIDELLARLLEGVRPDLVVLEATGKYERPAAVAVAAAGIAVAVVNPRQARDFAKAAGRLAKTDRIDAEVLARFAGAVGPRPSVLPDEEARALQDILVRRRQLLEMIVAEKNRLQMASEAVAKRIAAHVRWLEKELGRVDRELDEAVRESETWRANEELLRSVPGVGPVLARTLLAELPELGTLPRRRLCALVGVAPFNRDSGAFRGKREVWGGRAPVRAALYMGALVATRYNPVIGEFYERLLAAGKPKKVALVACMRKLLSILNAMMRDRIPWHPAHLLTP

SEQ ID NO: 310828 - protein, 316 aa, unidentified
MESESPYVGIDVSKDQLDIAVRPTGETWSMPNDASGITEVVQRVAQLHPKLVVLEATGGLQMPVAAALASAGLPLAMVNPRQVRDFARATGRLAKTDRLDAQVLAHFAEAVRPAPYPLPDAQTQELTALLTRRHQVVEMLTAEKNRLRATRSKAVRQRVQDHIRWLEQELADLDDDLERTLRESPLWREKDNLLRSVPGIGRVVSITLLADLPELGTLSRHQIAALVGVAPLNRDSGRFRGKRMVWGGRARVRAALYMAALTASRYNPIIKAFYHRLCSAGKARKVALTACMRKLLIILNSMVKHQQTWTHDVQYP

SEQ ID NO: 310829 - protein, 343 aa, unidentified
MKLMRVGIDLAKSVFQVHGVDRHERMVWRRKLTRANWLRVFLETVEPDCEVGMEACGGAHHWARLLQARGYSVKLIAPQFVKPYVKSNKNDANDAEAICEAMSRPNMRFVAVKSVAQQDVQAVHRVRAEISKQRKAKGNQIRGLVSEYGLVAPKELVHLRAAIPAWLEDAENGLTGRFRRLLNALWHDLHALDQRMIELDHEIAQIASADPVVKRLQQLRGVGPLIATALVATVGDAKQFANGRQLAASLGLTPRQNSSGGKERLLGISKRGDAYQRTLLVHGARSALRTAQNKEDRLSRWVSRIATTRHHNVAAVALANKTARIAWAMMKDGTDYAPDRAAA

SEQ ID NO: 310830 - protein, 436 aa, unidentified
MHREFAQVAVWEDGVVRQVGQIALTDEALRIFADSLGPEDEIALEATCNTQAIVRLLEPHVARVVVSNPQKTRAIAEAKVKTDKVDAEVLAQLLAADYLPSVWVADPATQALRRQVARRAHVVRQRTRLKNQVQAILHRNLIPRCPAADLFGIKGRCWLANQPLPPDEELTVEALLRQLDFYGQELRIIDAALGRVALARPEVKRLMTIPGVDATVALSIVAAVGDFRRFRRPEQLVSYLGLNPRVKQSGGQPASHGRITKQGRAHARGMLVEAAWVATKTPGPLRAFHDRVRSRRGMQIAVVATARKLAVLCWTMIERSEDYAFARPSLTDKKLRALELRAGMPSRRGQKGKAAAYSLKEVRRRERELAEQAERAYRQLVADWQTKRLTQPKPKPGVAAANGTRLKRPPVGQAARQASVPEPALRSGVDHALTEA

SEQ ID NO: 310831 - protein, 344 aa, unidentified
MQPQEYVGIDLHRRRSVIVRRNSEGETLEVSHVHNDDLLAFERAVTAAGEHPEVVLEAAYGWYWATDLLEELGCNVHLAHPLGNNWGNRRVKNDTRDAEDLADLLRLGRLAEAWIAPPKVRELRELVRYRAKLVCLRTNCKLQVYAVLAKEGVNIPMTDLFGVLGSELLETCHLAMAYRTRVESLRDLIEVFDREIAKLEADVRHELRGHAGYQAIQQIPGVGALFASVFVAEIGDVGRFRSPAQLASWAGLTPKHHESDLTVYRGPITKQGSRLVRWAAVEAAQRQANRTKLRADFARIAAHHGDSAGARKIARVAVARKIVTLVYYGLRDGTIRSKAISEAA

SEQ ID NO: 310832 - protein, 350 aa, unidentified
MVTLGGDSHKRTHTLVAVDDNGRQLAQKTSPATRAGHLEALQWARRWSERRWALEDCRHVSRRFEADLLVAGEVVVRVPSKLTGGARKVARTSGKSDAIDALAVARAALREPDLPVAKLEGPGRDVRLLLDHREDLVGERTRIQNRLRWHLHELEPEAAIPARMLSRYHTLGEIEQRLGRHRGVVAEIALELVVRVRELTRRINELEADIEHRVGGLAPTLMKLSGCGALCAAKVVGEAAGVSRFRSRAAFAMNNGTAPVQASSGNQQRHRLNRGGNRQLNVAMHRIAITQLSRPGPAKDYMAKRLAAGNTKTEAIRALKRRISDEVYRRLLQDERASLTNNASACVAAA

SEQ ID NO: 310833 - protein, 334 aa, unidentified
MKTNVVVLSNQSVMDKIKHFYGVDISKPFFDVVDHKGKHDQFSNDLKGFKSFLKSISKESLVVMEATGYYHYRLAQYLYEKGVTVSVVNPLSVKRFIQMKLSKVKTDKSDAKAICEYAQATEVPLYTARNAVQAECLQLLSLQDLYMKQRTAVKNKIHGEKALGTPSKAVSRSLNRMLKQIEKELTQIETKLESLVKETQKDQLEQLTSIPGMGKKTAMLLIVLTDGFTSFENARQLCCYSGLTPTIRQSGTSVRGRSRISKVGNRKLRNLLFMCSFTACRTNKACRELYERIVEKGKSKKLALIAVCNKLLKQAFAIAKSGTCYQENYMSKLA

SEQ ID NO: 310834 - protein, 368 aa, unidentified
MSVVSMPRGEVKWVGLDVAKDAIAVGVLDGVSEATPRLEKIAHDEVSIRRLVSRLGGPGRLRACYEAGPTGYELYRLLGSMGVDCEVIAPSLVPVAPGDKVKTDRRDARRLVRLFRAGELVTVRVPTREEEGCRDLSRLRAAAMVDRRRARQRLGSFLLRRHLVYRDGRAWTVKHRRWLRSLAFDDTGTQVTFAHLLASVEERELRVDAIDTDLARFFEAGLFVNEVARLGAYRGIAPLSALGLACEVCDWRRFPAPGKFMGFVGLVPSEYSTGASTSRYGITKSGNAHVRRILVEAAWAYRYPARVSPELARRHEGVAPDVIARAWNAQVRLCGRFRRLAARKDRRTIVATAVARELAGFVWAEMTA

SEQ ID NO: 310835 - protein, 351 aa, unidentified
MSQPASTTIAVMGIDIGKNSFHVVALDQRGAIVLRQRWSRGQVESRLANMPPCLIGMEACVGAHHLSRKLKGLGHDARLMPAKYVRPYSKGQKNDFRDAEAIAEAVQRPTMKFVATKTADQLDLQALHRVRERLVSQRTGIINQIRAFLLERGVAVRQGQRFLRAELPRILTTPPDVLSPRMLRVIEDLAGDWRRLDERIEGLSGEIEAIAHRDAGCERLMSVPGIGPIISSAMVAAIGRGDAFAKGRDFAAWLGLVPKQISTGDRTILGKISKRGNRYLRVLFVQAAWVVLIKPKSWERHGLKPWLEAARKRLHHNVLAIALANKLARIAWSVLANGRNFEARRIPAVAQ

SEQ ID NO: 310836 - protein, 407 aa, unidentified
MRVVHERCCGLDVHKANVVACVLTSEGEEVRTFGTVTRELLKLLDWLQKKGVTCLAMESTGVYWKPVYNLLEGQGIELMVVNPGHMKAVPGRKTDVKDAQWIADLLRHGLLRASRIPERPQRELQESIRYRRSLVEMRADEVRRLQKVLEGGNIKLGDVAADVMGKSGRNMLEALAAGVTNSNQMAELAQGKLKKKRPALRLALEGSIDQHQRSMIQRLLRHIDFLEAGIEQISAEIEARMRPFEPAMAALQAIPGIGSITAQTILAEVGTDMSHWPNHKAFASWAKLCPGNNQSGGKRRSSSIGNGNQSLRGSLVEAAKSAVRVKDSYFAAYYHRVKARRGGRRAIVAVAHAILVAIYHMLKEGTVYQDMGSDYFDRLDREAIMKRSVRRLENLGYTVTLEEPAVA

SEQ ID NO: 310837 - protein, 451 aa, unidentified
MYSYFVGIDIAKNTHWASCLSSDGEIILEPFSFSNDNSGFQKFISKLESLDKTKILIGLESTAHYGENIISYLFNLDYNIGLINPIQTANLRRSNIRKTKNDKVDTKIIIKALTLGNYSLITSRDINNLKLKGLCRSRRNLVTMRSKAKIQLVSYLDQIFPELAQFFKGNLHLNVSYQLLKEYSSPKQISSLHLTKLSNILHDNSHGRYNKQDAIRLRELAKNSVGIDNPSLSLQIKHSILQIELYNEQIAEVEALYKQILDEMNTPILSIPGMSYNQAAVIIGCIGDINRFEHSCQLLAYAGLDPSVIQSGNFQARSTRMSKRGSGMLRYSLVYSAHNVVKNNKTFRDYYELKRSQGKSHYCALGHVAHKLVRMIFKMLKNLANKAGITKEISPHTLRHSFASNLLNNGADLRVIQELLGHENLETTEIYSHLQNKKIKDDYNNHPHAHF

SEQ ID NO: 310838 - protein, 315 aa, unidentified
MSDVPCFVGIDVAKAQLDIALRPSGERWAVPNDTSGVTTLVDQLQALQPTLIVLEATGGLERMVTSALATSGLPVVVVNPRQARDFARATGQLAKTDALDARALAHFADVIRPTPRPLPDAQTQELRALLGRRQQLIIMRTAEQNRLAGTSERLAQDITAHIAWRNTRIATLDDDLETLLRASPLWRANDDLLQSAPGIGPVCARTFLLELPELGTLTRQQIAALVGVAPLNCDSGTLRGRRSIWGGRAHVRTVLYMGTLVATRFNPRIKAFYERLLAAGKLKKVALTACMHKFLTILNAMLKHRTPWQSQEVPG

SEQ ID NO: 310839 - protein, 399 aa, unidentified
MPANLRAHSNLPVATSEQPVLYLALELGWDSWKLAFASGPGSAPRLRQMPARDVTRLVLEIAEAKRRLRLPADCPIVSCYEAGRDGFWLDRCLQQHGATNLVVDSSSIEVNRRQRRAKTDRLDAVKLVSMLLRYASGETAVWSVVHVPTVEQEDARQLHRELLTLQQEATEHTNRIKSLLATCGLAIEIDRHFPKRLKELRQWNGTPLPETLHQRLLREFERMQVVNRQARQLQQQRAKQVRERDDAPAVEQVRKLLGLKGIGIRSSWLYVHEFFAWRNFRNRREVGSLAGLAPTPYGSGQTDHDQGISKAGNKRIRWMAVEIAWGWLHFQPDSELSRWFHARFGRGSSRQRRIGIVALARKLLVQLWKYLQTGVPPAGAALADWRPKAVITTRSLKIA

SEQ ID NO: 310840 - protein, 344 aa, unidentified
MKITRVGLDIAKQVFQVHGVDERGRVGLRKQLARAKVLQFFAQLPPCLVGIEACGSSHYWGRELTKLGHRVKLMGAQFVLPYRKRSKNDANDAEAICEAVGRPNMRFVAVKSEEQQAVLMVHRARTLVVANRTAQVNQIRGLLAEFGLVVPKGVARLRRELPGILEDAENGLPALAREVLAGLLEQFSHFDTRVRVYDGQIRALAAASEPARRLMQIEAIGPQTATALVASMGDPHVYSNARCYAASIGITPRQHSSGGKERLGRITRQGDGYLRTLLVHGARAALRVIDTKTDAKSAWARRLRDRRHVNVAAVALAAKHARIAWAILAHGTDYRPAQPEAVAA

SEQ ID NO: 310841 - protein, 300 aa, unidentified
MAKAGTLVGLDVRASKIVAAVLDGETGELRTFAMDGDSDAAAGFCAGMPGAVRAAYEAGPTGYGLARALATRGVECVVAAPSKIPRAPGDRVKTDRRDAELLVRLLLAGELHPVRVPGDEEEALRDLVRAREAVRVDLMRSRHRLSKLLLRHGIRFDDGASWTERHYQWLATVTLGWPAAQATLLDARGAIDALIHRRDQLEREILALLPASPWQVQVGRLRCLRGIDTLTAVGLCAEIGDFERFARAEQLMSYVGLVPCESSTGHQRRLGSITKTGSSHARRLLVEAAWHYRAPTSAAA

SEQ ID NO: 310842 - protein, 469 aa, unidentified
MGQRTVGIDLAIRGDHVARILDDGRPHGKPIRFRLTSHSLASLVIRLRDGVAPDSPITAVMEPTGMSWFPVARWLGQAGIKVIRVKGQRVRALRRYLSEHTKTDAADAYVLGAIPMFGGVPAEPVYVPNAERHALQRLTRQRERLEDEVTAIKRRLLDLIRWACPAIEAVLPDLRTNLSLAVLHDLFDPAVVAKAQRTTLLRFVAKHASGNHPHTGPFAEALVDGLKLAAVETQRLHEAAVDFRLVQLEVAIEVDRLRLLETQLTRLGREVDVLYAKLHPSDALRTIPGIGATLGPLVLGVLHEARRFAGLHQLRGFCGMFPRVNSSGGANKPGQAITQSGNNRIKRALYLAADAARRIDPGLAEVYWRLMVRKGHHHKQALCAVATRLVNRIGKVLRSGEAYELRDTDGTPITVAEGKAIVAERFSIPTEIRNARRRQRPEATHAPAGAASSTGRPAAELADPLCSVT

SEQ ID NO: 310843 - protein, 338 aa, unidentified
MTIIRIGLDTSKHVFQIHGVDENEQPVLRRQIRRSEVVKFFAKLPATRIGMEACGASHHWARVLRELGHEVVLIPPQYVKAYVQRGKNDKIDAEAICEAMSRPMVQARFVPIKTVEQQAALTMLGVRDLLVKQRTMLINAIRGHAAEFGVTVAKGPEQMRELLRRLATDEGVPTLAREMISVLANQLDGLGVKLKAIEARLMTWHRQDQASQCLATIPGVGPIGGVSFALRVPNPKAFRSGRHFAAWVGITPREDSTAGRQRLGRISKQGDEDLRRLLVLGATAVIQQAKPGRASPWLLGLLARKSKKVAAIALANKMARIVWAMMVSGETYRRPTAA

SEQ ID NO: 310844 - protein, 418 aa, unidentified
MEVLCPCCCGLDVHKDTVVACLVRSVTAGVRTKETRTFGTTTGELEALGAWLRAVGGTHAAMESTGVYWKPVFNILTEPGDDLAVWVVNAQHARAIPGRKTDVKDAEWLADLLQHGRVRPSFVPGREQRELRDLTRTRTSLVDERSAAVKRVQKVLEDANIKLSGVATDVMGTSGRAILAALLEGTADPAEMAELARGKLRAKIPQLERALAGRVREHHRQLLALHLGHIDFLEGAIAELDARIADKTRPFEAELARLDTIPGVDRRTAEVLVAEIGVDMAQFPSARHLASWAGMAPGNNASAGKRKGGKTRKGSKHLRRALVEAARAAARTKQPGRTAFAQQYRRIVVRRGPKKAAVAVGHAILVTAYFLVSRHTTYREPDPSQFDDRRRARVRQRALDQLRALGYHVTLAPKEVAA

SEQ ID NO: 310845 - protein, 361 aa, unidentified
MVAVAEQDGEVRPLGTIPNRVESIRKLVKKLGPVAELRFCYEAGPTGYVVYWQLSALGAKCEVVAPTLVPVKSGERVKTDRRDALKLARNYRAGELTPVWVPDATHEALRDLVRAREAAKKDQLRAKHRLGKFLLRHGRRPPTSVKRWTLNYLSWVKHEVHFEQMAQEATLLDYLHEVEHAEGRIARLDLAIEEAVKLTPPQMRRVIEALQALRGVAQVSAVTIVAELGEVSRFTGARQLMGYGGIVASEHSSGESSWRGGITKTGNAHLRRLVVEAAWAYRHGPSIGKSLQKRQAGVSAEICEIAWKAQHRLHARYRKLMARGKEKEKVVTAIGRELLGFIWAIGVKAEAEQKNLERRAA

SEQ ID NO: 310846 - protein, 318 aa, unidentified
MNTPVVGIDVSKRKLDVALLVDGKIKAKAVSNSQEGFAELEVWLIKQKISLPEAHICLESTGVYSEPVALYWFDKGIKVSLVNPNCIKSFGSSENIRNKNDQVDAGLIARYCAAMAPSAWEAPSREQRQLRAWGNRLTALQDMRQQELNRLEVHETAKQHDVISHVQAHITWLDAQIAQIAQDIDDHIDRHPGLKQDAELIESIPGLGRTTAAKVLGHLGDVRRFENAKALAAYVGVTPRQRQSGTSVRGRTMISRMGNKHLRAALFLPSLVAKRHNPILKQFGQRLEANGLSKMAVAGAIRTTTRRTISRIRTRLAA

SEQ ID NO: 310847 - protein, 386 aa, unidentified
MDRTVNNLPAATHGEPVRCLFAIELSTKSWVIAFNTPLSEKISRRTLTGCKWKRLLELIEQVRARVSRETGRTVEVVSCYEAGYDGFWLHRQLEAHGVRNYVIDPASLQVDRRARRAKTDRIDTERLLRSLMAYLRGEPKVWSVVRVPSVAEEDARRLHRERDRLVSERVQHVNRIKGLCALHGIYDYNPLRPQARARLEQLRTTQGGALPPRLNSEIKRELQRLQLVVEMIATLEAERDAIVDDEASTHVNAKKIQNLHKLKAIGPEFAAVLVGEIFHRDFNNRRQLASYVGYAPSPFQSGNVAHDQGISKAGNRKGRTTGIELAWMWLRYQPDSELSAWFRARVGTTKGRIRRIAIVALARKLLVALWRYLETGLVPRGAVLKG

SEQ ID NO: 310848 - protein, 415 aa, unidentified
MNDHECAAAAGLDWAKDEHALCVIENSGRKIFEGRYAHEEGGINELCRSLVEMGVERLAIERPEGVLVERVLEAGITVLTIHPNQLKASRPRFRASGARAKSDAFDAFCLAELARTDHHRFRALVPDSDQTKALKVLSRSREDLVGTRVALANQLRAELEAFWGGAAILFSEIDSAISLAFLERYPSPKDACRLAEKRLESFLSKNRYSGGKSAVELLEKLRKAPQGRAGEAEIEARREAVLALVGTLKVLLERIKDLEDRIARAVRAHPDGEIFLSLFRSPKSRLTAASLVAQIGDRRERYPTNEALAGAAGMSPVAVESGRRKVASFRRACDKRLRRAVATLAESTRQHNRWAKEIYRRARARGCDHAHAIRILGRAWVRVIWRMWRDGVPYDPERHGGLRRLQSAEGLPQGV

SEQ ID NO: 310849 - protein, 421 aa, unidentified
MNKNTNNDRQPVTPQAWIGLDWGHETHAFALQDRSGHAEDGTLKHSAESLHQWLNDLAKRYGGRPVSLAIEASRGAVIHGLLQYPWLTIYPVNPVTSARYRTAFTPSGAKDDLPDAHVLLELVRDHAHKLRPLEAQDPQTQKLARLVEVRRHLVDRRTQLLNQLTSLLKDYYPQALELVGGLNSDLAVDFLDRWPDLVTLKAARPSTIKHFYYAHHLRRPEILEERIKRIKEAVVLLQDYELVQVSVLHLRLLVDQLRAFRKHLPVVEEEIKTVFAAHPEAYLFRDLPGAGAQLAPRLCVAFGTLRGLHADPASLQKLAGVAPVREKSGNQVWTHWRWLAPTFLRQTFVEWAGQTVVFSAWAKVYYQRMIAKGTKHHAVLRALAFKWIRVLWKCWQTRVPYQESRYLQQLLQRKSPNAVTT

SEQ ID NO: 310850 - protein, 370 aa, unidentified
MNPIYIGVDFHSREQTICYLKTETGELVIKELKHQDKEQLRAFYQQFLGQVIVGLEASGYSPWFEALLEELGCEVWLGDPVEIRRRARWRQKSDRRDAELIWDLMVHHEFPRLYQPPLASREVLRMLRYRQKLIKMRTMAKNSLQAIAMQAGLAKGSRLFSTAGQEEFGNATMSPVLQWQRDHWFSLLKPLNEQLLETMVWFKAQSKDDNQIKRLRTHPGIGLLTSLCLRHTLQPVSRFRNQRKVVAYAGFDPMIRTSAERAIYLGISKAGSRMLRYLLVEAVHTAVRYDEDLKRFYKRVAERRGRAKAKVATARKLLIRAYIMMRDEIDYAEFRRRAVAVRLARRSQVTPPTSGGLPGVLIGQSTSPGV

SEQ ID NO: 310851 - protein, 369 aa, unidentified
MEKDTTYVALDDSKRKIVAGILRPGDGQPELREMANDPRLIRRLFERLKREGPVAACYEAGVSGYDLHRQITALGVTCAVIAPALTPRRPGQRIKTDRRDAAKLVRLFRAGELTAIHVPDEAEEAVRDLVRCRDDIRRDVLRWRHRVLKLLARHGRAYLAGKNWSQAHWRWIREQRFDLPPLQRAFEATVFALEQALARQAELDKELEALAVTAPYREPVGWLRCFRGIDTLSAIILLAEVVDFQRFRRPRELMAYLGLVPSEYSSGETQRRGALTKAGNSHARRVLVEAAWHYRHRPTIGRALASRSQGQPDEIVSHAWRAQQRLHRRYRHLVGHGKRTPVAVAAIARELVGFIWAAMTQHESRRQAA

SEQ ID NO: 310852 - protein, 336 aa, unidentified
MKKFLIGIDVSKQKLDVCLIDQSGVIKEEIIIGNQPSVIYAYFKKASKEYGFGQSELLVCAEYTGRYIYPLCCACHESGVDLWLENPTQIKYRSGLKRGKNDKLDARKIAMYAKRFQDEAKLFSMPEKTIATLKQLIKERGMYMVDKGKYRGQLTDQKMFMDKDDYKRKSKRLMGFIKQLDEAISQTEEDIRVLIDSDPDLSNQFKLLRSVEGVGEQTAVKMIVETNAFKDFKDPRKFCCHAGVAPFSYTSGSSIRSRNKVSNRADKSIKALLHMGALIAATRMKGELHDYYVRKVDEGKNKMSVLNAIRAKLVYRMFAVIRNDRMYEKNYQNSLA

SEQ ID NO: 310853 - protein, 341 aa, unidentified
MKLSYVGVDLAKNIFQLHGVDRTGQSVWRRRLRRDQWLKALLDKIEPGCEIGMEACAGAHHWARVLQGKGFTVKLIAPQFVKPYVKSQKNDAHDAEAICEAMSRPNMRFVTVKRIEQQDIQAMHRIRSELMGQRTAKGNQLRGLVAEYGLVAPRELLHLRKAIPIWLEDAQNGLTMRFRVLLDGLWNDLRYLDDRVAELDREVRQLAQTDPQAKRLQQLRGVGPLIATALLATVGSGKQFANGRQMSAALGLVPRQHDSGDKRRRLGITKRGDAYLRSLLIHGARAVIRTAKHKDDRLSEWVTDLAARRHPNVAAVALANKTVRMAWMMLNRDVDYQPVAA

SEQ ID NO: 310854 - protein, 349 aa, unidentified
MKLEPTAQPKLYIGIDIHKRSWKVHCATDLFGGKSFAMPPKPEVLYEYVAKHFPDHQVTTAYEAGCCGYYAHRSFEAYGWHSLVVNPADIHRKGKERFTKTDKIDAQLISRELKDGRLESIHVPHVEREQLRSLFRRRNDLVKDYRRIKSLIKMQLLYFGIAIPEEFDNDHWSHKFRGWVDEVVFAYPSARETLDSRMRSFRFIDQELRDVSTKMRAYCRKHYKKDYYLLKSIPGIGGIVACGIICELGDLRRFNSIKHLAGYVGLAPGIHQSGDNQKSTGITMRAHRLMRSYFIEASWQAIRTDPIMQAYYRRHLGKNVKSIIIKVARKLLNRTLAVIKTETPYAIGH

SEQ ID NO: 310855 - protein, 400 aa, unidentified
MSLDRPFAETAAIRSELGAIFISLELSRSTWLMTSLSPGAGEKLSKREIKAGDVSALLARLAELRHKALARTGTSHPIIVIQEAGLDGFWLHRVLQEEGCESHVVDPASIAAPRRRRRAKTDRIDGEALLRALLAYKRGEPRVCSMVRPPTPEAEDERRICRERAELIGERVRHVNRIKGLLFSQGVRDYEPLRRDRRKRLLELRTGDGRPLGPHLKAQIERELDRLELLLEQVKTVEGARDRLLDRLVESRSQDATAPAEAQPSPVALLLSLNGVGPEFAASLWTEGLCRSFANRRQAGAYPGLTPTPWRSGKIEHEQGVSKTGNARLRTKMLQLAWLWLQHQPKSALAQWFHRRLPGMTGKAARKRLIVALARKLFVALWKFTSAGVVIEGAVMKTTA

SEQ ID NO: 310856 - protein, 377 aa, unidentified
MKKFCVGIDVDKRTFQVCLISLKEDLKRILGSKTFSNSLEGFIDFSEWVSKKASDQKVYFVMEATGVYHEYLAYHLHGHKGQVHIVLPLKSKRYIQSLGIRSKTDQIDAKGLAMMGLEQTLDIWQPGSKQLLELRSLTRQIEMLQEHRTAFKNQLEGAKHSAVMHKSVIKSLEQMIAQTGKQITKLEGQIKKIIECDPFLKRKYELLNPLKGVGIMSFAVVISETNGFALFKNQRQLVCYSGYDVLSNQSGQRVGKTRISKKGNTHIRRILHMAAWSAVENNSQPFRNLYDRVYERTGVKMKAYVAVQRKLLVMIYTLWKKDIPFDPDYGTSGNQEPKLLFSVGSKSQITKTAKSKDLAALDELPYNQSPEALFSVP

SEQ ID NO: 310857 - protein, 338 aa, unidentified
MALQCGMDLHGKNVLCSLTDEKDKVVDERRVATKLDEVLLFLAPHKSDIKGVVVESTYNWYWLVDGLLDAGYCVHLANPNAVKTYDGLKHGNDKGDARHLAHLFRLGLLPTGFIYPKEQRGMRDLLRRRMLLVQERTRFILSLQSLCERVNGGKHAAEKFKRMKPEKLVELIEDPYHQAGALEYLDVVRRLNQGIYRLETKVLGECKDTRTYELLNTIPGVGRVLGMMIAFETGPMKRYAKPGNYASYARTVNANRYSDGKKKGENNRKCGNKYLAWALVQAAHKLIQYCPEARSFYDRKKAKKNGAVATKALACKLARCIYHMLTNDEEFDVKKIFG

SEQ ID NO: 310858 - protein, 370 aa, unidentified
MLDTTTFVGLDVHARSIKAVSLDVMTGEVRCATFGYDAGAVAEWVRSVDPGARCVYESGVTGFDLQKRLSGLGVDCVVGAVSKMIKPSADRRRKNDRNDAEFLARMLSVGNVVEVWVPDDECEAARDLTRALEDARDDLSRSKQRLSKFLLRHGLVFDERTPTGRRKGNWTRAHWSWIESIRFAEGADNDVLAYYVDAVRRAAEEKARLEGLVEAEARKPRWRKRVDSLRCLKGVDTASAADLVFEAGEFSRFRNARSFAAWVGLTPSEHSSGESDRRGAITKAGNKHLRKTLVEAAWHYLTCSGRPKDLARGQAPDRGARRHAAKGVRRLVERREALLARGVHGNKANVATARELACWAWAVGLMAEEA

SEQ ID NO: 310859 - protein, 358 aa, unidentified
MEAQVKKIDFTGQNIYAGFDAHLKSWKVTIMAEDIVYKTFTQPPQPEVLYNYLKNNFPGGTYHTAYEAGFCGYWIHDKLMSLGVKSIVVNPADIPTTDKERVQKEDKRDSRKIARSLSSGSLTPIFVPTINTQRDRSLLRTRAMLVKDLARYKNRIKSFLYFYGISIDESFKNTQSHWSKRFVNWLERIDMGSDSGKEALLVLISECKNLRLSILNITKQVKRLSQTEPYQERINLLRSIPGIGLLTSMIILTEFETINRFRNLDNMCGYIGLVPSTKSSGEKDRTGDITPRGHNVLRSAIIESSWTAIRNDPSLMKSYLTYIQRMDQNKAIVKIAKKLLSRIRFVLTNNRPYMCSMV

SEQ ID NO: 310860 - protein, 310 aa, unidentified
MKVVGIDIAKYSFDLHLLPEGKTAHYRNDTQGIQQCRQFLLQIRPERIVLEATGGYELALTLDLQTAALPVIVVNPRRVREYARSQGLRAKTDQIDARVLAEFAQSPRVQVRELPDAQGRQRRELLARKRQLVETHVAERHRLEHAAERTVVHSIRRILLVVEKEIAKLDKQIAARIAADPQLQRKAEICDSTPGIATATAAVLVTELPELGRVNRREIATLVGLAPMNRDSGQFRGKRTTGGGRVRVRTALYMPLLTVIRCNPVIRRFYQRLVDQGKAKMTALVAAMRKLLTILNTMIKNNQLWNPNIA

SEQ ID NO: 310861 - protein, 437 aa, unidentified
MSQELSMLDPLAAFVDVGSEHMHVSVGGNRPEVFGTVTSQLHALRDWLLAQGVHSVAMEATGVYWMPLYGVLESAGLEVRMVNGRQTRNLPGRKTDMADSQWGATLHMHGLLHAGFVPPADIRRLQDYLRLRADHVAAAASCVQLMQKALERMNIKLHDVISSLAGVSGLAVARAIVAGERSPEALVALCDVQIRRKKEQAVIEALRGTWADEHIFALAQALQSWDHYQKLIADCDERIAAVLPPHDDTQPPLPRSTRRTGVNAPEITRLREILAQMCGGRDLTKLPALSSYGVLQLIGEVGTDLSVWPTEKHFTAWAGLAPGSHDSGKRRKGVKRGRNRTGRLFCMIAQSLIRSRDIALGGFYRRLAAHRGGLVATKALARKLAAWFWRVMVKGDDYVEKGLARYEEQVRKTKEQALKRLARELGRELVPLPGVAH

SEQ ID NO: 310862 - protein, 332 aa, unidentified
MLVQVFGINRNKRSQSPKYAIDLAKSVFQVCKVSPRGKIIYNREVSRKRLKELLVKETKSLVAMEACATAHYWARYAERAGHQVKVINARIVKGFQTKQKTDKNDAIAIATAAALEHIQSIRIHSVEEQAMQSTERARNLALTHVIAQSNQIRGLLLEFGIVIPQGINSLRRNLPMILEDAENDLPDSFRQIVMSLWEHLEVQIEHADAITSSLKGTIESNQVCQKLMKLEGVGPIGALGLSLKLGKGEHYSNGRNAAASIGLTPKQHSSGGKEHIGHISKQCADKRLRATLYQGALSVVSLVINRPPKTNKEQWLKALIARRGKKVAAWLA

SEQ ID NO: 310863 - protein, 338 aa, unidentified
MKLYGGIDLHSNNSVFAIKDENGEIKARKKLPNDLNMIFQFLGSFENELVGLVVESTFNWYWLVDALMDAGFCVHLANTTAIQQYSGLKYADDNSDAAWLAEMLRLNILPEGYIYPKAERAVRDLMRKRMQLVQQATKNLLSIQGLYMRHLSYKLSNNKIKQLSAEDIEKDFLSTNVSQATVCNLAVMNCLKTQIKTIERVILEQVKLRAQFQQLTSIDGIGNILALTIMLETGDIKRFDKVGNYASYCRCVSGARYSNGKKKGSTNSKNGNKYLAWAFVEAASFAIRYNKTVKSYYQRKAAKTNQTVAIKTVAHKLARACFYVLRDDVPFEAKKAFC

SEQ ID NO: 310864 - protein, 373 aa, unidentified
MRDYSEVYIGIDTSKLRHAVAVAEGGRGGEVRFLGEIEASEPAVRTLARQLAAKHGKLLFCYEAGPTGYGLYRLIEKLGHACMVVAPSMTPRKPGDRVKTNRRDALSLARLLRAGELTSVWAPDERHEAMRDLVRAREAAAADLRCKRQQLSALLLRLGRHYTGKKTWSRAHMGWLMGQKLAHREQRIVFEETMQALREAQARMARLEQAIGAAVPDWSLAETVTALMAMRGIDLIAATTILAEIGDLDRFRTPRELMAWLGLVPSEASTGDRVRRGGITKTGNGRARRMLVECAWSYRHPPRVGLAKQARVEAAPPAVRAIAWKAQSRLTARYRALSRKGKLRNVVVTAIARELAGFVWAVRRALVDTRAAA

SEQ ID NO: 310865 - protein, 352 aa, unidentified
MKKIFIGIDISKETFDASVIFSAECSFDYIQLGYEQFKNEAKGFRQFRTWVRKLTAKVHMGKKENWLLCCETTGGYDHGLCAWCHGSGLDIWRESALQIRRSSGVRRGKSDRADSLMIAEYAHKNQRKCKLWEPLPQSLCELKELLLYRERLVNQRKAAKVRANEKRLTSARSKISDYIYNSSIREVERLGKEIKECEKRMMEIINADGKIKRNYDHITSIGGVGLINATALIVFTGNFKTIDDPRKIATYFGLVTFYEDSGTSVHKKDSTKHLCNKLCKKYISNAATVVIKTNRELRQYYDRLLSNGKHKKIAKNNLKHKIIHIAFSLVMNDCDYEENHEYKRAERNKITA

SEQ ID NO: 310866 - protein, 357 aa, unidentified
MKILALDLGKYKTVACDYELASGEHEFETTTTTPQSLHDLLVEREPDRVVIEICSIAGWVCDLTRALEIEIEVANTNDERWRWKRIKKKTDRTDALKLASLSALQQIEPVHVPAREVRQWRALINYRQFLLRRRNRMKNHIRDLLAREAILLPRGRSAWTQEAMIALEQLARPLAAVECHELWRGELSIELGELRRAEEPLKQVEKKLDELAKANQNVQLLQTIPGVGPRLAEALVALIDDPGRFAHGKEVGAYLGMVPKQLESGETLRLGHITHHGNRLVRALLVEVSWLGLRYNPWVREVYERTRAGKSARRKLAIVAVGRRLLIRSWAMLRDQQPWHGPAKQTAAQKTKLKRAA

SEQ ID NO: 310867 - protein, 372 aa, unidentified
MESILYVGMDVHTTNYTLCTYSIEDDREFGLVKFGPDYLNIVRYVRRLREHHGQDIRVICGYEAGGLGYSLYRSLSANNIECVILAPSTMPKAPNERKTDYRDAAKIARCLAYNSYRSVYIPDAEDEAVKEYIRMRDNTKDHIKQLKQRIQALCIRWRKEFNGTKKLWTVAHMKWLQHLEFENPIAQEAFDEYVIQLNEANARLKRYDERIEKWAKLPRYADNVSKLTCFCGVKTHVALATIAEVSDFNRFPNANRFASYLGLVPGEYSSGENINRLGITKQGNSHIRKLLTEAAQCYARALPGKPSVQLLKRQEGNDPKVISYANKGNERLKRKYRSIAARKPKPLAVTATARELACFIWGMMTNHLEQVY

SEQ ID NO: 310868 - protein, 350 aa, unidentified
MKRPDNKVIAGLDLHGNNVVIAVIDLEGKRLTHGKVECNLQQVEDFLKPYKARLECSAVESTFNWYWLVDGLRARGYPIDLANPAQIAQYSGTKHADDKHDAFHLAELQRLKILPKGHVYDPELRPVRDLFRRRTKFVQQRTALMLSFKSLYSRTTGSEMTLTRLKSIDSKEASKLYEHPANQLIAQIQMRQIQSLNQAIAQIEKAVLKCAREIPLYEKLLTLPGVGKILGMTITMEVGDIKRFKTDGDFASYCRVVDSRRLSNGKQKGENNAKCGNKHLAWAFVEAANFAQRGDERCRRWYDRKKAKTMSVIATKALACKLAKAAWHMMMHEQDYDPERMLPGLAGKNK

SEQ ID NO: 310869 - protein, 428 aa, unidentified
MTVRDYTSAKDFLQFKKEIRGSRAHLIVGIDIGKDDHRAFFGTAYGKTLLRRFMFKNDIEGFGKLLEHVKSVKQKDGLSEVVLGMEPTANYHKPLGDYLIRCGHRVVLVSGVAVKKNRELLDGRWDKNDTKDSANVADLISQGKCLFYDYTPVLIRELRNLLSLKRRLKKQEHGLRIRIRNNLLALYFPEIDRYYSKWETEILSVVRWCLDPSMVAGLEYDQFADLVYPGNKTVRRQGRLEWIWKKAVDSIGCTAGEAAEFEAQVLVEELRHIREVIKETDAKIKDVCKRCPEYDYLLTIPGFGPDVSSKVLAAIGDPFRFNSTSQVLKMAGMDLNAERSGKSSDTAVPIISKKGSGHLRYALYQAAFIASCRHKQFKKYYVNILTGREKEKGIKTKMRVKLAGKLLVVAWTLMKKREPFDPEYLQIG

SEQ ID NO: 310870 - protein, 335 aa, unidentified
MNKSKEKKEVIGIDVSKLKLDITVHTTQVYFKCENNKKGINKMINDIYKQSVFSQENILFVFENTGIYSYELAAILNEKEIPFTMVSGLEVKRSLGIVRGKSDKADSKLIALFGYQRREELKPSIMPSKNVEKLQKLLNLRRKLEKHLAGHKSYTKELKSVLNKKEHKVIFAETEKQIKALKASIKNIEEEMFDIIKSDENIDKNYKLLTSINGIGKITSMLVIVCTANFTKFDNHRQLASYCGIAPFEHSSGSSVRGKTKVSNLAYKELKSMLTMAAMSAIQHNNEIRQYYERRIKEGKNKMSTLNNVRNKLLARMFSVVKRGTPYVDLTKYAA

SEQ ID NO: 310871 - protein, 342 aa, unidentified
MVLKTKLMKKNKIVIGIDISKNKLDVCIIEDPTSKQHHYFIVSNDKKGINSIFKELKKYKVEDDSLLFCFENTGVYGMHLCNELQTKKVQFAMVPAIEIKRAKGLVRGKSDKADSKDIAMYAITHEHKLNLTSLPETDLLKLRLLLTEREKLIKAISLFDATRENEDFIDKSITKEVLCLNKKTMAFLKKQLVELEKSMQKIIKENEKINKQFELARSVPGVGPQTALNLIITTRCFSTFEDWRKLACYAGIAPFEYSSGTSIRGKTKVSSMGNKKIKSLLNMAALSAKKYDKQLKDYYERKTSEGKNGMSVMNALRCKIISRVFATVKRGTPYVNILKYSA

SEQ ID NO: 310872 - protein, 343 aa, unidentified
MELHAIGIDLGKTLFHLVGVDSRGNVIVRKRCSRTQLLAYTANVRVGLIGLEACSGSHFLGRALREQGHDVRLMPAQYVTPYVKTNKSDYIDAEAIAEAVQRPTMRFVPIKTEEQLDLQAVHRVRERWVRRRTAVVNQVRGLLLERGLTLPKGRSHVDQALPDILEDATLPLSDSFRVLLAQLKLELDQLTARIKQMDAIIQQAATENEACQRLTAIPGVGPVTATALIAAVGNGSAFRRGRDLAAWVGMVPREYSTGGKQKLLGISKRGNGYLRRLFVQGARVVMQYRTKQAPGLSSWLGQLMARTHQNVAVVALANKLLRMAWAVLCKNETFRPPALVTSG

SEQ ID NO: 310873 - protein, 352 aa, unidentified
MSVYVGIDVHRKRSQVAVVTGDGTVELNKNVVNGSEPMLRLIGNLPPGTPVAFEAAFGWGWLAGLLEDYGFEAHLVHPLRCKAIASARLKNDKVDAAILAQLLRADLLPEAWIAPPEVRQLRALLRHRAGLVRLGTQQQNRIHAVVADFGFDRAGSYLSGPGRGWLAELDLPPVSREIVTDCLTVIDGLAPVIDRIDGELRQHARADPRVKTLTTLPGVGQFTALVMLAEIGDISRFPNARKLASWAGLTPTVRGSDLTVRHGHISKQGSAWLRWVMNQAAQTAKRSPEFSATYAAIAERRGKKIATIAISRKLLTRAWHLLATARAPGPAAPDASAATAAHPRPGGSPSPG

SEQ ID NO: 310874 - protein, 450 aa, unidentified
MDLLDGEGKRKTGPVMGVDVHKDLLTICIVTEKRVLLEIEFKNTNEGIGELLASCKKNKVKSVGMESTAQYHFKLMYALVDANIPFLVANPQQTKSTQGKKTDAIDAKRIAIAHRDGRLKPSVISPKEIMSLRKGMRALLKLIQDQTKIKQRLNQVFHQKDVKLSPLLRTKWGLQVLRRLFQDELVNLLDELLPKKKWELEFQKYLEVLTKFKNSLDEIEQCNFGIDISRLYLLRILATKQKLIYTVLAKQNKQFLRQMRILLSLPGIGPETAAIILAELVDVSYFKSPEQLVKWAGLAPRVYQSGHRKNITGKLHKGGNKFLRRACVLACQNIYAKGTMDNPIHAFMKSKKEANSTYWLALCAGARKLLSIIWHLLKSGSNWKPQTASKKILQKVKIIARKKQKALENRLQKFQKINERLTREETSIINEMVESMSMPDQILKVLMQSV

SEQ ID NO: 310875 - protein, 375 aa, unidentified
MKGKVRFLGLDVHAETISVAVAEPDGEVRSLGTIANREESIRQLIKKLGPVEQLRACYEAGPTGYVLYWQLTQLGVECTVVAPTLVPTKAGDRVKTDRRDALKLARSHRSNDLTGVWVPDGESEALRDLVRTREAAKQDQLRARHRLSKFLLRMGRRPAVGIKAWTEPYMAWVRQVRFERPAQQAALEDYLHEVDHMAARVKGLEQAITEVVKLASPGVQEVVKGLQALRGIAEISAVTRVAELGQISRFDTARQLMGYSGAVPSEDSSGKRKRQGSITKTGNAHLRRIVVEAAWSYRHRPAIGPGLRKRQEGVSEPIKEIAWKAQVRLSRRYARLAAAGKDQRKIVTAVARELLGFIWAIGVKAERSVTQQIAA

SEQ ID NO: 310876 - protein, 355 aa, unidentified
MESSRSKVCGIDVHKRFLVATILERNGLKKTEKFSNDLEHLLKLKDWIVTEHCQAVAFESTGEYWVSLYDVLEGYVDIIVANSYHIKWIPGKKTDTIDSEWIAELALNDLISPSRILPKDKRDIRALTRLREKLVNERTDHKNRVHKVLDSACIRLSVYFTDLFGTSGLKVLKSILSGIPPEEIARRLPRRLQTRSAGILDAIRSQLSAHQLLQLQTSVTMIEHLTGKIKELERTILNDMKKDRRKLEILMSIPGIGYVGSTTILAEIGDVNDFPSPDQLTKWAGLTPRVYQSADKLNTGSITKQGSKHLRWILVEVAHSCIRVKNTPLRTFFDRIFNRSGYKKAIVALARKILT

SEQ ID NO: 310877 - protein, 489 aa, unidentified
MALDPVRKIARYASCACDVRLHIHAFMEVEALSQSRKHRSKDMKANELPKQLQHVNLDAAGIDIGSGSHFVAVPDGRDRVDVREFGPFTTDLQEMADWLRRCGVTTVAMESTSVYWIPVFEFLERAGFEVSLVDARRVRNVSGRKSDVLDCQWLQQLHTYGLLAGAFRPPDEVCVLRGYMRQREMLVQSSVMHIQHMQKALQQMNLLLHNVVTDITGTTGMKVIKSIIAGERDPHVLAEHRDYRCRSSAATIAKSLVGNYREEHLFALKQSLELYEMYRDKIEECELAIARYLGEQPNRIEDEPPTEQNEKRVRVRDRIRGGVDMRSQLFKLYGVDLFTVPGLGADTLLTLAGEVGFDVRAWRTEKHFTSWLSLCPGTKKSGGKVLSSKTRKNANRAATAFRIAAAAVTKSKTALGAFYRRVKARAGAPKAIVATARKLAVMFYSMLKNGTSYVEVGQAAYEEKFRQRRLGGMQRQALEMGFQLIPITE

SEQ ID NO: 310878 - protein, 370 aa, unidentified
MSQSRTLFIGMDVHKDSMAVAYVAQEHGAEVASLGTIGTRQCDIDQLIRKMQAKATHLIFIYEAGPCGYWLSRYLRKKDSDCWVVAPSLIPKKAGDRVKTDRRDAVQLARLARSGDLTPVYVPKVDDEAIRDLTRAREDAISDLKDAKFRLKAFLLRQDIRSAGRANWSPAHLRWLAEVVCPTPAQQIVFQEDVRAVTEHTERLGRLDQELREQVTTWRLHPVVDALQALRGVQFTVAVTMVAEIGDLTRFEHPSELMKFLGLVPSEYSSGQRRHQGGITKTGNTHARRVLVEGAWAYRYPAKVSRQLQLRLENQPKMIQDISWKAQVRLCKRYQRLVAKGKHTNVVTVAIARELVGFVWAIAKEVPVTL

SEQ ID NO: 310879 - protein, 415 aa, unidentified
MKVVFPTCCGVDVHKTFLVATIITTPADSLQPHYQKKRFSTFNSDLNRFADWLLERDCLDVCMESTGKYWVPVFNILEKRGIRVVIANPKWVKAVKGNKDDTKDSKWIGDLFRIGLVKSSFIPNWDIRILREFTRYRYKLVSMKSSEKNRFQNAFTVCNVALDSVVSDMFGKSATAITDYLASDESFDADHCVSLLQRSLKKKAEQVLESIVGFSIADEQKTRIKIIREHYDFIEKLIAKVDACVNEMVAKYEGEINLLCTIPGINRNSAITIISEIGIDMHQFGSSKRLCCWAGLTPGNNESAGKKKSVRISRAGVYLKPALVQVAHAAVKDKKNPYYALKYERIAKRRGKKRAIIAIARMILTAIYSMFCTGEVWNPVDIFKIDMPEHLKEQQLAKAIKLATRFLEKQGLTVA

SEQ ID NO: 310880 - protein, 348 aa, unidentified
MRISTIGIDLAKNVFQVHGVDAAEKLVLKKQLRRSQVLEFFSKLSPCLVGMEACATSHQWARDLKKLGHDVRLMPASYVKAYVKRGKNDAADAAAICEAVTRPSMHFVPIKSSEQQSALMLHRTRDLLICQRTQLINAMRAHLAELGLVARKGRKGLQQLIRTVAEADDERLPSDACFACQAIIAQLQAVQIQITRLDKRIHQAHRVNPASKRLEAIPGFGVIVSTAVVATMTDPKAFKTGREFAAWIGLVPRQNSTGGKDRLGSISKQGDRYLRRLLIVGALSVVKSARARPDKYPWIITLLGRRPAKVVAVALANKMARIAWAVLARGETYRASAHPTSRAVAVST

SEQ ID NO: 310881 - protein, 333 aa, unidentified
MRSTLRVVVGLLNEQDKVICRKRLSNDLPTILEQLAPYRTDIKGVVVESTYNWYWLVDGLMEAEYRVHLANPAAMQQYSGLKYTDDDSDARWLAHLLRLGVLPQGYIYPKAERAVRDLLRKRAHLVRQHTANVLSVQNILARNTGARFSGKRIQELTKQELTTLLAEETQVLAVTSSLVVLDCLRHQIKMLEQSVHKRLHHTPSYEQLLTVPGIGTILAQTIALETGAISRFPSVGHYASYCRCVDSTKLSNGKRKGTGNVKNGNPYLAWAYMEAAQFAMRFQPEAQRFYQRKLAKSRNNTVLARKAVAHKLSRACYYLMRDRVPYEATKAFG

SEQ ID NO: 310882 - protein, 330 aa, unidentified
MYLGIDIHKRYSQVAVVDSDGNLQQESRLPNDRLADLAEEYAGSEAAIEASGNYRPIYETLDEHCDVTLVDPSKNRIIAEATVKTDRVDAKRLALMLRADMLAESYVPSDEIRELRDLVRTRKALVEERTAEKNRVQAVLARTDNTYESELFGPNGREFLAELSLSKVNRKIVEAHLSVIDEYDAQIEIFDKEISKRVVESPAAQRLLTIPGVGETTAATVLAEVGEIERFDRDKELVSYAGLDPEVHQSGDTEIRGSISKEGSAPLRWTLVQSALVAVQYDDYLGNFYTRLKSRKNHQIAIVATARKLLVSMFHMLTRKEPYNPPEVNT

SEQ ID NO: 310883 - protein, 385 aa, unidentified
MATHPIRANNSSKSSTRRSPPALTSTAALSEAGAAAQLPNVIHLGIDVHLRQHVVCRKIDAATVQPAQRMKPEQFVAWAVKQKALEHRVVCCYEAGPFGYTLQRQLTAAGITCYVVRPQDWDKLGKQVKTDSRDARELAEALARYEAGNKHAMAVVRVPEVAQEQRRMITRQREAFVREVRRLGAMGRSHGMTQGHEVSGRWWRKAGWKALSGKLPAALKDILDPLRQLLVQLDELIAARTAQIEAQASAATQRPKGLGALTERGIDNEVLDWHRFNNRRQVSSYTGLCPSEHSSGGSRRQGSINKHGNPRLRHMLVEAVWRFIRLQPGWKRLLKMVEKLKVGLKASKKKLAVALARELAVDLWRLNTGRCTLADLGLIAAQEAT

SEQ ID NO: 310884 - protein, 338 aa, unidentified
MRTYAGIDLHSSNNFIGVIDEQDKILYGKRHSNRIGEVLRALGPFQESLQGVVVESTFNWYWLVDGLQDHGYCVHLANPSAIQQYEGLKHTDDKWDSFWLAHMYRLGILPEGYIYPKEHRAVRDLLRRRLLFVRQRTSHILSLQSMINRNLGFKMSNNEIKKLKPEDSEGLFTCANLAFMAHNNIAAINFLKKIILDTEKKVKSQIKMRKDFLKLLTIPGVGNILGMTIMLEVGDIGRFPKVGDYSSYCRCVDSNRISNGKKKGENNKKNGNKYLAWAYVEAAQFARRYCVKAQSFYQSKAAKTKPVVAIKALSNKLSRASYYIMRDQVAFDEDKLFC

SEQ ID NO: 310885 - protein, 377 aa, unidentified
MKRIKFVGLDVHAETIAVAVAERDGEVRSLGIIPNREDSIWKLVRKLGPVEDLRFCYEAGPTGYALYWQLTRMGAQCEVVAPTLVPVKAGDRVKTDRRDALKLARNYRAGELTPVWVPDAAHEALRDLVRAREAAKKDELRARHRLSKFLLRQGRRSPTGVKAWTMKYMEWVKREVHFEQMAQEATLLDYLHEVEHAAARIARLDGAITEAVKCAPPQMRAVIEALQALRGIAHVAAVTVVAELGELSRFARAKQLMAYGGIVASEDSSGERRRRGSITKTGNAHLRRVVVEAAWTYRHRPGVGAALRKRQEKVSEEVKEIAWKAQQRLHERYRKLLAKGKNKGVVVTAVGRELLGFIWAIGIQVETAHKESLRRAA

SEQ ID NO: 310886 - protein, 351 aa, unidentified
MSQKTNAVAVRTIGIDTGKNTFHLIGLDEQGTIVLREKLARGRIGRRLANASPCLIGIEAGMATHYVARELLALGHDVRQVPPAYAKPFRQGHKNDFRDAYAIAEAVLRPSTRCVPVKTDDQLDLQALHRVRSRLVGQRTAVINQIRSFLLERGIAVRQGPRFLRRQLPEILAKRIDVLSPRMIGIIEDLGGDWRRLDERIERVTEEIEQLAHGSESCRQLMTVPGIGPLIASAMVAAIANGAAFAKGRDFAAWLGLVPKQMSTGDRTILGHISKRGNRYLRTLFMQGARVILLRPANWARHSFGPWLTAAAKRLHHNVLATALANKLARIAWTILAQRRNYETHVVTEAA

SEQ ID NO: 310887 - protein, 458 aa, unidentified
MSRACRNQTKTASQAVGADALTILNANAAGIDIGLEEMWVSVRADRDPQPLRKFGMNTPDLFTVADWLKVCGVETVAMESTGVYWIPLYEILEARGFRVYLVNARQAKNLPGRKRDEGDAQWLRRLHTFGLLNNSFRPEDEICAVRAYWRHRVDLIEHRAAHIQHMQKALHQMNVRLSPTVTDITGVTGMAIIRAILAGKRDPVHLAQLRNPRCAQPESEFVKALTGNYRDEHVFALKQAVALYDAYTHQLLECDQELERKFSALKPVHDDDLPPLDSTDKRNTHSKNAPAYDGRNLLYHLLGIDLVAVHGLNEVTAQIILSEIGTDMSCWSDEKHFCSWLGLAPHHDVSGGKVLRRRTLKTHNRAGQAFRLAAQAVGKTETAYGAFFRRMRAMHGPRKAIVATAHKIARAVYIMLRDHKPFHALDSDMYNQREKERQIARLYKKATTLGFTLTPVSA

SEQ ID NO: 310888 - protein, 362 aa, unidentified
MPKMIWLGMDVHAASITVARYEDQAATAMVQTIANDPAQVRRLVRRLPAGCDVRACYEAGSCGYGLHRQLTALGVHCDVIAPALIPRRPGERIKTDRRDAEKLGRFHRSGELTTITVPTPSQEAVRDLVRAREDVRRDRTAARQRLAKFLLRHGHRYPGSHWTKRHWEWVCGRPFEGAARTVFVHYCDHVLALNERLAHLEREIHTFADSPVYQPVVARLSCLRGLATLSALMLIAELYDLRRFRTPRELMAYLGLVPSEHSSGARERRGRITKTGNALARRLLIEAAWAYRHPARQTRRVHQALTTQPPAVHAISDRALHRLSARYRRLLSRGKTPHHAVTAIARELCGFVWAIALVPDLA

SEQ ID NO: 310889 - protein, 433 aa, unidentified
MPTTHPYDLVIGLDRSDRKADLHLIDTRTGTVQKQTVATSPEALHDWLVQLRRDHPQARVAICLEQPAANLIVFLETYSWITLYPINPISLQKFREAFVTSRAKDDGKDAQYLAELLLSHPDKLKPWQPDDSQTRQLQQLVLHRRAVVDQRTGLTNRLKALLKQYFPQALDLCGEDLWRPLATAFLLKWPTLQSLKKARKESLKQFYYLQGSRSQTLIEQRLERIDKAVPLSDELALLQSYTLRVQLLCKELQLLLKTLQQFDQQIAKVFQQHTDRPIFEAFPGAGPVLAPRLLASMGSERERFAQPENLQSFSGVAPVTKQSGGTCSIHRRYLCPKFLKQSFHEYAKESILHSRWAAAYYGQQRNKGCGHHTAVRALAYKWQRIIWKCWQTRTVYKEAIYEAALKKNKSPLIGLLDQIELGKSPVKSRAKKS

SEQ ID NO: 310890 - protein, 391 aa, unidentified
MFAGIDIASERHVLARLDEQGAPIGKPAPFSEDREGYDTLLRLLGPAPVLVVMEATGHYWKNVFAVLTAAGHDVALLNPLVSRRFQDAKLERTKTDAIDATALARFGFERRPSPSHLHDEAVENLRELVRHRDRLQQDFEARILQLHRLVDLTFPEFTRYVHGLDTRLATSLLADYPTARAFAAATPRRIARLRYARTRLVGAELAEQLVNAAKRSIGQHHGATYEMQARHICQDLDLWRERLAEIDRDIARIIDGHELGKLLLTVNSIGPQTAARIIAAVGDPARFKSASAFAAYVGVVPGLKQSGKQNARRAKLAPLGNARLRRALWMPVLGAVRRDPWLQNFFDRLKASGKPHKVALIAAMRKMLMAIYSVAKNRRPFVPITEQGRAA

SEQ ID NO: 310891 - protein, 319 aa, unidentified
MNTLAPAAIIGIDVSRDWLDLHCLADGQELREPNTAEGHARVVALARERGALVGFEATGGQEWRLWAALDAEGIVTRQLPPAQVKAFARSQGTRAKTDRIDARLIARFLRFRPAVGRRRPPENLVLLRALTTKRGQLVELRKRLLTQIKTQGRTGIAGLFDDIDAGLKALLDARIKDLEARIRQAIAADEALTETARILRSIPGIGLVTSTMLIAEMPELGAITGGQAAALVGLAPIADDSGARRGKRAIAGGRRSLRQVLYQAGLVAAYHNPDLKAWAERLRDAGKPHKVVIVAVARKLVTIANALCKSRQKWVPRTA

SEQ ID NO: 310892 - protein, 365 aa, unidentified
MHATTKPVRNESSAAVTLAVDLAKDVFELAFADAAGRIVERKRLKRGPFSECLENRAPLRIVMEACGSAHAWARRFVRLGHAVELLPAQHVRPYVRGNKTDRADAAGLLEAARCGDIRPVPVKTPEQQGTQGLHRIREHHKAERTAAINTVRGLLREFGFAIPAGADKVRPAVLAALEDGDNDIPMDLRHALAGLLDRIVSCQEAMAAIEKQLADIVRRDTRSQRLMAASGIGLITATAMSAGIGDFARFPSGRHFASALGLTPREYSSGGQRKLGRITKRGDVYLRTLLIRGARSALMAAHKAKKRGQPLDRTQHWALALAERKGHNKAVVALANKTARRLWAAEHHGASFDPEHVSRREQAAG

SEQ ID NO: 310893 - protein, 356 aa, unidentified
MSHDVKYIGMDVHKEAIVIAVQNESGKLVMESVIETKASSILQFLHGLRGELHVTWEEGTWAAWLYDLLQPHVQHIVVCNPRRNALLKEGNKSDKVDAGKLADLLRTGMLRPVYHGENGLRTLHELGRSYQTISKDLTRVMNRLKALYRGWGIPCAGTQVYAARAREKWLSKIPHTAVRRRAELLYQQLDGLQALRRNVRPEFLAESRKHKAAKLLRQIPCIGPIRAAKLIALMQTPHRFRSKRQLRTYSGLGIETHDSAQFRFVGGQLQRSRKPQQVRGLNRNHNHEMKEIFKSAATQASCGRGPFHDFYTGLLAKGMKPEMARLTLARKIAAITLTLWKKEERFDVEQLKTQAA

SEQ ID NO: 310894 - protein, 416 aa, unidentified
MEVLHPRCCGLDVHKETVVACLRLVSEGKVVTEVRTFDTTTAQLIALSEWLAANDCTHVAMEATGVYWKPVWHVLADGEFKLVLANAAHVKNVPGRKTDVGDAAWLAELLAHGLIRASFVPDALTQELRTLLRTRKQLVREQTSHVLRVQKTLEDANIKLDSVISDVMGKSGRAMIKALIGGESDPAKLARFADRRVKVSQEKLREALRSRVTNNHRFLLRLHLNQIDALDAAIATIDQQVEANLAPFQSAVELVESIPGIKGVGAQVIVSEIGIDMSRFPSDGHLISWAGLCPRNDESAGKRRSNRLRKGAPWLKTTLVQCAWAAIRKKGSYLQAQFYRIRARRGPKKAIIAIAASILTAIYHMLKQGTFYKDLGADHFQRRSKDQQRQRLVKRLADLGYAVELSPRGQLAVVSF

SEQ ID NO: 310895 - protein, 343 aa, unidentified
MYYIGLDVHKKTISYCVKDAAGCVHQEGKIGSTRRELDTWVRTLPQPRTIAMEATMFSGWIYDHLLPHAAAVKVAHPLMLRAIAAAKKKNDRIDAGKIADCLRCDFLPECHMAPTAIRERRRVLRYRHLLVRQMAQTKNRVSGLLMETGVEHNRSRLHKVGYFRRLMATDSEIDDSIRPLLKLSRDTIQRCQRTEYALVSSLERDPLLKERIRRLRTVPGVGPITALNWALEMGEISRFRSIKQAVSYCGLCGDERSSGDKVMRMPLSRQRNKHIQHVLVEAAKLAPRLSPELALVHQKAMERSNNRNRATLAVARKIVAWLLAVDRENREFIPAEQRETEAA

SEQ ID NO: 310896 - protein, 319 aa, unidentified
MKAIDYEQVISVGCGIDVHKDVIVATVRSSSKDYQTRQFTAYTSSLTELRDWCKKEGVTHVAMESTGVYWKPVFNILEEDFAIILVNARHVKNVPGHKTDKKDSVWLSKLLLSGLLKASFIPPREIRELRDLMRYKRKKVQFVASETNRIIKVLEDCNIKLSSVVSNVKGVSASKIIGDIIDGKDDVTGLLTHVHGRVKTPREEMAQALTGRITPHHRFMLKMIRETIDENEKLITKLDQQVDLIASQYEMELELLQTIDGVGKDTALVIISEVGVDMDAFPNQHHLASWSGLSPGSNESAGKKKAPASSTETNTSNRH

SEQ ID NO: 310897 - protein, 320 aa, unidentified
MTSKGAEKMQNDTIGVDVSKDHLDAHRLADGASRRFANDKCGRKAFVKWFAQTPVERVVFEPTGPYHRAFERALGAAGVPFVKVNPRRARRFAEAIGKLAKTDRLDAATLARMGALLELKARPPQSEALLKLKELRLAREALVKDRTAAQNRAKILTAPLLKRHNAQRLEQIKRHIAAIEVEILKQVQADPDLAQRFAILTSIPGLSVITAFALLIEMPELGALEPGQAASLAGLAPMARQSGRWTGRAFIRGGRAEIRQALYMPALVAARFNPDLKAKYKKLTSAGKPAKVPFTAVMRKLIVLANALLKANRSWTPKYA

SEQ ID NO: 310898 - protein, 367 aa, unidentified
MKKVSTRAAKQSRNICQPQLTIGLDLGDRNSGYCVLDESGQIQLEERVRTNAKALREVFGAMARSRIAVEIGTHSPWISRLLSALGHAVIVANARKVRLIGESRKKDDRLDAQTLARLARIDPQLLYPVKHRSAQAQADLMMIGARAGLVRARTGLVNTARGLAKSYGERLRGCNVRNRNPEKAEGLSPELQRELEPLLAGIEAGSERICEYNEGIEQLAQQSYPQTALLKQVKGMGTLMALTYMLTLEDPHRFQKSRDVGCSLGLQPGRRNSGRSEPQLHISKEGDPYLRTRLVQGAQHILGPFGIDCDLRRWGLKLAERGGRNGKKRAIVATARKLAVLLHHLWGSGEAYEPLHNSSPTTAAVAA

SEQ ID NO: 310899 - protein, 375 aa, unidentified
MQKKVRFLGLDVHAETIAVAVAEADGQLRSLGTIANRAESVRRLVKKLGPVDQLRACYEAGPTGYVLYWQLAELGVECAVIAPTLVPVKAGDRVKTDRRDAGKLARSHRAGDLTAVWVPDEGTEALRDLVRAREAAKQDQLRARHRLSKFLLRTGQRPAPGVKAWTELYMAWVRQLRYEQPAREWARLDYLHEVEHMAERVRRLEQAITEAVKLASPQMQEVIRGLQALRGIAEISAVTIVAELGNISRFESARQLMGYSGTVPSENSSGKRQQRGSITKTGNAHLRRIAIEAAWSYRLRPGIGPGLRKRQEGVPEEIKEIAWKAQIRLSKRYVRLAAAGKDQRKIVTAVGRELLGFIWAIGIKAEAAGKQAMAA

SEQ ID NO: 310900 - protein, 368 aa, unidentified
MNTVKFIGMDVHKNSITIAIAEEGSRDPVRVYGAINNDFEALDKFCRKMVSTASELHFVYEAGPCGYGIHRHLTGKGFSCMVAAPSMIPKKSGDRIKNDTRDAKTLARLHRAGELTAIYVPDTQDEAMRDLSRAREDAVVAGRKAKQRLNAFLLRHGITYSGKTKWSKAYFNWLSDIAMPHPAQQIAFQEYIDAVHESLDRIERLTEQIRQMVPAWRLADVVEALQAARGVSLIVAVTLLSEIGDLNRFQHPRQLMAYLGLVPSEHSSGGSIKRGGITKTGNSHARRALIEAAWAYRMQPRVSRVLIKRQENLSDPVRQVAWKAQLRLCAKYRRIMAKGKPKQVVITAIARELSAFLWAIAKQLQPVT

SEQ ID NO: 310901 - protein, 345 aa, unidentified
MEIHTIGIDLGKTVFHLVGLNPRGEVVVRKKCSRNQILRFTANRHVSLIGMEACGGAHFLARALREQGHDVRLMPAQYVKPYVKTNKNDYIDAEAIAEAVGRPSMRFVPIKTDDQLDLQSLHRVRERWVGRRTAVINQIRGLLLERGITIRKGRRYIEESLPGILENADNKLSGALRVLLAQLQLEMQYLHRQIDESDKLILRIAGDLEACRRLIAIPGIGPLTATATIAAIGNGAAFKKGRGFAAWLGVVPGEHSTGGKQTLTGTSRRGNKYLRKLFVQGAHSVLLQKTKQSTGLSAWLAQLTSRKRIHVATVAMANKMARMVWAVLAKGEAYRPPLVPQAAGA

SEQ ID NO: 310902 - protein, 369 aa, unidentified
MADRITYVGLDVHKDSIVVAVAVGGLRGEVREYGRIANTSAALDRLLRKLGGDGMTLRFCYEAGPCGYGIQRRLSARGHECVVVAPSLIPKRAGDRVKTDRRDAASLAKLHRAGELTAVWVPDAQHEAMRDLVRARLDAVHALRRARQQLSGFLLRQGCHYGRPAWTKLHRRWLAGLKFAQAVHHLVLEDYIAAVEAAAARRDRLTGQIEALLPDWTLAPVVAALQTMRGMALVNAATLIAELGDLSRFANPRQLMAYLGLVPSEYSSGASIKRGGLTKAGNRAARRLLIEAAWCYRFPARVSRELLLRQEEQPKPIREIAWKAQLRLCAHYRRLARTGKPANIVTTAIARELAGFVWAIARQVTVTTD

SEQ ID NO: 310903 - protein, 367 aa, unidentified
MYIGVDTHKQDHVLVAIDDLGRRCGIQHSANTPEGWTQALAWARDRGQEGTTCWGIENSGGLGKGFAQFLLAQGEADVREVSPHRTAQYRRRGRTQDKTDETDALAIARLLLAEGADLPRVQVDDLSTELRVLSDHRDSLLRERTRLINQLHAQMLQLDPTYKEKSGTLTSTRGLTYCRDLTSAGVDRLTATRLLVVGQLATQALSLDSMIAALTAELERRVAESQTPLLALKGVGTIGAARLLADLGTTPRIPAAKALAALSGVSPVAVSSGGHTGYRLNRGGNRQLNRVIHTMALVQRRYEPRARAYYEKKRAEGKTNRAAMRCLKRRLVDVLYRTLQHSGPTPASLTGAPEVSPLSPASDGAAA

SEQ ID NO: 310904 - protein, 451 aa, unidentified
MEDEVIKMEVVNPQAAGIDVGSRSHWVAVGQREEDVREYGVFNDDLFSLCDWLRECKVRTIAMESTGTYWQNLYAVLISRGFQVILCNGKFTKNIKGKKTDIKDCQWIQRLHSLGLLSSSFLPDGKTEELRTYCRHRKNLLYESASTSKKMQKYLRLLNLRLDVVVKDTCGLSGLRIIRAICNGEKNPEKLAELRHANCHTSKADIALALQSNGREDYLFALKHELDMYDYLHRKIEECDLKIEEKLNSIINNDENKKQHHIDPKPHKKVNKNTPKNIDLNLKSYQMFEGTDLLAIEGMSYSTVLALMSEIGVEGIRKFPTAKHFASWLRLAPNNKVSGGKVLSSKVPKGSNNLKISLRNAANAIGNLKDSTPLRDFFMRINFRKGRVSAISATARKLAVIIWNMVVKGVPYENPEGYLFRDQKKKLGLLKRIQKQITKFELESTDFQFSN

SEQ ID NO: 310905 - protein, 367 aa, unidentified
MKSIAYVGLDVHKEFIVAVALPEKGDEPIIEKRIANDSLAVKKLLGRLERTHEPRCCYEASSCGYVVHRWLAEMGIGCDVIAPSLIPKKPGDKVKTDRRDARKLARLYRAGELTKVHVPSEEDESVRALVRCRETMVKEAQKSRHYVLKFLSMRGLAYLAGSNWTKKHWKYLKGLRFEGADEITWRQYLTLLEYKLSQLEELNRQIAEVAESEPYKQRVGKLGCLRGVGTQTAMVLISEVQDFGRFASPRALMAYFGLVPSEESSGGTIRRGGITKTGNSRARRVLVEAAWHYAHKPALSDGLRKRQEGQPVEAIAHSWKAQHRLHNKFWRIALRKERCKAATAVARELTGFVWALMTQYEREAAAA

SEQ ID NO: 310906 - protein, 421 aa, unidentified
MQKILEISCGLDVHKESVVACIMKRRPWVIPEATETTEEMEIRTFGTFAKDLDELRGWVEWEGCRHVAMESTGIYWVPVYGALEGAHGGEIELMVTNARHMKNVPGRKSDVDDSEWIATLLMAGLLRGSFIPPADVRELRELTRYRKNIVRDIGTQKNRIEKYLVQSGVKLSTFLSDVFGVSGRNLLRVLASRGRLTEADVEAEAKAISRAKKDEIKTSIKGELGEHQREFLKMQVAHLDELQRHLAAVEASVAEKSKPFEREIERVDTIPGIAATAATALIAEVGVDMGRFPTAEHFCSWAGVAPGSNESAGKKKPAGVMQGNHYVKGLVCECAWSVVRMRNTYLSSFYWKVKQKRGAKKAIIALSRKILVIVYNLLKHGTVYSEDHYEAAKCSQEAFRLKKLNADAKRLGLALVPMAHA

SEQ ID NO: 310907 - protein, 343 aa, unidentified
MEKITTIGFDLAKSIFQVHAVTGEGKVAVRRSLRRSQVLDFFRSLEPCLIGIEACGTAHYWANAIGEFGHTVRLMPPAYVKAYVKRNKTDAADAEAICEAVTRPTMRFVPVKSAEEQSAGMVLKTRELLVRQRSQMSNAMRSHMAELGIIAATGMPSIAKLVVIVRDEEDNRLPPSARAALLEMAEQIEILTERIEKLDSRIVAAVKADDTARRLTTIPGVGPIIAATVRASVPDPAGFRTGRDLAAWIGITPRANSSGGKERLGKISKRGNKQLRTLLVVGATSILKQARRGAKLPAWIASVLERRPYKVAAVALANKMARTIWALLVKGGTYQTPAVMMKA

SEQ ID NO: 310908 - protein, 341 aa, unidentified
MKQSVIGMDIAKKVFQLHTVDQRSGKIERFKLRREEVLAFFAERQPYLVAMEACGSAHWWARQLQQLGHEVRLLAPRSVRPFVLRNKTDAADAQAIWTAVQQPDAHQVAIKQADQQAILSLHRIRAQLLKFRIMQSNALRGLFYEFGIVLPEGYTSLTKAVPNAFVDAENQVPHVLLESLREQWARVIRLDEEIQAIELRLKHCMRVRLDCQKIAKIPGVGLLTATAAVASLGDAKTFRSGRQFAAWVGLVPRQTGTGGRVRQLELSKRGDTYLRTLFMHGARSIIARGQKSEWVERLLARRPYNVVVAAVANKLARTVWAVLVKGSRYRAELFTACPVGH

SEQ ID NO: 310909 - protein, 387 aa, unidentified
MPQLNDLSRSLVALDQDSTIIAVVELSQSSWLVAGVLPGIERQPRKKLEPSAERLLGLLHRWRDEAVRAGKTITRIALAFEAGRDGFWLARWLNARGVEAHVIHPSSVAVSREHRRAKTDRLDTELLKRAFLGWLRGERGHCSMARVPTIAEEDAKRPNRERECLVGERTRIVNRMKGTLARLGIRNFKPTLRKAADRLATLHTPEGMPLPPNVLVELLRAMARLGFVVSQIREIEQARQKRLEQQPETGPHAMVRQLARVVGVGIETADMLVHEVLSRPMRDRKAVARYAGLTGSPDESGTKRREQGLARAGNARVRRGMIQLAWRFLLFQKDSALALWYRARTADSRVGTRKTMIVALARKLMIALWRFVTTGETLEGVVLRPAG

SEQ ID NO: 310910 - protein, 412 aa, unidentified
MDATYYVAGIDVHKTMLAVVVANVSERELRFECRRFGTTVSELQNLSAWLRAHTVQEVVMESTAQYWKPVWLALEGQFQLWLAQARSNRGPRGRKTDFRDAKRCVSRLLSDDLRLSYVPDAEQRCWRTLTRTKYQLRRDRVRLQSQLESLLEECQIKLSSVVSDLLGASGQRILRAIAAGETDPAQLGALGDKRLHATDAQLKDALSGQPQPAHRALLTLYLQRLDVIEAQMAELERMIADALKAHEAAIVRLSELPGLGVDSAQQIIAEIGPRAEAFPSAGQLASWVGVCPGREESNGESNSNRSAKGNRTMRRLLNQLAHAAVRKRDCYLQIVFKRLSVRLGYAKAVWAVAHRLCGLIWKVLHEGVRYVERGPAVSALTLRRRKQRLVAQLKKLGYSVQLTPITASETTL

SEQ ID NO: 310911 - protein, 370 aa, unidentified
MCCIDRLNPPSITVAYAIDAGEVESLGKIGTTQTEIDRLCKRLQSKASHVRVVYEAGPCGYGLYRQLTERGFETMVCAPSLIPRKPGERVKTDRRDAAKLVRSLRAGDLSAVYVPTVEDEAFRDLARAWAVAKEDLRQARQRLKSFLLAHGVGYTGRADWSESHRRWLSGYSFANAWQQLAFEEHRRTIEDRLVQCGRLEAALRDAVISWRFYPVVLALQAMRGVQFVTAVGMVSELGDLSRFTHPRQLMAWLGVTPSEHSSGGKRRQGSITKTGNSYARKLLVEAAWSYRHVARVAPQIQQRHEGLPKAIIDRAWDAQLRLCRRYHKLVARGKNANIAVVAVARELAGFIWDIARLAMALALPRGMQSA

SEQ ID NO: 310912 - protein, 387 aa, unidentified
MAQVNDLSRSLTAFDPISTLVLVVEMSKAKWLVSGAVPGVERQPLKKLEADATALLRLIERWRNEAVRAGRPISRIALAYEAGRDGFWLARWLIARGIEGHLIHSASVAVSRERKRAKTDRLDAAMLMRVFLGWLRGERGHCGMVAIPTMEEEDARRPSRERECLVNERSRITNRMKSALARLGVRGFKPHLRKAPERLAGLRTAEGTDLPANIIEELRRDMARLALLREQINSIEKTRAARLERAPDTGPHAMVRLLARVIGIGIETADMLVREILSRRLRDRRAVARYAGLTGSPDESGLKRREKGLAKAGNARVRRGLIQLAWRFLVFQKDSALARWYRTRTEGPSGARKTTMIVALARELLIALWRLVTTGEVPDGVALRPAP

SEQ ID NO: 310913 - protein, 429 aa, unidentified
MNSTQNKKIEQVKETTMIVGIDVGSEKHYFRAFSWRGIELTGKPVAFSNSMEGFNSFYNSVVELMQKNELKEALVGIEPTGHYWFDLGQFMGEKNIKFVMVNPHHVHKTKELDDNSPSKNDRKDPRVIAGLVRDGRYFYSYMPTSVYAELRNASNRRFVLVEEQTRAKNRLHKWIAVYFPEYKGIYTHIDAKGGLLVLKQASTPEEIVRLGVEGIIKIWKDAKLRGNGHKKAMLILNAAMKSIGLKAGLTEARMEIQDLIEDYELQTKRLERVNDLIKELCQQVRYADKLLEIKGIGITTVAGFIAEVGDIMRFDSTKELQKLAGLELVADSSGKHNGKTKISKRGRERLRYLLFEAAISVVGKNEEFKEIHRYYTTREKNPLKKMQSLIAVACKLIRVFHVILTKGISYDASKMLKDIRHPGEQLKAA

SEQ ID NO: 310914 - protein, 365 aa, unidentified
MCHRVIVRDESDERAVHMQISTIGIDLAKNVFQVHGVDAAEKLVLKKQLRRSQVLEFFSKLSPCLVGLEACATSHQWARELKKLGHDVRLMPASYVKAYVKRGKNDAADAAAICEAVTRPSMHFVPIKSSEQQSALMLHRTRDLLICQRTQLINAMRAHLAELGLVARKGREGLQQLIRTVAEADDERLPSDACFACQAIIAQLQAVQIQITRLDKRIHQAHRVNPASKRLEAIPGFGVIVSTAVVATMTDPKAFKTGREFAAWIGLVPRQNSTGGKDRLGSISKQGDRYLRRLLIVGALSVVKSARARPDKYPWIMTLLGRRPAKVVAVALANKMARIAWAVLAKGETYRASAHTTSGAVAVST

SEQ ID NO: 310915 - protein, 344 aa, unidentified
MEHYAGLDVSLELTSVCIVDAQGEIVREAKVASEPEALIGFLRGQKLDVGRVGLEAGPLSQWLHAGLLAAGVDAVLLETRHVKAALSAMTVKTDRRDARGIAQLLRLGWYRPVHAKSASAQEVRSLLTARKLMQAKLLDVECSIRGVLRGFGMKVGPISRSRFEARIRELVDGNAILEIVIGSLLGARTALETEFKRLHRELLVLVRADPVCRQLMSVPGVGAIVAITFKSGVDDPCRFRRSRDVGPHFGLTPRKYQSGELDVTGSITKVGDRMVRTALYEAASVMLTRTVRFSGLKAWAMAVAKRRGMKKARVALARKLGVILHRMWIDGTTFRWSNQETAIA

SEQ ID NO: 310916 - protein, 338 aa, unidentified
MEWTVAIGVDTHKHVHVAVALDRFGAQLDSLELETTETGYRSLLAWAWELGAPAFAVEGCGSYGAGLVRFLERADVGVWECERPRRQERRRGKSDLIDAALAARRLVTGEGLCLPRGGGRREELRLLLLERRSAIQARTAALNQLSALVVTAPEQLRQRLGALSGERLAQAAARLRPGADVSRAVLQRLGRRVERLNHEVLEVDGRLLEILTEVAPALLAECGVGPVCAAQLLVSSGDPQRMTSEASFAALAGTSPLDASSGQQQRHRLNRGGDRQLNWALHVIALARIHHHAETAAYYQRLLATGKTAREARRCVKRALARYFYRRLRELPTPALTT

SEQ ID NO: 310917 - protein, 327 aa, unidentified
MERSIGIDVSKDTLEVVIYDGTFSKNMQYENNLQGLAKLDDTIRNQGEAETLITMEATGVYHLQAAVYLYEKGYTVSVLNPLKIKRYSEMKMLRAKTDSVDARAIAAYGFHEEPCYFTAQEYKKEHIVQLLQQIDAFQRTELENSNRLHALQRIPGANEQALEIYRELVRMLKEKERKVEHTVYEIVNESYADEYRLLKKIPGVGNRLAALIIGYFGKFENFNNAKQVASFIGLNPSPVQSGISIKGRGAISKKGNRYIRKMFYMAALSASKYNKACNSLYERLLAKGKSKKLALIAVANKLIRQIFAIVKYGSVYDPNYQKNFSYC

SEQ ID NO: 310918 - protein, 438 aa, unidentified
MEQIHRRAAGIDIGSYEIYVSVPEQPVRRFTTFTEDVALCVNYLREHKITTAAMEATGVYWMVLYEMMEAAKIEVYLVNGRYVKRVPGRKTDVLDCQWLQQLHSYGLLSKGFVPAEEIRALRSYQRLREDHVERAADAVRHMQKALDLMNIKLHTVISQLHGVSGLRVIRAILKGERDPAKLTALCDDQILKTKCVRVERSLQGNWKKEHLFSLGEALSVYEFYQSKITLCDHEIEKQLDEIAKDKEEPAPRQGKTKPIRHNAPQIKDLETKLLKISEGKDPTLIPGLTDKTFLQLVAELGVDMSKWPTRGQFTSWLGLAPNLHQSGHTKKRYRGRKKTKAGQIFRVVAQSIGQSKKKALGGFYRRIEKRRGASVAIVATARKLAACYYDVMKHGIAYVEQGLEVYEHQLEQQLKRQMQKLAAKFKCQIIPNPTPATP

SEQ ID NO: 310919 - protein, 331 aa, unidentified
MKNKEIVGIDVSKKVLDIYVLSEKHHFKISNDPGGFADLIELCAVKLGDRFENVFFCFEDTGRYSKLLSVFLQESQFQFAALNALDIKRSMGLTRGKTDKKDARMIALYAWRKRDELNVTNLSGPIIDQLKQLLTLREKLIKHRTAFKNAGKDLHDCYIDGEFSFIKERHTSMLIHLNSEIDLVEKELLRIINLHEELADTFKLLLSIRGIGKVLSVYLITLTDNFTKFLSPRKFACYAGIAPFEYSSGSSVKGRTKVHSCANKQIKSLLNMAAMSSIQLNGEYKTYYLRRLSEGKNKMSTLNIIRNKLVFRAFAVVKRGTPYVDLCRFAA

SEQ ID NO: 310920 - protein, 343 aa, unidentified
MSVVILGIDLGKNVCSVVGVDAAGAVIVRRSMRRQTLIDYVAKLPACVVAMEACCGAHYLGRLFAAQGHEIRLMSPEYVRPYVKAQKNDDRDAEGIAEAASRPTMRFVELKSEEQLDIQTLHRVRSRLVNERKNLINQMRAILLERGTTFPVGRRKFEQGIDAMLAGEDTTLSPRLRQLMEQLRAEWRELDARIEALNGEFVELARNDAAARRLTSIPGVGVLNATALIAAVGNASSFAKARDLGAWLGLVPRQHTTGGKPRLLGISKRGNTYLRTLLIHGARAALPSLARSETPLGRWLTGMIERGVHRNAIVVALANKLARIAWAALRKEATFERSYPVAA

SEQ ID NO: 310921 - protein, 410 aa, unidentified
MPSPLFVGIDVSCKDNKVQLLHSDGAEITRFSVPNNHPGAKSLSEKIIGIMGKNKFDSLVIGLEATSVYGHPLVYFLRQEPSIKALNPRIHVLNPKQVANFKKAYPELPKNDWVDAWVIADNLRFGRITKEVCMDEKFDALQKLTRERYHVARNLTREKNRFLNNLFLKFSTLAQEDIFSDKFGAASTAIIEDFFSVDDIAYMDVDKLAEFLNKKSKGRFADPHELAETIKKAARSSYRLPKTVNDSVNQVLAVSLVAVKALKKQLETLDKAIETQFALIPNTLQSIKGVGPVYAAGIVAEVGNVKRFPNHAALAKFAGLAWSEHQSGQFKAENTHMIRSGNRYLKYYLLEAANKVRVHDPEFKRFYELKYAKTPKTPYKRALALTARKFVRLVYALLHSNRLYTPPKGE

SEQ ID NO: 310922 - protein, 315 aa, unidentified
MNAKEIFVGIDVSRDHLDIGIHPTGKTWQLLHDEAGKEQLCQELRKLKPDLIVMEASGGMESALAVKLQEAKLPAAVVNPRQVRDFAKAQGILAKTDRIDAQVLARFAERIRPEVRPLPDEAQRALEGLMARRRQLVIMMTAEKNRLRRASEAVAQGIRDHIEWLKRQLDGVDREISCRIQRNDVWKQKEKLLKSTPGVGPVVSRSFLSGLPELGTINGKKISALVGVAPFNCDSGKFKGRRRIWGGREHIRSILYMGTVAAVRWNPVIRSFFLRLVEAGKSKKVALTACMRKLLVTVNAIIASNVPWKYWKVVY

SEQ ID NO: 310923 - protein, 368 aa, unidentified
MDYHPGFQQIAFVDTKTGECGERRLQHREEAEKFYRELAAQGVKVRVGMEASGHARWFERLLGELNFELWIGDAAEIRTRRVRKQKTDRQDAQLILRLMLKDDFPQIWVPSAENRDVRQLLWHRHRMVQARTRIMNQLQAVALNEGLRCKKRLWREAGREQLEALRLASWASRRRSDLLELLDRLSPTIAELTQAIEQEAEKCPEAHRLRTHPGVGSLTALAFVLIIGRAERFQCGKQIASYLGLVPSEDSSGDRRRLGHISKQGNGLLRFLLVEAAQVTVRSLPEWRNKYFHLAMRRLVPEKTLGNFPSLETRMLLRRYSPRCRVAMRCRFMLVDAQIQHWIAWPVHHDRNDKEEFTWSRRELGVAK

SEQ ID NO: 310924 - protein, 338 aa, unidentified
MEFKHYVGIDVSKNTLDVAVIMNANDVPLHIQISNDNNGFKQLTSWFKKIDKFDFSSTLFCMEHTGIYNNPVLGFLLKLSCTVWVENAVHIQKTIGLQRGKNDKVDAHRIAVYATKNKEELNPYKPRRQSIEQLKVLSSLRDQLIGMKKEIKSRINEYQKFGDKTASSLMLKTSKQTQQGIEKDLKNLEKEILKIITSDEQLNQMYELMKSVVGVGHVTALQLIVHTNEMTLVNNPRSLACHCGVAPFERSSGLFKGKARVSHMANKRLKTALHMAALSAMKLDKELKIFYERKVAEGKSKMSVINAIRNKLIHRIFAVIKRQTPYQNDYQPIFNIKP

SEQ ID NO: 310925 - protein, 408 aa, unidentified
MDLMHKRCAGLDVHQRTVVACARIVEDGKVTEEVGTFETTTTGLLELSAWLETQACTHVAMEATGVYWKPVWHVLEEKFELLLANAAHIKNVPGRKTDVKDATWIADLLAHGLIRGSFVPPTPIQDLRALMRTRKQLVREAARNTQRIQKALEDANIKLTGVVSDILGKSGRAVLDALVAGETDPEKLVELTRGRLKAPREALVEALRGKVREHHRFLIKLHLDQIDALNKALRELEARVGEHLDPFRKNVVILTTMPGISETAASVIVSEIGYDMARFPTAAHLISWAGLCPRSDESAGKRRSSRIRHGAPWLKTTLVQCAWAAIRTKDSYLRAQFHRLKSRVGPMKAIIAVAASMLTAAFHMLTDGTEYKDLTGAYFDRRDHAKLAKRLVRRLEDLGLKVTLSPAA

SEQ ID NO: 310926 - protein, 398 aa, unidentified
MALTPLAHLAVWLAHSVLAGHRPPSAWLDRGVDRFLKLRLPAAVPTVGARREEGSVITIGVDPHKSSHTAVALDETGQVLAELRVQVDRGTGRRLRRWAERWPERIWAIEGANGLGHLLAQQLVAAGEVVLDVPATLAARARQLDRGHGRKTDGIDAQTVAWVAQRTPALRRVTAEDHAGVLRLLSDRRDELVAERRRVVNRLHRLLRDLRPGGAPIELSATVAARLLGATRPHGAANVERKAMARQLVADLRPLDRALADNRHRCAAAVTASGTTLTKVFGISDVLAAKILGHTGDVARFGTADRFASYTGTAPVEVSSGELTRHRLTRSGNRSLNNALHLAARVQVLHPGPGREYYQRKLAAHKSSTEALRASSGNSRRWPTATWSPTALVVPCPP

SEQ ID NO: 310927 - protein, 355 aa, unidentified
MTSTQYIGMDVHKESISIAVMNATGKIVMECVIATKASIILQFIHGLRGDLHVTFEEGTWAAWLYDLLKPHVTEVVVCNPRKIALLKDGSKSDRIDARKLTEQLSMNKLKPVYHGEHGLRTLKELARSYLTITKDLTRVMNRLKALYRSWGIPCAGSEVYAPRHRSEWLSKISEPGVRRRAEHYYQQLDALRSLRQEVRRDLLAESRKHKAWKLLRQVPGIGPIRAALLVALIQTPHRFRTKRHLWTHSGLGLETHDSAQYRVVEGQLQRSKKPVTLRGLNKDHNHDLKDIFKGAAMRASTAAGPLHDFYEALLAKGRKPTMARLTLARKIAAITLIVWKKEVRFDANELKPQAA

SEQ ID NO: 310928 - protein, 337 aa, unidentified
MKTVTTIGIDLAKNSFSIYGVNAQGKPVLQRTLTRANVIRFFANLPECLVGMEACASSEYWARAIESVGHTVRRIHPRYVKAYLLGAKNDTNDAAAICEAVQRPNMRFVPHKSPEQTDIQCVHRIRQGFVRSRTALVNQVRGLLGEYGIVMRQGINTVRNRLPELIADEANELSPIMRRNLAALYESLCFLDERILTQEKILKDIARENEACKRLMQVPGIGLLTATILLSVAGVASNFKNGREFAAYLGLVPRQNSTGGKIKLLGITKRGDTYTRTLLVHGARSVLWHAPQARQNAWLMELAARRGNNRASVALANKTARIVWSMLAQGTEYKIAA

SEQ ID NO: 310929 - protein, 419 aa, unidentified
MNQLFVGIDIGSRDNAVYIMLPDGSKHSSFAVQNNLGGAQTLSKRIVAALKEKNLSAVVIGMEATSVYGDNLLCFLREDGALGRFECKLHVLNPKQVNKFKQSYSDLPKNDPVDAFVVADNLRFGRITAPVYMDDYRYKALQNLTRARFYAVHSLTREKQRFMNYLFMKCSGLAQEKTFSNNYGVAALAVFEEFESPGALADIDIQQLASFIAEKGKNRFPDPVEIAKAVQAAAQGSYRLPKTVNDSVNQVLSISISSMRAMKAQIKALDKEIERQFKNIPNTLTSIPGIGPVFSAGIIAEIGDIKRFNGQASLAKFAGLAWTQHQSGMFEAQHTRLIKSGNRFLKYYLCEAANSLVRCDTEFKRYYNLKFKEVNKYQHKPRTRSHCQKVGQVSLSTAERQPPIYTGVGYLRLFTPCFF

SEQ ID NO: 310930 - protein, 325 aa, unidentified
MAVIGIDVSKAKLDCAWLDENNKLKAKVFPNALAGWAGLIEWSLKNTGLPIGGLNFVMEATGVYHEQLAIYLYDKGANVSVVNPAQVKYYGQSLGIRGKNDKKDSAVLARYGVHEKPKRWQPEALEIRTLKALLARLDGIEKDLQRERNRQEKATVSQAPQAVLASLANIIGMLDNERQQLEKLIQEHIDSHQQLKENKALLESIPGVGNVIATRMLMVIGSRSFDNASQCSAYLGLVPVQHESGSSVRGRPRLSKAGNPAIRAKLYMAAVVATTYNPDIKAQYLRLTGNGKSKMSALGAAMRKLVQICFGVLKHQQPYQPQVAN

SEQ ID NO: 310931 - protein, 316 aa, unidentified
MNSPVFIGLDVSKQHLDVAVRPQNRHFVNSNDDRGIKQLVKRLAALKPELIVLEASGGYEFLVTAALAEAQLPVALLNPQAVRKFAGATGKLAKTDKIDAQVLAHFAEALRPEPRPLPDQALQVLKAALQRRLQVVKMIGQEKNRLEKTFIPSVRQDIQEHLAWLQKRLKELDRDLNDQIRQSPLWRDRDRLYQSVPGIGPVVSRAVIAQLPEIGTLSGKKAAALVGVAPFNRDSGRFRGKRMIRGGRSYLRNMLYMAAVVASQWNPVIRAFYQRLLAAGKSPKLALTACIRKLVLILNAVVKNNQPWNQFITQVP

SEQ ID NO: 310932 - protein, 312 aa, unidentified
MYHIEEEVVYMGVDIAKAYLDAAIGNEKRRFGNDALGHRQLINWIKQMPASVQVICEPSGGYERALVRALVGAQLKISLVPANRVRQFARAAGILAKTDRIDAKLLCAFGQAMQPGTISASELEQEHLRELESQRRHLTHLLVMEQNRAARMSDAFVCKLSRRLLTQIKKQIEQLDLLIQEQIKASPELCTKAQKLTAISGVGARTAALLLAQMPELGQLNRRQVAALVGVAPFNRDSGRMRGKRAIYGGRRPVRHGLYMATLVAARHNPILRGFYLRLRAGGKPAKVALTATMRKLLIVLNSALKPDPNYA

SEQ ID NO: 310933 - protein, 314 aa, unidentified
MTSTTPRYVGIDVAKHHLDVAVRPDGDSWRVPHDADGLAALVARLHDLVPTLVVLEASGGYERPVVAALSAASLAMAALNPRQTRDFAKATGKLAKTDTLDAAALAHFAEAVRPPPRAVADDATQALGAALTRRRQLLAMLAAEQNRLSTALPTVRERIAAHIAWLKAEVADSTKALARTIQDDPAWREREALLRSVPGVGPILATVVLAELPELGTVTRQQAAALAGVAPLNRDSGTRRGKRATWGGRAHVRTALYMATMSAIRANPVIRAFYERLRAVGKPRKVAVVACMHKLLTVLNAVLRQRIPWAGAAG

SEQ ID NO: 310934 - protein, 340 aa, unidentified
MEKAIMIGLDIAKNVFEVHGRNAAGEVVLRRSLRRGQVEKFFAKLPKAVIGMEACGSAHHWARVLGKLGHEVRLMPPAYVKPYVKRNKSDTIDAAACWEAVGRPDMRFVPVKTVGQQAALSLHRSRDLLVSQRTQLGNALRALLSEFGIVAGKGKAGLTHLVAELRAGTLDLPADAVVAAMALADQRAALDAAADALERRITAQAKADKKAVMLKTAPGVGPLSAHAALATLPDPSLFKSGRDFAAWLGLTPRLNGSGGKTRTGRITKQGNQPLRRLLVLGATAWLRQVRARPEKASPWLRGMLARRPSKVVAVAQAARTARILWAMLSHNQPYRAPAIG

SEQ ID NO: 310935 - protein, 353 aa, unidentified
MAIAEGGRGGEVRYLGEFPATEAAMRKLVAKLAAKFAKLTFCYEAGPTGYGLYRLITSLGHECIVVAPSLIPKKPGDRVKTNRRDAISLAKLSRAGELTAVWVPDERHEAMRDLSRARLAAKKDLQGKRQQISSFMLRLGRVYPGKTTWGPAHMNWLMAQKLKHREQRTALEELLQGVRQENERVERLDQAIREAAPEWSLAEVVTALQAMRGIDLIAAVGVLAEIGDLSRFQNPRELMGYLGLVPSEDTTGDRVKRGHITKAGNGRARRILVEAAWAYRYPARVSREKQPKVAAAPRRVREIAWKAQTRLCRRFRSLERKGKLRTVIATAIARELAAFVWAINREVMGNRQA

SEQ ID NO: 310936 - protein, 338 aa, unidentified
MDHYVGIDLHSTNNYIAIIDHDNKRVFKKKTKNDLRLVVQALNPYKEQIKGIVVESTYNWYWLVDGLIEEEYKLHLANPSAIKQYAGLKHSDDVTDAFHLANLLRLGILPTGYIYPKEERPVRDLLRKRLQLVQQRTAQILSFQNLIARNLGKSMNANAVKKLSEDDVAQLFQQEHLVVAGKASIATILFLTEKIKQLEKTIHKVAKLKDEYKLLKTVPGIWKILALTIMYETGPIERFAKVGNYASYCRCVGSKRISNEKLKGRGNRRNGNKHLSRAYVEAAHNALWHYEYVKRYYQKKMAKTNVVVARKAIAHKLARACYFIIRDQKEFDPTRVFV

SEQ ID NO: 310937 - protein, 345 aa, unidentified
MESMYYIGLDVHKKTISYCVKDASGRIHAEGKISATRFDLDQWMKTLPQPWTVAMEATIFTGWIYDHLRPHAAAVKVAHPLMLRAIAAAKKKNDRVDAKKIADVLRCNFLPECYMAPTAIRERRRTLRYRNLLVRQTVQLKNRISGLLMEAGVSYNKQKLHKVGCFRELLKSNPDIDESLRPLLQLCRETLVRLQKTESALIRSLARDRLLVERVEHLMTIPAVGPITALTWALEVGEVSRFSSIKKAISYCGLCGDEQSSGEHVKRTPISKQRNKHLQWVLVEAAHMAPRLSPELALLYDREKQKGNANRATLAVARKLVAYLVAIDRSQRDFLLVEKENQAAA

SEQ ID NO: 310938 - protein, 345 aa, unidentified
MNITTVGLDLAKNVFQVHAIDEAGEVVVGKALRRRQMMPFFSKLDPCLVGMEACATSHHWARQLTALGHQVKLMPPIYVKPYVKRGKTDAGDAEAISEAVTRPTMRFVAVKSLDQQSMLALHRTRDLLIRQRTQLVNMIRGQLAEFGIVLAKGIQHVHKFTGQLLDGEAPDIPPLAASVIVTLAENLRDLHARIGGLDKDIRTWSKDNEVVQRLLTIPGIGIITASALAATVTDPHQFTSGRQFAAWLGLTPKANSSGGKERMGRISKMGDQYLRRLLVNGMTSLSQSVRRNPDAHPWAAGLMRRKPDKLVAVAMANKTARIAWAVMTRGEVYRAPQPSGVKEAA

SEQ ID NO: 310939 - protein, 404 aa, unidentified
MARFYVGIDWADDHHDVYVTNDTAQTLASFVIPHSYEGMERLQKGLNKFSSNPEDFFVAVESHQGLLIYALLDMGYQVYLINPKAMDRYRDRYRMSSSKSDPKDAMVLANILRTDLHLYKPLPRETTADVRLRQLTCAHKALGRHKVKLTNQLTTQLKSYYPAALQLFSGLDQEITLAFLEHYPTPQKAATASLEELREFFRKQGYSCPSKVPLIYEDLHRPALMAPKELEEVHQAIVLSLIPVLRSLLAQIEKLAKEIAREFKQNPAHDIFSSLPTGEVTAARLNGELGSDGSRYPSREYVQTAAGTAPVTRRSGRTIVVFFRWQCNKHLRGAFQDLARESVKRCVWARQYFVNQLRLGHKPSRAYRALANRWAAIIWRMLQERQRFSQARLAKAVVSAEAVT

SEQ ID NO: 310940 - protein, 381 aa, unidentified
MTTKKEKNDTTTARRAMSQLSIPRTPAVGLDLGEEFSVATMYSVLGEISERFNFSMDDAGYALFSSRIPKDARIGYEASTMAYPVNRRLRAMGYQNITVAHPKELALIVRSKKKNDRADSEKIARLLFMDMLPESHLLTREEQIVRDLLLQRVKLGVEIARTKSSVISYLKREDVYATLPKANNNFSAARREAIRSIRFGDDRDLVLKTMMEKVAFYEERCAPLEERTKALVKDNEDVKLLMTIPGVDYYLASLFSSYVRDVNRFPTVDHLASFFGIIPETRDSANVKRRGRMSKDGPSIARWTLGIMTDTVMHWNPHLHRYYVHQKERTKSGKRAHVLAMKKLLRMTYHVLKTREHWRWENEALTNKKLEGLERGGGGVA

SEQ ID NO: 310941 - protein, 334 aa, unidentified
MNQKYFIGIDISKGKLDCAVILADYTVVDESIIPNNVNKIKSYLKAFLKKHNTEFDQMIVCCESTGIYNGPLRQVCTDLNIDLWEEHALKIKRASTDMRGKSDRKDAMRIAEYLVRYRDKAILFKNPSAALQALDQLNKVRETLLGQKLALQNQLGESKSFDPEGFKVLSKHYKQMIAQIENQLKKIDLEIQDLLNQHEEIQQNINLMKGVPGVGKQTAMQIIIYTQNFTTFKSVKHLACYAGVVPFQNESGIVIKRARVSKMASKKLKSILHMAALAAVRTKSELKAYYIRKLAEGKNKMCVLNAVRNKILQRVWAVIERKTPFLSEENFRPI

SEQ ID NO: 310942 - protein, 419 aa, unidentified
MHHPKMQYTYVGIDSHKDTHTAVFLDCFFEKLGEITFENLPSTFDVFLANAEKFQMEGTVFLFGLEDVSVYGRSLVAFLTANDQHVRHVNSLLVAYERKNQNITQKTDSVDAECAARVLLSKFNSLPTAETQDKYWVLRSLVTRRDFIVRQNHAAKNSLHNLLTQHYPNYRNFFGNIDCKTSLAFYDKYPSPDLLEGVTVDELADFFRQLSNQQFGTEKAREVLSTLQNTAVTFQEIRNDIVHSNIRQIRFNLEETAMLEKRLKSFLAEFNCTLTSMSGMDIVSASQFLSCIGDIRSFSTPAKLARYAGIAPVTYASGKKDLQFSNQRGNRELNSLFYKLAVRVTMTAGPSRKVVNSFFHDYYHRKMSEGKTKRQALKCVQRRLVNIIWTMLTNNEEYVNPPTYDLPKDEIAIEKPKTK

SEQ ID NO: 310943 - protein, 429 aa, unidentified
MSGTETVQPELEFVAFVGIDWADQKHVWCLQAAGSTQREFGELEHKPETVEAWVGELCRRFDSGPIAVAVEQVKGALVCMLRKYECLHLFPVPSTMSAAMRKALYPSGAKDDPRDADLLLDLLVQHRDRLWHLQPDNEGTRRVQNLVEERRKLVEEKTAQINRLIGSLKIYFPQMLQWFERLDRKLVCDFLERWPSLEELKKVPPAELRKFFRQRQGRHHELTEDRIHGIVQAMPAIQDRAVIEAKGAVVQVIAQLLRSLLEGIANLDRKIEEAAGAHPDFFIFQSLPGAGAALAPRLLAVLGSQRDRYDNADEVQKHTGIAPVTESSGKKKWVHFRWACAKFPRQSFHEWAGHTIGHSVWARAYYQQQRGRGKDHHAAVRALAFKWIRIVFRCWKDRVVYDENKYLAALAKRGSPLNSVLLTTTSTTV

SEQ ID NO: 310944 - protein, 370 aa, unidentified
MQFAAALELSRSSWVITSLSPGGGEKMSKHTVRGGDVAGLLKRFAQLREKALGRTGKVFPLIVIQEAGLDGFWIDRVLQNEGIESHVVDPASVATSRRRRRAKTDGIDGEALVRALLAYKRGEPRVCSMVRLPTPEDEDRRRLCRERKVLTMERVQHVNRIKGLLFSQGVSGYEPLRRDRRERLDALQTGDGRPLPPHLKAQVRRELDRLELLLAQIKAVEAERDVLLAAEQTKAPVAPAMLLGVKGIGPEFAAVLWSEGLSRPFENRRQVAAYAGLAPTPWQSGSVDREQGISQSGNPRLRTTMIQLAWLWLRHQPDSALALWFHDRVKRNGGRLRKTTIVALARKLLVALWKYVTAGVVIEGAVTKTA

SEQ ID NO: 310945 - protein, 377 aa, unidentified
MQSIIYVGMDVHTENFTFASYEYGKEDVFAVNQVIGATWKDAIKYMKTLQKQRSEEEIHFVCGYEAGCFGYSLYNELMSAAITEKGLSLQCVILAPTTMAIQGNAPKTDRRDARMIAKNLAYGTYSSVYVVSEEDNGVRDFLRMRDDTKKKIKSTKQQINALCLRHGKNYTANKWTGAHYNWLQKLELGDIYSNITLKEYLHQLTQLEENISRYDKEIEEIAKRERYATAVAKLRCLKGIETVTALALVAEIGDYSRFPTAEKFAAFLGLVPGERSSGGTINRTGITKHGNSFLRRLLTEAAQGYSKGTPYTKSKRLKARQVGQDKEILDYCDRARLYLGKKYIRLKEKGKNGNVCKTAVARSLACFIWGLMTDNIA

SEQ ID NO: 310946 - protein, 313 aa, unidentified
MDQPIFVGIDVAKDHLDVHLLPSGSASSCANNARDARALAADLARQQPALVVLEATGGYERVLVRELAGADLPVAVANPRQVRDFARSTGRLAKTDKIDAAIIARFAQAVKPKVRHLPDQQEQALKDLLARRQQLMDMRVAETNRLHQAHEPRVKSSIQSVIDAVNTQIKQLDDEIDRTIKDSPIWCEKQDLLLSVPGIGPATSRTLLASLPELGRLNRRQIASLVGLAPINRDSGQMRGHRTIWGARAAVRSALYMAAFASTRHNPVIGAFYHRLRAKGKPYKVAITACMRKLLLILNTIIKTKQSWGTQIA

SEQ ID NO: 310947 - protein, 431 aa, unidentified
MLKINPLSTLYVGIDVSSKSNYVCALDFFKNNYINSSFANNQPGAEELALKILECLNQHPDLTMVVAALESTSVYSIHIANYLSSCEELMRFKPYVFVLNPKCTANYKKSYIGLGKSDPIDAFVIADYARAGNIESEPWRGSQFLALKRLTRHRIHLVECMTREKTYLISNLYLKFSELQMLEGDDQPFCDIYGATSSSVLMEYLSPEEILASSEENLIAFLAEKSRNRIKDISKTADLLKKAARDSYRLDKALYEPLNVSIASSFNCIETFKREIKVIDNAIEKEIKGLNPNAFIILQSIDGIGPVFAGGIIAEIGDITAFHSSDALAKYAGLTWKSNQSGDFYGEDTPMIKAGNRYLRYYLGEAANSMRKHNVEYGAYYRKKYNEVPKHQHKRALALTSRKFVRLVYGLLARNQLYSGVSLDTSIKDSN

SEQ ID NO: 310948 - protein, 322 aa, unidentified
MSVSVLGIDIAKQKFDAALLVDGKTKHKACKNSAEGFEALRLWLEKQGIRKVHACLEATGNYGEALAIYLHEAGHIVSIVNPARIKGFGQSELIRTKTDKIDAALIARFCLAMKPGLWSPPSPEIRSLRALVRRVDSLIDMRSQEKNRISMAHESVSLLIKEHIAYLNQEIEKIRQQIADLIGQSPNHKQKKDLLDSIPAIGKATIPHILAELDDLGKFNHVRELVAFIGLAPKETLSGSSIKGKPRICKIGHARLRKALYMPALVSIQCNPVMIAFYNRLKDKGKNGKVIVCAIMRKLVHVIFGVLKSGKEYDPNFKPISA

SEQ ID NO: 310949 - protein, 408 aa, unidentified
MERYYLGVDWSDKFHQVWVSDAQGQKVAEQKVVENVAGLIEFGRWLDESRSQGIELWAAIEKPQGRIVDFLLDHGVVVYPVNPKALDRARDRFRMSPSKSDSFDAHVLAEFLRTDHGHFRALEPNSNEAQELKLLTRDQHRLGRHKTRLLNQIGITLKEYYPRPLELFPDLEAQIARDFLKHYPTPRALSDLTRRQWNRFAKREHHLGEGRCQELWEKLNQPQLGVPDHVVRAKSQLLRVLLAQLEALSGALESYHERVKNFFATMPAAELVKTLPGAKTGTIVAMLWAELGDSKNRWQSFHHLQAEAGVVPVTKASGKSRVVHFRFSCNKVMRHASYWLAFVSLNRSEWANHYYRDQRAKGHNHHQAIRALGAKWLKIIFVMWRDHKPYDENYHLANITRQKMRQAA

SEQ ID NO: 310950 - protein, 395 aa, unidentified
MFIVGIDIAKRSHEAIIIAEDGQVVRKAFSFRNNCTGYNLLLEQVRRLTLVKSQIVFAMESTAHYWLALYARLLKDGYTVMVLNPIQSHSLRELYIRKAKTDTRDSLVIADLVRFGRCKASNVPQDKILALRELCRSRAYLVDMAADLKRKLIALLDRIFPEYESLFDSVFSKASIAVLRKYSTPPKVKNANLRKLTDLLMESSNGHFGEWKAHQLKEAACSSFGIDDSGGVYSTLLGMFLEQILSLTAQADSLEKQISVFFQEFNNPLTSIPGVGTVLAATILSEIGDITRFSSADKLLAYAGLDPSVKQSGEFKSNQNRMSKRGSPYLRRAIWLASTVAVHRDSMFQTYYEKKISEGLHYMNVIGHVSRKMTAVIFAVLRDRQPYQPILQSAG

SEQ ID NO: 310951 - protein, 344 aa, unidentified
MKLYAAFDLHSSSSYLGISDEKGRRIFKKKLPNDPARIKETLRPFKDEIEGIVVESPYNWYFLVDLLREEGYRVHLANVMKTQQYSGLKYSNDKNDAFWLVEFWLVEMLRLGILPEGYIYPKEERPIRDLLRKRGHLVRLRTSLIVSLQNIIARNLGSRLKANDVKVLTTDRVTPLFQGNEDLALAGKVSKEAIDFMTRQIKAIEASIDGRIHLSDPYDRLLSIPGVGKILASTIMLETGSIERFRKVGNYVSYCRKVPSGRFSNDKKKGTGNRKNGNRYLAWAFSEASDHARFFDSESRRYYQRKLQKTNAPIAHNALAHKLARAAYYIMKDGVVFMPDKAFA

SEQ ID NO: 310952 - protein, 421 aa, unidentified
MKSTAARKLRQVPERYLVIGIDAHKKRHAAAVVTQDFTTHSKFKFNNSREGFEMVLERARMEMVRTGSRGVMFAIETGGHYWRNLAYFLDERGIPFRFINQFTLKRRREGKDLNRRKNDYRDSEVAAQLLFTGEFVETRLPQGVYAELRAAYNTYRRLVKERTRITNLARGLLDGLFPEFTQIFKDPCGLTALSVLSTCPVPGIIAGMTEEQFLNLIKLGHRGRLMRRKLVALHKATVVSIGVKAGAHSVSTELSFLVERLLLIKRQIQMVEEALVTLVGETEEGKYLLSIRGLNYLSVAGLLAEIGSFRSYRNAKQLVKMAGSNPTESESAGKRGVHTPMSKHGRPLLRYCAWIAVIPMLRLNPDFRAWGKRLRERPVHEHPLNGKEIVGAALNRLLRLAFTLVKKQAFYQAPQMVAITN

SEQ ID NO: 310953 - protein, 417 aa, unidentified
MQYAPVMLADQPVNGVTCGIDWARDDHAVAIIDGGGRSIYRGVIEHSARGLTELIAILARTGANEVAIERPDGPLVDALLDAGVTVVVINPNQIKNLRSRYGSAGNKDDRFDAFVLADTLRTDRTRLRPLTPNSHETAVLRALCRTRKDLVIHRVRITNQLREHLKRVYPGPIGLFEDLDSPISLRFLARFDCQDRADWLTPKRLGAWLTSVQYKGRTDPAVLHQRLTSGPRGATGTEGAAYVGITRALVATLTNLVEQIHQLATQIGEQLAGHADAHIFTSLPRSGTVRAARLLAEIGDCRGKFPSPDALACLAGVAPSTRQSGKIRSVGFRWACDKQLRDAVCDFANDSRRANPWAADLYNRARARGHDHPHATRILARAWLHIIWQCWQTNSPYEPTRHRALQTLLSRRTQATT

SEQ ID NO: 310954 - protein, 361 aa, unidentified
MLDHQKSFLKEVFMRFYSKLHKHYCGVDIHAKTIYVCIIDKEARIIKQKNIKSNPAAFMKAIDKYRDDIVVSAECMFTWYWLADLCAKESITFILGHALYMKAIHGGKAKNDRIDAYKIACLLRGGNIPMAYVYPPEMRATRDLMRRRTHLVRKRAELLGHIQNTNHQYNLPPLPENIRYKGNREGLIEHFREECVQKSMEINLSLIDHYNSLLLKLEHYICKKAKVHDHEALLRLLSVPGIGQTLALVILYEIHDIRRFPRVQDFVSYSRLVKPSKESAGKIYGHSGKKIGNAHLKWAFSEAAVSMLRGIPDVKKYKEKLQRKHGKAKALSILAHKIGRAIYYILKRKEVFTIEKFLTKK

SEQ ID NO: 310955 - protein, 412 aa, unidentified
MDLVYARCAGLDVHKKTVVAGVRVPAPQGGQRRGEVQTFPTTMSGLKALADWLVAHEVTHVAMESTGVYWRPVYAVLEGLMTVLLVNPRHVKMVPGRKTDVKDCEWLAQLLECGLLRSSFVPPRPIRDLRDLTRLRKTLIRERGHHVNRIEKTLELANIKLGSVVTDLMGNTGRAILEALSLGIDDPDKLAACAQGLLRKKQAALREALVGRLTPHYAFLLQQHLSLIDALDAHIATLDARIAEAMAPFADAAALAQTMPGVATRAAQAILAETGVDMAAFPTADNFASWARLCPGNNESAGKRRPATTGQGATWLRATLQEVAWAAAKTKKSYYRALFHRLKARSDSKTAIVAVQHAMLVALWHMLKHRVPHQDLGADYFTRRDTERTRRHHVRRLEKLGYQVLLVKEEAA

SEQ ID NO: 310956 - protein, 496 aa, unidentified
MPIIRPNAIRIKRFRELKETLRTNRDRLLVGIDIAKAHDVAQVRLAHTQILDKHLTIPNTAAGFAAFWAHLEQRRAETGLSEIVCAVEPTGTYHEALAQFLETQGADVVLVSNTVAHHNRRTLDGTWGKSDPKDAHNLCDLLERGHVLFYSLPDGPLAELRRLVRLLRQARSERGACKARFRNTLLPRLGPAGEALPLAVVATLPGPLQVFVPKPEPDPGPRRRPVHRPSRGAADAPALGPVPPALAYECTDLAARLTAVQARITQLEAALVQIATPLPAYGWLLSLPGIGPTLAAILLAEIGDIAWYTRFSQLRKLAGLDIIWVASGKWTGTTRISKCGRPLLRWALYQAALGACRNPGWHARREALIAKRQGDRYAFLKANTELAAKLLRLTWGVWRSGRPYDPARGAGHPAGPPPLRRGRRRAAPPAQTGRVGSRTGGASLAPRVPAAGRDALRPSPLPPQAEVVFRSPSRARSPVARLASTLAVPGKARGGR

SEQ ID NO: 310957 - protein, 341 aa, unidentified
MESTKFVGMDVHKDAITIAVMNSAGKVIMESIIETKAVTILQFIQGLRADVFVTFEEGTWAAWLYDLLKPHVTKVVVCNPRKSALLKDGSKGDKIDARKLAELLRGGYVKPVYHGENGLRTLKELSRSYLTISKDLTRVMNRIKALYRGWAIPCGGTQVYALCHRSVWLSKIPEAGVRSRAEHFYEQLDALQGLRKQVRRDLLAESRKHNATKLLRQIPSIGPIRAAELVALIQTPHRFRTKRQLWNYSGLGLKTHDSAQYRYVDGQLQRSRKPQQLRGLNQDHNHDLKKIFKGAATMASISAGPFHGFYEASFQRCKDWSRCAGVTRISTLRRTYSLGTT

SEQ ID NO: 310958 - protein, 367 aa, unidentified
MRKISTVAAKESSDFSQPKLTIGLDLGDRSSWYCVLDERGELQGEGKVSTTAKAMREVFGRMPRSRITLETGTHSPWVSRLLSELGHEVIVAHARKVRLIGESRRKDDRRDARTLARLARIDPQLLSPVKHRSAQAQADLTVIRARAGLVRARTALVNTVRALAKSYGERLRSCNVRNMDPEKAEGLSPELQAALQPLLGTIESLSAGIREYNQRIEALAERSYPEVALLKQVKGVGTLIALTFLLTLEDPHRFRKSRDVGCYLGLQPGRRNSGQSEPQMHISKEGDPYLRTLLVQGAQHILGPFGADCDLRRWGLKLAERGGKSGKKRAIIATARKLAVLLHRLWVSGEVYEPLHNSRRLVVSAVA

SEQ ID NO: 310959 - protein, 367 aa, unidentified
MKKISTAAAQKKEKVEGQKLTIGLDLGDRWSWYCVLDEAGDVLLEQKLATTPKAMKEVFGGMPRSRIALETGMHSPWVSRLLSELGHEAIVAHARNVRLIGESRRKDDRFDARTLARLARIDPELLGPVKHRSRKAQADLTVIRARAGLVRARTSLINTARGLTKSYGERLRGCSPRTMNRELAEGLSPELRSALQPLLDEIESLSEGIREYNERVQQIAQESYPEVARLEQVKGVGTLIALTYVLTLEDPRRFRKSRDVGCYVGLQPGHRNSGQSEPQMHISKEGDPYLRTMMVQSAHHILGPFGEDSDLRRWGLKLAERGGKNAKKRAVVAVARKLSILLHRLWVSGEDYEPLRHSRPALLPAAA

SEQ ID NO: 310960 - protein, 417 aa, unidentified
MIDERRWYAGVDWASESHHVFLTDENGRRIGEKIFRHSGEGLAEMAVWLSSTSGGVPAQIHIAIEVPHGPVVETLIERGFKVHAINPKQMDRFRDRFMLAGAKDDSRDAEVMASALRTDLRCFRPLAVADPVVIELREWSRIADDLGAERNRLTNRMREQLWRYFPAMLDLESDLGAEWLLDLWEIAPTPHKAIRVREATVAKVLKRNRIRRFDAAHVLDVLRKPPVQVAAGTTEAAAAHIKTLTARIRLVNHQLGEAHRQLDALTARLIPSEETGPGQRKQHDVEILASLPGVGRIVLATLLAEAQDALHRRDYHALRCLSGVAPITKRSGKSKIVLMRQAAHVRLRNAVYHWARTAVQHDPRSRAKYAALRARGHGHGRALRSVADRLLAVACAMLESRTLFIASHSTKISSPSA

SEQ ID NO: 310961 - protein, 461 aa, unidentified
MAKQPGKRKKDGAKADATVGLPPLNLHAAGIDVGSAEHYVAVPPDRDAEPVRKFGSFTADLHRMARWLKDCRIKTVVMQSTGVYWMALYDVLEKHGFEVNVANARHTKTLPGRKTDVQECQWLQKLHTFGLLNNSFRPAEEIRVLRGYLRQRENLVAAAATCIQHMQKALTEMNIQLANVISDISGTTGLAILYDIVRGERDPYKLAMRKHSRIRASRQEIARSLEGTWRQELLFVLEQSLDLYQTYQQKIQTCDERIDGQLRSMEPRIDPLSEPIPEPRRGKDARGHQSGFDLRGQLYRITGVDLTRIDGIEVQNAQTIVSEVGVDMSRWKTEKHFASWLGLCPDNRSSGGKVLKRGTRHVVNRASTALRLAASALLRSQSALGAKFRRLRSKLGAPKAITAMAHMLARLVYRMLKFGHDYVDRGIAFYEARYQQQQLQRITKQAAALHMQLIPLTRVVS

SEQ ID NO: 310962 - protein, 482 aa, unidentified
MKKRTIYTNQSQELLRLFEQVGNSAKVMCVPIDYAKKDHVVMFCNGYGDIVRKPFSVKNSPEGLKYLIDQVTRSCRHRRIRKEHVFFGGEDANSYAENFANTLRSKGWLVAHVNAHDAKKQRQNLQASTDRLDLMGIATMLLNRRANCSPAQTGIYRNLRTLVRHRKKLVVMKTEVRNRVHTVVDRLFPGFLSEKKTSITPFSNSSLYLMENSFSAQQIRRRKHSTLVNILKRYGTAAPEGAAAKLRTYAAQVLTTQNQYAATLQLSLAHHIKLYRCLLDNTEQLEKEIALPLAQSQGAFLTSIKGIGIVLAAGVTAEIGSPFEQRPLNNLTSYSGIIPRVKQSGGPNAQAHTGRVSKRSNHLLKDSVVQSAFHIGHFGPKELSLDYKRRKAAGQHADFGMGRRFLRMAMSLMKTSQIYLPPSLRNDQLRAQERAGYYLAVWPQLRDKWNKADALKVAFAKHNPLGQWRHIVQELYGIKLKL

SEQ ID NO: 310963 - protein, 342 aa, unidentified
MEQVSIIGIDLAKRVFQAHGAAADGSVAFRKKLSRSQFLAFLAAQPRCTVAMEACATAHGWGREIGELGHEVRLIPPIYVKPFVKRQKNDAADAEAIAEAASRPTMRFVAVKTEDQQARSMIFRTRDLLVRQRTQLINALRGHLAEHGVVAPQGTAHVKRLADVIGDETAALPATVRQIGRLYLEQIDVLSGRIDALGKKLRAEAGQGEATRRLQTMPGVGPITAVAIESFAPPMETFRRGRDFAAWVGLVPRQNSTGGKQRLGRTAKMGQRDIRRLLIIGAMAVVNSAARHGAPEGSWLERMLAKKPKMLVAIALANKMARAVWAMMTKQEDYRNPVAVAA

SEQ ID NO: 310964 - protein, 392 aa, unidentified
MIYVGIDVAKDKHDCFITNSDGEVLFKPFTISNNRNGFETLFQRIQSVSDDSNKIKVGLEATGHYSYNLLGFLLDKGLTTFVINPLHTNLYRKSLSLRKTKTDKVDSRTIATMMMSDMNLKSYSDTSYHNEELKSLTRYRFDKVKERAKLKSSVSRLVCILFPELEKLVPTLHMASIYALLSEFPSAEAVANAHLTRLSNLLSESSKGRYGKDTAVMFRDAARNSIGSHMPAKSLELKHTIKLIQELTAEIDEIEAAIKRIMDEEIQSPILTIPGISYRMGAMILAEIGDFSRFDSADKILAYAGMSPSTYQSGQLDNCYSHMEKRGSRYLRYALYNATKYVCHWDKSFGAYLEKKRSEGKHYNVALSHATKKLVRLIFAMEKSGKAYLPTT

SEQ ID NO: 310965 - protein, 389 aa, unidentified
MNGQTEFTVKVEPEEFKNTLFLAMELSRATWLVATFAPRLGDKISVHAIPGGDTKRLLDLIGRLQAKLRGKDVSRVRTVCCYEAGYDGFWLHRVLVNHGVENHVLDAASLPIDRRAKHIKTDNIDAKRLLRAIVGFVQGDPQSCRVVRAPTPEEEDARRLHRERQRLVRERTGHLNRIKALLITHGIRALRITDAKWCERLDKMQTGDGRPIPGRLKIEIEREWKRLKVVAEQVREVEAERDRLVKGSEPSGDACTEKMRQLVKLHGIGAEFATVLTREVFYRPFQNRRQVASYVGLTPAPYDSGDTKHDQGINKAGNTRARVIAVQMAWLWLRYQSKSELSLWYYRRVGDLKGRVRRIMIIALARKLVIALWRYVETGKVPTGAIVTT

SEQ ID NO: 310966 - protein, 340 aa, unidentified
MNHYAGIDVSLEASSVCVIDGSGKIVREAKVASEPEALIAWFGSLGLSLTRIGLEAGPLSQWLYAALRDAGLAVELLETRHVRNAFKMMPVKTDRKDAHGIAELMRLGWFRPVHCKSMEAQETRAMLTARKLVQKMLHEVEMSLRGVLRGFGLKVGKTTPVQFEARIKELVAGHQNLEVIAHSLLAARATLRREFNGFEKRLRAMARVDPRARLLMSTPAVGTIVALIYASAIDDPSRFKSSKVVGAHFGLTPTRYQSGETDRTGRISKIGDGAVRAALYESAHIILTKPIKGCTGLKSWAMRIAKRAGMNKAKVALARKLAVIMPRMLSDGTTFANQPA

SEQ ID NO: 310967 - protein, 364 aa, unidentified
MAVSGLSPKELTKEAPNIMLHVGLDLSRRRLDFDLSCEDGSRIERGAAPPDADGLRGLVRRVDVYQEPVCAAIESMNGARFVHDRLEELGWQVELADAQKVKGLAPLACKTDRIDAWVLAELSRRDLVPAIWLPSPTVRQERERARWRLHLVRHRTALKNRVHATLIAFGKPCPVSDLFGSRGRQLLARLDLPDPWAQTVSASLSLIEDLDVQITDCERELRVLGADHEYVPLLMSAPGIAWVLGYTIAAEIGDINRFASPTKLCGYTGLCPRVNQSGEHDHRGSITKNGPKYLRWALIEAAVHAVCSPVYRERYQRTATRLGRQRGKKVARVDIARKLAEAIWYMLTRSQPFAPAGATTPLAA

SEQ ID NO: 310968 - protein, 446 aa, unidentified
MPHSPEAHTRSMPNAEAAAFDWYVGIDCGGATHHVGVLNAHGDRVGERAVAHSGQALTAFVAWLHELAGPSLARVAVGLETPHGGPVALCLEHGAAVFAINPKQLERFRERASAAGAKDDRRDAFAAASALRTDRAAFHRLAPEAAALVQVRELSRVSDELREEAARLSNRLRAQLERYFPPLLAVVPAADEPWLWALLTLAPTPAAAARLSERRLARLLRDYRIRRLSAADVRALLQAPALPVAPGTVEAVSAHVALLVPQLELVTRQHRACLAQLEAALTALAGPAGDPPAAPNADGAAGVGPTGADRLGPVVRLLRSLPGVGVGVAGVLLAEAAPALLAGDYHALRTHGGAAPVTKQSGKQRLVVMRYACNHRLRTALFHWARVSIQRDAAAHRYYAALRARGHSHARTLRSLADRWLRILTAMLTTGTAYDASRFAVAAPTP

SEQ ID NO: 310969 - protein, 351 aa, unidentified
MDGKASDSIVTAIGIDIGKNTFHLVGQDERGAIVLRQKLSRGQVTARLANMVPCLIGMEACVGAHHLSRQLLALGHDVKLVPGQFVKPFLKGQKNDFRDAEAVAEAVQRPTMRFVPTKSVDQLDLQALHRVRSRLVGQRTAIVNQIRAFLLERGIAVRQGLRFLRHALPDILANRVDVLTPRMVHMIEGLAGDLHHLDTRIDEVTGEIEALARNDEACQRLMTIPGIGPIIASATVATIGDGSAFQRGRDFGAWLGLVPRQISTGDRTILGRISKRGNSYLRMLFVQAARVVLLRPANWPKHSFGRWLEAAAKRMHHNVVAAALANKLTRIAWSVLYHGRRYEPRMRAELA

SEQ ID NO: 310970 - protein, 346 aa, unidentified
MRFYNTIHPYYCGIDLHARSLYVCIINDKGEKVIHKDIKASPNNLINILSPYIGKIVVGVECMHCWYWVADFCRDNQIEFILGHALYMKAIHGGKAKNDKIDSFKIASLMRGGTFPLAYVYPEEMRATRDLLRRRTKMVNYGAQLKAHVKNTISQYNLPEHQLNLRYPKARESMRNTFSEISVQRNVDLDLDMIGHINAELSKVENFIEKQAKQHNPQDYYLLRSIPGVGQILALTILYEIGYIERFESVQKFASYSRLIKCKAESAGKSYGTQGNKIGNAHLKWAFSEMAVLYLRNNPNAKRYLLKLQKRMSKAKALSALAHKLGRCVFYMLKKKSLFDETRLIG

SEQ ID NO: 310971 - protein, 332 aa, unidentified
MSRTTNAVAVSAIGIDTGKNTLHLIGLHERGTIVLREKLPRGRIGGPLANVPPCLIGIEAGMGTHYVARELMSLGHDVRQVPAAYAKPFRQTHKNDFRDAYAIAEAVRRPSTRCVPVKTDDQLDLQALHRVRSRLVGQRTAVINQIRGFLLERGIAVRQGLRFLRQQLPEILAKRIDVLSPRMIRMVEDLSGDWRHFDERIEQVTDEIEVLARESESCRQLMTVPGIGPLIASAMVAAIANGAAFTKGRDFAAWLGLVPRQMSTGDRTILGRISKRGNRYLRTLFMQGARVILLRPANWTKHSFGLWLTTAATRLHHNVLATALANKLARIA

SEQ ID NO: 310972 - protein, 332 aa, unidentified
MTEYIGIDVSKQSLELWDGTHEEEVPNEKGLKTLKKLLKKRYGGEWNQAVRFIYEPTGPYSNYLRAFAAEHEVRVYEVNPKKSANFAKVLGNRSKTDAVDAKMLSTFSTLLTEEDFRIPEIDEIAEQLGAFIGSYEIIQKTRTMLSNHVQSLEYKSGVTRKLKESLEKELKHLGTMEDQLEKEMEAYAEDHEETREDLGNLLSIKGIGVISAMSLLYLFRKYPGANRNEITALAGLDPVRRQSGSSLNGGRKISRAGDPLLRKVLYLACMNCIQHNECIRTFYKHLVSDNHKKPKVALVACMRKLLLIAHHLTVTKSKYRTLQHDATLCLSS

SEQ ID NO: 310973 - protein, 442 aa, unidentified
MTNLSSSATPTEWAAFVAIDWADQKHCWALTPTASEKVERGELNATPEAVETWAAALNVRFSGRPIAVCLEQKRGALVFMLAKYAHLVIFPVHPKTAAQYRETFCPSGAKSDPADAGWLLDLLLRHRHQLRELRPDTPQTRLLQHLTEYRRRLVDESTRQKNRLTSCLKIYFPQLLSWFDDVGSPVAGALLERWPTLPELQRAHPGTLRRFFHQQNCRSEERIQERISGIAAAVAAVRDETVVEAESLRARSLVALLTTLRSQIAVFDERIQEVVKNHPEERLFASFPSAGPVLVPRLIAAFGTQRDRYATATDLQSLSGIAPVTESSGKQEWVHFRWACSHFLRQTFHEYAAHSIVKSAWARAYYESQIEAKKTHHAAVRALAFKWIRIMFRCWKDGKTYDEQAYVAALRKRNSPLAALFTTTSIGWQSSAGFQRLSANPS

SEQ ID NO: 310974 - protein, 352 aa, unidentified
MIIIGVDFHPEFQQIASVDSDTGEFQEKRLGHREEAEKFYRALAGQKVRAGMEASGHARWFERLLSELQVELWIGDAAEIRSRRVRKQKTDRQDAQLILKLMLKDDFPKIWVPSRENRDLRQLLWHRHRMVQARTRIMNQLQSVALNEGLRCKKRLWRQHGREQLESFRLAPWASRRRRDLLELLDRLNPTIAELSQAVEQEAEKCAEARRLMTHPGVGALTALAFVLIIGQADRFDCGKQVASYLGLVPLEDSSGNRRRLGHITKQGSSMMRFLLVEAAQVTVRSVPAWRSKYLHLMMRRGRKTAKVAMARKLAVHLYWMMRQGWDYEQWNKFGSHAGQPGNRDGVQSNTE

SEQ ID NO: 310975 - protein, 387 aa, unidentified
MQKPHDNSKASPAAFMQDYTLIAVIELSLSNWLVAGLIPGVSREPLKKLEPNPEDLLKLLHGWRGEAIKAGRPITRIAVAYETGRDSFWLARWLRERGIDAHVIHATSVTVSREHRRAKTDRLDTAMLKRGFLGWLRGERGHCTVAIVPTMEEEDAKRPHREREGLVHEQTRAVNRMKSALIQFGVRNFNPKLRKASVKLETVRTPEGKSLPPNTIAALRRDMERLKIIKEQIKAIEQARLQQFEQKPEALANRMVYLLVRIYGLGLETADLLAHELLSRTLRDRKAVARYAGLTGSPDESGSKRREKGLSRSGNARVRKIMIQLAWRMVKFQPDSALVQWFKQRTESTKGSRKPMIVALARKLIIALWRYANDGVIPEGFRLHSAA

SEQ ID NO: 310976 - protein, 427 aa, unidentified
MKYTQNKKIEQVNESTLIIGADIAKQKHIARAQDFRGIESGRALTFDNSRDGFIKLLNWIKNLKEEQDKQQVIFGIEPTGQYWLPLAQFLRQHGIKIVLVNPLHVKKSKELDDNSPTKNDVKDARVIAQLVKDGRYSEPNIPAGIYAELRVGMNMRDRLTEDMQCIKGRIDNWLDRYFPEFNTVFKSWEGKAALLTLQSFPLPQEITDKGIEGILECWKQEIKRAVGKKRAVELLEAAKESIGLTEGLIMARQELKTLLSQYRVLKREIDQLMEQIENILKEIPGTQEMMTIPGVGIVTVAGFLAEVGNLENYHHPRQIQKLAGLNLKENSSGKHKGQTRITKRGRPRLRALLYKCTMPLVAKNPEFKALHRYYTTRTKNPLKKKQSLIALSCKLIRVLFALGKKKISYDGGKLLKDSTIVSLQEAA

SEQ ID NO: 310977 - protein, 367 aa, unidentified
MKHCTLFVGLDESKESIEVAVAEAGQRGEVREYGGIANTPDALRKLVRRLGRQGWLRFVYEAGPCGYVTYRELTRLGAGCVVVAPSKTPRKPGDRIKNDRRDAMTLARLHRAGELTPVWVPDEETEAMRDLTRAREDAKYAQTRARQRLGSFLLRHGRRFKGAHRWTYAHMEWIRNLAFDHPGQQVCLDEYLQTVDEATRRVKRLEEQIHQLVPTWSQVRQVQALSALRGVKTLVAATTLAELGDLTRFQRARELMGFVGLVPSLNASGQRHQSGRITKTGNMHVRRILTESAWAYRHPARRSPTLMRRIKSQPDSVQEISWKAQLRLCGRYRKMRARGVPQQKVITAVARELVGFMWATARAVAAN

SEQ ID NO: 310978 - protein, 346 aa, unidentified
MKILALDLSKFKSVGCVYEAESGDHRYRRVKTTPQALHDLLVEVEPDRVVIEVSSVSGWVSDLVRALGIELQVVNTNGEAWRWRRVKQKHDQADALKLARLSAMNQLDLVHVPAPEIRQWRAVIKYRQHLVGRRTDIKNHVRELLVREGVILPRGRKCWSQEGCAALEEMCRSWEEVEIAELWRGELQSELQQLQVIQERLREVEAKLETLAAADDRVGLLRTIPGVGPRLAEAMVTLIDDPHRFKRGRDVGAYLGLVPRPYQSGEMNRLCRITKRGSKLLRSLLVEVSWVSLRHNPWLRRLYERMNRGSKTRKKIAIVAVARHLAIYCWAMLRDGTTWRQPCATQ

SEQ ID NO: 310979 - protein, 386 aa, unidentified
MKRNDLSRSLVAFDQASTMVAVVELSFRSWLVAGLVPGLTRQPLKKLGPDAQALLTLLRRWQGEATKAGSTINRIVVAFEAGRDGFWLARWLRARGIEAYVIHPTSIPVSREHRRAKTDRLDTGLLMRAVLGWLRGEPKHCSMAAIPTIAEEDARRPNREHQTLVQERTRIVNRMKATLIRFGIRTFNVKLRKASDRLAVLRSPEDEPLPPNTGAELRRDMARLQLIRDQIKVIEEARLQQLKHAPRKGTHPMLLMLAEIIGVGVETADMLVHEVLSRKLRDQRAVARYGGLTGAPDESGTKRREKGLARAGNARVRRGMIQLAWRWLTHQKNSELAQWYQTRTTGAKPAARKTMIVALARKLLIALWRYVTTGEMPAGVTLHRAT

SEQ ID NO: 310980 - protein, 351 aa, unidentified
MMIIGVDYHPSDQYIAFAEAETGECGERRLNHGDGEAEKFYRELTARGVSVRVGMEATGYSRWFERLLGELGIEVWIGDAAKIETKRVRKQKTDRQDAQLLLKLLLENNFPRIWVASPENRDLRQLLWHRHRLVQMRTRIMNQLQALAMNEGNRRKKKLWSEPGRAQLEKLPLATWASRRRHDLLELLDRMNPTIEGLTAAVEQEARKQPEVLRLMTHPGVGPLTALAFVTIIGTPDRFPCGKQIGSYVGLIPSEDSSAGRQRLGHISKQGNSLLRFLLVEAAQAAVRYDPDWRRRYVHLAMRRERRIAKVAMARRLAVRLYWMWRNGWEYAQSVEFGSHAGQLVTGHGVN

SEQ ID NO: 310981 - protein, 397 aa, unidentified
MSVNNIHPSRPAPLSNPGPGDLAREGVTAGVDWASTEHAVAVVDQQGVELRRATVPHTKAGLSQLVGMLDRAGVREIGIERGDGPMVDALLEAGFVVFVIAPNQVRNLRRRYGAAGNKDDHFDAYVLADTVRTDRHRLTPLAPDTPPTVTLRMSVRARQDLVAARVAMGNQLRAHLAIVLPGAIGLFRDIDSAITLAFLTRFPTQAKVDWLTPRRLENWLRSQRYPNPRRAELLHAHLAGAARGTTDPQADTRAHITAALVAGLQSLRTQIAALEDDIGQQLLVHPDAQIFTSLPKAGTMRAARLLAEIGDCRSRFQTPQALTRLAGATPSTRQSGKVTVVGFRWAVDKQLRGVVMDFAGDSHHANPWAADLYWKARHRGNGRLVLADFRGAPPSCR

SEQ ID NO: 310982 - protein, 319 aa, unidentified
MAQNDLVVAGIDVAKDKVDVCIRSLSLRRTFASTAEGRRELASWLRRQKVGKAVMEASGGYEREWAKALRDAGIEVRIVDPKRVRSFAQSAGRLAKNDAIDAEMIAWFAETFDQARGQACDAAREELVQIVNARQALLEQQTQMQNRCEHTVPVPVRKMHERLLKAIALEVDRLEAAITAMIKATPHFAEIAEIIESVPGLGKITSAGLIAAMPELGQVSNEAISALLGVAPYDDDSGKRRGERQIKGGRRKVRNLFYMACLGAATRHNPVLKAFYRRLIAKGKKAKVALVACMRKLIVILNIMIARGEKWDASRYPVD

SEQ ID NO: 310983 - protein, 450 aa, unidentified
MKALPVLNPNAAALDVGSEKLHLSIAGDEPVVFGTFTNEIYRLRDYLKAQGVTSVAMEATGVYWMYVYVVLEQAGLEVVVVNARYVRNLPGRKTDMADCQWLATLHAHGLLRGGFVPPAAIRKLQDYQRLRADHITEAASQVQKMQQALERMNIKFHDVISDLTGVSGLKVVRAILEGQRDPKALLELCDVQIQNKKRHRVIESLQGAWAPEHLFALKQALSVWEFYQELLAQCDRQIEAVLKELAGPEPPPPAQSPTALTTPLKPSGKNAPQIEQLHQLLVRICGGRDATALPGIADYLLMQLISETGVDLGAWPSEKHFTSWLGLASGSKQSGKRKGSVKRQRNRAGRLFCTGARSLVQSVDKALGGFYRRLAARKGGLVAMQALARKLAQLYYRVLKYGLEYAERGLRAYDQKYAESQRRLLAKLAAKQGFRLVSTQLDSTSPSTRM

SEQ ID NO: 310984 - protein, 367 aa, unidentified
MKKVSTAAVKTTKNFSQPKLTIGLDLGDRNSWYCVLDESGQIQLEQRVRTTATALREVFSEMPGSRIALEIGTHSPWISRLLSELGHEVIVANARKVRLIAESRKKDDRMDAQTLARLARIDPQLLSPVKHRSAQAQADLMMIRARAGLVRARTGLVNTARGLAKSYGERLRGCNVRNMNPEKAEGLSPELQSALEPLLAGIEVLSERIREYNERIEKLAQDSYPQVALLKQIKGVGTLISLTYMLTLEDPHRFRKRRDVGCYLGLQPGRRNSGQSEPQLHISKEGDPYLRTLLVQGAQHILGPFGVDCDLRRWGLKLAERGGRNGKKRAIVATARKLAVLLHHLWVSGEVYEPLHNSNRTTVAAAA

SEQ ID NO: 310985 - protein, 370 aa, unidentified
MLRFHATNDEGGSQMFYGIDLHSDSITIAAMGEEGETSRVFRYHLGTEAFEKFVERLTANDYMIVEASTNTFWFYEKVRYCVGRCIIIDPRKIQGNDGVKVKTDKRDALQLVRLLRYVILTGATVPEVYIPEKPVQEIRQLFTTYYLYKRQMVMTKNRIHSLLKQEGYTVPKKSLDVAKTWDIIARFKLSVSAKIQIQQLYEQIESIRKGKELIKQEILKRGVIFQEEIELLTSIKGISVFMAIGIMADIVDINRFPSAKKLCAYLRTAPTISSSNKMTRIGSINKNSRKLTISLLIESVEHFRSVEKINRFYTGKKKGKGAGKARVAVVRKIIVAIYYILKKRQYYYYRSEEMHCRKLKEYENFLKKVA

SEQ ID NO: 310986 - protein, 461 aa, unidentified
MRKARRAGRKPGKKIVDVTAGMEVLRPHAAGIDVGNAEHYVAVPPGRSDPSVQTFGSFTADLHRMAKWLQACHIETVVMQATGVYWMALYQVLEGYGLQVYVVNAKYTKTLPGRKTDVLECQWLQKLHTFGLLNNSFLPPEQIRVLRTYLRQRENLVAAAGTCIQQMQKVLTEMNVQLANVISDVSGKTGMAILKAILSGERDPQRLAALADRRIQASRQEIAQSLEGQWREDLLFVLRQVHDLYFFHLESITGCDRQIEAHLKTLAGKVDRATQPLPAASRLPHRKHIPQTNLREELYRITGVDLTRIDGIQVQTAQVVISEVGVDMTPWPDEHQFASWLGLCPNNRITGGKVIRRGTKKVLNRAATALRLAAQTLHRSKSYLGAKYRRLRARLDGPVAITAMAHQLARLIYRLLRFGTEYHDKGMQHYERHYRETQMQWLKKQAAQFNMQLIPTQGVVK

SEQ ID NO: 310987 - protein, 355 aa, unidentified
MKYHTSTTQFNCGIDLHAHQMYVCVMDREGKKLVHTNVRNNDFAFFLKLVAPYRHDLTVCAECMFGWYWLADACQAAGIHFVLAHALYVKAIHGGKNKNDRIDSEKLCHLLRSNLIPPGYVYPAEKRPLRALLRQRLLYVWNRGELLSRIQSHQLAYNRPTCRQTRYNRDPWEQQLLASEPDPVRQLALQNDLALIRHYDTQLASLEKELLQLTKQTASRDFTLLQTTPGIGDYLGLTILHEIGDIARFPTVKDFLSYCRLVKGTVASAGKIKGLRGAKLGNPYLRWAFGEAAVIAKRDPLVIGPLTQRLEARMGGNKFRANTVLAIKLARAVYFMLKNKTVFDPERLVAALSKN

SEQ ID NO: 310988 - protein, 363 aa, unidentified
MDKYIGFDIDDNKTVACVVQKGKKDRFTTIKTDIAQIKQFLCDQRKGGEKLHLTFEISGQAGYRYDQLGGCVEDITVSNPSKMTWIYRTAKKTDRVDARKQAVLLSIGEVPKVHIPSKEVRQWRVTIQHRRKIVNRITAVKNRIRAHLKGNGFSKAPHRGSWWKVVNRVWMRSLCEGVEVTSGDLWRMSLADMLEELYLLEGQRKRITKWLDGYLDKQAGGRLLMSIPGIGPRTAEAVLAYTDEVGRFGRSKQYCSYFGMTPKLDESGSVRRLGHISKQGPSVVRWLLVEASWRVIKKSAGLRGFYQRVMCGQKARKKIAIVAVARKLLSIMRAMQVTGELFNEELVCNECGVSRIGKVREPA

SEQ ID NO: 310989 - protein, 322 aa, unidentified
MNYVGIDISKSSFDVAVEKDKRYHHYKFSNDRAGFKELLKVINVGEYWCVMEASGPYYLKLAWYLREQHIGLSVVNPLVIKRFCQMRLTRAKTDKKDAVMIAEYGKTENPKAWEEEETYVMELKQMQAYVDILEKTRTGFINQLEAFHQSPIHSADVKKGLVKLIKQTEKQMEETEKKMEAIITRYHGEMFEQVKSIPGIGKKTGLLLVVVSGGFTKFENAKQLSSYLGLSPRIYLSGTSVKGKARICKMGMSRARAMLYVCSWSAIKCNKACKELYERLVAKGKSKRLALIAVANKLLKQIFAVATKGMFYNENYLQKTCF

SEQ ID NO: 310990 - protein, 322 aa, unidentified
MTAPVLGIDIAKRGMEVALLVDGKIRHKSFRNTQEGFEALALWMRKWGVERVQACLEATGNYGEALAIYLHEAGHTVSVVNPARIKGFAQSELIRTKTDKIDAGIIARFCLAMKPACWIPPSPEIRSLRALVRRADSLVDMMTQEKNRLGTAHESVTPLIKEHIDYLNREIERVRDQIADLIDRDPNLRQKKDLLASIPGIGKATIAALLAELDNLEKFKHVGELVAFIGLAPKETLSGSSIKGKPRICKTGNARLRKALYMPALVSIRYNPLMIAFYRRLKEKGKNGKVIVCAIMRKLVHVIFGVLKSGKKYDPNYRPIVA

SEQ ID NO: 310991 - protein, 351 aa, unidentified
MSEKYVAMDVHKASVAIGVRDARGRYIMESIVETKATTLVEFVKGLSGTIHLTFEEGTQSAWLYDLLRPHVAECVVCNPRQNKLLEAGNKGDRVDVQKLSELLYLGALRPVYHGDHGTRALKELARNYESLVRDRTRVKNRLKAIYRGRGIDCEGDEVYNPSKQAQWLMPLAERGVRQRATSLYSQLESLNAMVVEAQRQMLAESRKHKATTILRSLSTLGPISTAMIIATCDTPHRFRTKRQFWTYCGFAVVTRSSSDHYFKDGRLHKRRKPALTRGLNRNYNRRLKQVFKSAATSGSRRGPFKPIYEQLLAKGLKPDLAKLTLARRISAIALAMWKKGERFDPKKLSNS

SEQ ID NO: 310992 - protein, 347 aa, unidentified
MAIVGGFDIHRRQVTFDYLDTVSGQVRRGRIDPACREALRVWLRRFAGRGDVTFAVEGCTGWRFVVEELQRAGITALLAEPTETAHQRGPKKRAKTDKADARHLRVLVAEDRVPLSWIPPEQARELRVLLQLYRDLREEHTAWAQRIHATLFHQGVPGLAGRLADPRARAVLEHGQDIGLPAAGAQAVAAALRRMDDLEAALAPVHAQIAAFARHQIGCKALAAELYGIGPLVAAIVWAFLGDARRFSSSAQAVRHTGLDVTVYSSDDKRTPGHLSHQGPPILRWALFEAGHQGSRTSSPDHLYYTDVAARIDANRAALSAARKLARRSHHILRRLGDAAYAPLPGW

SEQ ID NO: 310993 - protein, 347 aa, unidentified
MNFYNNTHPYYCGIDLHARSLYVCILDQDGNTCCHKEISAAPDKLNDLLKPYIGNIVVGVECMHCWYWISDFCDDIGVDFILGHALYMKAIHGGKAKNDKIDSFKIAKLIRGGNFPLAYVYPKVMRATRDLLRRRMKIVRHGADLKAHVVNTTSQYNLPPNKVNLKDVSAREQLKNTFSDRSVQKNIDLDIVILDCYAEQLGKVEWYIQQQAKQHNPKHFHLLKSVWGIGPILALTIIYEIGDIKRFESVQKFASYARLVKCKAESAGKTYGTQGNKIGNAHLKWAFSEAAVLYLRGNKKGQKYLLRLQKRMSKAKALSALAHKIGRCVYFMLKNETVFDESRFLTG

SEQ ID NO: 310994 - protein, 374 aa, unidentified
MGRSIGVDLHWDCFTTAILAENGRFYTREWKLKDLNKFVETLGYDDKVAVEMTTNVRLFRDAVLPHVERVDVVNTRQFKVITESVKKTDRNDAVLLARFLDKDMLPTVHLKDKHVAEVASLTRSRDTLVKQRTTLKNQVNNAFAAAGVKLRRERMSSNKALSEVEVEAAEAMDALTAVEVKVLLGQIRALNVGIGELEKMIEAEGSKLKGFAEITSIKGIGTISGTILLSVIDDVKRFANDGKLAAYLGIVPRVSDSNETEHRGRITKRGSKLARTALVQCALIAKRYNPYLAKYHERLKRKKGGGKANIALARKLLGIVYRTLRNGWVFEDFPSFRLKDGTIPVWSREGAKKYAASRRDLSHLAKTGKQKRAT

SEQ ID NO: 310995 - protein, 424 aa, unidentified
MSKKKSRVAGLQALYARACGLDVHKKLVVACVRILDSKDGTVQSTLRKFGTMTADLLELRQWLAELKVTHVAMESTGVYWQPVFNLLEGHFKVWVVNAQHIKKVPGRKTDMKDAEWIAQLLQCGLLRPSFVPERQQRELRDLTRQQTKLVQQRNAVDNRIQKVLETANIKLGSVASDVLGVSGRKMIEGLIAGEKDVTALADLAQRQLRGKIPELQRALEGELNDHHRFLLRQLLGQYDFLEKEIASIRERLGAVAPPSFRAAVEQLDAIAGVGERGARALLAETGTDMSRFPTHKHFASWAGRCPGNHESAGKRRSGKTPAANRHLDAVLTEMAHAAVRTKNSYFKAQYHRLAGRRGKKRAIGAVKHSLLVTVYFMLRDNRPYKDLGVDYFDKLNPQQRIRYHVRRLQELGQEVELSPIADAA

SEQ ID NO: 310996 - protein, 321 aa, unidentified
MSLYQLGIDISKAKLDCALRMPSGKYRDKVVENTSRGFKALSEWLGKQDASLPHVCMEATGVYWEAVAEYLAGAGMVVSVINPAQIKSFGGSRLIRTKTDKADARLIADFCHERRPPPWQAPSQSVQTLRALVLRLEALQNMRTQESNRLEVSRDAVKAGIVEHLAWLDTQIKQLAKQIKDHINNDPDLKAKRDLLDSIPGVGERTIASLLAFYDNIGRFSNVKQAAAYAGLDPRTHTSGTSVSLKPRLSKVGHAFLRKALYMPAIVTLYKTSWGIHFRTRLAAAGKAPKVIIGAMMRKLIHVVFGVMKSGKTFDVTLHGV

SEQ ID NO: 310997 - protein, 408 aa, unidentified
MKTLHKRCAGLDVHKAEVVACLRVITNRKVGREVRRFPTTTQGLLALAEWLENAGCTHVAMEATGVYWKPVWHILEGHFVLILANAAHVKNVPGRKSDVNDATWLGDLLAHGLIRSSFVPPPEIQELRDLTRTRRQLTREIVQHVQRIQAVLEEANIKLCSVITDIMGASGRRMLKAMIAGETDAEKLAALGHERLGCTRAELVEVLTGCVREHHRFLLGQHLRTIEQLEDSIAAFDARIEGALSPFHDIVERLKEVPGLAATATETVIAEIGTNMSPFPTAGHLLSWAGFVPRLDESAGKRRSTRIRKGAPWLKPVLVQAAWGAARKKNSYFQAQFLRLKARHGAKKAAIAVAASILTTVYHMLRDGTCYQDLGPEYFTRRNPAQAAARLANRIRNLGYHVEIRAAA

SEQ ID NO: 310998 - protein, 351 aa, unidentified
MTIVGGLDVHRKQITFDYVDDDGLMHWGQIRPATRQTLRGWLAEHCPDGNGEFALEGCTGWRYVCEALAAAGMVAHLGDPAETAALRGPKKRAKTDRADARLLRTLLVEGRFPESWIPPAHVVEIRTLGRLYCALMDERRAWQQRIHAQLFHQGCPPITALLSQSGRLGLARAELSAAGRQYVDTALRRIDELSAEIEPLRAQLISFARRQPGCRALQERHYGVGWLCAVIIWAEIGDARRFASSDRLVRFAGLDVTVYSSDAKRSPGHLSRQGSPQLRWAAFEAAKCAARRGSPDHGYYHNLAAKHDGHNGKNPTLAVERKILRRCYHTLRELGDAALAMPVPQPQEVAA

SEQ ID NO: 310999 - protein, 328 aa, unidentified
MYFIGCDVSKATLDAAWFNKANGNWVEKQKIPNSRSGWKGLLKYMLTACQCEADDICLVVEATGVYHRPLADLAYGAGVRVIITNPGRAAEHASSHNRLNKNDRIDARGLQQYGRQLENAHDYEPDSPQIQALRALLSRLRQLDKDIQRERNRLEKCAFIAQSKVLAASIKRQTRQLIQERELIQGKIDSLISEHPSLKHIQARLISIKGIGKITSQWLLPLLYREQFESARQLAAFLGLTPIHRTSGTSLKKRGRLSGRGDCYLRSRLYMPAVCAKRHDPAMAACYDTLIRRGKTPKQALTAIIRKLVHVAYGVIKNDEPYRCPVPA

SEQ ID NO: 311000 - protein, 372 aa, unidentified
MRRQQAVLERRDTLAADMKITIPLTTIGLDLGDKKHAICVLNQAGEIIDERTITNHRESIRRLSLKYPGARIALEVGTHSPWISRFLSGLGHEVLVANPRKLRVIYANDRKSDKNDARILAKIARIEPQLLYPVEHGSEQAQRDMLQIKLRDNLVRQRVDIISSVRFTLKSLGVSLPSPNTACFAKRCRALLSKEQSELLAMIEPSLQVVDMMTQKIRDLDREIEKLCVEKYPATERLRQITGVGPITALSFVLSIEDPQRFDRPRDVAAYLGLVPKRDQSGALDKQLRISKAGDTYLRSLLVSCAQYILGPFGPDTDLRRHGLKLAERGGARAKRKAVVAIARKLSVLMLTLWKHQRDYQPLRNPEDAQAA

SEQ ID NO: 311001 - protein, 355 aa, unidentified
MNDEKYIGLDVHQATIVVAVMDSTGKLVMESILKTKAATILQFFAGLRGTLSVTFEEGTWSAWLYDLLHSRVDKLVVCNPRKNALLHDGNKSDRIDARKLAELLRGNQLKPVYHGETGVRMLRELSRSYLTIVKDLSRVMNRLKAVYRSWAIPCAGRDVYYRRHRAQWLAKIREAGVRRRAERLYEQLDMLQHLRQQARRELLAESRKHTITAKLRQIPYLGPIRVALAVALIQTPHRFRSRRQLWAYSGLALETRTSAEYRFVEGQVRRSKKLLCIRGLNKDHNHDLKGLFKGAATMASVRPGPFQDFYQATLAQGIKPTMARLTLARKIAAITLTLWKKGENFDAEKLKSQAA

SEQ ID NO: 311002 - protein, 409 aa, unidentified
MEAIFPRCAGLDVHKETVEATSRIWEGRRVEPQTRRWGTMTRELLQMADWMAAQGVTHVAMESTGVFWKPIYNILESRFTVILVNARHLKQVPGRKSDVRDSQWIAQLLQHGLLRASFIPPRPQRELRDLTRHRTQLVAEQTRVANRLHKVLEDANIKLGSVASDILGVSGRAMIRALMEGEQDAAPLADRAQKQLRGKIPELERALEGRVTDHHRFMLRLLWKELASLEELIAELEGKIKQMTRPFTPCIQRLDPVPGVDRRIAEVVLAEVGADVHAFPSHQHLASWAGMCPGNEESAGKRKRSRTTKGNRWLRQALVQAAWAASHSKSSYLAAQFRRLAGRRGKKRALIAVGHSILVTVYHLLKYRTTYSDLGSDFFDRLHHDRLTRYHVKRLESLGHKVALEPVAA

SEQ ID NO: 311003 - protein, 369 aa, unidentified
MTVYIGVDLHKTQFTVHVRVGDRIESLSEIKQYPTTAAGYTKFLERIAGYKAVDFTVKIGVESTGNTRFFKNQVEKAGAEVTVINTLKFKVINESTKKTDKYDASTISWFLSKDMLPESHICSKETENLRRLLKSRERLVRSIVGQKNEVHALLVSMGLDDELRSLQSKKGRQKVLDTLLSHSDLVLEAQSVKLIFQIIEQMIESVKIIEKHLSELTEDDAMVNRLMTIRGCGKITAWIIRAYTEDIGRFANAKKYAAFCGLVPWVQDSNESVRHGKITKRGPQELRTAYVQLVLGIRRCKDTWGWRIMQRLDYMKKNKGSGKSIVAAARKMAEIVWALLTEGQDFDSKKMMGTYKPLTLTEQALAAMN

SEQ ID NO: 311004 - protein, 363 aa, unidentified
MANVQANVIGGVDTHKHTHYAAAIDDQGRLLGHEEFPANASGYRSLLAWMRRFGRIETIGVESSGSFGATLTRYLRSAGEDVAEVNKPNRQARHMQGKSDRLDAEQIARAVLAGEGVGTPKTKSGPIEVIRMLRVARASAIRARTQAFNNLFGTMIGAPSEVRDELVGFTKRTFVNRCLALEPETEELLELLDDPERLVVASARFTLRDLARRWKTLDREAKELGRQLEALVHHVAPELVELFGVSTELAGQFLVTAGDNPERIRNEAAFARLCGVCPKPASSGLKNNRHRLNRGGDRGANSALWIVAVVRLRHHEATREYVARRTAEGLSKREIIRCLKRYIAREVFAALPRSRPEAALVAA

SEQ ID NO: 311005 - protein, 289 aa, unidentified
MKHYVGLDVSLRETSICIVDETRRIIREGRVSSEAEAIADWLRRQDLGFEIVGLEAGSLAPALHSGLSDLGLPVVCLDARHLKAATSVMPVKTDRIDARNIAMALQAGWYRVVHVKSQATHRLRTLLRSRAMLVRARVDLDNHLRGILKAFGLKIGKARADQFEARVRELVNDDAVLRQIVSAVLGVRTELMQRLEVLDRMVLTVVRADPVCRRLMTVPGVGPLTALAFRTAVEDPARFAKASLLGSYFGLTPRKYASGDIDRNGTISKCGDKLVRSLLCEAPMPCSRG

SEQ ID NO: 311006 - protein, 343 aa, unidentified
MDPARTAARADATSSSHLQDRDMFMDAAVNSFVGIDVAKDSLDVCVLPDRRRWTTTNDRDGVGRLLEALPAAGACLVVLEATGGYQRTVVAELIAAGHQVAVVNPRQVRDFARGLGLLAKTDRLDAQAIARFGQQVQPRPAQKVPEKQDRLEQLVARRRQLIELRAAEKCRLETASTKFVIKNVRSMIEQLGKFIRQIEKELSELVDSDDRLQCRAAALQTAPGVGAVTAVTLVAELPELGRLNRQEISALVGVAPFNRDSGKFHGRRAIWGGRAAVRSVLYMATLTARRCNPVIRTFGQRLQAAGKPFKVVMVACMRKLLVILNTILKNNSTWNSNHQLNHG

SEQ ID NO: 311007 - protein, 356 aa, unidentified
MQTQVTKKIDFTGQSLFIGLDVHKKSWSVTVVVDGIEHRTFTQPPDPKALNNYLQRMFPGGAYNSAYEAGFCGYGIHRELNSLGIRNIVINAADIPTSQKDKLQKRDPVDSRKIARALEKGSLHGIHIFDRELEELRSLNRTRFYLMRDLRRSKTRIKSFLQYYGEPIPVEFDNNQWTLKFVCWLKQVKMQTPSGQDAFSNLISSYEYHRSQLLTLSRQIRERIREYDRELYTLLKSVSGIGPLTASALITELGDINRFTNIDQLGSYVGLIPRIRESGETTHTGGITFRCNSFLRTLLIESSWQAIRMDPAMMQYYHAHLINNKGHKVVIKVARKLLNRIRYVMKNRKPYITGVV

SEQ ID NO: 311008 - protein, 407 aa, unidentified
MIAIGIDWGTYAHTVKFSTGPGSDEPAIKIKNTYEGFLHLLDVSRRRTVGLKSEEIVFAIESQNKRIVDFLLAHGFVGYCVDPNRMQAFRLRYKSSRVKDDDFDAFVIADILWRDRDQLVRIVPEDESVLRLKGLLNDRDAFMNDLVSLTNRLTAALREYYPAVLEMFADPTGKTALAFMEVYPDFDSTRALMQDDMKKLMVKHHSFSKKRLLKILRILGQPQIAVPPVIVELKRKAIRHLIKQLREVQAAIAAYDADIQAAMPNIPEIELFQTLPAAGPIISSSLYALLGPDRMRFKDADEVQSYLGIVPRTIQSGQSRQVTFRYACRQDYRDILTCWAFCTLRVCPWAKKYYNKKRAEGKKHYHALRCLASILLKIAFTMWQERTRYCEDHYLAQRARHRMNNEQ

SEQ ID NO: 311009 - protein, 367 aa, unidentified
MTTQQKQSCMFIGIDVHKDTHTAVGISPYGEKLFEITVGNYKEDFETLDSKVKEKSGTLSPFFGLEDVRGYGERLSGYLYQRYPVYRVPSILVDRQRQNATHPEKSDSLDALGVAKVMIQSIDTLLPYTISKESEKAKQLKEISIDREDLVLERTRLKNQVHTLLYRIYNTEYVNKFKDPFSLKALRYWRNAKPKCDPFLLKTMKRKVRRLLDIHVEVTDLEKDMKTLLDTGGYTIQTASGCGLVLASTIIGEIGDINRFTSPGALSKYAGCSPRERSSGKKTRHVKSRSGNRRLNCAFHRMALSQISRMGNDKARTYFKRKISEGKSRISRRKSKKGRKILVLIRRYHISYNNLEYNTTEYYNTNT

SEQ ID NO: 311010 - protein, 317 aa, unidentified
MTTPSEAYVGIDVGKAWLDVALWGSDEVWRVSNDEAGVAKIMERVRALDPRLIAVEATGGYEQLVVQAMLMKSLPVAVVNPTRVRALAKATGKLAKTDVIDARLIAEYAFKIQPEALAPKEANEIRLKALVTRREQLVAMRTAEQNRLGTAQNSLQADIGEHIEWMTARIKDLEAEIEELVDSLPVWRAQAKRLDSIPGVGMVTAVTVLAEMPELGQLDRQKIAALAGLAPFNRDSGQKRGKRRIFGGRKGIRRVLYMACLSATRYNPVIRSMFQRLMKKGKLFKVAITACMRKMLTIMNAMTRDQVNWKVPEPISA

SEQ ID NO: 311011 - protein, 404 aa, unidentified
MLLVGIDWAERHHHVCVMAPDGGVLARERVADGVAGVARLHELIASWAEEPAEVVVGIETDRGLLVGALVAAGYQVVAVNPLAASRYRERHTISRAKSDRGDARMLADLVRTDRHHHRPAKGDSGLAEAVKVLARGHQQLVWARQRQANIVRSALRAFYPAAVAAFGNDPGGRDAVAVLGLAPTPELGRRVSPAELVDALRRVGRRRQVEARAAAIHAALASQQLEAPPVVAAAYGQVVAAAVAVIASLSQQLAGLEAALTSAFGAHRDAGIVRSQPGLGVVLAARVLAEFGDDPDRYVSAKARKAYAGTAPITRASGQRQVVLARAVGNRRLSTACHLWAFAALTGSAGARRYYDAHRARGATHHQALRALANRLVGILHGCLRHRQAYDEQLAWPTHIAVAA

SEQ ID NO: 311012 - protein, 396 aa, unidentified
MAQIWAGTDIGKTHHHCVVLNAEGERLLSRRVLNDEPELLALLTDVLALDEDVVWAVDVADGMGALWISVLLNHGQHLVYIPGLAVNRASAGYRGMGKADAKDATVIADQARMRRDLTVLRSDDAQAVELRVLTSRRADLNADRTRRINRLRGQLTSIFPALERVLDLTNLGPLILLAGYQTPAALRRTGAKRLATWLRNRSVRSPEALAEAALEAAERQHTAVPGQKIIAQVIHTLAKEVMSLNEQISEIDKIIAARFRDHELAEVISSMPGIGPLLGAEFLAVTAGDMSRYGTADRLASLAGVAPVPRDSGNISGNLHRPRRYHRGLQRVFYTSALISIRSCDDSRRFYERKRAEGKRHTQAVLALARRRVNVLWALIRDGQCYQASLPVTDTA

SEQ ID NO: 311013 - protein, 321 aa, unidentified
MAMPVQTLYLGVDVSKASLALCLGPEQPVQTLPNTAADIARWLATLPAGPVCLALEATNTFHLDFIEQAYRRGYTVYLVDGYRLSRYRDSLGVRAKTDASDAQLLHRYLIREHRDLRPWSPPPAGYTRLQRLLHRRAGLVRARVALQQSLADLPELQRAAIPLLRQFARLDALIQTRLRETLAQLDWTPDCARCQAIEGIGPLTATALTLAFHRGHFRTSDAFIAFLGLDVRVRDSGQLRGRRKLTKKGDPELRRLLHLAAMQASRSSRWNAFYQRYLERGLSKIQALVILARKLARVAFALLKQQTDYLPKTTSEACGQT

SEQ ID NO: 311014 - protein, 429 aa, unidentified
MNEVDNIRLEQFRQIRKEIRGSIEYLIVGIDVAKFKHYAFYGTANGKTLLRRMIFENTLEGFQKLRVQEDAIKVRYGLEKVIYGFEPTANYHKPLGEYLIRCGRHVVLVAGTAVKNNRKTIDGRWDKNDTKDAAVIADLISQGKFLFYEYPSMPLRDLRNLLSLKRRLKKQEHGQKVRIRNHLLAQYFPELDGYYGNWGKEGLAIVRWCLDPSVIAGLEYEDFVRRVSPDAWGSSYRQERLRAVWEKAVDSIGCRAGESLDVEAKLMVEGLAYTRESIRELQDKIEEVCSCFPEYSYLLSIPGFGPDIASRVIAAIGNPFRFDNQRQVLKMAGMDLSANRSGTTSDKAIPRLSKNGNAYLRYALYQAAMIASYRSTPFIRYFTDKLRGREKEKGIKTKMRVKLAAKMLIIAWTLMKKREEFDPKYLSID

SEQ ID NO: 311015 - protein, 378 aa, unidentified
MNRIIKIGMDVHTTNYTLCIFEPSFEHDGTVHCITQVKPEVKNIIRVIETFKKKHENEELNIVCGYEAGCLGYSLYHELKEKGIECVILAPTTMKTEKGGRKLKNDYRDAKMIAECLAYGGYSAVHVPTELDNSVKEFIRMRDDIKENLKSIKQQIIAFLTRNGKQFEGKSFWTRKHIDWINTISFSEPLLQDTLKEYMIEYNHLCDRIEILDKQIEEISLKEEYVEKVQQLQCLIGIKTHTALSLIVETSDFNRFKKGNMYSAYLGLIPGDDSSGGHENKVGITKAGNSHLRRLLVEAAQGYTRGKVGFKSKDLKSRQEKCSSEVVAYADRANERLRRKYYRMTLRGKKYNVAKTAIARELACFVWGIMTDHIDLCS

SEQ ID NO: 311016 - protein, 459 aa, unidentified
MKKRKSKRTKGTEEARPFEGLSKVHQNAAGVDIGATEIVACVSDGDEVQLVKTFGNYTVDLQAICEWFRKHEIKTVAMESTGVYWIPLFEELERQGFECLLISSRSLRKVAGQKTDVEDAQWIQTLHSYGLLKGSFRPQADLVALRTLLRHRAQLLEHRSPHIQHMQKALLQMNIQLSQAVTDVTGMTGQKIIRAIVAGIREPEQLATLRDPGCKHSAEEIAKALTGTWREEHLYILKQSLELYDFYTEKVEACDAEISRRYAMIRPDWGSRELPVVPAKKRHAHSKNAPKAAREIRKHLYRLNGVDLSLVDGMGVSLAQTVTMEVGSNVGEKFPTEKHFCSWLGLAPKHDISGGKVLNNKTLKTKNRAGQAFRMAANSVKKADCPFGVLYRRLRSRLGPAQATVATAHAIARVVYKMLRYKVEYDPLSVNEYQKRYEEQQVKYMRKRAAKFGYQLVPA

SEQ ID NO: 311017 - protein, 346 aa, unidentified
MLYAGLDLSRKRLDFHLLDREGATVEVGACPPDADGLRGLTERVDRHGAPIRAAIESMNGARFVHDQLELAGWQVEIADAQKVKGLAPLACKTDRIDAWVLAQLARRDLVPAIWLPDPQVRAERERARWRLHLVRHRSSLKQRVHAVLLTHGTPSPVSDLFGVRGRQLLARLGLPEPWQATIEASLRLIDDLDREIGDRERELRRLGADHRYVPLLCTVPGISWVLAYTIAAELGDINRFPTPRKLAGYTGLCPRVYQSGDRDLRGPLAKQGPRYLRWALVEAATHACTHPIYRERYQQTKARIGKQRGAKVAQIDLARRLSEAIWHMLSRGEAFAPKGATDPLAA

SEQ ID NO: 311018 - protein, 358 aa, unidentified
MYKFMKKFFIGVDVSKDTVDVSFFDDDRMKSPEYLAQYSNSPKGFREMVKDLRMCCHGVSSGQWLFCCETTGRYDHPMCHWLVDHGMVVWRESALQIKWSSGIQRGKNDRVDSLRIAEYAWRHQDKMQKFVKPSESLSNLKAAFTHRRRLVEKRTATRCQLKSMSSEKGLSASVARMIVRDLSREIERLSASIATMDESIQEIIRSDSELDRNYRHIISVKGVGPITAVALIVCSGNFKAITSAKKMACYCGVASFRSQSGTSINRKASVSNLSNRQIKSLLSMAARSASRSNPVFAEYFNRTLSRGKPVALVYNNLRNKIITVVYKLIERDCDFDVDYMRMHSTGQRANEPAIREAV

SEQ ID NO: 311019 - protein, 407 aa, unidentified
MKLTCGVDWAEAHHDIALVDGDGAVVARARIDTGATGFSAMLALIAEHGGSVEDTPIAIETDKNLLVVAAAEAGFTVYPINPRAVARYRERHGQAGRKSDPGDAAVLAHILRTDRHMHRPLPALSEHARAIKALARQHQEAIWALHQTISRLRSVLLEFYPQALQAFPSLKHKAALTVLAVAPSPEDAQRLTRGRLVSLLKQCGRRNDPALVEQILSDLKAPALRQPPQIESALGTTVAGLLTIVVSMQNAVEHLETQLKAEFDTHPQAVILRSAPGLGAILAARVLAEIGDDPTRFDDVSGLRAFAGTAPVTIASGRSHYVKARKVRNKRLGDACHWWAFATLTKSAGARAYYDKRRAAGDHHNAALRNLANKLLGRLWWCLANNQPWDERAAWPDLTDTSKPAAA

SEQ ID NO: 311020 - protein, 401 aa, unidentified
MNAVGIDISKGKSMIAVVRPFGEVVVSPYEIHHTTSELRELASSLKSLEGETRVILEHTGRYYEPVAQTLNNAGIFVSAVNPLLIKEYGNNSIRKVKTDKADALKIARYGLDNWSELREYTFTDEIREQLKILNRQYSLYTKNKTALKNNLIALLDQSFPCANTLFSSPVRENGSQKWVDFAASFWHVDCVRSLSPKTFTERFHKWCRRHGYNFNEAKAASIHEKAKELVPTLPKSQSTKILVAEAIRQLNSSAKTVEVLRSEMNRLATQLPEYPIVMDMFGVGTSLGPQLMAEVGDIQRFAQRGSLTAFAGVDPMPNQSGSYERQSNPSSKRGSPYLRKSLFIVMTILMKNSPPADPVYQFLDKKRAEGKPYYVYMTAGCNKFLRVYYGRVNAHLAALDS

SEQ ID NO: 311021 - protein, 387 aa, unidentified
MYYIGIDISKFKHDCAVIDDSGEIVTPSWSFTNDSEGFSQLKTLVDSLDAETRIGLESTGHYGMNLKLFLESNNFSFMEFNPLLINRFVKSKSLRKTKSDSIDCMMIAHYLMTVEYKPYPPLLYHIEKLKSLTRFRDSLIRLRSRQLVELTNILDKVFPEFKPFFGSRFSVTALYILSNYSSPEKIANMNSKSYEALRKLSRGRFSTVDFAKLKQLAKNTIGTTEDYLLLQMQIVLDIYRQLDSKVDETEVSIKECVSDMNPPMLSVPGIGIESAAVILAEFGDFSKFKNASQMLSFAGLEPGYFQSGTSETTGKMVKHGSSYLRYALMNCAQTVVNYEPTFAMFYAKKRAEGKPHRVALSHVVKKLLRVIYTLQTKNIAYDADFVR

SEQ ID NO: 311022 - protein, 355 aa, unidentified
MNDAKYIGLDIHQATIYAAVLDSAGKLVMECILETKAATILQFIHGLRGSLHVTFEEGTCAAWLHDLLKPHVAQVLVCDPRKNALIKAGNKSDRIDARKLADLLYLNKLNAVYHGETGIRALKELARSYLALTRDTTRVMNRLKALYRSWAIPCAGQRVYAPRYRSEWLAKITEAGVHRRAEIYYQQLDALRSLREQVRRDLLAEGRKHSAMKLLRQIPSIGPIRAVLLIALMQTPHRFRTKRQLWSYCGLALKTSTSGEYRFVEGQLKRSKKFLAIRGLNANHNHDLKNIFKGAATRAAAVPGPFQEFHAALVARGMKPTMARLTLARKIAAITLIVWKKGVGFDAEYLKQQAA

SEQ ID NO: 311023 - protein, 351 aa, unidentified
MSFRFAHATPEENRMTTKTVGIDIHKSESQIAVVNDEGEPVDERRIANDQLADFAAEYAGSEAAIEASRNYFTIYDTLSEELEVTVVDPRQTRWIADSSKKTDRIDAKKLANLLRVGMVSESYVPPPAIRKRRALVRGRKKFVEKRTDCKNEIHALLDQNGISYEGSLWDEDGLEFLADVELTEPSRLLLDQWLELLGDLTEKLYALDREIERIAADVPEVQLLMTIPGVSSYSGLMIHAEIGEVDRFDEANQLVSYAGLDPVVKESGETRTEGGISKQGSSYLRYILVMSATSAVHNAKDPYLKEFYDRLRHKRGKPHKVAIVATARKLLVSIFHMLTNEEPYDPPGVTS

SEQ ID NO: 311024 - protein, 342 aa, unidentified
MRVAGIDTHKATLAACAIDDAGVLLGEATFANEPAGFADLVAWLQGIGDIERIGLEGSAGYGAAAARYLLRAGETALEVPPQLSHRERIRTRRAGKSDPGDALAIARVTLREAELPPVRLPDASRELQLLVEAREDLVAEATRVRNRLHADLVVLVPGYGAAAANLVADKYRKAASRLLRRLPGIQAELARDRLGRLDRLATEARTLERRIEGLVAGHPLRQLWGAGPLVTAKLIGEVGDVSRFRSADAFAMLAGVAPIPASSGQTNRVRLNRGGNRQINRALHGIALAQVRTYQPAKDFVARKRAEGKGWLEALRSLKRHLARIVFRLLSEPARQASVLGA

SEQ ID NO: 311025 - protein, 343 aa, unidentified
MQVVRIGLDLAKYAFAIHGVDARGKIVLRKTLRRDSVSRFFANLPPCLVGVEASNGAHYWARVLTELGHQVRLISPQFVTPYVKSNKNDRNDAEAICEAISRLSMRFVPPKSTEQLAVQAVHRIRRRLVSDRVKLVNQVRGLLAEHGIVIPRDITQLRRGLAELVERCNDELSELVRSLMRELREELAELDRRITSYDRRIREIFRNSEPCQRLGRIEGIGPITATALIAAVGDRTCFKNGRQFAAWLGLVPKQRSSGGRARLVGISKRGDRYLRTLMIHGARAALARAGGKQDPRSLWLGKLRQRRHPNVAAVALANKNARIVWAMLAGNTAYEPELSMNAA

SEQ ID NO: 311026 - protein, 412 aa, unidentified
MKDLLEISCGLDVHKDKIVACILSGPIGKTTVSEIREFTTLIPDMAALRDWIVSCNCHHVAMESTGIYWQPIYEILEDAYSGDITLLVVNARHMKNVPGKKTDMRDSEWIATLLRAGLLNGSFIPDKQIREFRYLNRYRKSIIRDITSQKNRVEKFLQSSGFRLSTFISDIFGASGRNIICHLIQHGCIDRESLDSCLKTKTRNHINEILVAVNGTLSQIQQDFLEMLMDHYDSLKSHLAEIETALEEAMAPFSLHIEQLTSIYGINTTASCAIIAEIGTDMSYFKTAEHICSWAGLCPGNNESAGKRKNTSITKGNPYIKSMLCEIAWVIAGKRNTYLSAWYWRIKQKKGAKKAIVALARKLLVIIYTMLKQGTLFGENCFETRRKNCEQKQVSHCIRELEKRGYHIEASA

SEQ ID NO: 311027 - protein, 457 aa, unidentified
MLFQAQISVPIFVKTTLVLILIIQSILFTPYNSIEPIVLKGVPMALKIVYPICCGIDVHKTFVVACIASTNRHGVTTYKCHRFSTFTQGLKELLQWLLDNNCKDVCMESTGKYWIPIYNVLEKNCTIVLAHPKYVKAIRGKKTDKKDAKWIADLFKHDLVTGSFMPPVNIRQLRDLMRYRFKLTCFMSSEKNRLQNCLTVSNIQLASVVSDTFGKSSQRILDKILENPNNTAFDIEPLIHGSMKKKLPELELAVDGFITPEQAGKLKIIKKHFEDLESRKAELEKLILALAGPYQQELDIILTAPSFKNKFTAIGIISEIGVNMEAFPSAKHLCSWAGLTPTNNESAGKKKSVRISKAGCYIKPLLVQCANSVVKSEKHPEIRNRYLRLRKRRGHKKAIIAIARMLLTALYNMLKNKEPYNAELYQKSDVLPVNREITVEQAILMAQFQGYKIKSAT

SEQ ID NO: 311028 - protein, 349 aa, unidentified
MAMTIVEAPPGITGGVDTHLDKHVAAALDPLGRLVGTESFDADAAGYKALLVWLEDFGEVTKVGVEGTGSYGVGLSRFLRRKGIEVVEVNRPNRQSRRNQGKSDSLDAVEAARAAISGRASGVGKTKDGPVEAIRVLVVAKRSARQARVKAIVQMRHLGFTAPDQLHSRLKGLSVTALVAEGAKLRATKSADTVTAATKASLSSLAHRIQGLDLEIAELDEKIESLLLATAPDLMARFGVGPDTAASLLVAAGDNPERLHSEAAWAHLCGVSPVPADSGKNAGHLRRHTGGDRQANSALWRIAMVRIAHDPETTHYFERRVKEGRTKRDVIRILQRYIAREVYRYLPRG

SEQ ID NO: 311029 - protein, 412 aa, unidentified
MTVTNQFAAHVGLDWADKKHDVCVQFKNGERVFDVIEHTAEALDAWLTELHQKVKGRIAIALELKKGPVVYALQKYPFITVFPVHALSLARYRQAFSPSGAKDDPQDAELALELMLRYPQKIKAIEPDNADIRLLQQLVEQRRQLVEDKRRFVNRIINTLKQYYPQPLEWFSHRGSLLLCELIIRWPSLQQLKRARRDTIRNFLNAKGGRAMALTEQRVASIDNAIPLTTDPSVIEANALMAAALATQIKVVSEIIKTYDERIETLFDTLPDAELFKSLPGMGPCMGPRMLAALGDNRDRFNSAEEIQNYAGIAPVTERSGQKSWVHWRWQCAKFVRQTFVEWAAKTVNSSYWAKLYYQGLREKGKSHQSAIRALAFKWIRIIYRCWKARTCYDEAKYLLALEARHSPLLKP

SEQ ID NO: 311030 - protein, 387 aa, unidentified
MPLAADLPAQTQPVPRPAQVLYVSLELSPSKWLVTSLLSGTGRMSKHLVIGGDGNALLRLLAALRTRAEQRAGAPVVIVAIQEAGLDGFSVHRLLEANSVESWVVDPASVAVPRRMRRAKSDAIDGETLLRTLLAFRRGEPRVCSMVHPPSVEEEDRRRITRERRTLLRERIEHTNRIKGLLMSQGVTGYDPLGKDRWARLESLETRDGHALPPRLKAEIGREIERLELLARQIRKVEAERDALAATVPEVAASPAALLLRLKGVGPETATLLWLEGLFRTFANRRQLAAYAGLAPTPWLSGRIRREQGISKAGNPRLRTAMIELAWLWLRHQPESALSRWFGERVRAGGGRNRRTTIVALARKLLVALWRYLVHGQVPDGAVLKPS

SEQ ID NO: 311031 - protein, 411 aa, unidentified
MRVHHNVCCGIDVHKKSVTACLMWGPADKEPQFEIRRFGTMTRDLQMLAEWLKQAGCEAATMESTGSYWKPVWNVLEGQIAKLILANAQHVRALPGEKTDRKDGKRLAELTRHGQVRPSYVPPRAILELRDLTRYRSKLLSAGSSERNRIQKVLEDANIKLGSVLSDLFGVSGQKMLQALIRQDTVDTATVAQLAHWSLKPKMEAIQQALDGKLRDHHRFLIDASLQPMRFIEEQLMRLDEEIQRRLQPYQEQYALLQTIPGIKETGAARILSEIGPDMSPFPDGDHLSSWGGACPGNNESAGKKFQSKIRKGNPHLLAALTECAWAATKKKDCHFRNKYYRLKSRRGSQRAIIAIDHAMLKCIYVVLSQRQPYQEPKPTSLTEAQKQRKASSLCRQLRALGYDVTIQKAA

SEQ ID NO: 311032 - protein, 363 aa, unidentified
MNKKVPISSSFIKNLCAETIKLGVDAHLNKYVVVVKVDASAPMRARRFSCEEAFVSFVRELQARCQQIYCSYEAGPFGYRLHRALESMGVTNYVIRPINWDEHGKRVKTDNRDATEIVLALDGYLRGNTRSFSVVRVPGEQEERLRGVSRLRESLMKHRKRLGTQGRGIALYHGGHLKWNWWSKRSWKKLSEELEEYLLELLEPIQAQLVVVEEQLAKVFKRLETMPQPALPKGMATILFQSMEREVCDWGRFSNRKQVGGFTGLCPSEYTSSHHRLQGSINKHGNPRLRRLLIEAVWLLWQFNPTYCRFERWPEKINVKKFSKARLKKLVVATARQFAVDWWRLRTGRVSAADLGLVMKPIS

SEQ ID NO: 311033 - protein, 478 aa, unidentified
MASQTHRETSQGQRLTRKERKILGRQIWSGSPGLEVVHRDAAGIDIGSREHYVAVGPDRDGQPVQSFGCFTTDLHRLAAWLTQCGVKTVVMQSTGVYWIPVFDVLEQSGFDVWLVNARETRNLPGRKSDVQESQWLLKLHTYGLLRKSFRPTAEIRAIRTCWRERAEYVEQAGTSIQRMQKALTEMNVQLATVLSDLSGVTGMKIIRAIVAGERDGRKLAEFRDANVKASQETIARSLEGTWLPEQLAILRRQLADWDHVQRQMAGCDEDLAARMKDLPAAEVQPGEPRPPAGRTGKRQRKKSSRNQPNFDLGAELKRVAGVDLTRIDGIREMTVQTVITEAGLDMSQWPTEHHFVSWIGLAPRNDISGGKVLKRRTRKVVSRLATALRMAASTLRESDSYLGAQFRRLRSRLGPPKAITAMAAKQARLVYRMLKYGQEYVDKGTAQYEEKYRLQRIRLITKQAAQQGFALVPLVSPV

SEQ ID NO: 311034 - protein, 355 aa, unidentified
MPAPLKSTNSYKNAMTLFYPIFSLRLTGDSTMIFIGIDISKLTFDAAYSLNSRTIHKQFSNNPKGFETFYLWMNKSKKEVYTCLEATGIYSFDLAQYLSHKKINVMVVNPIITHAFFKMELNRNKTDKADAQLIARYCEHVVVTGGYEKKSYQPKGADYEAIQRLVTRCDQLEKSKTQENNRLEASANKQTSRSIKRLQKAIDNEIVRVKKEISDIVKNNQYLCQQVELLVSINGIGERTAWSILAYIGDINFFSNAKQIASYAGLTPKIIQSGTSIDKSSLSKLGHKRLRKSLYMPALVAIRYNPILKAVYERLVNNGKPKKVAIVAVMRKLLILSYGVLKSEKPFDINYQMTD

SEQ ID NO: 311035 - protein, 343 aa, unidentified
MEKIATVGLDLAKSIFQIHAINDSGDILVRRALRRSQVLDFFRKLPPCRIGIEACASAHHWAREIAAFGHDVRMIPPIYVKAYVKRNKTDAADAAAICEAVNRPTMSFVPIKTAEQQAAGMVLKTRDLLVRQRSQASNAFRAHMSELGIIAATGMASIAKLSAMARERDDGAIPDAARQALQEMVDQIEILTERVERLDRAIQANVKNDDVGKRLMTIPGVGPLIAATVRATVQNPQGFKSGRYLAAWIGLTPRTHSSGGKERLGAISKRGNRQLRTLLIVGATSIVKFAKRGVKMLAWLAGLMLRKPFKLVAVALANKIARTIWALLVKGGTYKRPFVVATT

SEQ ID NO: 311036 - protein, 315 aa, unidentified
MPKETFVGIDVAKDQLDVHILPKAVHFTCEHDAKGIASLLSRLQEENPTVIIMEATGGYEITLAAELGAAGLPVAIVNPRQVRDFARGIGKLAKTDAIDAFVLARFGETNKPEPQPISTDQEKQIKQLVTRRRPLVGLRASEKNHRCSARSQRVRQSIDTVIATLDREIAEVDTDIDDLIRNSPLWREEEKLLRTFKGVGPVVSRIVLAKLPELGMLDRQEVACLVGLAPLNKDSGKMRGKRMISGGRKDVRDALYMAALTAIKHNKIIKPFYERLMKSGKLFKVAITACMRKILIILNTMVKTKRPFQIPEVFA

SEQ ID NO: 311037 - protein, 331 aa, unidentified
MFPVGIDVSKNTLDLCMLYDGIKGRIKTRNIQNNRHSVENILRWLRLQHCSPEDVHVVMEATGVYHERLATELHDAGFQVSLANPHRSREFARGMGIMTKTDKVDAYMLACYAFLKKPHRWEPPALEIRYLGALLRRRDVLLGDALREENRLEKYLSTDAPADIISSCRRMAQLLSEEVSNIERQIKAHIKASPALRRDYTLLTSIKSVGPQLGMHMLVVLRSHNFVSAEQAAAFLGVVPIEKRSGTSVRSRPRMSKIGPPQLRAKLYMSALCGKIYNKRMRNIYDEMCLRGKPKMVAIGALMRKLVHWCYGVLKTGTVFNDEGLKPVLSS

SEQ ID NO: 311038 - protein, 337 aa, unidentified
MTFTYFVGIDIYKLTIDAVLYTSATEPVFHQQFENRPSGFKKLLTWINQRKSSASVLFCLEHTGIYALPLCCYFAQHKLKYSLQSALHVKRSMGIQRAKNDKADAHMLARFAYLYRDEIKLSELPSQTLLKIQHLLAYRQRLVKSKVALQVAAQELASFTDKQFNSTILRDSQKHITQLSASIVLVDKQLQTIIAEDQQVHQVYQLATSVTGIGLQTAAYLIVHTKCFSGFDNWRKLACFAGTAPFDHTSGSSVRGRNKLSKIGNMKLKSLLSNGANAAIQSPNEFLIYYNRKIAEGKPKLVALNGVRNKILSRVYAVVQRGTPYVKLQAEYLQVAS

SEQ ID NO: 311039 - protein, 327 aa, unidentified
MQYIGFDIHKRYTFYTQMNEAGTIQRQGRLPNTREAMGTFFADVVEPARVAMEAGPTWYYIYDLLETLQIPVTLAHPLRTRAIAEAKVKTDKVDSTILAHLLRADLVPAAYIPPREIRDLRELLRYRAALVRLQTKVKNHVHAILLKHGYQAPVCDVFGVRGRAWLSTLPLRPVYQHSLHGFLQILDTLRGQIQSASRLIDQEAQATPLAQTLCTLPGVGHYTALLLLAEIGDIRRFPSPKHLVSYAGLAPTVHASGDRTRIGHISRQGSSWLRWILVEVSHHASRKPGRFQQLYQRLAKRKGPRIASVAVARELLTTTYWMLRHVH

SEQ ID NO: 311040 - protein, 449 aa, unidentified
MKNEKTKNVKMSNGLPVHYAHAAGIDIGDTEHYVATPDGNGGHEVKCYDAFTCDLRSIVSNLKEKGMTTAAMETTGVYWLSLYLLLEEAGIEPWLVNAKHVKNVTGRKKDDTDAIWIQKLHACGLLQKSFQPDEQYRTLRTYVRQRKNLITIGSDSVRRMQKALELMNIKLHTVISDILGKTGMQMVEAILNGERNPQALANLTDPRIKASRETIIKSLEGIWKDEYLFMLQQAHEEYLFYQKQIKCCEEKIRKQLLQQVAIIQEGDISQITQEEEIKKKPKKNQFSFTVAPYLKIMTGVDLCNIPGVNEITAMELISETGVDMNKWKSTKHFAAWLNLTPNTKITGGKIISSKVPKKKNKAGQCLKMAASSLSNSKSVLGDEYRRMRAKLGGKGAALAMAHKLSRIIYTMLLNKTEYNIEIITGSQKKWREAKIKRLEKQLTKLKEAA

SEQ ID NO: 311041 - protein, 361 aa, unidentified
MFIERTSVGLDVHARSVVAEAVDWDTGQVFSERLVPASEQVVAWVGRLPGPVAVSYEAGPTGFGLARAFERAGVRCLVVAPSKLERPGGDRVKTDRRDARRLARLLHIGELPGVRVPTVAEETARDLVRAREDTRGDLMRARHRVSKLLLRQGIVYCGGTAWTAVHETWLRSQHFEQAGLRVAYREALDAVMACADRRDRLDAAIAEMAYQQPWAETVARLECVRGIATLTAFGLTVEIGDWHRFTGATIGAYLGLVPSEFSTGASRSQGPITKAGNTHARRLLVEAAWHHRRPTSGPSRTLRARRAAVTPAIRARARAADARLHQRWVAMQARKKRPTVTAVAIARELAGWCWSLAVMDS

SEQ ID NO: 311042 - protein, 445 aa, unidentified
MFIQSQDDSQCCYSLFIKVVILMMKLKYSICCGLDVHKNVIVATIVTTNKDGISEYLQKSFSTINSDIQRFHNWLIENNCYHVCMESTGKYWIPIFNYLENDIDVCLTHPKYVKAIKGKKTDKKDSKWIADLYKFDLVRCSFIPPKDFRQLRELSRYRFKLVCMKSSEKNRIQNCMTISNVGIASVLSDPFGKTATEIISYLLEHTADSMDEKAVRKLIKKGAKSKSDEIIEAIKGYTIETDQAKKLELARGHLEYLDDMITQTEVELYVRIKPYYEFVEFVSTMPGMTELSSTIVLAETGVDMDIFDDAKHLCSWCGLSPANNESAGKKKSVRIAKAGDYLKPMMVQCALAAIKSKKQPYFAIKYGRIKKRRGHKKAIIAIARMMMVCIYHMVSEKKPFTPTDYEELMNPQNHVESVVLNENNVFAYLESLGYDSSKLVKRNDN

SEQ ID NO: 311043 - protein, 347 aa, unidentified
MAAISKDIIANIGIDLGKNTFHICAMNDKGTIVMRERLTRAALPKRLANIPPCLIGMEACAGAHHIGRQLVTLGHDVRLMPAKYVKPFLKGHKNDYRDAEAIAEAVQRPTMRFVHFKSDEQLDLQALHRVRSRLVGQRTAVINQIRAFLLEHGIAVRQGPGALRQALPSILARRTDVLSPRITHLIEDLTDDWRRFDQRIADVTREVEELAKQDEHCKGLMGVPGVGPITASAMVAAIGDGAAFSKGRDFAAWLGLVPKQISTGDRTILGGISRRGNRYLRTLFIQGARSVLQRSDGWEKKSFGRWLVAASKRLHKNVLAAALANKLARIAWTVLYRARGYDAAFEA

SEQ ID NO: 311044 - protein, 421 aa, unidentified
MKGSGVKKASTVKEGTLIVTVDIGMISNHGYCTAGDGRSTKTFKFDNTREGLDTFWSMILSSKARFRCTEVIVWYESTGPYGEPLIHYLKQKPVKIVQVNPMHTKKMKEINDNSPLKTDNKDPRVIADIIRLGHALSVVVPEGDVAYLRRLNNARERHVKERTGLLNQLQQFVFITFPEFARILKTIDSKTALYILTKYTTPARIGSANHEELGKEMRRQSMGKFSIEHAAALINFAKTTIGIQEGLQGLVMDIQHVLIQLDLLEGFIAAILDEMEITLNRIPYSRKLLSIKGFGIVTVAGLIGEIADFTKFTTQSEITKLAGLNLYEVSSGKRRGQLRISKRGRSLLRKVLYYAAIQTVRKNGIMHDYYQKLIGRGMKSIKALIAVSRKLLRIIFAMVRDNSEFIVNYEAQQKEVMREAA

SEQ ID NO: 311045 - protein, 340 aa, unidentified
MFYVGLDIHSPRISICVLNETGQLAHRSQVRSLEEMLRVLRGLPDRFEVCYEASCGYGHYHDVLQPLASRVLVAHPGQLRLIFRSKNKNDRNDAERLAKLLYLGETPTVHVPSLEVRTWRELINCRSLVIAKRTRAKNTLRALLRSAGVNPPKHPGLWTKAGFRWLRQLELPTFSQQLRRDLLLEEIETLVSQVRRIEQQLNRQARRTSAVAQLRTIPGVGARTAEAVAAFIDDPHRFPNAKAVGRYFGLVPCQDQSGGRNRLGHITREGAPVVRQLLAEAAWQALRRSPTVRAYFERTQREDPQRKKIALVATAHYLVRVMWAMLRHGTIWQERAVQAA

SEQ ID NO: 311046 - protein, 399 aa, unidentified
MFCGWDWGSTLHGVCLLDEDGTTIKTWMVKHTEEDLSAMFAELALLGDPALVPVAIERGEGLVVGLIAAAGHPVLMVEPAAFKAARPRWGAAGAKSDAADAFMLADYARTDGHRLRRVEPLAQATRELAALVRARTSLVEARTAASNQLWAVLAEHWPGAALVFQKLTSQIALAFLTDYPTPQAAAQMGEGRMRQFCRRHSYRGGKSPAELISRLRAAPASANPIAEIVLEAIVRSSVAQIGLLNVEITGLERQTADALAAHPKTTLLKALPRVANVSLAALIAEIGPLLERCENPEQVAAMCGAAPVTKASGKSRTVGFRYTANKPARVAITSFADNSRHSSAWAGAAYHRARARGARHPHAVRILARGWVRVIWACWTTDTPYDPSRHRGEQRLASA

SEQ ID NO: 311047 - protein, 354 aa, unidentified
MKITTTGIDLAKNVFQVHGVDEHGKAVLRKQLKRGQVMVFFAKLPPCLIGMEACASAHHWARQLQTLGHTVKLMAPQYVKPYVKANKHDVADAEAICEAVGRPNMRFVPIKTVEQQLILTVHRARQGFVKARTAQGNQIRGLLAEFGAVLPQGISHLAQRLPEIVDDGEHALPGSFRQLLARLHKHWQQLDRQVAELEREIQRWHQDSEASQRVAALPGVGALSASALVATIGNGRSFANGRQVAAWMGVVPKQASTGGKPRLLGMSKRGDSYLRTLFIHGARSVLQQVARHPERADPWLKQLLARRPKNVAAVALANKNARIAWALLAHGREYQRGFRPTPPRQLAAVTSTAA

SEQ ID NO: 311048 - protein, 414 aa, unidentified
MAQPVWAGVDAGKADHYCMVINDDAQRLLSQRVANDEAALLELIAAVTTLADGGEVTWAIDLNAGGAALLIALLIAAGQRLLYIPGRTVHHAAGSYRGEGKTDAKDAAIIADQARMRHDLQPLRAGDDIAVELRILTSRRSDLVADRTRAINRMRAQLLEYFPALERAFDYNKSRAALILLTGYQTPDALRSAGGARVAAFLRKRKARNADTVAATALQAANAQHSIVPGQQLAATVVARLAKEVMALDTEIGDTDAMIEERFRRHRHAEIILSMPGFGVILGAEFLAATGGDMAAFASADRLAGVAGLAPVPRDSGRISGNLKRPRRYDRRLLRACYLSALVSIRTDPSSRTYYDRKRTEGKRHTQAVLALPAAASTSCGPCCATTLSTTPQPLPRRLDNVIENLLRWLRCPS

SEQ ID NO: 311049 - protein, 334 aa, unidentified
MKSDVVHIGVDVSKEKLDVYVPARKEGLRPETKEVDNSTEGFRELRNLARKAGATVCVEPTGGYELELIAFMHKFDIPVAYADALRVRQFAKAEGNLSKNDAVDAALISRFADKIGVRVLEPTDIDAVELKRKTKFRQTMMDSRTALICRLETEIDADIRLMMKDQIRRLDKLIDRMERSCLDTVAKNEEMDALRERFTKVGGVGDLTAISILAGLPEIGKLSDEKLNRLVGISPEQRQSGAKEWQRRIWGGRKDVRNALYMAAVASIMWNSILSAYYRKKRAEGHPYKWAIVPTMRKLLSLLNQIARDPNFNPTPEPESTKRNARAGRKKNAA

SEQ ID NO: 311050 - protein, 332 aa, unidentified
MENVLKIVGADLSKKSIDLAIHARQEHLRIENNTEGFKKMVHWLKYHKLDPSQLTIVMEHTGLYSYCFEAFLHKQGYRFNKVNPLDIKFSIGLTRGKSDKMDAARIAKFGFEKQGRLKAETPVSQALQALKLLNTSRENLVRTRAGLKTSIEEFRNIGLKDSNPALHSQMQIVSQLDKQIERLDKEIRTVIQKEEKIEKTYTLLNSIKGVGPVVATNTIIKTHNFERFANARKFACYCGIAPFENTSGTSVCGRTRVNHMADKGMKTILDLAAKSAIGCDKELKEFYQKRVDQGKSKMSTINIIRNKIVGRMFAVIKRQTPFEQNYFKATWN

SEQ ID NO: 311051 - protein, 353 aa, unidentified
MANPMANLTIGVDLGDRYSELYVVDAAGACVETGRIRTTVAGLEQWFGGRPPARVVLEAGTHSPWASRVLQRLGHEVLVANPRKLRGLYENDSKDDRVDAEYLARVGRLDPALLKPITHRGEAAQADLAVLSSRDVLVRARTLLINHTRGVVKALGGRLPRCSAEAFARRVGPHVPPALRPALAPVLEQLQQLTTTIRGFDRAVEHRCAQSYPETARLRQVTGVGPVTALAYVVVLDDPTRFRRSRAVGAYLGLRPRRSQSGEQDPQLRITKAGNPFLRRLVVQAAHYILGPHGPDCDLRRHGERIAARGGKNAKKRAVIAVARKLAVLLHHLWISGAVYEPLRHRPALAQAS

SEQ ID NO: 311052 - protein, 338 aa, unidentified
MELYAGIDLHSNNSVVTVLDEQDRTVYAKRLPNDLGCIVAALRACAGEVRGVAVESTFNWYWLVDGLQAAGFTVHLVNTAAVKQYDGLKHGGDFSDARHLAHLLRLGILPVGYVYPRKERAVRDLLRKRSQLVRQRTTQILSIESLIARNLGARVSGNEVKRWDAKCIDAMELLDEHKQAAKANLVVMNCIDGQVVELERSILAKVKLREDFKGLKTVSGIGEILALTIALETGDIGRFAGPGNFASYARMVDSRRESNGKKKGVGNAKCGNKHLAWAFIEAAHFAVRFDATIKRWYQKKCASSLSVVAIKAVAHKLARACYHVIKDGEPFDAAKAFG

SEQ ID NO: 311053 - protein, 363 aa, unidentified
MIVIGTDTHKRTHTCGAVFAGTGQLAGELTAPAREPGFRQLLDWGRDLDGERIWAIEDCRHVSGSLERFLIASGERVVRVPPKLMGESRRGERTAGKSDPIDALAIARAALREGPETLPTAHLDEDALQVKLLLDHREDLVKARSEDQCRLRWHLHDLWPELEIPAGALDRMVWLERAARKLARAEQGARVRVARELVTEIRRRTRRAAELEREIGALVKAQAPALLELEGCGALTAAKLLAETAGAERLPSDAKFARLAGVAPIPASSGNRVRHRLDRGGNRQLNCALHRIAVTQGRCHAPAREYLTKKQAEGKTRIEALRCLKRHLARRVWKLLVISEREISMTTVDTQRGKPAPQFAVAA

SEQ ID NO: 311054 - protein, 349 aa, unidentified
MHSTTVAVDLAKNVFELAVADAEGKIKERLRLNRARFSAYFVQRPPCRVLLEACGSAHYWARCIAGHGHSVELFPAQYVRRYVRRSKTDRADAAALIEAARCGEIRAVPVKSVEQQQVLALHRLRSQWMTTRQRYINTLRALLRELGMAIPLGAQVARTQIAQKLAEPNNDLPAALQPLLARMLNDVDHLEERVQEVERQIAAVTREDQIVQHLRQIPGIGLLTSTALRATVGGIERFPSGRHLASWVGLTPREHSSGERRRLGSISKQGDAYLRTLLIHGARAALIAAHRRERERRPVDRLQQWALKCEHERGRNVATVALANRLARIAWATWAYGRDFDGNWPVIAH

SEQ ID NO: 311055 - protein, 362 aa, unidentified
MESTNTNNSFFEKVLLFIGIDVHKLKWVVTIRTYDLELKTFSMKPSAEELEKFLIKNYPGAEYRIVYECCFSGFWIYDYFYEKGYKIIVTPTNRIYKDGSTIKTDKIDSRKLAFQHSRGLLREVMPPAKRIREYKYIFRIYDKQKMRQGQILRQIKAFLEQKNHPFKWLKWNKGLLEKLKELKFEDKLFDMKFGNLLKEYEYVVEQIKDSEKIISELKESTTGGEELSRRIELIEKINGIGIISAVRMSVYLFDRKDRFESSEKLNHYLGLTPSERSSGEKITRGRSGMCGNRQLRSIIIQLAWMTVRKDGALLDKFDRVYKKSGSKQKAIVAVARKLMTKIFAVIQKEEEYRINIRSFKAA

SEQ ID NO: 311056 - protein, 317 aa, unidentified
MGIDVAKAELVIAARPSGDRWSVANDEHGIKTLVDRLTREPPALIVLEATGGYELLCVAALAAAALPVVVVNPRQVRDFAKATGQLAKTDRIDAALLALFAERVHPAVRPIADADAQELDALLTRRRQLLDMLQAERNRLGQVFGRGKPLVKKSLKQHIAFLERELRLADTDLGAMVRASPAWRERDDLLQSVPGVGRVLSLTMLAELPELGRLSRREIAKLVGVAPFSRDSGTQRGRRFVQGGRAAVRAVLYMGALVATRRNTVIRAFYLRLLAAGKPKKLALVACMRKLLTILNTIARTRQRWSVDHAIITLIPA

SEQ ID NO: 311057 - protein, 333 aa, unidentified
MMNMHLQGGVAKSDVQPNAGVDVSKHHLDVCCGGQERRVANDVQGWDELSAMLQAARVDLVVIEATGGYERGLVCALQGVGLCVARVNPRQARDFAKSMGVLAKTDQVDARTLRDFADVLARHAARQQYITPMLEQARQELAELMTRRRQLVEMRVAEHNRLEHAGARAARSIQSVLKLLDKQIAAVDQHIDDHMDRHFKAQRNLLDSVKGVGPVTVLTLTAALPELGRLGRRQIAKLVGVAPLADDSGSRSGKRRIWGGRAEVRAVVYMAAVVAMRHNPVIRVFYERLLEAGKPKKVAIVACMRKLLTILNAMLRDHATWDAARHMRTPLEA

SEQ ID NO: 311058 - protein, 401 aa, unidentified
MSSTVFVGLDWAVHTHAVCVIDAAGKVLDRFEVAHTREGLAQLLHRLARFGLRLHIAIERPSGLIVDALIDAGHQVFPIHPNAVKASRPRYRSHGGKSDTSDAYLLADLLRTDGHRWAPLSPQSDSIRALRALVRSRDDLVATRIALSNQLRSTLEAFWPGAACIFADITSPIALAFLQRYPCPAAAARLNQARLQRFCRCQHYSGRRSALELLARLHAAAASLTGPLASEAMAQVVGSLVRVLQPLVEQLSELTHRIERFIESLPDGQIIMSFPRAGHVCAAQILAELGDVRERFATVEQLAAEAGAVPVTYQSGKARSVTFRWACNHRLRQAVMCMADNSRQANAWARNIYTAARARGCAHPHAIRILARAWLRVLWRAWFDRKPYDPSLHLGALNLGG

SEQ ID NO: 311059 - protein, 336 aa, unidentified
MEPTTIAIDLAKRVFQIHYVEPKTGAIHSKALKRAQLVPFFANRPASRIVMEACGSAHHWARVLARSGHDVRLIAAQFVRPFVKSNKNDAADAAAIWEAAQRPGMRFVAVKTEDQQAMLAMHRIRQQLVRIRVMQVNQLRGLLYEFGVVLPQGRRASIEAAKVALASLANQLPAMLADSLQDQLSRLRELDEQIARVEQRILEWRRNDDACRRISEIPGVGVLTATAAVSVIGQAKTFRSGREFAAYLGLVPRQNSSGGKTKLCGISKRGDVYLRTLLIHGARSVIAASKHLPERVRALLMRRPTNVVAVALANKMARTIWALLAYGRTYQPTPAQ

SEQ ID NO: 311060 - protein, 416 aa, unidentified
MNAVGIDVSSRKSTVAVLRPLGEVVCLPFDVTHDIAGLASLAEKLKALDGETRVVMEHTGRYYEAVAKALHEAGFFVCAVNPLLIKEYGANSLRRVKTDKADAVKIARYALDNWADLRDFTPMDAIRYDLKTLNRQFQLASKQRTASANNLIALLEQSFPGIRKCFDSPVRSDGTQKWVDFAHSFWHVDCVRKQPFPAFCERYRKWCKRHAYLFKLSNAEEVYALAKRAVVLTPKSKVVKVLVQEAANQLISISRSVEVYRAEMDRLAAMLPEYPVVMAMYGVGKSYGPQLMAEIGDVRRFERKQALIAFAGIDPMPNQSGDKNVRSNKSSKRGSPYLRKTLFNVIRTYLQCAPQDEPVFQFLNRKRAEGKPFYVYMLAAANKFLRRYYAKLRDYFASLDTLQPVAPIPTILKATL

SEQ ID NO: 311061 - protein, 339 aa, unidentified
MAWTVAIGVDTHKEAHVAVACDRLGRQLDACELPAGAGGYARLLEWAEGLGSPAFAIEGCGSYGAGLARFLQASGAAVFECERPRRRERRRGKSDLIDAALAARRLVAGEGLARPRGGGRREDLRLLLLERRGLVQARTAALNQLQAVLVSAPERLRVRLGSLRGTRLARAAQALRAGSDEERVLVGVLRRLARRVQQLEAELAELEAELEAIVSELVPELLAECGVGPVCAAQLVASSGDPARMRSEAAFAALAGTSPVDASSGRQRRHRLNRGGDRQLNRTLHVIALARVRHDRETAAYHQRLLGSGKTDREARRCIKRALARHFYHRLSANSALTT

SEQ ID NO: 311062 - protein, 339 aa, unidentified
MSKLLKNFIGIDISKSYFDVALIVPMHPGQHIHYQFSQCKNGFKKMLQWLAQQDVFINEETIFCMEYTGIYNTGLVNYLVEQKAQLWVEMPLRIKRSCGFERGSNDKTSAVKIAAYAFRHQDQIHLWRPLDSSIEKVKNLIAQRDRIVNAITGLTVPVKEMLECGCVDEARQLEKLQKAPLKALQKSKDAIEQLILKIVEQDEHIYKKTKQVESIKGIGKVTAVTLLAYTKGFTTFSTAKQLACYCGVVPFSKTSGSSVRFKPTVSQHANKKLKKLLHLCALSAIKNDPEIKLYFERKVGEGKNKMCVINAVRNKLIHRVFAVTRDDRFFEENYVRKCA

SEQ ID NO: 311063 - protein, 424 aa, unidentified
MENTAARKRKQVPEGYLIIGIDPHKKRHAAVAITQDFTTRDKFKFDNTREGLETLLRRAKAEMVKSGCRGVMFAIETGGHYWRNVAYFLDEQGIPFRFINQFTLKRRREGKDLNRRKNDYRDSEVAAQLLCTGEFTESKLPQGVYAELRTAHNAYRRLVKERTRITNLVKGLLDGIFPEFTHVFKNPCALTALSVLSTCTIPRVIAGMTEEEFIATVESHHQGYRLMRKKLGALHSLTRTSIGIEAGARSVASEISFLVEKLGLIRQHIRIIEGALIRLVDKTEEGKYLISIRGLNYTAVAGLLAELGCFKSYRSAKQMIKMAGSNPTESESAGKRGAHTPMSKQGRPVLRYCAWTSVIPMLRLNEDFRAWAKRRRERPAHANPLNGREVVGAALNRLLRLAFAMVKNQTYYQAPEREPMLVAA

SEQ ID NO: 311064 - protein, 354 aa, unidentified
MTMLAATIDFVIGVDTHRDTHSAAAVDPTGGVVAQTRLVADAFGYRRLLTFARAHAPARRVWAIEGTGSFGAGLTTYLLEQGEWVVEIDRPARPARRNGAKSDGLDAVRAAREALSREHLAAPRRRGDREAMRVLVATRHGAVVARTKAICQLKALLVGAPEALRDQLRRHPTDEQLARCARLRTGPAQSVEHRATVRALRAAARRALFLEAEAADLESQLEELVVAACPVLLERPGVGVVTAAQVIVSWSHAGRLRSEAAFAMLGGAAPIEASSGKITRHRLNRGGDRQLNRALHTIVLSRLQHHPPTKVYAARRTAEGKSPREIKRCLKRAVARQLFRALEADARSKTSTDA

SEQ ID NO: 311065 - protein, 318 aa, unidentified
MNSHNKVESTEPVRYVSLDISKARLDYAIAGQPCRQVPNTAAGIATLITTIEPLPGVRVVCEATGGYERRLLEQLHQARVPVCRLQPGRVRHFARAEGTLAKTDRIDVGVIYRYACSMHPRVEKPLQPEVTALRELLDYRRQLVEQATQTGNRLETAGATLQALLQTQHEQQQAALEKADQLVAQHLRDHPALRTKAERMQQLQGVGPVLATTLLAYLPELGEEDDKRIAALVGVAPHAHDSGETSRPRHARGGRVEVRNVLYMAAVSASQHNPVLSLFYQRLKAAGKPANVCLLAVMRKMIVVLNRMLKDPKFTLVS

SEQ ID NO: 311066 - protein, 413 aa, unidentified
MHIVHRNCGGLDVHKETVVACIMWVLNGVDYKAIRTFGTTTRDLLALLDWLLSKGITHVAMEATGVFWKPVFNILEGHVGVLLANPAHIKQVPGRKSDVSDCEWICDLDQHGLIRASFIPDRPQRDLRDLTRHRAQLVGEKGRIANRIMKVLEDANIKLASVASDVLGVSGRAMIQSLIAGKLSPEQMAELSRGKMRVKRPQLTAALEGFVREHHQFMLQQLWNHLSFIEKAIASMESRIEEQIRPFSAARSLLMTIPGVKEQVAAALLAEIGSDMSVFPSAGHLASWAALCPGNNSSAGKRRSGKTRHGNHWLRRCLSQAAWAAAHTKNTYLSSQYHRLAGRRGKKRAIIAVAHSILIIAHEMLKNGECYRELGAEYLDRAQGERLKRSLVRRLSNLGYQVTLTPTLAPVPA

SEQ ID NO: 311067 - protein, 344 aa, unidentified
MLHAGLDLSRRRLDVCLLDEGGELVGETAVPPDADGLRGLAGRLAGRRVRAVIESMNGARFVHDALEEHGWEVLVADAQKVKGLAPLACKTDKIDARVLAVLSQRDLVPAIWLPDPSIRRERELARFRLHLVRHRTTLKNRVHATLITFGHPCPVSDLFGRAGRELLDRLAIPDPWRSNVDASLELIDDLELRIARLTVELKRHGADHRYIPLLVTAPGFGWINAFTVASEIGDIERFASPAKLCGYTGLCPRVIQSGATDRRGPISKHGPRYLRWGLFEAAMNACKHPLYAERYQRTKRRLGRQRGPKVAQIELSRKLTEAIWHMLTRNQPFAPAGAAYRLAA

SEQ ID NO: 311068 - protein, 417 aa, unidentified
MSREIESKEVRDELYYERCCGIDVHKKKIVACFRDGREMTIKEFETQSRELREMSKWLLEGNCQMVAMESTGSYWKPVYNILELLGLEVIVVNAQHLKHVPGRKTDVKDAEWIAKQLSAGNLRGSYIPDREQRELREVTRYRKSLTEERAREINRLSKMLEGANIKLTSVVRDVMGKSARNLLRTFVEGEDITEATIGGLIDKQLVGKAAMLVEAMDGEMSKVQRKLVKAVLEHIDDMARRIAELSKIIDDEMDKYDDCIKRIDTMDGIGEQSAQTILAEIGMDMNRFPTASHLAKWSGLCPGNNESAGKKKSGRVSKGNMTLKTTMIQCAQSAVLVKGTFFRAQYDRLVVRRGANRAKVAVAHSMIVAIWHILKYETEYKDLGGDYYNRFNKEKKIAMHLKKLTALGWTPPIQTPA

SEQ ID NO: 311069 - protein, 389 aa, unidentified
MNPTQGMDFTPGAGFMAASLELSKGSWKIALHDGKRDKPAIHTVSSEQAAKRLNDAAAVIEATKKKWGIPEYTRTVVSYEAGQDGFWIQRALSALGYEVLIVDPASIPVERQARRAKTDRLDAIKLVNCLLAWLRGERDRMHVIRVPGVEAEAQRHLARDRGELQKEIQQHRDRTRKLLRTVGCWDSVEGKFAKRLEQGQVRCQDGQPLPALMQARLERECARMALAETQLAALEKSMIEVLPEAVSGRIERLTLLKAIGQTGAFRLVLELYWRNFDNRRQVGSCVGLAPQPYDSGESRVDQGISKQGNRRVRALLIEMAWFWLRYQPDSALSKWFAQRTGGVGQNKRGKRIAIVAVARRLAIALWRYLKDGVIPEGAEFKVVAAPKAA

SEQ ID NO: 311070 - protein, 412 aa, unidentified
MDVIVERCAGLDVHRDSVVATVRVPGKGKSRRRRAQQTHTFGTTIAQLEQLGDWLEGFGVTLVGMEATGVYWKPVFTVLERRFECWLINAEHLHNVPGRKSDVIDSRWLCELLELGLVRPSFVPPPETRRLRDLTRLRSSQAEERTRAIQRLEKVLQDAGIKLTSVASKTYSVSARAMLEALLGGVSDPVCLAELAKGRLRAKIPQLTEALANRFDTAHHGVLVAGLLAHIDALDQAVATLDARIAAATDAELIELLSTIPGVKRRIAEVLIAECGLDMSVFGNAQRLVSWAAICPGTNQSGHRRRSGKTRHGNSWLRTALTQAAHAAARSKNTYLASHYWQIRGRRGDAKAIGATRHDILIAYYHITRDRVPFRELGPDWLARRHSVEHRTRRLVKQLEALGHTITLEAAA

SEQ ID NO: 311071 - protein, 318 aa, unidentified
MEIVVGIDVSKERLDVAILPQEEVFAVGNDHAGIDELVERLKGIGVDAIALEATGGYETLAVAGLSSAGLTVLVVNPAQVRAYAHAIGRRAKTDPIGRRAKTDPIDAAVIAAFVLATKPEIRPLRDAETQALSELVARRRQIVQMTVAEENRLRMALAKQAQKSIKRLLKALRRELESLDADLDSHIRKSPVWRVREALLTSVPGVGPTTARTLLAELPELGSLDRRQIAALAGLAPWTRQSGKWKGKSFIGGGRSKVRAVLFMAALVASRYNPDLKAFRDRLVAAGKPKIVATVATMRKLLTILNAIIRDGRPWQNA

SEQ ID NO: 311072 - protein, 423 aa, unidentified
MKSLITQNFAAYVGLDWADAKHDICLQAAGSDRREFACIAHQVECIDEWAKSLRQRFGGPIAIALELAKGPIVYALQKYDFLVLFPINPLTLAKYREAFRPSRAKDDPTDAELALDLLVRHPERFAPLQPQSVGMRTLISLTERRRELINDKTRVTNRLTNTLKQYYPQALEWFDQHDTVMFCDFLSRWPTPLQAKRAHQASIKAFHQAHNAHRPKLIADRLAAIKAAVPLTQDPGVVVPCRLHAMVLVEQLRLALQAIEQFDRHIAELAPTLPDFRLFEGLPGAGPHLAPRLLVAFGEDRERFQRAEELQKYAGIAPVTERSGKKSWVHWRWQCPTFLRQTFVEWAGQTINKSFWAGAYYYQQRAKGSTYQAAVRALAFKWIRILYCCWKSRTPYDETKYLNALKKRRSSLLNNLVPDPLNA

SEQ ID NO: 311073 - protein, 366 aa, unidentified
MKKISTVAKRGNEIFEEPKLTIGLDLGDRTSHYGILDEAGNVILEHNLPTTPKGIQQVFSRIPRSRIALETGTHSSWVSRQLTELGHEVIMAHARNVRLGGESSRKDDQFDARTLARLARIDPDLLGPVRHRSAKAQIHLTVIRARAGLVSARTALVNTARGLAKSYGERLRKCGTGQVGRALAGGLSAALRDALDPLLQGIESLNERIAEYDRRIEQIAKEVYPEVALLKQVKGVGTLIALTYVLTLDDPHRLRRSRDAGCFLGLRPGRRNSGMSEPQMHISKEGDRYLRTLMVQGAHYILGPFGEDSDLRRWGLKLAERGGKNAKKRAVIAVARKLAVLLHKLWVSGEVYEPLRNNHKVVSAVA

SEQ ID NO: 311074 - protein, 341 aa, unidentified
MSSVTLIGIDIGKHTFHLHAQDKFGKEVMRKKCSRQQMMRFLANHPPCTVVMEACAGSHCLAREIKAMDHEAKLISPQFVKPFVKSNKNDFVDAQAICEAASRPSMRFVTPKSPEQQTLSVSHRMRESLIRDRTKTVNQMHGFLLEFGVSLPTGLAVVKRLASVLEEHDLPIRLVALLQRLHDHFVYLSEQIKVLDKELESQLADDDLGSRLRSMPCVGPITASLLAVEMGDARQYGSSRDFAASVGLVPRQYSTGGRPALLGISKRGDKNLRHLLVLCARVYMLRLKYQKGPLADWVRSLLARRHSNVVACALANKLARIAWAIATRHTQYKTEPDAINA

SEQ ID NO: 311075 - protein, 357 aa, unidentified
MKKGYQKDKTLARGKNVFIGMDVHKESWHVSARIDGEEVFHVNMPSAYGSLQKLLERFKDCTIKVAYEAGPCGFWLYDKLIADGIETIVVPPSLIPLESGNRVKTDKRDSRKLAQLLEKGMLKRVHVLSEEERLHREILRTRRQLIEHRSDVARQIKSKLLFHGIEFPGEAGSGWNRQFIRWLRELGATHQVLSLSLGFLIDLWEHLTDQIKKITKDVFLLAKNKKYAQSISLLKTIPGIGRLVATEILVELQDIKRFKSSENIASYMGLTPSEYSTGQYTRQGRITRCGNARVRSCLVESSWVLIYRDPAMKEKYEKLKSRKGAKRAIVAIARNLIIRIRRMLLSNEPYMCRLKTS

SEQ ID NO: 311076 - protein, 347 aa, unidentified
MGKFMFYVGIDVSRNKLDFAILRSQKILYHKEIANTVDSVQALLSELQTVSGFALKKTVFGIEHTGIYTSHLLTVLKKAKANVVLEDALEIRNSLGKTRGKYDKLDAIRIATYLFKCKEDLTLWQPRRQVIEDLHHLSTLRSRLIGMSNAMKMPLKELKAFLRPELSDKHDLLCYGTMQSLKKDIESIDALIINTVKGDHRISRLYDIITSIPNVGPVTALLMIVTTNEFKDITDPKKYASYAGIAPFKKESGIVKGKSMVSHLANKRAKAILHIIAMSSISTKSELRDYYIRKTEVDGKPKMAVLNAIRNKLILRIFACVHQDRLYEKNYDRSNYQNDNKSTKPFI

SEQ ID NO: 311077 - protein, 393 aa, unidentified
MICVGIDVAKDKHDCFILNSEGEVLADVFTIQNNAEGFDALLQTIHRCAHAEDKIKVGLEATGHYSYNILGFLLDKGLATYVINPLHTNLYRKSLSLRKTKTDRVDARTIAAMLMSDVDLKSYTDTAYHNEELKSLTRYRFDKVRERAKLKQSVSRLVTILFPELEKLVPTLHMASVYALLSEFPGAKQVAGAHLTHLKAVLSDASKGRYGRDMATTLRDAARCSVGSVMPAKSLELRHTIRLIRELDAEIEDIEAAIQSMMDEIQSPITTIPGIGVRMGAMILAEIGDFSHFDSPDKILAYAGMSPSTYQSGQLSLSGTYSHMEKRGSRYLRYALYNATKYVCHWDPTFAAYLAKKRAEGKHYNVALSHAAKKLVRLIYAMEKSGMPYNSAA

SEQ ID NO: 311078 - protein, 369 aa, unidentified
MTDVTLFVGLDVHKKTISVALVDAAASATVRFYGTIVNTPDALLGLSKKLSKDGQALHFCYEAGPCGYGVQRQLTRLGHRCDVVAPALIPRKVGDKVKTDRRDAMMLAQTLRAGQLTAVWVPDEAHEAMRDLVRLRAQAMRDLRKTRQQLLSFLLRHGLVSPYGHWTKMHRRWLGELVFAHPAQHLAHEEMLQRIERAEALCDRLKGAILDLVPQWSLAPVVQAIQALRGVSLIVASVIVAEVGCFTRFDNPRQLMAYLGLNPSEHSSGSTIRRGAITKTGNALARTCLVEAAWTYRFPARVTQIIRDRLAGLPEPIRNVAWKSQVRLSARYRKLVAAGKPTPKVVVAVARELVGFIWAIARMVEPKFA

SEQ ID NO: 311079 - protein, 341 aa, unidentified
MELFVGLDVSIRTTSVCVMEASGKLIRESKVESEPDAIGALLHAIGGPYKRVGLEAGPLSQWLYSGLAAAGYPVICVETRHMKAALSAQINKTDRNDARGIAQMMRVGLFKPVHVKTVRSQEIRMLLTARKFVQTKILDAENNLRGLLRNFGLKVGAVTRLQFERRIIELLEQSPHLRLVIDPLLEVRRVLRKQFQHLQKAMERLAESDDTCKLLMTAPGVGPLVALSFRAGVDEPARFGRSRSVPAHFGLTPSRYQSGEIDRDRGISKCGDAGIRWALVEAAGILLRISKRSSPLKAWGLSVARRRDMAKATVAVARRLAIILHRMWVDNTPYRWEAKAA

SEQ ID NO: 311080 - protein, 338 aa, unidentified
MQTYAGIDLHSSNNFIGVINAQDKVLYGKRHSNRLDEVLRTLEPFKDSLQGVVVESTFNWYWLVDGLQEHGYSVHLANPSAIQQYEGLKHTDDKWDSYWLAHMYRLGILPEGYIYPKAQRAVRDLLRRRLLFVRQRTSHILSLQSMISRNLGLKMSNNEIKKLKPEDAQELFDCSNLAFMAHNSIAAKEFLKKIILDIEKNVKSQVKVREEFLKLLTIPGIGNILGLTIMLEVGDIGRFPQVGDYSSYCRCVESKRISNGKKKGENNKKNGNKYLAWAYVEAAQFCRRYCVKAQSFYQSKAAKTKSVVAVKALSNKLARASYYIMRDQVDFDENKLFC

SEQ ID NO: 311081 - protein, 366 aa, unidentified
MKKDSIRMKKGKGDWEGKKLTIGMDLGDRTSRYCVLGEEGEVLLEASVATTQKGLSEGFSAVPPCRTAIETGQHSPWVSRHLSGLGHEVIVAHARNVRLIGESTRKDDRLDAKTLARLARIDPALLSPVRHRSAEAQAHLTRIRARAVLVGARTALVNAIRGLTKAYGERLRKCHPEQIRKELATELSSELRTALEPLFQEVQSLTERIQHYDHEIEKIAKQHYPEVAQLQQVNGVGTLIALTYVLTVDDPHRFGKSRDLGCYIGLRPGRRNSGNSQPQLHISKEGNRYLRTMMVQGAHYILGPFGKDSDLRRWGLKLAQRGGRNAKKRAVVAVARKLAVLLHKLWVSGEVYEPLRNHREEKRTAA

SEQ ID NO: 311082 - protein, 311 aa, unidentified
MNSSERNVGIDVGKDTLDVYVYETDAHWQDANTDEGARRLVKRLKRFRLTRVLVEATGGYERRFVESAFDNDIPVIIVQPIQVRQFARAQGVFAKTDKMDARLIAEYGVKLQPEVRVLPSKKVRRVKDLLARKRQLTQMRTMEMNRHHKAAKNLGSSHRRLIKWLDNEIESVSVKLTKEASGVDAWQRTHEIIISVPGIGDGVAYTLLGELPELGQLNNRQIAALSGLAPFNRDSGKMKGKRRIRGGRAPIRTVLFMAMLSAIQHNPVIKRFYEKLIDQGKHKKVAITACMRKVITILNTMVRNDQEWQMN

SEQ ID NO: 311083 - protein, 384 aa, unidentified
MQASSVATPTVEHCGTVCIAIELSQKSWLVTLHSPNRDRISRHKLDGGDHAGLLALINRERDRASRTAGGVPAVASCYEAGYDGFWLHRLLLAAGITNYVFDPSSIAVDQRARRVKTDRIDGERMLRTLMAYLRGEPRVVRIVRVPTPEQEDARRASRERGRLTKEQTAHTTRIKALLRLLGMAVGNPRRHDWLTWLVKQRDWQGQAVPPQIMAEIKREHARLMLVREQLDALAQAPADLTPAAAQMAQRSELLLRLKSLGPAFATTLTNEVFYKDFRNRREVASYFGLAPSPWQSGGIDRDQGISKAGNPRARCAAIEMAWLWLRHQPDSKLTQEYRRRTLNASKRIKRVAIVALARKLIVALWRYLTTGLVPEGAMLKTAEV

SEQ ID NO: 311084 - protein, 385 aa, unidentified
MQKNDLSRSLVAFEQNSTLVAVVELSLKTWLVCGLVPGLTRQPLKKQGADPGALAALLDRWRNEAIKTGRKITRTVVAFEAGRDGFWLARWLLAHGIEASVIHPNSIPVSREHRRAKTDRLDTQLLLRALLGWLRGEAKHCSMAAIPTLAEEDARRPNRAHEMLVGECTRIVSRMKAILIRFGVRNFNVKLSKAAQRLEALRGPEGQLPPNTLAELRREMARLAFVKKQIKEIENARLTELKQAPREGTHPMLLMLARVKCIGVETADMLVHEALSRNLRDQRAVARYGGITGAPDESGSKRREKGLARAGNARVRRGMIQLAWRWLMFQKDSALAQWFQARTAGAKPGVRKSMIVALARKLLIALWRFVTTGEVPAGAVLRPAT

SEQ ID NO: 311085 - protein, 352 aa, unidentified
MDKGNKLDFTGQRIYVGMDIHKKSWSVSIYTEHFEHKTFTQPPEVKKLTNYLQRNFPGATYHCVYEAGFSGFWIHDLLKEEGIHCMVVNPADVPTKHKEKAGKADKVDCRKLARNLRSGDIKGIYIPSRVEAEDRHLIRTRQSMVRKQTRCKNQIKSILFFYGILIPEESHWSRKFINWIETIRMERASGDLAFKVHLEELKYLRQIIAGLNKAIRALSRTDTYRDKVFFLRTVPGISTLTAMTLLTELCDISRFSSLDKLASYAGLVPDIKSSGETQHTSGITHRRNATLRTVLIEASWVAARKDPALIMAFNKFSLRMKKTAAIVHIARKLLNRVRFVLMNQERYVPAVV

SEQ ID NO: 311086 - protein, 339 aa, unidentified
MQIATVGLDLAKNIFQVHGITEIGEVAFNRALRRAQVLPFFERLEPCLVGIEACGTSHNWARELIKLGHTVKLIPPIYVKPYVKRGKSDAVDAEAICEAVTRPTMRFVAVKTPEQQAILSLHRTRDLIVRQRTQTINMLRAQLAEFGFVFPQGVGHATQFAKRVIDGVRLDIPEVAGDVIAQLSEQLLYLHGKVGWYSREMACVAKREKRVALLQTIPGIGPITASAIVATVGTGEQFKNGREFAAWLGLTPLNRSSGGKERLGRISKMGDRYIRRLLVIGMMSRMRQIIQNPDRYDPWFADILVRKPGKLAAVAMANKTARIVWAVLISNEPYKVRTA

SEQ ID NO: 311087 - protein, 409 aa, unidentified
MTYFVGLDWATREHAVCAIDQCGTVVTRFTATHGADGLTDLVARLTKLAPPGELRVAIERPSGILVDTLVESGFAVVPIHPNAVKASRARYSAAQAKTDLGDAYLLADVLRTDGHRFRTLTPLSDETKALRGLSRLRDDLVGQRVALANQLRGLLDEFWPGGAAIFADVDSPIALDFLDHYPTPQAAASLGEKSMAAFMAQHAYCGRRSARELLERLRAAPRSIAGKLEAEAKGECVRALVAVLRPLVAQIAGLTAAVELAVEAHPDAKVVTPLFRRGRVCAAQLLVELGDDRGRFVSADHLAAEGGVAPVTRESGKHRAVTFRWACNMRLRAALTTLADSTRHTSPWARAIYQRARDRGCDHAHAIRILARAWCRVLWHCWQQRVAYDPTKHRAAHQLTLRSVDQEAA

SEQ ID NO: 311088 - protein, 387 aa, unidentified
MAEPSFEVILGVDTHAQVHVAAVLDHLGRLQATLTIPATPAGYRQLLTWAAQHGHLTRAGVEGTGTYGAGLTRCLTRAGVKVIEVDRPNRQRRRRRGKSDPTDAEAAARAVLAGEATATPKTRSGIVESIRVLRVARSSAVKARTQTANQLRDLLVTAPDTLRAQLYPLPTAKRVAQLAAQHPGHGADPAVATRRALWYLARRYQTFTAELDALNADLAVLTRRAAPRLLARYGVGVETAGSLLVTAGDNPDRLGSDAALAALCGASPVEASSGKTVRHRLNRGGDRQANNALWVIALTRLRDDPRTLVYAERRTKQGKTTKEIMRCLKRSIARELFPLLKADLHDACQLSLTQELRSVALVPARPRDEAAVLSARVIGSTPAKLRG

SEQ ID NO: 311089 - protein, 285 aa, unidentified
MPVDHPSVPSPYRLFAGIDIAATTFTAVWIAPGATPSRALTLDQTPHGFATLQGRLLAAGHARGEILVVMEATGSYWVALATTLAQAGFAVAVINPDQAHNFAKALLQRAKTDAIDARTLARLGTTLQPTPWTPPPAIYAELPQRLAERDALLDRRQQVRNQLHALGQLPVVLPAVRARMEELIATFSAQIAVIEREVERVLPQDAEWAASATLLLSITGIGVLTAAWLLVTTLNFTIGSSAEALTAYAGLAPHPKESGTSVRGRERIGHGGNKRLRTALYMGSE

SEQ ID NO: 311090 - protein, 393 aa, unidentified
MRKNSIARLQVSKSQIRQLAAKQRLTVGLDLGDGDSRYCMLDQTGEKASEGKVATTKVGLNAVFGKMAASRIALEVGTHSPWVSRQLAELGHEVIVANPRKVKLITQSVKKNDRLDAEQLARLARVDPKLLSPIRHRGAEAQADLAVIRARDGLVACRTEAINMARGLAKPMGERLKKCDADSVKESLAEGLSGATRNVIGPLLKCVEEITRQILAYDKQIQEIEKRYPETTVLKQVYGVGTLVSLTLILTIEDADRFAHSREVGPYLGLTRKLRDSGASQPELGISKAGDELLRRLLVQSAHCVLRRGAPDSDLRAWGLKLQAGGGKRGRKKKAAVAVARKLAVLLHRLWVTGEVYDPHYNRKAVAAAHRNEVTAAQRGKCTAGRGKKKSAA

SEQ ID NO: 311091 - protein, 391 aa, unidentified
MTILVGIDVAKDKHDCFIMNSEGEVLAKPFTILNNKEGFNFLYEKIQSVSSSDNIKVGLEATGHYSYNIIGFLLNKGLATFILNPLHTNLYRKSLSLRKTKTDKIDSKTIAMMLLSDVSLKSYSDISYHNEDLKSLTRYRFSKVEERAKLKTSLSRLAQILFPELEKLVPTLHMTSIYQLLEEFPSASAIASAHLTRLTNLLSKASKGHYNRETAIKIREAAKNSIGSNMPAKSLELKHTIKLIRALTIDIGEIEAEISKMMDKIASPITTIPGIGRNMGAMIISEIGDFSRFSTPDKILAYAGFSPSIYQSGKLDNCYAHMEKRGSRYLRYALFHAAKLVCHWDKTFADYLAKKRAEGKHYYVAISHAVKKLVRVIFHIEKTKQAFLKAS

SEQ ID NO: 311092 - protein, 366 aa, unidentified
MQNKVQSQPTAPTHSTAHASAIAWLGLDAHAQNCVLAHLEDDGTQRQFWRIPTQPEKLVAQVRAIAAPDKRLALEESNLARWLWQLLRPHVQQLVVCDARHNKLISAHPNKKDARDAFSLARLFRLHELKPVWQVPTEERARFKTAAQSYEAAVLRQTQLKQQIKSTFQHWGLFPTGTRLYAPEGRGAWLKKLPHADLRAQVELLYGAMEQAVQTQHAARRLMVRLGKSFSEVKLLSTAPGLGVIGAHLFAAYICDPARFTDPAQLIRYCRLGIRDRSSDDKPLGYEQLDREGHGVLKAISYRAWLQAMKRRDTSVHRFFLWSKQHTGSATHARLNTQRKLLRAWWTLWMEGKEWDEARFFPTPHK

SEQ ID NO: 311093 - protein, 387 aa, unidentified
MKQYVALDCSLKQISVCVMTEQRRIVTQAVIAADAGSIAEFVRSHAPEAEVIGLESGPTSPWLFHALRAEGLPVVVIDARHAKAVLSLRINKTDRNDAVGLAELLVSGWYKPVTVKSLESHRIRTVLTNRALLVGIRQDLENQVRSVLKTFGFVLGKGRGTFVDRVSELLEGKRLLLRLVRPLLRAWEAIRGQLQTVDKEALTIAAKDETCRRLMTVPGVGAITALAFKTTIDTPWRFSSSSKVGAYLGLTPRRYASGETDRAGRISKCGDGLVRTYLVEAAGVLMTRSKAQSDLKDWGVRLAKRASPARLVSPSPASWRSFCCGSGLTTACSGRRVPLSRPDRAFYQFRIPRSEVPAGTVTQARSCRSLGGRPRQTRMRLWTRLVP

SEQ ID NO: 311094 - protein, 279 aa, unidentified
MGQASTIGLDIAKRVFQAHGADATGRVVFRKRLVRAKVLEFFAGQPPCLVALEACGGAHYWARELGKLGHTVRLIPPAYVKPFVKRQKNDVADAEAICEAAQRPGMRFVPVKDEAQQANTVVFRARDLLVRQRTQCINALRGHLAEYGHVVPQGPAHVDSLVALVEDPKSSVPESARGILQVLIRMLNALEEQLKELDGEIARRAKADPVARRLMTIPGIGPIAATAITALVPAPEGFRAGRDFAAWLGLTPLQKSTGGKHKLGAISKWSCFGKVESSR

SEQ ID NO: 311095 - protein, 339 aa, unidentified
MLIIGCDYHPSVQQIAWVDTETGECGERRLMHRAEAEQFYREVKGKQVRVGMEATGHSRWFERLLAELNFELWVGDPAQIRVKQVRKQKNDRRDAEHILKLMLKDDFPRIWAPTPENRDLRQLVLHRHRLVGMRTRVMNQLQAVAMNEGIRRKRGWWSEKGREQLKSLSLMPWTERRRQELLELLDQFDPSIDELSQAIKQEAERMPEVKRLMTHPGVGPITALAFVLVIGTPDRFGCGKEVASYLGLIPCEDSSSDRWRLGHITKQGNKLLRFLLGQAGQSVASCEEQWHRQYAHLTIRRNKPIAKVAMARKLAVRLFWMWRKGWNYEQLKQFGSHVG

SEQ ID NO: 311096 - protein, 328 aa, unidentified
MDAPASARIFTSMSQTNKNIIYAGIDVAKRTLALDGPGGRCLLANELGGHRGVVKLLGKSIEPVHVIVEASGGYEQGLVRALHEAQLRVSVVEPGRVRAFARAKGLRAKTDPIDAGVLRAFGEAIQPEPTLPPSQEQLRLGELVTRRSQLIDSLVAESNRSAHYRDALLRHQATAYRRLLQRQIEQCEETIAQLIAADPAMEQRSLRLQQVKGVGAITAAILLADMPELGSLRDESAAALAGVAPYNDDSGPIRGIRRIRGGRASVRRALYMAALSAVRHDPVFQRFYQRLRSAGKKPLVALVAVMRKLIILLNRLLKNPALVLQHAT

SEQ ID NO: 311097 - protein, 368 aa, unidentified
MDRKRTSVGLDVHARSVVACGLDGVTGELFERRLTPDQDELLGWLRRLPGPVEVVYEAGPTGFGLARFLAEQHVLCRVAAPSRLQRPSGDRVKTDKRDARHLARLLHLDEIVSVTVPGRGQEAARDLVRAREDVRRDLLSARHRLSKLLLRHGIVYYGGKPWTANHDRWLRARRRLAVFDQPGLGLAYDAAYDAAYDTVLATLARRDRLDTAIAEMAAYDSYAPVVTRLGCLRGVSTLTAFGLAVEIGDGQRLTGRSIGAYLGLVPSESSSGQSRQLGSITKTGNAHARRLLIEAAWHHRRPIQPSAVLRRRQDKAGAAARDRGQRANRRLHTRWARFDARHKLPVVANTAIARELAGWCWSLAVLDD

SEQ ID NO: 311098 - protein, 325 aa, unidentified
MTAIVGIDIAKDKFDVCLLNEAGKRQQATFANSKAGINQLHQWLKKQGAKQAQVCLEATGIYGDLVAETLYSRNYQVSVVNPARIKAYGESQMRRNKTDGLDAALIADFCRTQQPNPWTPPPPELKELRALIRHLDDLKQEKLRAHNRLEVQDSSQAVSQHLQAQIRLLEGQIQHTLQLIHDHIDRYPDLKRQRDLLDSIPGIGDLTASYLLAELGDISRFQDVGEVVAFVGLNPCLHQSGKRKATHGISRMGRAALRAALYMPAIVAKRCNPRLATWANQLAQRGLTGKQVIVALMRKLIHLAYGILKSGRAFDPHFADLQLAS

SEQ ID NO: 311099 - protein, 447 aa, unidentified
MKVRYERVAGIDVHKDMVKVAIRSPGEGGERKTEVLEFRAFYGMLQAMARLLRERGVTHVAMEASGVYTEPVYHALCEQDFEQVLVVNPQHVKALKGHKTDARDCRRIAELLECGLLRGSYVPSAEQKEMRDLTRYRKKTVQARTSEIQRLQKALESAGVKLGSVVSDVTGKSATAMIQALIDGERRTEVMADLALRSLRTAGKQADLKMALAGRFTEHHAMLCRMHRDQIKLADHAIARLDEQIAAMAGRWQRELDLLLSIPGFGVVVAAIWLAEIGPCPHQWFDSHGKLASWVTLCPGNHISAKKRKHGKTGDAGTYIKPSLIEAAWGAIRGKGRLQSRYRRLVRRFGGDKNPGAKKKAITAIAHTLLKIGYQVLKTGTPYQEPGADFYTRRESPARQQAWLERRLQQLYPGRTVTVTIGPPPGSPPHGNPPPGAPVQAALPAHH

SEQ ID NO: 311100 - protein, 324 aa, unidentified
MEENKQKVTIGIDVSKNKLDIYYLPTKEHKVIVNQPRQIGQWLRTTLRQYTIEIVALEPTGGYEKPLLQQLLKRELTIEYVHPNRLNNFQAVNGEVAKTDKIASSQLARYAADPQYRHNLIKQGHVERTCHGELSSRIKQLKQMIQMEKNRLEKPLYNAQVKKSIRKHIKHLEKELKHLENQAEALIKEDATLNATYELIQTFKGAGKTTAQTLILDVPELGTLSKAKISSLIGLAPINRDSGKKQGQRYIQGGRGHVRRVLYMTAMVAIRYNKTMRVFYDRMRSTGKPFKVAIVAVMRKLLCTLNAMVRDKLPWLEDKELAAQ

SEQ ID NO: 311101 - protein, 427 aa, unidentified
MEDIEMDSDANEVEYAAFIGLDWGSEKHSIAFQAAGSRQIDTFTLKQTPEDLHGWILKLRDKFGGRPVALAIEQTKGAVIHALLGCDFVHVFRINPKSLADYRKAFSPGGAKDDPTDAEYLLEWVKLHRDRIKPWMPDDAQTRALQRLVEFRREVVNQRTAFTNQLTQALKEYFPQALDWAGDLDRVMACDFLSKWPTLEKIKNARPDTIRTFYRQHGCRSCEGIEERVKAIYTAQPLTQDPAVNAISLCLVQTIIRTLRPTIESIHCLDKEIEERFHAHPDMGIFDSFPGAGPALAPRLLAAMGTDRSRFESASEVQKYSGIAPVTERSGKHVWVHRRFACPKFLRQTFHEFAGQSIKSCAWARGYYDMKRAVGIGHHAAVRTLAYKWIRIIFRCWQDRAPYNEEIYFQSLRRRGSAVLDFIAKAA

SEQ ID NO: 311102 - protein, 424 aa, unidentified
MTQNQSYAAFIGLDKSDKKINVSLQQCAKNKMERSIVKGGAEALHAWVAALCARFPGQAVAICLEQPASGLIHALMSYDFIVLFPINPMTLARYREAFTPSRAKDDPTDADFLCELVALHREQLKAWQPDDVCTRKLRHLTLSRRRSVNMRTRFSNQLKALLKTYFPQALELCGDDLTTPMACALLQKWPSLQQLKKSRAETIRRFYYAQNARRGDVIEKRLALIAQAVALTNDPALIESSIITVQALTLGLRAAHTAISCYDREIARTFAQHPDASLFAALPGSGTAYSARLLAAFGSRRELFESAEAMLNFSGVAPVLKRSGQATITHRRYARPLFVHQSFIEYANESIRHSLWARAFYQMHKAAQKSHWVIIRALAYKWIRILFRCWQQRMPYDEIHYLKSLQKSHSSLLPYLAQPVIQTA

SEQ ID NO: 311103 - protein, 496 aa, unidentified
MSAFLRRSGQNPHRWATKGMKSKKELLAKKKHIKRKSAKAKHNRVLGIHNPHAAGADIGATEIYIAVPPDRLEMNVRCFGTFTQDLRAIVQWLREYKVTSVAMESTGVYWIPLYELLEQEGFEIYLVNARHVKNVPGRKSDVQDCQWLQYLHSVGLLRGSYRPAQDICAMRAISRYRDNLLHFGAQHLQHMQAALDQMNLRLHHVIADLSGLTGMAIIEAILAGERDPRQLAKLRDPRIKASEETIAKALEGNWRVEHLFVLGQALQSWKQVQQQLGQCDQKLEELSSQLEGKIDLANSPLPPSAKYCGREPRSKNQPNGRWREELYRHFGVDLTEVPGLSLGVVQTLFVELGADLSAFPTPRHFAAWMGLCPDNAITGGKVIRRGTRRNRQRIRLALRLAATSLHHNKTQLGECFRRLRARLGAPKAITAMAHKLARIIWHLVTHRVGYDESIFAEREEQLLRRKQRQLRNLAHSLGFTLVPNPRPAATSNAEVS

SEQ ID NO: 311104 - protein, 348 aa, unidentified
MRFYTQQHQFYCGIDLHARTMYLCILNQDGEILVHRNMPAGPEPFLKAVAPYREDLVVCVECIFTWYWLADLCAREGIPFVLGHALYMKAIHGGKAKNDKIDSQKIAVLLRGGMLPQAYVYPAAMRATRDLLRRRMHLMRKRAELLAHVQNTNSQYNLPGIGKNIAYKANRDGIAERFPDPAVQKSIEVDLALIGHYDHLLNDVELSIVHTAKQHDPQTLSRLQSVPGIGKILSLVLLYEIPTIDRFPRVQDFVSYCRLVKCAKESAGKRYGTSGAKIGNAYLKWAFSEAAVLFLRTNPAGQKYLARLEKKHGQGKALTVLAQKLARAVYYMLRRKTAFDMSMFLQSS

SEQ ID NO: 311105 - protein, 376 aa, unidentified
MKKTVRFLGLDVHAETIAVAVAEADGTVRSLGTIANREEAVRKLVKKLGPVEHLRACYEAGPTGYVLYWQLTQLGVECIVIAPSLVPVKAGDRVKTDRRDAEKLARSFRSGDLTAVWVPDAGSEALRDLVRAREAAKQDQLRARHRLNKFLLRAGRHPAPGVKAWTLPYMAWVRALRFEQPAQESTRLDYLHEVEHMGERVKRLEQAIRDAVKLAAPVIQTVIAGLQALRGVAELSAVTIVSELGSLTRFAGPRQLMAYSGTVPSEDSSGKRTRRGGITKTGNAHLRRIAVESAWSYRLRPGVGPELRRRQQGVPEEIKEIAWKAQNRLHKRYVKLSLAGKDQRKIVTAVGRELLGFIWAIGVRAEAAGRQMAAAG

SEQ ID NO: 311106 - protein, 345 aa, unidentified
MSYYAGIDVSLEQSSVCVLDGEGKIIREAKVASEPEALIAWFGSLGLAMTRIGLEAGPLSQWLFAAMKQAGLPVELLETRHVRNAFKTMPVKTDRKDARGIAELMRMGWFRPVHCKSISAQETRAILTTRTLIEAKLRDVEMSLRGVLRGFGLKVGKTTPTNFAERIKELVSEHSNLQVIADALLAVREVLLREFRSFEKRVRTMARHDERARLLMTTTGVGAVISLTYAAAIDDPARFKNSKQVGAHYGITPKRYQSGEIDYSGRISKIGDKSVRTALYQAAHIILTRPVKASALKSWAMQLAKRIGMAKAKVALARKLAVILHRMLVEGKPFDHKLPNQVAAA

SEQ ID NO: 311107 - protein, 447 aa, unidentified
MVPDGRQVEVDEHEQIVERVAAIDVAKASGMVCTRVPHPTTAGKRLTRVWEVAATTNAIIELADQLAGQGIERVVVESTSDYWRGFVYLLEARGLSVWLVNARDVKQVPGRPKTDKLDAVWLAKLNERGMLRPSFIPPAEIRQLRDYTRLRSDLTQERARHVQRLEKLLEDALIKLSTVATDIMGASGRDMVEALIAGQRDPKVLAELARGRMRGKRAALVQALTGRFNDHHAELARMLLDQIDALGVQIDRLTSRIEELIGAIPAAQPPSEKASHTGEDTYQPALPAVSRLDEVPGIGVKAAQVIIAEVGLDIGQFPTAAHLVSWARLSPRTIQSGAKQRTGATGKGNPYLKGMLGEAAAAAAKTDTFLGERYRRLVKRRGKLKALVAVARSILVIVWHLLADPTARYHDLGSDFYTSRIDTDRKTRTHIRQLQALGFTVTLTPAA

SEQ ID NO: 311108 - protein, 356 aa, unidentified
MDSIASAAPEGTIVIGVDTHKHLHVAVALDELGARLGELTISADSAGYAALAGWVEGLGRPREFGIEGTGSYGVGLASFLRRRGHAVIEVNRGDRRGRRANGKSDTLDAEAAARAVLAGEARAVPKSADGACEMIRQVKIARDTAVKARTQALITLKCIVVNAPAELREQLARLSDKKLIDRCAALRPGPIDSTTASAKHTLRALARRWLTVAEEIQGHDRVLEQLTAAVAPSLRDGFGIGADTAAEMLIVFGDNPERIRSEAAFAKLCGVAPIPASSGKTTRHRLARGGHRQANSALYRVVIVRMRFHQPTIDYVTRRSQEGRSKREIIRCLKRFLAREIYRRVMADSALIAAST

SEQ ID NO: 311109 - protein, 357 aa, unidentified
MAIVAHTHPFVIGVDTHARNHALAILAAPNGEVIDDAQFRATGAGLTRAVSWAGRRTGGDLNVLWVIEGVGTYGARLARAAADAGYPVAEAARMNARANRGLGKSDPMDARRIAQAVLPLDVSALRQPRADDGVRAAVRVLVASRDHMSTERTAAVNALTALLRVSDLGIGARRPLTSAQITTVAAWRTREEDLATATARGEAIRLAKRVTTLEQELKANTKRVTELVTQSPAAELLNQPGIAPVTAAVALTAWSHPGRLRSEAAFASLAGVNPIPASSGNTVRHRINRGGDRRLNRALHMAIVTRMRMDPRTRAYVERRTCEGRTLKEIRRCLKRYLARQIYRQLNTASQASPARA

SEQ ID NO: 311110 - protein, 423 aa, unidentified
MEVMHKRVAGLDVHKTTVVACVRVQAGRKVTRECRTFATTTDGLVALLAWVVESRCTHVAMEATGVYWMPVWKILSDGDFALIVANAAHIKNVPGRKSDVNDAMWIADLVACGLIKASFVPEENMQELRSLMRTRKQLGREQTRHVQRIQKTLAEANVKLDSVICDIMGWSGRRIIEAIIAGERDPGKLAALASKRIKATPQELHDALHGRLTEHHRFMLQLHLRQWDGLDATIRDIDAEVDARISRMDREAKAGEAPFRELIALLCTIPGVSTLSAIIILTEIGSDMSRFPTAGHLVAWAGLCPGQNESAGKRKSTRLRKGDPWLKTALVQCSWAAKRKKNSYYKAQFFRLQSRRGPQKAICAVAASILTAIYHILKDGTEHRDLGADHFNRRSTEDQAKRLVARLTKLGFQVHLQRQTEAA

SEQ ID NO: 311111 - protein, 418 aa, unidentified
MQTELSQFAAVIGIDWADKKHDICVQDMATGRRRRSRVRHRAEDLDEWAGSLYRRYGGPIAVALELSKGPIVSVLQKYDFFVIFPIDPSTLAYHRKTFTPSGAKDDPTDAELALDLLFKHSERFKPLQPQSVEMRTLMLLVEHRRKLMNDRVRITNRLRSALKQYYPQVLEWFDRIDTLLFCDFIRRWPSLPQARRARRATLERFFREHNMNRKALLERRIQAIKTAMPLTEDPAVIVPYRLQVLSLVAQLEVALESIKTYDQEIAALLPQHPDYELFDVLPGAGPVHKSRLMVAFGEQRERYACADEVQMYGGIAPVTKRSGDSTWVHWRWQCPTFMRQTFVEWAGQTINKSYWAGLYYYQQRAKGCSHQAAVRALAFKWIRILYRCWQTRTPYDEARYLKALHERGSPLLKMAETA

SEQ ID NO: 311112 - protein, 307 aa, unidentified
MWEGRFPRTPDGIGRFVARGVDARGAIAVEASGPTWAFVDALASTGATVCVVDPRKTKLQAGYAAKTDRLDARRLADALRRESVVSIYIPPPELRELREMCRGRHQVVRLRTRLAQMIRALLLRCDAGEPPGTRLYSPRALAWLAAVQLGPEATRTLRRLERLYREVHKDAHAADAELKQRAAADPIAVALTGLTGVGPVLAVTLRAEIGDITRFHRGAALACYAGVVPRVDQSADRRYHGRITRSGSPWLRWALVEAASHAIKRPDAVGRWARRLAVRKGAMKARVALARVLCDDVIAAWPRSPSV

SEQ ID NO: 311113 - protein, 374 aa, unidentified
MKKSSKIFVGMDVHKESIDITLAEPAGEVRRWGQIGGERAALAKAVRKLESLGGELHFVYEAGPCGFWIERWIKARGHDCWVVSPSSVPKKSGERIKTDRRDSEKLARMLRAGELTPIYVPNEHDEAIRDVVRTRDDAIIAQRKARQQLKALLLRNEIRYVGKSSWTAAHRRWLADLKLPQPAQQIAFEEYVDAVEVASTRVERLTRAIESSTEGWRLAPVVEALHALRGVQFVHAVTLVCELGDFVRFECPRQLMAYLGLVPSENSTGERRRQGAITKTGNHFARRALIEAAWAYQHPARVTPIIARRQSGLPKHARDIAWKAQLRLCARFRRLSARRLNKNKVVVAIARELSGFVWAIARDVTIAPDTSIVA

SEQ ID NO: 311114 - protein, 346 aa, unidentified
MERIARIGMDTSKHLFQLHGVDAEENVVLRRQLRRSQLMTFFQKLPPTLIGIEACGASHHWARMLQSLGHEVRLLPPQYVKPYVKRNKNDAADAAAVCEAMSRPTMRFVPVKTRDNQAVLMLLGVRERLLRVRTQLSNTIRGYAAEFGLTVGKGVSRLEHLFERIAGDSSLPALARELFNLHAQAYRDLQMRIAEVEDKLDDWRHENEKVRRLTKVPGIGPIGASLLVMKAPDPEYFRSGRDFAAWIGLTPKDHSSGGKRRLGGITHAGDEALRSVLLSGATNVIRHARLGRSQSSPWLTALIKRKPAMLAAVALANKMARIAWKLLVSGEAYSEHPVSPLAVQAG

SEQ ID NO: 311115 - protein, 413 aa, unidentified
MEQGLITAVGVDVSKGKSMVAVRRPGGQIVMPPIQINHTTEELARLAERLQGLGGDIRIIMEHTGMCWSPIAHSLKEAGFFVSVVNAILIHNFSDNSLRKVKTDKADALKIANYGLTFWTELRDFSDEDETRQMLKMQCRLYERTQKASVELRNGLISLLDQTFPGINEIMPAHYCTKRSHYKWVDVSKRFWHKDCVKKLSESAFTNTYQKWCKKEGYRFSRIEAEKIYRAAQNTVATFPQNESTKTLIVQAVDCLNAVYESMAVLRTEKKRLASLLPEYEVVMAMQGAGDVTGPKLMAEIGDVRRFTNKNALVAFAGVDAPPFQSGSFEAKSRHVSKRGSPHLRRTLFQVMSVVLQRSSTDNPIYSFMDKKRAEGKHFYVYTVAGAAKFLRVYYARVKEYLLALETKQETAA

SEQ ID NO: 311116 - protein, 355 aa, unidentified
MSHEKYIGMDVHQATISAAVMDAHGKLLMECLLETKASTIVDFIQGLHGTLSLTFEEGTSAAWLHDLLKPHVSRLVVCDPRKAALLKEGNKSDRIDARKLAELLRTNQLKAVYHEEHGIRALKELGRSYLTITKDVTRVMNRIKALYRSWGIPCSGTSVYAPRHRAEWLAKIVEPGVRVRAEYSYQQLDSLQPLRLQARRELLRESYQHPAVKLLRQIPSIGPIRAALLVALLQTPHRFRTKRQLWVYSGFAVETHDSGEYRYVRGKRQRNRERISVRGLNDNHNKDVKNLFKSAAISASTRPGPLHDCYVARVEKGMRPTMARLTLARKIATITLTIWKKGVSFDPKHLHRQAA

SEQ ID NO: 311117 - protein, 411 aa, unidentified
MEAAVITAVGIDVSKSKSTVAVRRPGGEIALQPFEVHHTNSDLKKLASTLKKLGGDIRIVMEHTSTYWRPIALTLKEAGFFVSVVNAMLIHDFSDNTIRKLKTDRADALKIANYALTFWDTLPPFNNEEETRLLLKMQSRANERITATATALRNGLIALADQTFPGVNIAFDPNTKNANGHEKWVDFFLRYWHKDCVCQYSMEAFTESYRGWCKRKNYKFRTDTAHKIYLLAQEGVATLPKCESTKMLITQACKSLNAVCEAKQSTQLEMQRLAAMLPEYEVVMRMEGAGPVTGPALMAEIGDVRRFKNKKALVAFADIDAPPFQSGAFESKSRHVSKRGSPHLRRTIFIVSNIILTRSNPENAVYCFMDKKRSEGKHYYVYTVAGSAKFLRVYYARVTEFLRSLPSSDAC

SEQ ID NO: 311118 - protein, 323 aa, unidentified
MREFTGIDISKKTFDIYFEQNGQGTHVCFNQNKQDYKRFINLIGKERICIMEATGNYHVKLSRFLYENKLKVLVENPLKIKRFLQMRLQRNKTDKADSKMIYEYGKMVFIEKEIVGWKPDSNEIAELKQYDTVRQQFTKQLTALTNTQEAMGQLSDLQEQVDGALKLMIKHLKDALNQLDMQMQQIVETHHKDSYKLLTSIPGVGPKTATMMICLTDGFRKFDAKRVKPFISYIGMSPRTYESGTSVKGAGHITKVGNGRLRTLLYLCSWTAKRVNPQCAELHKRLFEKGKPEKVIKVAIAHKLVRQMFGVIKSGSSFSTVRA

SEQ ID NO: 311119 - protein, 450 aa, unidentified
MGSYAGVDWAADKHDVLVCDEAGEELLSATFAHDEAGLRLLCRQLLRLKVALVAIERPDGLLVERMLDAGLRVLALHPNQVAATRARFRVSGGKSDRFDAFVLCELARTDNHRFRVLEPDSDETKALRALTRAREDLVKTRVAVCNQLRSELERFWPGPIGLFADLDSQISLAFLERYPSPVETRTLGEQRMAAFLARQGYTGGKTAAELLAKLRSAPAGRAAEQETKVRRQIVRGLVGALKTLTAELKTLERELEDAVRTHPDGEIFLSLFKSRNSFVTAAELLAEIGDCRARYPNRDALAGDAGQAAVAIESGKRKSASFRWGCNKRLRSAFCTLADTTRHWHPWAQDLYAAARQRGHDHPRALRTVGRAWCRVVWSCWQTRTPYDPARHRALQQHCTVWITDTSGRRRPDLAATQRMLGAAVTEMAARRAEREALDAKPTSANTPGT

SEQ ID NO: 311120 - protein, 338 aa, unidentified
MKLYGAIDLHSNNAVSGLIDDDDVVKLGKKSPCDLDVILKTFEPFKDEITGIAVESTFNWYWLVDGLMDAGYRVHLVNTAAVKQYEGLKYTDDGSDTFWLAHLLRLGILPTGHIYPKESRPIRDLLRKRGQLVQQRTAHILSIQNLYSRNTGSRLSCNAVKRLTREQIEQRFDDDNLILAIDSNRRIMEVLDDQLKLVEKTVLEQAKLDPRYRYLLTINGVGKILALTIMLETGDVNRFEKVGNFTSYCRCVNSARFSNGKKKGKGNTKNGNKYLSWAFIEAANYAIRFHEPAKRYYQRKMAATKRVVAIKALAHKLARASYYMMRDQVPFDPKKLYG

SEQ ID NO: 311121 - protein, 398 aa, unidentified
MSECYVGIDVSKDTSTAHGIDRGGKKLFYVEFTMDTEGFSKLLSAIRAHCIDFSMASAAMESTGCYHSNLLCYLVTEGIQCFVINPLLIANFAKLSLRKTKTDKKDSMVIAQFLLLHKDTLVKAAPSESLQDLKDLARERESLTVLMSGLKNDIKRMLQITFPELESLCNVFSESMRDIIKQYPSARLIRAANARAIKKALMPSDARRTPPFYPEDFIAAAQKSVATDSIAKELILPEKYATLEHLMKQRERITEALVEACQAMMIQDIEIITSIGGISDTTASAFLAEVGDFKVFPSYKHLIAFAGLDPSIHQSGNFEGRGKISKRGNRHLRHLSYLMTTCVVRLDNIFREYYLRRRAEGLPYKKAIIATTHKLLRVIFTMLINRTTFQVKEVIHNS

SEQ ID NO: 311122 - protein, 346 aa, unidentified
MNDRNYYVGIDIADADFTTNIIDQPGHTIAAKEKIENRPGGFRLFTRWLAQHGVTPTNSLLCLENTGVYGESLCYFFLAEGYFVAVVPPHKAKKAFTTLTKNDRIDARQLAEYAFRYRDQLSPWKPLEPVLEQIKTLYAAREHFTRQLIANKNALTAIQKKVVQAPLACDSYREMIKHLSDRIESIDKEIEKLIDDNPTFKQLSDLADSAPGVGKQLANTLMVLTEGFTIGLEHKRFCSRIGIAPHEHQSGTSVCYTPRSLGHGNARVRKLLHLAARSVATHNEDFRRYYLRKLAEGKDKRLILNNIANKLIKIIFAMVTSGKPYIKNYRSANPIYLKGRLPSFCH

SEQ ID NO: 311123 - protein, 351 aa, unidentified
MPRKTDVAVVHTIGIDTGKNTLHMVGLDERGAIILREKVSRHRIAARLVNVQPCLVGIEAGMATHYLARELVALGHQVKQVPPAYAKPFRQGHKNDFRDAHAVAEAVQRPSTRCVPIKTDDQLDLQALHRVRSRLIGDRTAVINQLRGFLLEHGIAVRQGHRFLRQQLPQILATRADVLSPRMVRIAGDLVDDWGYLDERIEGVTDEIEGLAQTDVSCGQLMTVPGIGPIIASATVAAIGNGAAFAKRRDFAAWLGLVPKQMSTGDRTILGRITKRGNRYLRMLFIQGARAIQLHPASWAKHSFGPWLTAAAKRLHHNVLTVALANKLARIALTVLVEGRNYETRIAPAVA

SEQ ID NO: 311124 - protein, 367 aa, unidentified
MSNYVTAIGLDVHARSISACAFDPMTGEVSRARFGYDPASVAEWALGFESPKAVYESGPTGFHLCRALRALGVDCAVGAVSKMHRPAADRGRKNDRRDAEWLARLLACRNVVEVWVPDERTEAARDLSRALEDARDDLQRARQRMSKFLLRHGLVFDETTPTGRRRSNWTEAYWRWARSIEFDEADDAAAYEHYTDAVDRCGEAKRELERRVVEAASRPEWAPTVDALCLVKGVDVATAFLLAAEAGDFSRFPSAPSFAAWCGLAPSERSSGETESRGGITRAGNSHVRRALVEASWHVPMSTRHPKKPRPGHGVAPAASRHAAKCNRRLQDRRDAMSQAGKRPCVANCATAREMACWVWAIALMVR

SEQ ID NO: 311125 - protein, 288 aa, unidentified
MSQKINTVVAVIGIDIGKNSFHIVGLDKRGAIALRQKWSRGQVETRLANMPPCLIGMEACVGAHHLSRRLKSLGHDARLMPAKYVRPYNKGQKNDFRDAEAIAEAVQRPTMKFVATKTADQLDLQALHRVRARLVGQRTGIINQIRAFLLERGIAVRQGLRFLRIELPGILATRTDLLSPRMLQVVEDLAGDWHRLDERVEDLSTEIAALAAQDAACKRLMTMPGVGPIISSATVAAIGRGDVFSKGRDFGAWLGLVPKQISTGDRTILGKISKRGNRYLRTLFVQAA

SEQ ID NO: 311126 - protein, 343 aa, unidentified
MLAITTIGLDIAKSVFQVHGVDAQGYAVVRRQLKRRYVLSFFKKLPPCLVGIEACATSHHWSRELQALGHTVRLIPPAYVKPYVKRQKNDAADAEAICEAVQRPSMRFVPTKTPEQQSCLMLHRTRHLFIRQQTAVINTIRAHLAEFGIVAPVGRNGVEDLLYAVADQRDERIPEVARGCLEALGVLLGKLKAQILEFDRQINAWHRSNETSRRLDELPGVGPALATALVASVADPKAFRSGRDFSAWIGLVPKQNSSGGKEKLGSITKQGDRYLRSLFCAGALAVIRYAKIHGTAHRPWLAKLLERRPTKVAAIALANKIARMAWALMAKGESYREPVALAR

SEQ ID NO: 311127 - protein, 339 aa, unidentified
MSKVTTIGLDLAKSVFQVHGTDEAGQTIVRKRLRRGQVATWFGGLAPCLIGMEACATAHHWARELKALGHEVRLMPPQYVKAYVRRNKNDAADAEAICEAVRRPTMRFVPVKTVDQQAALVMHRARDLLVRQRTMAVNALRGHLSEFGLVAAQGNQGVGRLISIIRDEADQSIPDVARGVLRVIAGQIDELEKQITMLEKQILAWHKSNPVSQRLATIPGIGPIIATAIVATVADPKEFRSGREFAAWLGLVPRQNSTGGKARLGGISKRGDSYIRRLLVNGAHAVLLRSKAAMDNAWLNQLRERKHRLVVAVALANKTARIVWAVMNGDKPYRPVTAA

SEQ ID NO: 311128 - protein, 387 aa, unidentified
MPQPNDLSRSLVALDHNSTIIAVVEMSQSSWLVGGMLPGIERQPRKKLEPSPERLLALLHRWRDEAVKAGRTITRIALAFEAGRDGFWLARWLAARGIEAHVIHASSVAVSREHRRAKTDRLDTELLKRGFLGWLRGERGHCSMARVPTLAEEDAKRPNRERDCLVGERTRIVNRIKSTLVRLGIRNFKPTLRKAAERLATVHTPEGTPLPPNTLAELQRDMARLGFVVSQIREIEEARQKRLEQQHETGAHDMVRQLARIVGVGVETADLLVHELLSRPMRDRRAVARYAGLTGSPDESGARRREQGLARAGNARVRRSMIQLAWRFLMFQKESALALWYRARTADSRSGTRKTMIVALARKLIIALWRFVTTGEPLEGVVLRPAS

SEQ ID NO: 311129 - protein, 355 aa, unidentified
MTSTKYIGMDVHKESISIAVRNDAGKIVMECVIETKASMILQFFDGLRGDLHVTFEEGTWAAWLYDLLKPHVTKLVVCDPRRNALLQDGNQNDRVDARKLSDLLYLNKLSAVYHGDHGLRTLKELGRSYLTITRDQSRVMTRVKAMYRSWAIPCSGKQVYGSRHRAEWLAKIYEPGVRRRAELYYQQLDALRTLRQEVRRDLLAESKKHKVWKRLCEIPSIGPIRAAELLGILQTPHRFRTKRQLWTYCGLGVVTSSSADHEMSKGQLRRRKKHVQIRGLNENYNHDLKDLFKGAAVVASIKPGPLAEFYGALVSKGMRPEMARLTLARKIATIVLIVWKRGVCFDANHLKPQTA

SEQ ID NO: 311130 - protein, 319 aa, unidentified
MSDPLPHSEIFVGIDISKKTLDWCVGPALEHGQVPNTTAGRKKLVKTLTKLSPTLVVFEATGGYERGLADALEETEFPWTMVNPRMVRDFARADGRLAKTDKLDAEILARYAQKMQPPVRPRPNAAVRDLNAWVTRRRQLIDSIHAETCRLGTATPIVQPSIRKVLRLVEKELRKVEAQIEKLIRSNPALNERVKLMQTQKGVGVVIASTLAAQMPELGQLNRKEIAALAGLAPFNRDSGQWRGKRMIGGGRAGVRAALWMGALVGSRYNPEIRSFYQRLLANGKPKKVALTACMRKLLTILNAVVRDGLNEENRAKAA

SEQ ID NO: 311131 - protein, 380 aa, unidentified
MKNVRFIGLDVHAETIAVAVAEPGGEVRSLGTIPNRPEPVARLIRKLGKPEQLRVCYEAGPTGYVLYWQLNELGVKCAVIAPTLVPVKAGDRVKTDRRDAEKLARCYRAGDLTPVWVPDAAHEALRDLVRARLAAKRDQLRARNRLGKFLLRHGRRAPAGTTAWTLKYLAWVKQQSFEQAAQQATLLDYLHEVEHEAERIVRLERSIDTAIETLPEKMCAVIEALQSLRGIAKISAVSIMAEVGEMSRFEHARQLMGYSGAVSWEDSSGPRVHRGGISKAGNAHLRRIVVEAAWAYRHRPGVGNPLRARQRDQSEDIKAIAWKAQHRLHARYTRLLAKGKPKQKVITAVGRELLGFIWAIGVAAERSQAVAPRRTLKRAA

SEQ ID NO: 311132 - protein, 411 aa, unidentified
MIKENYIYVGIDLHKETHTAVMIDCYNQKLGEITFPNRPADFPKLVAKVKKCNTDGKTIVFGLENAYGYGRALAVWLIDKGYLVKDVNTAISHRQAKHRGAMYRKSDSDDAEAIALATLNMLDKLPDAYPNDAYWSLGQLVHRRDNIMKQRTRLVNQLHEQLCIAYPSYKQFFNDISRPTALYFWEHYPSRKYLKGKSVEDLRAELVPVSHNKCSTKTCEKILDAVASDKVKNNAYQDARDMVTLSIVSDLQHYDKQLAEVDKMLEQMYKMLGCTLTTIPGVNVITAVKILAEIGDIKRFSNANKLAQFAGIAPLHLSSSGKGKDVATKQGNRRLQATIYFLAIQMVQVSSKGTPRNSVVRAYYEKRKAEGKTSQQALICISRRLISIIYGMLKHGTEYRMPVVESAGENR

SEQ ID NO: 311133 - protein, 407 aa, unidentified
MNVLIERACGLDIHKKSITACIMTSKGKEVETFNTKTCYLIEMVDWIKEHGCTHVAMESTGVYWKPVVNLLEAEEIEFLVVNATDMKAVPGRKTDVKDAEWIAELLRYGLLKASYIPNREQRELRELVRYRRSIIEERARQINRIHKVLEGANIKLASVVSNVVGVSALDMLRAIGNGEEDPEQLANFARKTMKKKKDELKLALKGYIQDHQRFMIKTIIDHYDYLTNQIDKLDKEIAERMSEHQEDIDILDSIPGIAPRMAEMLLAELGFDVGEQFPSAPHMCSWAGLVPGQNESAGKRKSSRMRKGNKYLKSGLLEAAHSLRGSKTYLGELYRRKAAGKGKKQAGIIVAHTILRIAYALLTRKEVYVDKGPGYYEKQREKSITQHSIRRLESLGYTVAISKTDAS

SEQ ID NO: 311134 - protein, 413 aa, unidentified
MDVLHPRCCGIDVHKSSISACILVVVAGRVQKYQRRFGAMTQDLQELANWLRQFEVTQLAMESSGVYWKPVWNILEGQFTVLLANAQHIKNVPGRKTDQKDAEWIAQLLQHGLLRPSYVPCEVIRDLRDLTRMRASLSQEASRISSRVQKVLEDANIKLASVATNTLGKSGRAILEEIIAGQNDPEYLASLALGHLRAKTPQLKLALEGKIRPHHRFLLRRLLDQLRFVEHEIELLDERLEEIGREQPELSQAVARWDTIPGIDRVAGWTLLAEVGHTMAQFPTAEQLASWACLCPGNRESAGKRLGGKTRKGSPWLRRIACQCAWAAARTKNTYLSAQFRRLAARRGIKRAILGVAHSLVIIGYHLQKSQHNYEELGGDYFDRIDSDGLKRYFIKRLEKLGHKVTLVPIKAA

SEQ ID NO: 311135 - protein, 367 aa, unidentified
MRKHNTAKGSVGTGKRANRKLTVGIDLGDRSSRYCILDEQGEVLAEGSVATTKKGFAQVFGSKPRSRLALEVGTHSPWVSRYLADLGHEVIVANARRVRLITDSTRKNDRLDAKTLARLMRIDPELLSPIRHRSAQAQADLMVIRARAVLVEARTMLVNAARGLTKSHGERLASCGTGQIREQLAESLSEPLQNALRPLLAEMESLSKRIREYDEQIESLGKSRYPETELLKQVHGVGALTALTYVLTVDDPYRFRHSRDAGAYFGLRPQRRESGDSRPQLRITKEGDAYMRKLLVQCAHYILGPFGSDSDLRQWGLELAARGGKNAKKRALVAVARKLAVLLHKLWVTGEAYEPLHIRTHSQTAAA

SEQ ID NO: 311136 - protein, 328 aa, unidentified
MQFLGIDVSKDKLDGAAVSENSGAMLGRRSFPNTPDGIERLVRWAEKLAGVGPAGIHAILEATAAYHELAAHELVAAGMTVSVVNPARVRSFARGVAVLGKTDRLDAMMLARFGRLVRPKAWRPAGPILRDLQALLARLDEVEADLRREANRLEQARVRGCPEAVLRSFADAMAALKASRSELRQAIEAHVAAHRALQADLDRLLTIPAVGPKTALRMLVLLRSREFDSARQAAAFLGLVPVERQSGTSVRGRPKLSKAGNPRLRAGLYMAAVVATRLNPDVRAQHQRLLERGKSKMSALGAAMRKLVHICFGVLKSGGDYRPAANLA

SEQ ID NO: 311137 - protein, 418 aa, unidentified
MNEDGNTRGSRRYVALDIHKQYCVIAGVDREGRVLLQPVRVEHADLEAWLKKHLVDNDHVVIESTTNAWHVYDLLTPLVERVVVANPIKVKQIASARVKTDIRDTLILARLLAANLVPEVWVPPPHVRQMRQLLSQRRQLVETHTQILNRMHSVAHRHHLKHERGKRFNEKNTGWQKDARLSQIEQFQLSLEMENRIYIEKQIERISQEVRKLCHQTPWAANMTYLMQLPGFGVITAMTVLAAIGEIERFEPPKHLASYSGLTPGLEQSGTKKRGKGITKEGRRELRWALVEAAQMAVKSDPLLKMKFQTLQKRMHRNQAIVAIARHLLELVWYVLTRRQPYRHFSHERIAYKYLTWAWQMDEVAREGLTRQQFARYYLMRLGIGHDLTRIALNPKHPRRLASEAEVLALHPELNQVE

SEQ ID NO: 311138 - protein, 393 aa, unidentified
MVACLRLVSDGKVTTEVRTFQTTTADLLRLSEWLAANDCTHVAMEATGVYWKPVWHILDDGEFKLVLANAAHVKNVPGRKTDVNDAMWLAELLAHGLIRASFVPDTQTQEMRNLLRTRKQLVREQSSHVLRVQKTLEDANIKLDSVLSDLMGKSGRAMIEALIAGETNPAKLAGLADRRVKASPDELREALRGRVTKHHRFLLRLHLNQIDALDAAMATLDAQVEANLGPFRTAVDLIISIPGIKNLGAHVIVSEIGIDMSRFPSDAHLISWAGICPRNDESAGKRRSNRLRKGAPWLKTTLVQCAWAAVKKKNSYLQAQFYRIKARRGPKKAIMAVAASILTAIYHMLKDGTMYQDLGCNHFDRRSTDQQKNRLVKRLTDLGYAVEIKPLAA

SEQ ID NO: 311139 - protein, 328 aa, unidentified
MAKHITICAGIDTGKRKLDVALDRSSEQQLLIDNTPEGYKVLLDWLRRRRVKRIGIEASGGYEQAVVAELRRKGFVVVVFQPAQVRAYAKFHRQRAKNDKIDAALIAACTAAVKTVHAPPDARLQPFAEHLTMIDQIGEDIARLKNRLETCRNPRFQQTWKEDIARLAKREKIELKALVATIREHRDLAERLDLIESVDGIGQPTAVAILVRLPEIGRITREQAAALAGVAPYDDDSGEQVGIRHIDGGRQRLRRALYTAALPASLRWNPQLIALYRRLIAAGKEHKRALIACARKLLIFANTVVARGTPWDRERPAVASTSAVPQAA

SEQ ID NO: 311140 - protein, 354 aa, unidentified
MVTVGIDPHKDMHQAVALAQDGTRLGRAKKVNTGPQALGQLLAWIRALAANSPVLWAIEGGPGLGRALADALLGAGQEVVWVPPRAMAAHRRLGGPVGAKSDVIDAVAIARAALADPGLARHRIDPQVRQVRVLVNLRQNLTDQRVALTNRVLAAVHIELDHRLGQGALATRAKVGRVRALVEGAGLDEMVRWALLEQLEEIHTLFVRAAEVERRLKELVEPLAPNLLGIRGVGVVWAAVLLSQVGDVSRFATSARMARWAGSAPIPVFSSGRDRHRLHRGGNRQVNRALHSIGVVQVRLGEPAREFVRSREGAKGTKGAYRALKRHLVDVVYRAMVADQVVRGRAEVCLQPAT

SEQ ID NO: 311141 - protein, 425 aa, unidentified
MPTALAWEASMEVLHERCAGLDVHKNTVVGCVRLAQGGRVEKEVKTFKTTTGELLALAEWLDGHRVNHVVMEATGVYWKPVWHILDDGERQLVLANAAHVKNVPGRKSDVSDCDWLSDLEAHGLIRPSFVPDGPTQELRGLLRTRKQLVRERTSHTLRLQKTLEDANIKLDSVISNVVGVSGRRMIEALVAGESDPTALANLADRRIKAPPEALCEALRGRVTRHHRFLLSLHLGHIDAIDQAIDKIDQEVEASLQPFCQAVGLVKTIPGVSQLAGQGIIAEIGSDMSRFPTCGHLISWAGLCPRSDESAGKRRSTRTRKGNPWLKTLLVQCAWAATRTKATYLHAQFLSIRSRRGARKAIVAVAASILTAVYHMLKNGTSYRDLGPQHLENRNKEAQARRLLARLRRLGFVADFDTLRPVPVSC

SEQ ID NO: 311142 - protein, 349 aa, unidentified
MRIKPLPETFAYGIDIGKKLFHVAAVNREGAVIQRAKFARETLQSFFDAAPKALIGMEACPGSQWLARKLREMGHDARIIPARFVKPYVKSNKTDAVDAAAIAEAVTRPTMRFTQVRTPEQVDLQALHRIRDRLVGQRTGLMNQARAFCLEYGLAMRTGAGGFHADIRRHLANLENDLTETMRALLSELLDDLAHIESRVKTLSARIEAIAHEDETIRRLLTVPGIGPLGATALVAAAGDGRQFRKARDMAAWLGLVPAEHSTGGKQTLLGISKRGNRYVRRLIIHGARSCFLHLNRESHALGRWLTQLEARTHRNKAIVALANKLTRIVWAILTRPGAIYLRSKGASA

SEQ ID NO: 311143 - protein, 337 aa, unidentified
MIHIGVDLHQRFCYMTAVETSGKIRQQGRVANEPASLRGYFGQWGEPVEAAVEACSFWPAFYGVVEPLGVRLVLVHPQRVKAIASAKLKNDRVDSATLAHLLRARLLPEAWAPPAATRELRQQVRLRVSLGQQRTRLKNQVHAVLHQQGLRPPGSDLFGRRGRQWLAEVELPAAARQAVDTYLALLHSYDEQIRAWERSWAELDDGDERRRVLETIPGFGNYAARLVLAEIGDLGRFASKRQLYSYAGLVPRLRESGERQRRGGITRAGSPRLRWMLVQAAHSAVRSSPAARAYFQRLAQRRPPHVARVALARKLLGAVWALWRDGVGWDEEVFAAR

SEQ ID NO: 311144 - protein, 387 aa, unidentified
MPQPNDLSRSLVPFRQDSTLVAVVEMSRSSWLVAGIVPGIGRHPLKKLDPSEEALLALLRQWRDEAAGAGCTIARLAVAFEAGRDGFWLARWLRTRGVEAHVIHPTSVAVSREHRRAKTDRLDTELLKRAFLGWLRGEPDHCSMAAIPTLEEEDAKRPSREREGLVGERTRIVNRLKGALARLGVRGFKPTLRAAPERLETLRTPEGAPLPPNTLAELRRDMARLRLVSNQIAEVEASRAERLQRPGGGGGDAMVRLLARVVGVGIETADMLVREVLSRDLRDRKALARYAGLTGSPDESGARRREKGLARVGNARVRRGMLQLAWRFLRFQADSQLACWYRARTADARGGTRKAMIVALARKLLIALWRLVTIGEAPEGVVLRPAP

SEQ ID NO: 311145 - protein, 344 aa, unidentified
MTYYAALDVSLRSVNVCIVNDAGEIKFEAKVVSEVEDIVTCLRAFKGEISQVGFEAGVLTQYLTYGLQASGYEVVCMEARQVKAALSAMRNKTDKKDARGIAQILRCGWYSRVHVKSLESHHIRALLSSRKAVLNKCIDLENEVRGLFKVFGIKLPPKLGHGSFDATVRSTIEADAALARALLPLLDARLVLYRTFRELDNRTRKLTHQDPVCQCLMSAPGVGFITALTFKAGVDDPTRFKRSRTVGAHFGFTPRRFQSGEIDNTGHISRAGDPDVRRTLYTAANVLMTRSSKWSSLKVWGIQLAKTRGHRRAVVAVARKLAVILHRMWLDEAQFRWGTEGAKP

SEQ ID NO: 311146 - protein, 358 aa, unidentified
MDVHKESIDDIAVAEEGGEVRHHGQIGGDMNALWRAVRKLESSGRELVFVYEAGPCGFGIYRGLTARGHTCWVVAPSNTPRRVRDRIKTDRRDSLKLSGLARAGELTPIYVPDVRDEAMRDLVRAREDAVMMQRQARQRLAALLLRNDVRYAGKTAWTAAHRRWIADLKLPQSAQRLAFEEYVQAVEEASARVQRLGQCIEQELATWRWRSVVAALQACRGIQLIHGVRIVAELGDLSRFSHPRRLMAYLGLIPSEDSSGEHRQQGAITKAGNSSARRALVEAAWAYQYGAKVSALIARRQAEVPKAALDIAWKAQVRLCARFRRLAARRVNRNKIVVAIARELAGFVWAIAQHAKPI

SEQ ID NO: 311147 - protein, 355 aa, unidentified
MSQKLDTSPAVVGIDIGKNSFHIVGQNQRGAIVLRQKWSRGQVEARFANLSPCRIGMEACVGAHHLSRTLKALGHDARLMPAKYVRPYSKGQKNDYRDAEAIAEAVQRPTMKFVATKTADQLDLQALHRVRERFVGQRTGIINQIRAFMLERGIAVRQGLRFLRAELPNILATRTDALSPRMLRILEDLSADWRRLDARIEDLSSEIEALARQDKGCERLMTVPGIGPIISSAMVAAIGTGDAFSKGRDFGAWLGLVPKQLSTGDRTILGSISRRGNRYLRTLFVQAAWVVLVKVGPKHWDRYGLKSWIEAAKKRLHHNVLAIALANKLARIAWAVLHKGRAFECVKTNEAYRPA

SEQ ID NO: 311148 - protein, 334 aa, unidentified
MENIALIGIDLGKNSFHIHCQDRRGKAVYRKKFTRPKLIEFLATCPATTIAMEACGGSHFMARKLAELGHFPKLISPQFVRPFVKSNKNDFVDAEAICEAASRPSMRFMQPRTESQQAMRALHRVRESLVQDKVKTTNQMHAFLLEFGISVPRGAAVISRLSTLLEDSSLPLYLSQLLLKLQQHYHYLVEQIKDLESQLKRKLDEDEVGQRLLSIPCVGTLTASTISTEIGDGKQYASSRDFAAATGLVPRQYSTGGRTTLLGISKRGNKKIRTLLVQCARVFIQKLEHQSGKLADWVRELLCRKSNFVVTCALANKLARIAWALTARQQTYEA

SEQ ID NO: 311149 - protein, 313 aa, unidentified
MRFVGIDVSKDHLDIHCLPDGLALRVANSGEGIGLLLQRIGALEGVAFGCEATGGDEDLLLIRLGQAAVPGYCRQPSDVRAHSRLTGKRAKTDRLDARAIAGALQVAVATRKPAIRAASLSAIKELTTLRRRLIAGVNELKSLRARMGDAGVLGTIDAMSDQHVKAVKALQAQIRSALAGHPEQAQRARRIASMPGAGPVLTAELIGSMPELGTLSARQAASLTGVAPHPRQSGNTGGTGRCQGGRAAIRRVLYMAALSVIRSQKQPLAAFYAKLRAAGKPFKLAIVAIMRKLIVTLNAMIKNDQDWQPETQS

SEQ ID NO: 311150 - protein, 388 aa, unidentified
MSMVVIGMDPHKRSATIEVMASDETVLGKGRYGTHASGYRAMVRAVRHWPERTWAIEGCQGIGRHIALRLIADGEHVVDVPPKLSARTRVFATGQGRKTDATDAHSVALAATRMTGLRPVADDAQLAVLRVLADRRRSLGEDHTRMVSQLHRLLLELIPGGAKKALSAAQAKALLAGVRPRDAAGKARRRVAAELVSDLERTYQRKKDADKELRELLTGTKTNLTTLNGIGPSGAARLLVEVADITRFPSKAHFASWNGTAPIDASSGDQVRHRLSRAGNRQINRVLHIMAVVQLRHRDSEGRAYYDRKIAAGKTPMEAMRALKRRLSDIVYHQMILDHQAHRTGPGGQSGTTLNSSVASSTPAASTSDKPLPGPASSHPKTAPPTAS

SEQ ID NO: 311151 - protein, 322 aa, unidentified
MTQRGMMDQNAVVVGIDVSKAELVMSVLPSHERWTSATDPGALDDVVKRLGALRPQLIVMEATGGYEGPIAAACAAGGLPVAIVNPRQVRAFAQAIGRTAKTDAIDGDLLALFGARVQPPARPLPSADTTQLAQLVARRRQLLEMLSAERQRLAQLGTTTGPVARDLRNHIRWLEKRVTDADGDINTAIQHSAIWRAHDDLLRSVPGIGRTTARTLLAELPELGTLDRRAIAALVGVAPFNCDSGQFRGRRKIWGGRPAVRKALYMAALVAARHNPILARFYQRLRAAGKPGKVALVAVMRRLLTIMNAMIKHQSAWRPEAA

SEQ ID NO: 311152 - protein, 339 aa, unidentified
MQVTTVGLDLAKNIFQVHGVTDGDEVAFNRALRRAQVLPFFERLDPCLVGIEACGTSHHWARELIKLGHTVKLIPPIYVKPYVKRGKSDAVDAEAICEAVTRPTMRFVEVKTPAQQAILALHRTRDLIVRQRTQTINMLRAQLAEFGIVFPQGVGHATQFAKRVLEGEQPDLSEVAGDVIAQLSEQLLFLQGKVAWYSLEMTRVAKREDRVALLQTIPGIGPITASAIVATVGTGRQFNNGRDFAAWLGLTPLNRSTGGKERLGRISKMGDRYIRRLLVIGMMSRMRQIMQNPERYDPWFADILARKPGKVAAVAMANKTARMVWAVLTRNEPYKVRTI

SEQ ID NO: 311153 - protein, 349 aa, unidentified
MEVLKQVLGIDVAQKELVVTLGRMVEDLSIDLYAYKVFRNNEKGFSALLEWVKKLTDGKIKVRFVMEATGVYHQKFAYFLDEKEYEVCVVLPNKISNYMRTLDNKTVTDKTCSEAIAQFGLERKLDLWHRPSSIYRSLQQLTRERDQIVFERAMVKNHLHAEQSEAEPNESSILRINTRIKFLSGQEKEIKKEIENWVNNDAVLKKEIENICTIPGVGELTAVIILAETNGFELIRSKRQLTSYAGLDVKEKQSGTSVKGKPRISKSGNRHLRKAMHLPALTVVKWDDNFRDLYARIVSKHGIKMKALIAVQRKLLEMVYTIFKNKCPYDKEYETKRMEQKNSVHAQTA

SEQ ID NO: 311154 - protein, 389 aa, unidentified
MYFIGLDISKYKHDCFIVADSGEVIRQPFSFENNSEGFASLLDALSSLDSPENVKIGFEATSHYAENLKRFLVNHGFSFMEFNPLLLSKALKANSLRKTKTDKADAISIAHYLMSVVYKPNSISLYHIQSLKSLTRLRHSFVKQRSFFLVQLTNLLDLAFPEFKPFFGKKFSITALFILEKYKTPKHIANMNLASYDSLRCISKGQFSYAKFVALKALANSTVGFTSMSFEFQLSSVLKLYNAVNNEILELERKISDSMSTLDCKILSIKGIGIISASIIFSEYGNITNFSSPSQMLAFAGLEPGISQSGTKTFKGKMVKHGSPYLRYALINCANYSLIHNPVFYDYYRKKRSEGKCHSVAITHVARKLIRIIFTLETKHIDFNPALVR

SEQ ID NO: 311155 - protein, 352 aa, unidentified
MQTQGNELDFSGQNFYCGIDIHKKNWAVTIETDDMPLKTFSQDADPDLLVKYLNRNYPGGNYIAAYEAGYFGFTTQRRLSDQGVKCLVINPADIPTTHKEKDQKRDPIDSRKIARTLRARQIRSIWIPPVSISQDRQLLRTRKQLVKDRVRVKNQIKALLQLHGITYPERFIKAQTHWSKAFIKWLEGIRMEESSGTQSLQSLVSMLQHTRNELVILSISIKALSEEKRYHDAYIRLKETPGIGGLTAMTILTEVGDINRFRNVEAFRSYIGLIPRSHSSGEKEYKGRITNRKSDNLRPLLVEAAWTAIRHDPTYLHIFSQYKKRMETNKAIVRTARKLANHIYFTLREISR

SEQ ID NO: 311156 - protein, 411 aa, unidentified
MQVVYERCAAIDVHQKTAVTTTLITQANGHVQKETRTFATMTSDLLRLDDWLHELGITVVAMESTGVFWHPIFNILEEGREIILVNAQHMKAVPGRKTDVKDSEWLADLLRHGLLRASFIPPKPIRELRDLTRYRKTLVQERSQEINRLQKLLEGANIKLAAVATDVLGKSGRDMLQAVIQGEQDAEVLADLARGRLRAKLPDLRQALIGRVQPHHRFLLHQILAHIDFLEHSIGQVEHEVEQRLLPYEEAMTLLESIPGLQATTAAGILAEIGTDMSRFPSDKHLTSWAGVCPGSKVSAGKRLGGRTTRGDTHLQALLGEAAWAASHTKGTYLSAFHQRIARRRGKKKATVALERKLLVIIYHVLRTKKPSSELGPDYFDQRQKTRLEQHHIHRLEQLGYTVTLTPKEAA

SEQ ID NO: 311157 - protein, 393 aa, unidentified
MEVIQMYLVGIDISKYKHNCFIATKTGVQLKEFVFENNLEGFKMFHQSLFELDQSQEIRIGLESTGHYGTNLKQFITASGYTYLEFNPYLTHQFSKAMSLRKTKTDKVDAKTISNMLGSVDYKTLHTQFYHNNELKQLVRDHDDILTNRSKTLVKLTNLLDISYPEFKPFFNNRLGSTAFFILKKYKSAQRISKLAMKDYEVLKSKSKGKFTYSKFSRLKSLAKDTIGVQSEIYVKRIQMLIRDYEYFDQSLEGLDQEIINLFGEVKTKLTSIPGLGIIQAATIYAEIGDIHLFSNPQKLIAYVGFDVSISQSGMSEHYGKIVKRGSPLLRKSIWTYALPSLRFIPVLHDYYHTKKSEGKHHKVALTHVCRKLIRMIYHIEYNQIDFDDKEIK

SEQ ID NO: 311158 - protein, 409 aa, unidentified
MDVIVERQGALDVHKEQVTACVRAPDEMGERVSHVAEFKTTVRGLLVLRDWLKAHRVTQVTMEATGVYWKPVWHVLEDDFELVLVNARHVKQVPGRKTDVKDAEWLCQLAEAGLLKASFVPPKPIRALRQLTRYRKSQISERQREANRLHKALEDTGIKLDCVATDILGKSGRAMLDALVAGTTNPEILAELAKGRMRTKIPALREALEGRFEPLHALLIGAILVHLDFLDEQIDRLSDAIEEQLAPFGAAIELLCTIPGVQERSAQNIIAEIGVDMSVFPTAGHLASWAGQCPGNDQSAGKRRSGHTRRGSKWLDDALKDSAMPAIRTDDSYLQALYRRKKPQLGHGRAIGAVKHSIICACWHMLSTGEIYNDLGGDYYTRRDPQRQIRRLVAQLERLGQTVTLQEAA

SEQ ID NO: 311159 - protein, 342 aa, unidentified
MGTITTIGLDIAKSVFQVHGIDATGEVVVRRRLSRGRVLAFFEKLPRCLVGMEACNTSHYWARELIGLGHDVRLMPAQYVKPYVKRSKNDAADAEAICEAVARPTMRFVPVKTPEQQSIMMLHRVRLMLNRQRTQLSNAMRAHMSEFGVVGPVGRMGLERLMAVIADREDLRIPPDARVCLEMLAAQLAVVKEQILENDRRIRARARETEVGRRLMEIPGVGPLLASAFVASIADPTAFKSGRDVAAWIGLVPKQNSSGGKERLGSISRAGNRYLRQMLVVGAMAVIRHVERHGTKRRWLIQLLARRAKKVAAVALANKTARTIWALMTNGERYREPTVALP

SEQ ID NO: 311160 - protein, 358 aa, unidentified
MAKLSLSRLEAFVLGFETTGFRVGIDVHKKSYSLALVREDGACFTWTGPARAATLLEPVQRFGLRIKAVVYEAGPTGFSLARCLEDAGLRVMVVAPSRIPRPVRAGAKCDRLDCIKLAEYADNRRARAIAVPTESEEAERSLLRRRHALADGRRRCKQRIKAHLLYLGVDAPEGLDHWSQKSVASLGGLSLKPSARLTLESLVRELFFHTEELRRVEGQLLELIASGSQRRRLGHLRTIPGVGFLTAATYLLELFRPERFTNARQVASYLGLAPMVRHSGGHKPRGKITPVGQARLRTLLIEASWVWKSRDAYAAKLYNRFLSQMGIAQKAIVAVARRLAIILWRLLIEGRSYRPDPA

SEQ ID NO: 311161 - protein, 350 aa, unidentified
MLIIGCDFHSRFQQIAMVDTETGELLKQRLDHRKGEAQKFYAGLLRPVRVGMEATGYAQWFEQMLAQLGHELWVGDAAEIRAAMVRKQKTDDRDALHILDLLVANRFPRIWIPTPGERDLRQLLRHRHKMVCLRTSLRNQLHALAMGQGVYRKRKMWAATGRAELEGLRLDPWAGRRRQELLDILDRLDPCLAELDRAVAREAEQRPAARCLMEQPGVGPVTALMFVLTMGPVERFRRSKQVVSYLGLNPRESSSGGRQRLGAISKQGNSMARFLLVEAAQTASRYDEELRRDYQRLKFRRGTAVAKVAIARKLAVRLYWKLRKHSSLVPSTRMQGSSEHPVVGASLSGN

SEQ ID NO: 311162 - protein, 425 aa, unidentified
MSYRIAGIDVHKKMLAVVVADVEVQGEYQFERIRYGSNPEQLRLLAAWLIEHEVEEVVMESTAQYWKPVWGALEQYWKPSGQKRETTGPMSGTLHLAQAQSNRGPRGRKKDFPDAERLVKRLVANELSLSFVPDAEQRLWRTVMRRKYQLTRNRVQLQNRLEALLEEAHIKLSSLVSDLLGASARRRRMLKALADGETDPAALASLADKNLRATPAQLCDALGACTELNPVYRRLLKMFLEELQLIDQQIGQLDKEMATLLGQHQAAVERLAEVPGLGVDSAQQIIAEVGATAATFPSAKQLSSWVGACPGDEESAGVSKSHRSPKGNRHMRRILNQCANAAAKSKGTIFEIVYRRLVSRLGHNQTIGAIAHRLCRLIWIILHQNVRYEERGPSVSAKSRQRRTHRMIRELRNLGYRVEPVVTTL

SEQ ID NO: 311163 - protein, 363 aa, unidentified
MDATTIGVDLAKSVFEVAVADRHWRLVSRHRFTRTQFERFLRSSPPTHVVMEACGTSHFWARVAEAQGHRVSLLPAQYVRPYVRRNKTDRTDAEALLEAVRSGRIAPVTVKTVLQQELLALHRIRDQWMATRTARINALRGFLREHGCTLARGARTILARVTFLLDDASAPIPERLRHVLPLLIEEIRDIEDRIETIERALAAVAKEDAVVQRLMQIPGVGLLTATALVATVGHIHAFRTARRFASWLGLTPRERSSGGHRRLGAISKQGDVYPVFVDPRGPFGPPRSASRREARKVPVAITAMGARRPGAPRPQQSHGRPREQARTNHLGRLEPRCGISRRAGGAGGRVTASCHGRLRGPRS

SEQ ID NO: 311164 - protein, 361 aa, unidentified
MFTERTSVGLDVHARSVVAAAIDGDTGEVFRARLTPGNDDVIGWVRSLPVPSAVVYEAGPTGFGLARAFTTAGIRCEVAAPSKIQRPAGDRVKTDARDAMLLARLLRLDDIVSVTVPSVEQETARDLVRAREDARGDLMRARHRVSKLLLRQGIVYYGGNAWTGTHLRWLRKQRFDAPGLQLAFDAEHEAVLQAEARRDRLDTAIEAMATDSEYTEVVHRLGCLRGIATLTGFGLAVEVGDWDRLTGSTIGAYLGLVPTESSSGQSRSQGSITKTGNTHARRLLVEAAWQHLKPYRTPGVTMRARWELAPAAARARGHAGNQRLHQRWMHFTERKKPPVVANVAIARELAGWCWSLAVMDG

SEQ ID NO: 311165 - protein, 368 aa, unidentified
MKLLYEANPFGISKDQKGFGVMVTLTFQPQKERCMKYIGMDAHSSICVFCVMDEHGVEVDEATIETNGRLLVEYVRSIEGKKKLVFEESELSQWLYELLHDEVDELIVCNPVANREYKKAKSDKLDARRLAKLLRGGFLTPVYHSGSARERFRSLMSGYQSLVEEATRLKNRYKSLFRKEGNNVKGKALYNDESLLEGFERSDFKFVGERTFELLQQMELQRLAYVKEIKRVSKGFKEVRWLKTIPGIADIQASKIVAQVIDPHRFPNKYKYYSYCGLARHGRSSAGKPCGSIKGHGNRALKCVYKMAAHSALRGDNGLRRYHDRLCAKGVNEGDAYNAVCRKIAAISLSLWKHERRYDDQLIDNPLK

SEQ ID NO: 311166 - protein, 419 aa, unidentified
MKILYRRCAGLDVHEKSISACIRIVKSRNEVETVEATFSTFTEDLEQLRDWLRRNRIQRVAMESTGVYWRPVWNILERSKLNLVLLNPRHVKALPGHKTDRVDAARIAELTQYGLVRASFVPPQEIRDLRDLVRRRVHLQQDRNRVSNRIHRLLELQNIKLSSVLTKLTTVTARSILEGLATATTMKPESLAILATHKRVRAKRDQLRKALRCTLTDHFRFLLRELLEELDRLSGKMKLLEERIAEQMQPYRALIERLCEMPGVEKLTAWTLIAEIGVDMGRFPSAGHLASWCGLCPGNAESGGKRHSGRTSKGNRYVRRALVQSAWAAARITRQRTFFTTFFYRISHRAGMKKAAIAVAHKILSLIYVMIRDGSAYHEQGGDYFDRLHPERTRNRLTARLERLGFLVELKPKIPPSTS

SEQ ID NO: 311167 - protein, 341 aa, unidentified
MKVSTLGIDLAKNVFQLHGVDHEGHTILRKKLTRAKFVQFVIQLEPCLIGMEACSSSHYFARLFTRYGHEVKLIPPQYVKPYVKTNKTDAADAEAICEAVTRPNMRFVQIKTEEQQAVLALHTERGILIRERIACANCLRATLAEFGITIAAGQSHLTRELPAILEDSENGLSPFVRTSIYRQSKHIRELEEQVKQVEEALASWYRTQEACQRMAKIPGVDMLTATYVVAAVGNARQFSTAKQFASWLGLTPKEHSSGGKQQLGGISKRGDGYFRYLLVHGARALTAWVNRNGAVEENSWLQGLLERKHYNVAVVAMAAKTARIMWSMLSHNTEYQPRQLA

SEQ ID NO: 311168 - protein, 403 aa, unidentified
MNAVGIDVSKRKSTVTIRRPGDKVILKPCDFQHTQSDINALIQIIKGLDGETKVCMEHTGRYYEPIATWLSNSGIFVSAVNPVLIRSFGDESLRAPKTDKADSRKIARYTLDRWDKLKQYCHMDEIRNQLKTMNRQFGFYMDQKTAMKNNLIALLDQTYPGANDFFTCPTRSDGSQKWVDFVYTYWHVDCVRSRSLKAFTEHYQNWCKRKGYNFSADKAEQIYRVSTDLISVFPKDACTKMLIHQAVDMLNTTSRTVETFRTEMDKTASMLPEYPVVMAMNGVGPTLGPQLMAEIGDVTRFEKRGSLTAFAGVDPGKKESGDYIQKSVHTSKKGSPHLRKTLFQIMESLIQRSPSDDPVYAFMDKKRTQGKPYYVYMTAGANKFLRIYYGRVKEYLAGQSESE

SEQ ID NO: 311169 - protein, 352 aa, unidentified
MPMLADAIDAVLGVDTHRDVHHAEIAHPSGAAIAACSVPNTSSGYAQLLDWAHKHAPGPRLAACIEGTRSYGAGLARAATAAGLTVIECEQPTRRTRRGKGKSDPIDAHLAVLTALRLDTTKLPTPRADGDREALRILLCARQELTTLAAARTNRLRALLRDGDDTDRDLARACRLSGKTLAALAGRAQPSGASRAQAVRHAEIRRLALALLDTAQQVKANHRELNAIISDLAPGLTSRPGIGPVSAAQAIVSFSHPGRCRHDAAFAALAGTSPIEASSGQTTRHRLNRGGDRALNQAIHMIAVTRMRVCARTRDYVQRRTAQGKSTREIRRCLKRYITRELYRALTTAMTT

SEQ ID NO: 311170 - protein, 342 aa, unidentified
MTITIGIDPHKASHTAVAIDNNETVLDELRVNASKDQTDQLRCWAAPFPDRVWAIESARGLGYLLAQQLVAAGETVVDVPPVLSTRTRLLGSGKGQKNDPNDARSVAITALRHTSRGQVAADDHAQALKLLSKRHRDLSRSRNKTACRLHSLLTELSPGGMAKTMTVTRANEILDNLEISDAVLEHRVAIAREFVEDIARYDAQRKASLKRLRAAVAAADTSLTQIRGIGPVNAAIIIGHVGNIDRFASAAHFASYNATAPIEASSGENRRHRVNQRGNRKLNHAIHIAAITQLRQPCDGRVYFDRRRAEGKSSKEAIRALKRQISNAVYRALVADARRVSG

SEQ ID NO: 311171 - protein, 352 aa, unidentified
MLIIGCDFHPGFQQVAIFDNRTGEIQERRLPHRAEAEQFYHSLAGQQVRVGMEACGHYPWFERLLEELGFELWMGDAAQVRASVVRKQKTDRRDAEHLLQLLMENRFPKIWVPSLEVRDVRQLLVHRHKQVQARTRTRNQLQAMALSQGVQKKWKLWTKAGRAELEQLPLLPYAAERRKQLLQALDQLAAEIAELNGRVEEEVRKRPEAVRLRTHPGVGPVTALAMVLTLGPAERFASGKDVGSYFGLIPREDSSGGKQRLGRISKQGSSFLRFLLVEAGQSAARYDPQLKRFYRRLATRKNRGVAKVAVARKLATRLYLMLREQWTYPQLCQAVMQASPSHSVVEHQKPTA

SEQ ID NO: 311172 - protein, 343 aa, unidentified
MQTVTTIGLDIAKSVFQVHGIDEAGKVLIRQQLKRGRLLAFFKKLPPCLVGIEACASAHHWARELTALGHDVRLMPPAYVKPYVKRQKNDAADAEAICEAVQRPSMRFVPIKTPDQQAGLVLHRTRHLFVRQLTAVTNALRAHLAEFGIVAPVGRNGVDQLITLVNDRTERRIPDVVRTCLFALTIQVDALREQIRILDRRLVGWHRTNEVCRRLDAIPGVGPALATALVASVADPKVFRSGRDFSAWIGLVPKQNSSGGKEKLGNITKAGDRYLRSLFCAGALSVIRRVQTHGGKHRPWVAKLLERRPAKVAAIALANKLARMAWAMMAKGESYREPVALAR

SEQ ID NO: 311173 - protein, 347 aa, unidentified
MYYVGVDLHKEMSWFYVMDSHGRKLSSISISNNPERLKQFFEKIPTPFTLAVEATYNWYFFVDLAEQFAEKVFLADSFELKAFAKRHKKTDKIDARLIADVLRKGYLPSVFIPNQEIRTMKELLRYRINLVQDRSRYIFRLKNTLDRLGADSSGNFTTAKRLNLFPISSFSPEYQTIISGYIARIIELSKQIHSMKTYLRDSYEHDTDIRNLITLDGLDYFSAALIKSEIGDIHRFSSFGRLCAYAGLAPKVSQSGSKSARHGGLLHNRRKHLQWILLEVVFPYIKASPEREVRYEYLKRRKCANIAKVIFARQMLKMVYHILKEQRPYYEDTHSIQSVAAPALAGV

SEQ ID NO: 311174 - protein, 356 aa, unidentified
MSYLIKLDFAGQHIYIGLDVHKKSWSVCILTHQLEHKTFTQPPDPVVLVNYLKRNFPGATYHAVYEAGYSGFWAHDRLRELGVDCIVVNPADVPTKNKERKRKRDKVDCRKLARSLRSGELTGIYVPTRINVEDRSLLRTRRNMVKKQTRCKNQIKAMLLFYGIHIPPEMHQGNWSRRFIAWIEAIQMEKASGNVALKVHLEELHHIRRIVVNLNRSIRALSRTDEYRENVRLLKLAPGISILSAMTFLTELYHISRFRSLDQLASYVGLIPDTDSSGEKDTTTGITKRRNRVLRGILIESAWIAARKDPALTMAFEKLCTRMKKTHAIVYIARKLLNRIRYILKNQMEYVPAVVQ

SEQ ID NO: 311175 - protein, 354 aa, unidentified
MSQNPNTSMAVVGIDIGKNSFHVVGLDPRGAIVLRQKWSRGQVDARFANMPPCLVGMEACVGAHHLSRKLKMLGHDARLMPAKYVRPYSKGQKNDFRDAEAIAEAVQRPTMKFVATKTADQLDLQALHRVRERLVSQRTGIINQIRAFLLERGIAVRQGQRFLRAELPRILATPPDVLSPRMVRVIEDLAGDWRRLDERVEGLSSEIEAVACQDAGCERLMSVPGIGPIISSAMVAAIGTGDGFSKGRDFAAWLGLVPRQMSTGDRTILGKISKRGNRYLRVLFVQAAWVVLIKPKSWERHGLKSWIEAAKKRLHHNVLAIALANKLARIAWSVLARGRAFEVRKVDEAAVQSA

SEQ ID NO: 311176 - protein, 343 aa, unidentified
MAIVCVGIDLAKNVFALHGVDEAGKPALVRPTVPRAKLLEAIAALPPCLIAMEACSGAHHWAREFQALGHTVKLIAPKFVIPYRLSGKRGKNDSADAAAICEAAQRPSMRFVPAKSLEQQGQLCLHRVRQGFIEQRTALINRIRGLLSEFGIVLPLKAATVRREALLHLEDLPGWANLAVGDCLSEVGRLDERIGQYDRHLAHLARESEAAKRLMRLAGIGETTATALTAAIGNGHDFQCGRQFAAWLGLTPGQYSSGGKTRLGRITKAGDAYLRSLLVLGARAVLAAAKNKTDPISRWVRNVEERRGYWKAVVAMAAKNARLAWAVLAKGDAFKLPAAAATS

SEQ ID NO: 311177 - protein, 430 aa, unidentified
MKSNTQNAKIEAITEKTLVLGIDVGSEMHYARAFDYRVIEYSKKPFKFSNTGVGFATFKEWILDLKERHEKDKVVPGMEPTGHYWFNLGKFLQDNEMKPVLVNPHHVKKSKELDDNNPTKNDRKDPKVIAGLVREGRYMIPYLPEGVYADLRTASNIRFQLQAELTRIQNRISRWFNIYFPEYKTVYGKPDAKSGMLILKAAPLPEDILTLGIDGVNQIWRDAKLRAVGKARAKTLIEAAKHSVGSKEGAVSARMEIRMLLEDYESRNTRLQEVMVLIEELVRKIPMAEKLLEIKGVGIRTVSGFLAEVGDISRFNNPKELQKLAGLALVENSSGKHKGETTISRRGRKRLRYLLFEVAMSLVSKNQEFRELHNYYTTRRLNPLKKMQSLMAIEAKLIRVFYAMLTKGVDYDPKKMVSDIKRPAVYLQAA

SEQ ID NO: 311178 - protein, 402 aa, unidentified
MTYDYVIGMDVGKYFHHACVLDIDGTQVLSKRINQNEQSLRALFSALSAYDHKVLVVVDQPNNIGRLTVAVAQDIGIDVRYLPGLAMRQLSRIHAGNAKTDIRDAYIIAHAAKNLPESLRSVDRVEEAFLQLKVLNGIDEDLARSYTRLINQIRSALVGCYPQFEQALRGQIIHRKWVLHLLARYGGPTKIKRLGKAKAAAFARRYKARNPEPVLDAIFAAISEQTVTIAGAHYAEMGVAMSAKDALLKLEHRQQIEKEVIELINDIPHTQFLLSMLGIGPKTAAQILMTAGDMSDFPSAGHLASYAGLSPRTNQSGTSIMSNSLNRAGNKKLKNALWQSSFASIRFHERSRQFYERKRREGKRHNAAVVALARRRLNVLYAMMRNHEHYHDPAPSQEDLAA

SEQ ID NO: 311179 - protein, 385 aa, unidentified
MFYVGIDIAKTKHDLACINETGETVITNFRFANSYQGFHQLKLKLKQLSPITQDIHIALESTGHYNYNIVAFLRELGYTVFAYNPFIIKQFAKSQSLRKTKTDKKDALLIARKLRSDVTPEYYQTDKVMDELKELTRYQNRLIQSRSKCKNLYIRLLDIIFPEINSYVSNLHSHFVYELLTKYPSAQKIARARVSSLLKIKRLTADKAHQIQEAAKQTIGNASSALSLELVQLIESIQHYDKQINQTQEEINRLMTGLDSPITSIPGIGSRLGAIILAEIKTIHNFKNPNQLQAFAGLDPAIYQSGQMDNTGHMVKRGSSYLRYALIQAAKLISIYSPHFKDYLKLKISQGKHYNVAVTLIAKKLIRVIYHLLKTNQTFDEAKLR

SEQ ID NO: 311180 - protein, 468 aa, unidentified
MALTLGIDVACRAAHQATLAVDGKTVWRGRKFWTRPADLERLWDDLDLAEPGELTVVVEPTRNAWIVVAEWFRRRGATVVMVPTTQSSDLRKYYSKHTKNDRIDSELLARLPLLHPEGLRPYSGQGPADPLRRLTRQRSTMVKRRTAVYARLDALTELLGPAWYEALNARYGIAALEFLARYADPHAVIRLGQARLARFLIARSRGAWREDRAAALIVAAKETLSLWTLDDGSDGMDFAELAADIAHEAEQALFLTGQIKEIDERIANLYADADPDGIVASAPGVGPVISAVIAGRIGDPHRFTSLAAIRAYSGLVPKVSQSGVSKVESSITKAGDPLLREMLFAAADQARKVDPQIAAKYQRLMAGDRHHSSAVCHLATTMLTRIATCMRTGQHYVLRDVDGTPITQAEGRAIVKDRYQLQPRRRDNVRHQRMRERRKQAAGQESQESQSAPTSQPASTKPTSRQVA

SEQ ID NO: 311181 - protein, 419 aa, unidentified
MKKDNNSRKKSELNSKRAKSGSTEHRGTKEVLAELVGRLREKLNPKVASADPRQEGPRDRGSLRPNLDRLTVGVDLGDQWSNYCILDLEGDTLAEGKLRTTQEEFSEFFQGLNAARVVVEVGTHSAWVREVIVGCGHEVLVANPRLMEGSKRRKRKNDRIDANKLARLGRVDPQSLHPLEHRSTEVRQDLVMLRARDALVSTRTELINTTRGLVKSMGKRLPSCSSRSFASKTEEGVPVEIREALLPLLQIADAVSNCIKEYDRRMEEMANQKYGHTKLLRQVKGVGPITALAYALTLENPQRFAKSRDVGPYLGLVPKQEDSGESQPQLGISKAGDSMVRKLLVGSAQYILGPFGPDTDLRRYGLRLCERGGKNAKKRAVVAVARKLAVLLHRLWVTGEVYEPLHHSMSLPTVTATAA

SEQ ID NO: 311182 - protein, 341 aa, unidentified
MTTIDAEKPDTKVEVILGVDTHLDFHVAVAVDHLGRRLGELSVPTTTKGYERLLCWAEGFGPVRCAGIEGTSSYGAGLARYLKTSGTEVLEVERPKRPQRSSRRHLKKSDPSDAERAARAVLAGEPSGAPKSGKGRVEMIRTLRAARRSAMKARTQAANQLQSLRLTAPEELLNRLRALSTKELVSVAARFRPGDDPNDVPTATKFALRSVARRYEALSAEIAELDAQLDRLVTQVAPELVCLPGIGTDHAATLLIVAGDNPQRLRSEASFASLCGVSPIEASSGKVVRHRLNRGGNREANRALYMTCLARMRRDRRTKEYVARRTAEGKSKREIIRCLKL

SEQ ID NO: 311183 - protein, 393 aa, unidentified
MSLDHHFAEPTAIRTNLGAIFVSLELSRSTWLITSLSPGGGEKMSKHGLSAGNIAALLARLSELKQKAFARTGQSFQVIVIQEAGLDGFWIHRVLQSEGVESHVVDAASIAISRRRRRPKTDRVDGEALVRALLAYKRGEPRVCAMVRTPTPEEEDRRRLCRERKTLTNERVQHVNRIKGLLFCQGISGYEPLRRNRRQRLDELKTGGGRPLPPHLKAQITRELDRLELLLGQIEAVEIERDALLSAMKPDGMNADAVRSPPAMLINLNGIGPEIAAVLWSEGLYRSFANRKQVAAYAGLAPTPWQSGSVAREQGVSKAGNPRLRTTLLQLAWLWLRHQPQSALARWFHERVTRNGGRLRKSTIVALARKLLVALWKYVTAGVVIDGAVVRAA

SEQ ID NO: 311184 - protein, 345 aa, unidentified
MALYVGLDVSLRMTSICVVEADGSSVWEGKAESEPVPLVKVLSPWRDKIALVGIEACPLSEWLHGALVESGFQIVCIETRHAQRFLSSRPNKTDRSDARGIAEMMRLGHYRSVHVKSKASQLLRTTLIARKKFVDHMLAIEDTIRGLMKVHGLKLGAVHRSRFPARVETLLADAPDLRMAIEPLLEARNMMRKHKALMDRQFSQMARKDHVCKRLMTVSGVGPLVSLSFKATIDDPNRFKDSKAVAAHLGLTPRVYQSGEIDRSGNISKCGDKLIRHALYEAANSHMRISKKWSTLRAWGVKLAKRIGSRKACVAVARKLAIIMHRMWVEETDFRFGKPPVTQPT

SEQ ID NO: 311185 - protein, 429 aa, unidentified
MTVSNDTPQRVTLVAVDIAKNSHDVLIESPARGRRRRLRLANNLEDFEQLAGYLRSLKSPVLIGFEATGNYHRPLAYFLHRQGFELRLIPTLALARTREAMHNSWDKNDPKDAQVILHLLKTGLAQTWHDPVVKGINDLQELSKTHFQVTLARVRVWHTLRNHYFALYFPEIDRFIRSDHSVWLVQMLASFPTPASITALSEAEFQKQAWNLVGRKVSKRALLAEIYAASKRSIGVPVQLDSAAIAMFRLVLGEYLDLHRLRERIAERAAIMLGDNPDSRRLMTVPGIGPANALTILAEAGDLRRFRHHRQFLNFCGLNLSTLQSGKSRSQSHISKYGNARLRTALWMAAQTAVRMRENSFRRKFDNYVRGNPLDADLRRKAYTAIAAKLARVIFGLIKSGADYRPFFEHKFQVEEPSRAGAVGAISTP

SEQ ID NO: 311186 - protein, 346 aa, unidentified
MKVLIGVDPHKASVVIAVVDEAVGDLIERATFPQNRAGLRSLERWAKRFPERRWAVENAGGLGRHLAVRLAAAGESVVDVPPKLSARVRVLSTGNARKNDGLDALATALAASRHERLSVVDPEAASEVLRLLSERREDVVAERTRALNRLHGLLRDLVPGGVAGTLSAHRAARILRGIRPQGASARLRRRLASEILRDVRTLDRKIADLNERIKAEVEASSTTLTEIFGVGPILAAKIIGTVGNVARFPTKAHFASYSETAPVEASSGEVVRHRLSLAGNRKLNNALHMVAICQARSDARGGAYYRKKIAEGKSRKEALRCLKRRISDAVFKSLMADSRAPSRSAA

SEQ ID NO: 311187 - protein, 414 aa, unidentified
MFAVGVDVSNGRSTVAVLGAKRKVVMKPFEVPHTADGFASLAEKLNGLDGETRIVMEHTGRYYESFAMSMYRAGFFVSAVNPLAIKDYQEGISVRKVKTDKADALKIAQFAIDKWEILPQYTPMDTIRYNLKTLHRQFHLSSKTKTALNNNLIALLEQSYPGANRYFDSPVRPDGSQKWVDFVDTFWHVDCVARVSQNAFVERYRKWCKRYGYNFSEQKAIEIHTEARQKFPLVPKSDTCKLLVKEAVSQLNAVSRTVETYRTEMDRLASQLPEYDTVMAMTGVGKSMGPQLMAEIGDLRCFAHQKSLVGFAGTDPIKDDSGDKVSDSKPSSKRGSPYLRKTLFVIMTILLQLQPQDDPVYQFLDKKRSEGKKYYVYMTAGMTKFLRIYYGKVRDCLKEQGLWDSPPSQKVNPD

SEQ ID NO: 311188 - protein, 361 aa, unidentified
MNATTAAIDLAKNVFQVALADSQGRVLEQHRLTRAQFERFFDNRSVSRMIMEACGSAHHWARVFGARGIEVSLLPAMYVRAYVRRSKTDAADALALLEAARCADIVAVKVKSVEQQSLQALHRTRSLWMATRTSRINALRGFCRELGLHVPVGARTGLEAIGRAVADQQSPITPLLRPIMLQLLDEIRLLETRVAQLERQLAQLARESHACKLLMSIPGIGLLTATAILAATAGSVAHFKSARHFASWFGLTPKESSSGTVRRLGRISKMGDRYLRMLLTHGARSVLRAAKVAQMKGLELIGLRQWALELQARSNHNKSACALANKMARICYAVLRDQTPFGQPAARLAKKMQRQSFELAY

SEQ ID NO: 311189 - protein, 345 aa, unidentified
MEQIIRIGMDTSKYIFQLHGVNTAEQPVLRKKLRRKEMFAFLEKLAPTVIAIEACGASHHCARLLQSFGHSVKLIAPQLVKPYIKRGKNDAADAEALCEAMSRPTMRFVPVKTAEQQAGLMLVGVRDRLIRNRTQLSNAIRGYAGEFGLTAAKGKAHLAPLLERIHADESLPALARELFAAQAEEYAQLQAQIDEVDARLMAWHRADECSRRLTKIPGVGPIGAVMLTMKTPEPELFRSGRQFAAWIGLTPKDHSTAGKVRLGGITRAGDEGLRSVLVVGATTVIQHAQRGGRPSPWLTQLLKRKSPKLAAVALANKTARIAWKLMVTGENYAAKAAPAALAAAA

SEQ ID NO: 311190 - protein, 461 aa, unidentified
MAQRNRAGSRAGLSLTHPNAAGIDIGSAAHFVAVPPDRDEQPVREFKSFTADLQRLADWLSACGVDTVAMESTGVYWIPLFELLEARGFTVLLVNARHVKNVSGRKSDVLDCQWLQQLMSYGLLRGAFRPAERVCALRALARQRAMLLRTQSRCVQHMQKALTQMNIQLANVIADVVGETGQKILRAIVAGERDGYTLAALKNVRIQASTDEIARSLHGTWRAEHLFALRQALDAFDFCGTQLAQCDSEIETQLERPHITADEPAKGKTRSRARNAPKFDLRTRLFQMCGVDLTRIDGIDVTTALVVLSEIGPDRSRFASDKHFASWLGLCPGTKITGGKLISGKTRRGANRAAQALRLAAAALRSSQSALGAYFRRLCSRMDKPKAVTAAAHKLARLIYALLTKGEQYTDQGQDYYEQRYRQRVLANLARRAQQLGMRIVAIDQPTSNTSLQISHLRGVS

SEQ ID NO: 311191 - protein, 306 aa, unidentified
MEHDVGLDVGLEETNLCIVDHEGKTVREVKVSTEPAAIRSALEGYADRLSRVGVEASSLGLWLHRELHAGGLPIIVVEARHMRVSLSTMRNKTDRNDARGIAQMMRLGWFRAVHVKNIEMQKMRTLLTNRKLLKRKLVDIENHIRGALRTYGLFVGFVGRGHYEARVRELIKRTDFVFSTMIETMLDVRRAIFDGYSRLHRAVLQVVQHDPICRRLMTVPVVGPVASLSFKVGVDDPLRFTRSRTVGAHFGLTPRRHQSGTSIDYEGRITKQGDVSVREALCEAAASLLLRVRKWSALRALGSSGC

SEQ ID NO: 311192 - protein, 339 aa, unidentified
MKLYSGMDLHSNNTYCGITNESGKRLIGHRLPNEPKVILGFLEPYQPDLEGIVIESTYNWYWLVDLLQENGYRVHLSHPSGNEQYRGLKHTDDRHDAFWLADLLRLGCLREGYIYPKQRRPLRDLLRKRAHLVRLRTSLLLSAQNSVQRNRSLHVSNEDLKKLTVDLLSVHLEGDEALWLAAKASKELIDAFTHRILRIESWILKHLEPQVGFGYLLTLPGVGEILGMTILFETGPIQRFPDVGNYVSYSRLVASQRISNDKVKGKGNQHNGNPYLAWAFSEAAEHARRHYPKCRAFYNRKLQQKNATVAHCALAHKLARAAYYILRDQVVFDETKLFS

SEQ ID NO: 311193 - protein, 345 aa, unidentified
MELHTIGIDLGKTVFHLVGLNLRGEVVVRKKFSRTQLLRFTSNVHVGLIGMEACGGSHFLGRALREQGHEVRLIPAQYVKPYVKTNKSDYIDAEAIAEAVARPTMRFVPIKTDDQLDMQSLHRVRERWVMRRTAVINQIRGLLLERGITLRKGRCYVGAALPGILEDADAKLSGALRMLLAQLKLELDHLDMLIDEANALIKKTACENEACQRLVAIPGIGPVTATAVIVAIGNGGAFHKGREFAAWMGVVPREHSTGGQQKLLGISKRGNSYLRRLFVQGARAVLQQRTKQSSGLSAWLAQLTSRTHRNVAAVALANKLARIAWAVLAKNEPYRPPVLADVAAA

SEQ ID NO: 311194 - protein, 392 aa, unidentified
MIYIGIDVAKEKHDCCIIDSDGVILNDSLRISNTREGFELLYDSILSVLPDKDISNVKIGLESTGHYSTNIQNFLYNKGFKLSILNPLSTNLFRKAQTLRKTKTDKTDSLVIAKMLFSDDTKSYIPVSYQIEELKSLTRHRYRLIGYRSKLKISINRLIDIIFPELPKLLWSIHQNSSYALLKELPSPKDIDSCHLTKLTNILNKASKGKYSKDKAIELKAYARDSIGTSTRSLSFELQQTIRLIESVQDEIKILDNQIKEVVTELNSPIITIPGISYTLAAIILAEIGEIERFTTPAKLLAFAGLDPSTYQSGKYSASHTPMVKRGSKYLRWAILMASRTVSMRNLTFSEYLSKKRSEGKHYYIAMSHVAKKLLRVIFYLLKSNTAFVPQM

SEQ ID NO: 311195 - protein, 368 aa, unidentified
MKKNTSNKQRTGKGNRQEQEKEAFAFYIGIDLGDKYGETCVMNPAGEVHQQFRLRMKAADLQGYFLTIGRSRVAVEAGGQSQWVAELIERCGHQVYVSNTRKVAYMYESDDKDDPGDACKLAELVHFKPRLLHPIQHRSQALQADLSWIRAREALVESRTHLINTIHGISKAFGERLPKCSVESFTAKLAAEIPAAIRGAVAPLLETIDDLNEQIHYYDQMEEQIARERYPKYRLLEQVNGVGVHTALSYMLTIGDPERFQKSRMVGCFLGMRPRKQDSGESRPQLGITKAGDEYLRKTLVNCAHYILGPHGTDSDLRRFGLRICERGGKNAKKRAVIAVARKLSVLLHRLWVTGEAYEPLRNSKKVA

SEQ ID NO: 311196 - protein, 359 aa, unidentified
MRIIGCDLHARQQTLAMVDSTTGEIVNLTLTHEGDNVREFYSNLPRPVRVGIEATGSMQWFLNLMEELGIECQVGHPANIRAAEPRKQKHDRRDADLILKLLVEKRFPSIWLPSKELLDLRGLLLHRHQWVRMRTRVQNALQAIALANGLRRGPSLWSHAGQDKLASLSLAPHTAHRRSELQALYAKFDMEIEKLNQRVEEQAWERPTALRLMTHPGVGPITALATDVFLGDATRFVDGKALASYVGIIPREYSSGGRQRLGGLTKQGNPLLRFLWCEAAIHAVRKDPELQRFYLRKLFQKGLGKARVAAARKLGIRLWILLRDQIDYNEFCRRGQMRQKNGGTCAGMPARVIAQTVAD

SEQ ID NO: 311197 - protein, 384 aa, unidentified
MNKHNILFIGLDTHKEFVEVAYIEDQRGAQAVHFGRVSSAKASITKLARQFQSKYPEATLHFVYEAGPCGYWIYRLLTSLGYCCYVIAPSLIPKKPGEKIKTDKRDALKLAKLLKSEDLTAIYVPEPEDEAIRDLSRARETAMKDLKDAKYQLKALQLRNNINYRGTANWSLKHLRWLTELILPHPSQQIVLQEYLQTISERIARLKRLDNELEHHVKKWRYYPVIKAIQALRGVRLLVAAGVIAELGDLTRFDHPRKLMSYVGLVPSEHSSGGKRHVGAITKCGNGRARRLLVEGAHSYRYPAKISTEMQIRQEGLPKEIIDIAWQAQLRLCRRYQKLTYKGKHNNVVVTAIAREIIAYIWAISREVVLTNVNPKLRLSRVPA

SEQ ID NO: 311198 - protein, 317 aa, unidentified
MPTIINFVGIDMAKNDFYACLSDVIEPVAFNNDGKGIKSFFSYLKRHDFKKENTLLGVESTASYHLKLCIDTAERDYKIKVINPLIIKKQNQIDLRRVKNDKKDSRLIRFCLIGGVGYLFNNDPEAIILKSLIRQRDSLVFSKLKFTRQQDNIRLKEQCLKQDISPVYTEIINVLEDKINTLKADLRLYRPKEQYLLESIPGVGPITAASFISEVGDINRFKKPEQLVAYVGIDPRVHQSGISVNGKGYISKRGNKILRTRLFNAASVAVLHDNIFKTFFQKKIDEGKPYRVALVAVMRKMTHVIHAVWTRGTPFIQ

SEQ ID NO: 311199 - protein, 343 aa, unidentified
MKLFIGLDVSLAKTAVCVINEHGKIAKEAQVPSDPQAIVDFANTLEGAVAIIGLEAGPLSQWLHRGLADAGLDVVLMETRQVKGALKAMPIKTDRRDAEGIARLLHMGWFRPVHCKSVSAQEVRALLAARKAIQQGMIALELSLRGLLRNFGLKVGAISRGQFGARIRELVDGNAMLQAAAGPMLRARASLRQELAGLERQVRLLAKDDAVCRLLMTMPGIGAVVALTFRSAVDDPARFSSSKKVGPWVGLTPSRNQSGERDVIGGITRAGDASLRRALCQAATVMIHRGRSTWLRSWAVQVAKRRGAKRAMVALARRMGTILHRMWRDGTEFSTVPLIAKSA

SEQ ID NO: 311200 - protein, 331 aa, unidentified
MNYSHFVGLDVGKKTFDASLMSAAEKELSHKSFDNTPEGIQSLLDWIAGYHLSLSKLLFCAENMGSYVTELSVSSVSMGFSLALVCPLTIKKSIGLQRGKNDRIDAKRIANYAVLHYRKLELYKLPNKDLVRLRGWIIIRDNLVKQKVSNIKLLETFSQMAKLADVTESISFLEEQLKSIKEKILEVEEDMEQLIAASTSLYTNYLLLRNIKGIGIINAIVLLCVTDNFQRFDNPRKFACYCGVAPFEHTSGISIRGKTQTSSLANKEVKVYLTRAAITAISWDPQMKAYYKRKIAEGKHKASVINAVRAKIIARSFAVIRRQTPFVTLAV

SEQ ID NO: 311201 - protein, 347 aa, unidentified
MNFYTKQHKYYCGIDLHAKSMYLCIISQEGNLVLQRNIRTDPEVFLKTIERYQDDIVVAVECIFTWYWIADLCTQQNIPFVLGHALYMKAIHGGKAKNDKIDAHKIAVLLRGGMIPMAYVYPQQMRSTRDLLRRRMHLTRKRAELLAHIQNTNYQYNLPEIEKKVAYKANREGVAERFPDESVRKSIELDLKLLDYYDQLLPRLEHEISLIAKAHDADSYFRIRSIPGIGRILGLVILYEIHDIRRFPTVQDFVSYCRLVKSAKESAGKRLGSSGKKIGNVHLKWAFSEAAVLFLRRNPEARKYRDKLQKKHGKAKSMTILAHKLARATYYILRRKEVFHMETFFEK

SEQ ID NO: 311202 - protein, 362 aa, unidentified
MAKVRSWVGLDVHARSVLAVMIDGESGELRSRRLSGSTSEVVEFCCALPGPARVAYEAGPTGYGLARALHTAGVGCVVAAPGKIERPAGDKVKTDQRDAERVLRLLMIDALHAVRVPSGQEEALRDVVRAREAVRGDLMRARQRLSKLLLRHDVRYEDTASAWTVAHRGWLTKIDLGERGAQVTLLEYLGAIDAIVIRRDALEKTIAELIPGSPWEQTVARLRCLRGIDTLSAVGLCAEVGDFGRFAKAGQLMSYLGLTPSEDTSGDKRRLGSITKTGSRHARRLLVEAAWHYRRAPAKGLTLRRRQARQPAHIIEISWQAQRRLHNVWQRLDAQRGKRRTIVAVAVARELTGFCWALANAD

SEQ ID NO: 311203 - protein, 346 aa, unidentified
MTILDGTRPVTGGVDTHLDLNVAAALDPIGGLLGVAEFRTTRIGHSLLVDWLGGFGPVARVGVEGTGSYGAGLARFLRGAGIEVVEVDRPNRQARRRTGKSDPADAVEAARAALSGRAQGAGKTRDGNVEAIRALVVAKRSARSSKIKALNQIRHLGFTASDELRERFSGISRQHLGAAAARLRPRAGSDAITFATKTALSILGRRVLALDEEKERLNVLLAELVAKTAPSLLELHGVGVDTAATLLVAAGDNPGRLRCEAAWAHLCGVAPIQASSGKVTRYRLNRGGDRQANSALWRIVITRLGSDPRTQIYMQRRLKEGRSKPEIIRVLKRYVAREVYPHLPRG

SEQ ID NO: 311204 - protein, 343 aa, unidentified
MQAITTIGLDIAKSVFQVHGVDAAGQVVIRRQLKRRYVLAFFQKLPPCLIGIEACASSHHWSRELKALGHTVRLMPPAYVKPYVKRQKNDATDAEAICEAVTRANMRFVATKTPEQQSCLMLHRTRHLFIRQQTAVINSIRAQLAEFGIVAPVGRKGVMELLHVVADPSDKRVPEVARACLAALGTQLLSLKEQIVRFDRMIMAWHRSNEASKRLHYIPGVGPMLATALVASVADPKVFRSGRNFSAWIGLVPKQHSSGGKDRLGSISKQGDRYLRSLFVAGALSVIRYAKIHGTKHRPWLMALLARKPTKVAAIALANKLARMAWAMMARGERYRNPVALAA

SEQ ID NO: 311205 - protein, 327 aa, unidentified
MFQYVLGIDVSKDTLDVVLWDGEHGNHQVFSNSPVGYTRLGHWLISQKTGRVHACLEATGQYGEGVAESLYSMGNPVSVVNPLRIKRYGDSKLHRNKTDKADAALIAEFCLKENPPLWKPLPSYYKQLRQMVRRLEDLQTNYQQESNRLKSGMDNEWVVEDLNDHLQELHKRIQTLKTTFQQFISETPELKQQADLLISIPGIGKLTAARLLAEIGDITSFEDAPQLAAYAGLNPKGARSGSSVQKKTRISKEGRSFLRYILYMPAIVARRYNPIIQAFCARLFQRKLPEMAIVAAAMRKLLHLVFGVLKNQQPFDPNYLNKSVFAS

SEQ ID NO: 311206 - protein, 377 aa, unidentified
MKAPSTRPAAVLGLDVGKSSHWACLIDRDGEVLASAPVRNREAELDALFASAPAGTLVVVDQFRSIGSLAVRRARAAGLGVAHLPGLAASRAAGLFAGEAKTDERDAAVIARTALGVPDSLSGVPGRGEALEAARALSSQRDHVVACATRDKNRLRAVLLESCPALEAAVDLSDRRWLELLAGFGGAWGIARSGAGGPRAEAAGEAAAASTAPPPALVEAENRQVRFLAARISEALDEAGALEAETAALLEGDETYACLLTVPGIGPRTAAQLAVSVDIGRFPDHDHLASYCGIAPRVRSSGTSVRSVRASRRGDARLKSLLIFSCNSLVRSSGRYGEYYRACRARGMGHGRALKAVARKRLRAIYAVMRDRVPYRE

SEQ ID NO: 311207 - protein, 462 aa, unidentified
MTVPRNRSNRKHETPSPTPLPAIRPMVAGLDVGSSQHWVCGPPRADGTSEVRVFGTTTDQLNALAEWLADQGAESVAMESTSVYWIPIYELLESRGIEAVLVNARQLHNVPGRKTDVSDCQWLQLLHSCGLLRGSFRPGEAITRLRALQRQLANLVAERTRCVQWMQKSLDQMNVQVHRAVTDLTGVTGMAIVRAIVGGERDPARLARHRDRRCGKSAAEIARYLTGNWRDEHLFNLASALRLFDALETEIAAYDAQLLEEIKSLQPPEREADPVPPHPNPAKEKAIKARGEQSARTTLWRFAGVDLTRVDGISAGAAQVVLTEVGPNLAAFPSEDHFVSWLRLCPRTPISGGKPLKKRRNGLGANRIAGVLRMAATSLQRSKTALGASFRRIARHKGGAVAVFATARHLARLIYRMLRYGHDYVDIGEKAYDHRFQTRRLAALTETARSLGYTLVPKVATG

SEQ ID NO: 311208 - protein, 385 aa, unidentified
MKEQSFVPREFDIFGGLDVDKKSIAVTFMSHHGILLSFSMPYRAEHLLGYVSKHFEGKKVAFAYEAGPTGWGLYDRLTAQGHLCVVAAPSMIPKVPGQRVKTNRLDSQRLSEHLRGGQLKSVHVPSESYRQLRQLVQLRDTFVRDIVAMKLRVKALLLFEGLEFPPAPAGSQWSLIVRGKLKRLSCSSAVRFKLDQLMESLESTEKRVLQTIKEIRRFYQQDPELCQAMAHLKSIPGIGEIVASHLLARIGDPQQISNVRQLAGFIGLVPTERSTGDRVVRGHITRSGDGRLRSKLIQAAWSAIRQDPEVREFYRSVYQRHPRDRAARKAIVAVARKLTTRIYAVLKQQRPYVVREIVHSAPLTQEETSPQGTTRRLAEPGETFS

SEQ ID NO: 311209 - protein, 351 aa, unidentified
MNDSIVTYRTTKNNSPNQYDYYIAVDWSQNNMAIATLNQKSKQLHTLDLRSNLHNLKDYLSNLKGSKIITIEECPAAQWLYVELTENVDKVLICDPYRNRLLSDGAKNDVLDAEKLCILLKNGLLKEVYHTHNKLFELRKYVSAYEDIIKAGVRLKNQRSALFRSEGKNPRKESVKKTNVNTFIMDILDKNIENYEQDRKQYQSLFSQIKQHNTRLKNLCKIPGIEIVSAVKILADVVDAHRFPGKGNYLAYCGLVKHKRVSGQKTYGLRKPRYSRILKSVYKTAALVAITMSNNPIKDYYEYLLTKGIEIHNARNAVARHLAAITYGMLKSGEKYQPYKWKKVITSESKP

SEQ ID NO: 311210 - protein, 356 aa, unidentified
MSRDIKYMGMDVHKEAIVIAVLNGSGQLVMESIVETKASSMLQFIHGLRGELHGTWEEGTWAAWLYDLLQPQVARVLVCDPRRNALMKEGNKSDKVDARKLADLLRTGMLRPVYHGEHGLRTLRELGRSYQTLSQDLNRVMNRIKALYRGWSIPCAGTQVYAPRYREEWLHKIEHAGVRRRAELLYQQLDGLQGLRRTLRPELLAESRKHKAAKLLRQIPCIGPIRAARLIALMQTPHRFRSKRQLWTYSGLGIETRDSAQYRYVHGQLQRTKKPQQIRGLNQNHNHEMKEIFKGAATRASCGVGPLRDFYMALLAKGMKPEMARLTLARKIAAMALTLWKKEGRFDAEQLKPQAA

SEQ ID NO: 311211 - protein, 338 aa, unidentified
MNEIATIGLDLAKNVFHLVGCDAHGKIVKRKMLKRREVLAYVADLPPCRIGMEACASAHYWGRQLTALGHEVKLIPAQHVKAFLRGNKNDYNDALAIAEAVSRPQMRFVEIKTAAQQDIQALHRLRERRLQERTALCNQLRGLLAEYGLVLPRGIHVLRRTLPELLEDGENGLSDLFRRLLAQSYQQLRQLDAHIETYSEELKRYSQHSDACQRLQTIPGFGPVVASAFSGHVATGESYRRGRDVAASIGLVPRQHSSGGKEVLLGISKRGDRYLRCLLIQGARAVVLRANKHEDPLSRWINRLVDRRGKNRAIVALANKMARIGWAVLRYKTVYRTT

SEQ ID NO: 311212 - protein, 339 aa, unidentified
MYYGAIDLHKNNSVLGIINADGQRLYVRKIPNDLDLIKKALSPFAENLEGIVVESTYNWYWLVDGLQGAGYRIHLANPTAIQQYSGIKHTDDVTDAWWLAELLRTKQLKEGFVYPRAERAVRDLLRKRAHLVKQRTQNILSIQNLTSRNTGGRLNANQTKQLTEEAVQKFYDKEEERALAINCSLRVIQTLKREITLIEKQVKSKLKLSQPYQVLQSVPGIGELLAMVIMLEAGDMSRFPSVGDFSSYCRCVDSIRLSNGKKKGSGNRKNGNKYLSWAFMEAAHYAIRYYPGIRKFYQRKSAQKGIFVACMAVAHKLARASYYVLRDQVPFEETKCFVH

SEQ ID NO: 311213 - protein, 365 aa, unidentified
MFYLGIDQHARQITISLRDDSGDVVQARQVSTQPEKVHAFFQQLTRERLSDGASFVAVLEVCGFNDWLIRMLQEYHCHKVVLIQPEDRKKCKTDRRDAAALSELLWVNRDRLLQGKPVRGVRQVDIARGTDQENRRLTTLRKEAGQARTRLVNQARHVLRRHNLQWQMPTKRLPTQAAIAWLKQLALPAIDRLEMDHLLTDLEQVQRRLKGLERVIAQRCGVSEEAVLLSSIPGVSYFTATALACRVCRVERFPRARSLANYWGLTPGCRNSGEATQRLGNITKAGSGMARWLLAQVAIKVLRKDARLREWYKRIRRRRGSTIARVAVMRKLATIIWHMLSKRKSYAECRAVAGTGAEEREKQEC

SEQ ID NO: 311214 - protein, 420 aa, unidentified
MKGSTDSEFAAFVGIDWADRKHDVCLQAAGSSKCESSVLPHRPESIAQWAEGLRQRFGGRPIAVCLEIAKGPLVYALQRYAFLVLFPVNPTTLAKYRETFCVSGAKDDPSDAQLALELLITHPEKLTRLNPERGPVRVLRQLVEQRRTLVDDVRRLTNRITDALKQYFPQVLDWFEDKDTLVFCDFLTHWPTLKQAQRARKARLSTFFREHNVRYPHIIERRIQAILAATALTCDDAVIMPNRLLVETLVQQLRGLLQAVQRYDREIAELAPTLPDYPVFTSFPGAGPVFAPRLLAALGEQRGRYQLADEVQKYTGIAPVTERSGNKCWVHWRLQCPKFLRQTFVEWAALSIPHSYWAKAYYDQQRAGGSTHQEALRSLAFKWIRIVYRCWQDRTPYDEARYLNALKRHGSPLLAGPQKP

SEQ ID NO: 311215 - protein, 421 aa, unidentified
MPNIEIGVDSMVKENFIYVGIDLHKETHTAVMIDCYNQKLGEITFPNRPADFPKLVTKVKKCNTDGKEVVYGLENAYGYGRALAVWLIDKGYLVKDVNTAISHRQAKHRGAMYRKSDSDDAEGIALATLNMLDKLPDACPNDAYWSLGQLVHRRDNIMKQRTRLVNQLHEQLCIAYPSYKQFFNDISRPTALYFWEHYPSRKYLKGKSVEDLRAELVPISHNKCSTKTCEKILDAVASDKVKNNAYQDARDMVTLSIVSDLQHYDSQLAEVDKMLEQMYKMLGCTLTTISGVNVITAVKILAEIGDIKRFSNANKLAQFAGIAPLRLSSSGKGKDVATKQGNRRLQATIYFLAIQMVQVSSKGTPRNPVVRAYYEKRKAEGKTSQQALICISRRLISIIYGMLKNGTEYRMPVVENAGENR

SEQ ID NO: 311216 - protein, 414 aa, unidentified
MHDPIVTDGSTGSVFAGVDWASADHAVCVIDGSGAVLWRHTVAHSRAGLTRLTTRLQELAVARIGIERPDGPVVEALLAAGLRVAVVPPRQVKNLRSRYRGAGKDDRFDAYLLADAMRTDGHRFTDLTRDTAETTGLRALVRARQDLVEVRVGLVNQLRHTLELSFPGAVGLFFDLHSPIARAFLRRFPTAAEAAILDEDTMAAWLAGEGYCGRTPAAVFIDRLHTAAAGLTGVEAAARRHVTLALLAAIDAIEEQAAELGRRIKEALTLHPDAPIFTSLPRAGQLRAAALLAEIGDARGRYPDPDALAAAAGVCPVTFESGKHRAVGFRYIADLKLRRALTDFADDSRHANPWAADIYARARARGMRHPHAVRVLARAWTAVIWRCWQDAAPYDTNRHGALNRYLSQDTAAAA

SEQ ID NO: 311217 - protein, 370 aa, unidentified
MKKHSTTPKSPKQTSACKGGPITIGLDLGDKTSRYCVLGANGEVMSEGSVATTRKAMAEKFAKMRRCRVAIEVGTHSPWLSRWLSSLGFEVIVANARQVQLISASSRKNDRLDARLLARLARVDPQLLRPIRHRSETAQADLMRIRVRAALVEARTRLVNAARGFAKAMGERLPACDTDSMGVERMESLPEGMRDTLKPLLEQVESLTEKIKESDVKIEQIARTQYPETELLRQVSGVGTLIALTFVLTLEDRERFRKSRDVGCYVGLRPKQSESGQSQPQLRISKEGDVYLRTLLVQAAHCILSRRGPDTDLKRWGLKLASRGGKNAKKRAVVAVARKLAVLLHRLWVCGEVYEPLRNSQASGSSKKAA

SEQ ID NO: 311218 - protein, 431 aa, unidentified
MGPESLLSIESKTAESSRRLMSASANAVPVSRIRRPSADDYVLPLESCNAMAAITQSNGMDAPTRDGIEVPKWKCLQPLEPKGASAMKITTVGIDLAKNLFQVHAVDERGRAVLRKQLRRDQMARFFANLLPCLIGMEACASAHHWARTLQKFGHTVRLMAPQFVKPYVKTNKNDVADAEAICEAVSRPNMRFVPIKSVEQQAVLSLHRVRQGFVRARTAQGNQIRGLLGEAGLIIPKGIVNVAKRVPALLEDAGDEVPASFRQLIQRLTEHLKELDRQVDELETQIKAWHRGSKLSCKLEKIPGIGPLGASALVASIADAKSFDNGRQLSAWLGLVPRQDSSGGKPKLLGISKRGDVYLRTLLIHGARSAILAAQRKAVNTNVWLASLLNRRHPNIAAVALANKNARTVWALLAHGREFRTDYAPEVSAA

SEQ ID NO: 311219 - protein, 316 aa, unidentified
MDVLYQSCAGIDVHQANIVVCILHGPLTSTRPKREMATFDTTTKGLRACHDFLSQFHVEAVGMESTGVYWRPVWHALCDDFELILAQPAHMKAIPGQKTDKKDAHWIAKLTRIGLLPRSFVPDETIQELRELTRQRKHYVESRNRETNRIHKFLQSGGIKLTTYIEDIMGLSGRNLLQLLVDGTPITPRIVHQSVYTSLKKKVPQLLEALDGYFSDHHRFMLKQSLEIYDFYQKQIELLEERITVYLSQYENHVETLDSIPGIDVITASVIISEVGVDMSQFPTSGHLASWAGLCPGNNESAGKNEVPRFDTEIHI

SEQ ID NO: 311220 - protein, 342 aa, unidentified
MRYLGEFPATEAATRKLVAKLATKYRHLTFCYEAGPTGYGLYRLIENLDHECMVVAPSLMPKKPGDRVKTNRRDGVSHARLARAGELTAVWVPDERHEAMRDLSRARQAAKKDLQGKRQQISSLMLRLGRYYPGKKTWGPAHMKWLMSQKLEYREQRMVLEELLQGIRQEGERVEHLEQAIREAVPEWSLAEVVTALQEMRGIDLIAAVAILAEIGDLSRFQNPRELMGYLGLVPSESSTGDNVKRGGITKAGNGRARRILVEAAWSYRYPPRVGRQKQPKVAAAPRRVREIAWKAQTRLCRRFRSLERKGKLRTVVATAVARELLAFIWAINREVMGTRQA

SEQ ID NO: 311221 - protein, 337 aa, unidentified
MKHTVIAMDIAKRVFQLHAVDAQTGEIERVKLRREAVREFFARRTPSLVAMEACGSAHYWARELRGLGHEVRLLAPKSVRPFVRSNKTDAADAQAIWTAVQQPEARLVAIKSEAQQAILTLHRMRAQLLKFRVMQSNALRGFLYEFGQVLPEGHRALAKAWPTALAALAEQLPAMLLDSLREQWVRVQQVDAEMAALERRLASALRANGLCQQIAAIPGVGLLTATAAVAAMGDPTTFKSGRQFAAWVGLVPRQTGTGGRVRQLGLSKRGDTYLRTLLIHGARSILARGKPSPWMEALLRRRPYSVAVAALANKLARTIWAVLARGRPFDPAAFGVA

SEQ ID NO: 311222 - protein, 458 aa, unidentified
MYRELQPLREALSQQLKADLSPAVAGVEPDKLLQAYLDRLTMYIGVDVADHTFTTLALDAGDEVLGSLSECPNDSHGFQKFITWAEALRDQHGLRILAIAGETAGIYYWALWDFLGQRAAVARILYNPRTTEHMGEVLSKKVRNDLVDALLLAEQLRLGSTPEVQLQEDADLLAARYYSRAARDLAQQINRKKNQLRALLRAYCQPLCQVFPGSKLHHPAVYALLQQYVFPDELVRAGAEAIAAILTTHCRTAFGLSEAQQLVEAAGRSLSRPIQQEVICYLVRHHIEDITTFQKRKKFYLQTGYRLIEDRPETKLLRGSIGAGVSNTLALVSELGDVKRFPSGQHLASFLGLTTSKHISGTTLFHSKHITKQGSPNGRYAAVNIAQHLSQRVPRYQAMYQRIKGRKPPHRGHFVALVAIARDFVTNVLYDMWRYQRPFFREVEEYRQYRHKNPRPED

SEQ ID NO: 311223 - protein, 362 aa, unidentified
MDVHKASFTLSCFSVTTQETFATVKISPDAKAIKKYLDGVSLSRSEECEFVCGYEAGCLGYTLYHQLTAMNIRCVIMAPTTILRNSKRVKTDRIDAENLARCLAYGGYKSVYIPTAQDEAVRDYLRMRDDHKLMLKKIKQQINAFCLKHNKIYPGNKSKWTQAHVKWLNALEFDGYLQDAFNEYMITYRELTDKVERLESQIEQLAELEEYRDKVKKLICIKGIKTHTALSLIVETGDFSRFQSAERYASYIGLVPGEHSSSEDQNRLGITKAGNRHMRMLLIEAAQCYSRGVPAKKSKNLKSRQKGASPEVIAYADKASIRLRRKYIRMELVNKKKANVAKTAVARELACFIWGMMTDNIA

SEQ ID NO: 311224 - protein, 370 aa, unidentified
MKKNSTRPQSPRGAAARSKGPITIGLDLGDKTSRYCVVGDNGEVMSEGSVATTRKAVAQKFTGMGRCRIAMEVGTHSPWLSRMLTALGFEVIVANARQVQLISASSRKNDRMDAHLLARLARVDPELLRPIRHRSEQAQADLMTIRIRAALVEARTSLVNAARGFTKAMGERLPACDTDSLGVEKLEALPAALRSRLQPLLEQIEALTAQIQKLESNIEQIARIEYPETRLLTQVSGVGTLIALTFVLTLEDRERFQKSRDVGCYVGLRPKQSQSGQSQPQLRITKEGDRYLRTLLVQAAHLILNRRGPDTDLKRWGLKLAQRGGKNAKKRAIVAVARKLAVLLHRLWVCGEVYEPLRNSRPTPASKQAA

SEQ ID NO: 311225 - protein, 349 aa, unidentified
MIILGIDAHKRTHTIVAIDDAGRQLGVRTTTATTTEEHLALVQWADQFGPERLFAVEDCRHLSRRLEKDLLGGGERIVRVPPKLMAHARDSARTYGKSDPIDALAVARAALRQPDLPTAQLDGPSRELRLLVDHREDLVAERTRVINRLRWHLHELDPSWDPGTRSLNRYVTLASVAERLWEFEGTVARIARTLVERARELTVAERELTREITSLVARVAPNLLALAGVGPLGAAKIVGEVADVRRFRSKEAFARHNGTAPLPVWSSNTERFRLSRTGNRQLNCAIHRMAVTQGRCYEPAKLFLQRRRDMGNTGPEARRALKRKLSDVIYRTLLLDAMNTVSVSLELAA

SEQ ID NO: 311226 - protein, 414 aa, unidentified
MDVLHEGCAGIDISKRDAKVCVRTPSARRKGTFTNQTVTFGATTNAILDLREHLLHAEVSLVVIEATGDYWKPFYYLLAEELNVVLVNARMVKNLPGRKTDVSDAAWLAQLGSHGLVRASFVPPQPVRELRDLTRARTQLTRERAQVVQRLEKLLEDAGIKLSAVVSDLMGVSSRAMLQALIDGQRDPQALADLAKRRMRSKIPELGQALTGRFREHHAFLTRLYLDQYDQLTSAIKQLTVRVEEAMVPFRPVLGLLDTIPGVNRAVAEVIVAETGGDMSRFASAKNLASWAGLCPGHHESAGKVRSTRVRPGNAHLKGALGMAALAATRTKDSYLQARYKRLTARRGPMKALFAVEHSIITAIWHMLTDDVPYYELGGDYFTRRDPERAARRAVTRLNELGYRVTLDPLEATG

SEQ ID NO: 311227 - protein, 343 aa, unidentified
MQTVTTIGLDIAKSVFQVHAVDAAGKVILCRQLKRRHVLAFFEKLPPCLIGIEACASSHHWSRELQALGHSVRLMPPAYVKPYVKRQKNDATDAEAICEAVTRANMRFVETKTADQQGGLVLHRTRHLCMRQQTSVINAIRAHLAEFGVVAPVGRNGVEELLRVVADPDDKRVPEVARVCLVALGAQLRRLKDQVLEFDRMITAWHRSNKMSIRLDECPGVGPVLATALVATVADPKSFRSGRNFSAWIGLVPKQHSSGGKDRLGSISKQGDRYLRSLFVIGALAVIRYAKVHGTRHRPWLTALLARRPAKVAAIALANKIARMVWAMMAKCERYKEPVALAA

SEQ ID NO: 311228 - protein, 350 aa, unidentified
MFIIGCDLHTRYQQIAILDTVTGEVVTRRLEHENGEARAFYASLAKPALVGIEATGCTQWFERMLAELGHELWVGDPAEIRARAVRRQKTDTRDAEHMLDLLATNRFPRIWIPSLQERDARQLLKHRDKLVRMRTSVKNQLHYLAMSQGLCRKQKLWTERGRRELEGLPLGTWASRRRQELLELLDRLQPRIEELDEAVKGEAEARPEVLRLMRQKGVGPVVGLAFVLTLGPVERFPRSKQVVSYLGLNPREASSGGHQRLGSISKQGNEMLRWLLVEAGQSASQADPELRRKYQRLKLRRGAKVAKVALARILVVRLYWALREASPQRSPVRMPGSPARTLVDASPSTC

SEQ ID NO: 311229 - protein, 355 aa, unidentified
MTSTKYIGMDVHKESISIAVLNFAGKVVMECVIETKASTLLQFINGLRGDLEVTFEEGTWAGWLYDLLKPHVTELMVCNPRKIALLKDGSKSDRIDARKLADLLYMNKIKPVYHGEHGLRMLKELSRSYLTISKDLGRVMNRLKALYRSWAIPCAGTQVYAPRYRSEWLSKIGEAGVRRRAELYYLQLDALRLVRQQARKELLVEARKHRATKLLRQIPGIGPLRAAHLVAVMQTPHRFRTKRQLWTYSGLGLETHDSAQYRVVERQLQRSNKPVTLRGLNTNHNHDLKDIFKGAAMRASTAAGPLHDFYEALLAKGRKPTMARLTLARKIAAITLIVWKKEVRFDANYLKQQAA

SEQ ID NO: 311230 - protein, 333 aa, unidentified
MLPPNCGTATPYILRNTVGLDISKLTFDATAIVGNAEYSAKFDNDSKGLDQFSDRLKSLGCQNLHICMEATGNYYEEVADYFAQYYSVYVVNPLKISKYAESRFKRTKTGKQDAKLIAQYCRSAQESELVKRQKPTDEQYRLSRMIAAYAQIKSECAAMKNRHHAAKDEEAAKAYAQIIKAMNEQLEVLKEKIKEQTEKPNCKEGVKRLETIPAIGRMTAAVLFHHLTSSKFETSNKFAAFAGLSPQQKESGTSVRGKGKLTKFGNRKLRAVLFMPAMVAYRIRAFPDFIKRLEEKKKPKKVIIAALMRKLAVIAYHVHKKGGDYDPSRYKSA

SEQ ID NO: 311231 - protein, 350 aa, unidentified
MPKRNVPRPAAVYGIDIGKNIFHVVGLGSDGVPVQKVRFRRETLLQFFERASPAIVGMESCAGSQWIARKIQALGHEVRLIPAQFVKPYVKSNKSDIIDAEAIAEAATRPTMRFAALKSEEQADLQALHRVRDQMIGTRTRLINQMRAFCLEYGIALRQGAGLFKLDLPQAVDDQSNDLSSAMRKLLADLFADLRQLEQRIGDVTREIEAVANREDVARRLMTIPGIGALGATALLAAIGNGRQFQKARDLAAWLGLVPREYSTGGKQKLLGISKRGNRYVRKLLVHGARSCFRHLDRTRDRLGNWLDGLQARMHPNKAVVALAAKMARIVWVVLTRPGALYERRDPAFT

SEQ ID NO: 311232 - protein, 468 aa, unidentified
MRADKKLWRNRKERKQWARRLQSEDPGLEVIHPQAAGIDVGNSAHYVAVRPERDPQPVRRFECFTVDLRRLADWLQSCGVKTVAMQSTGVYWIPLYEILEERGFEVYLVNARHTKNLPGRKSDVQESQWLLKLHTYGLLNNSFQPPAEIRALRTYWRQRGEHVASAATCIQRIQKALTQMNLQLANVISDISGLTGQAIVRAIVAGERDPRKLAQFRDPRIQASEEEIAKSLEGNWRPELLFVLQQELEMYDTYQRRMAECDLQLQKHLASLTDSVPPRPPEVEPEPKKGKRAKPAKNAPRFDLSRELQRITGVDLTRIDGIDVMIAQTLLSEVGVDMSRWKTEAHFASWLGLCPDNRVSGDKVLRRGTRHVVNRAANALRQAANALIRSRSYLGAQYRRLRTKLGAPKAITAMAHRLSRLVYRMLKYGQRYVDKGTEYYEQRYRNQQVQLLRKNATKLGFQITEARA

SEQ ID NO: 311233 - protein, 401 aa, unidentified
MVSDFRKGRFNLMEIYVGIDIAKLNHFAAAISSDGEIILEPFKFTNDADGFQLLVSKLESFDKNSIIIGLESTAHYGDNLVRYLVAELYQVCVLNPIKTCQMRKNNIRKTKTDKVDTYVIAKTLMMQDDLRFVSFYDLDMMDLKALGRFRQKTIKQRTRLKIQLTTYVDQVFPEIQYFFKSGLHQNAVYALLKEAPSPKKIASMHMTHLANLLKVNSHGHFTKEQAKELRVLAQKSVGANDSAISIQITQTIQQIELLDSQLDKIEAEMTDIIKFNDSVIMTIPGIGYINGGMILGEIGDIHRFSNPSKLLAFAGLDPSVYQSGNFQAKTTRMSKRGSRVLRYALVNAAWNVVRNNTTFKTYYDVKRAEGRSHYNALGHCAGKLVRVIWKMLTDEVEFNLE

SEQ ID NO: 311234 - protein, 391 aa, unidentified
MLPTRLREQNESDKVLIKGDSMSVRRILAKTIDTDLEYEAIGIDLAKNCVSVALLTTDGEVVCIDRLDYSELEKSAQVLCPTTFAMEPCTEMNYLVQKLEAWGHRCLVIGGKNVQNYVENHYSGQKTDLNDAQALAFLAQDTQLRPIKAKDMEQQKYASLTTLREQYIKQYRQTIVSLKGICQAWGLNISKGISGKARLKDLIENHAAFPEELKESLVDMVTHAQTTQKTLNKITKTLEELAKNDKLCQLIRTIPGLGLICSCRLRATIGDIKRFKNPKDFPAYYGLVPRSIATGHNEKKGRITHRGDKTMRSLMVQGAGSVINMATRGKLKSKQLTKWILKKQKEKMPWGKLVCAVAAKLLRIVRAVLISSKPYNPQIAGVAKCSLPKGT

SEQ ID NO: 311235 - protein, 390 aa, unidentified
MIFVGVDWAEAHHDVCVLDEGGAVLGSRRVLDTLEGVRQLHELVADHAEEPGQVAVGIEKDRGLLVVSLVAAGYAVYAVNPLASSRFRDRHQVSGAKSDRGDARVLADMVRTDRHQLREVAGDSDLAEATKVLARAHQSAIWSRQRHLNQLRNALKDYYPGALEAFGTDLASNDAVAVLTAAPTPAAGRALGTGELEALLRKGGRQRNVAARARQLRDALCRGQLEQPGIVADAYGAVTASELRLIAAATAEVATLEEALSAAFEQHPDAKVVLSLPGLGTVLGARVLGEFGDDPNRYASAKSRRNYAGTSPVTRASGLSRVVLARVSRNRRLVATCDQWAFCALTSSPGARRYYDELRQRGKTHLHGCLEDHVPYDEATAWRHREQLAA

SEQ ID NO: 311236 - protein, 373 aa, unidentified
MPKYSTAFGMDVHLRSTTVCALDADTGEAVTRRFPGNPWGEIAAWMDGFPGPSLAAYESGYLGFAPQRELAGLGVECVVAAVSKIPRSAADSASKNDRNDAARMAKAILAHDISPVWVPSPEVEGIRDLAGAYDGATARLATAKQRLLAFLAKRGFAYGGTTPAGNPRKYWTYDFLRWLDKVRPEDDGGVRTLAALRNEVEAAAEARADLLSEYRAAVDASPIAAEAAALQSIKGCAFALAAAFSAEVGDFARFRSGRQVTAYFGLAPSQRSSGDSVRLGGVSGAGNALVRKLAVEGSWCYAAARHQPKLMPRDTGVPLEIRMHGRKGSERLLRRREEMLARGMPAAKANAATAAELVRWLWALGTMCREGAE

SEQ ID NO: 311237 - protein, 314 aa, unidentified
MIASYQNFIGIDIGKFKNVAAVYNQKNTIKFNNNDAGWQQLFQEFSNILPNSFVTLENTGKYELGLARYLVDMNVAVHRANTRKVKSFIISHGTLAKTDQSDAKALAQYGFERYSALSLFVPMSKEQTALVALCQRRDDITQMRTQEKCRLAAPENDYIKESCQKTIDFFTNQINEFNDAIQRIIDKNPELQKRQKILRTVPGIGLKLSQVFVCLMPELGYLNKKEVASLAGVAPHPKESGKTIGYRRITGGRSNVRAKLFTAAMAAARSKSALGAFYSNLIGRGKKKMVAITALMRKIIVIANARLKEAINMK

SEQ ID NO: 311238 - protein, 333 aa, unidentified
MQTFLDIGADVAKDAVVVACSAQSFPVHSVANQRASLLAWLKSLPAGSRIGLESTGGYHELLADLAHAQGHTVFLLNPLDTKHYARAMGNRAKTDRVDAELIARLVAREHSRLRPYTPPTASQRKLDRMIRRRAKIVRIKSSLQLTMRDLGGFSAELKAVLLKLDALIARVDAAMSALASCSPQHADAQQRLQTIVGVGPVVGMALTNTLERVPFRRADAFVAFVGYDPRANDSGNKIGRRRLSKRGPAELRRLLFNAAMAAVKSKVWKPIYEHYRALGWSTTAALVIIARKIARTAWSIHHYKSVFDPGQSLTRKGLQKMLDENHRISRRTE

SEQ ID NO: 311239 - protein, 332 aa, unidentified
MVAGTPGSLNKAGSTKMTQISKTAGIDTSKAKLDVAVHGGGECWQVENTPAGWRRLTVALIGAQVGRVGIEASGGYERGIVGCLRAKGLSVVVLQPMQVKAYARLHLRRAKNDKLDAVLIAACAAMAVQDRIEPDERLAELARHLTFVEQIEKDLARFKVRLEHMDDPRLRRMIVADIARLQKRRAAELQRIEAALRIHGDLAHRLDLVMSVPGLGERTALAIVIRMPELGRVSREHAAALAGLAPFDDDSGKHKGERHIAGGRKQLRRSLFAAALPAAFRWNKALIELYARLTKRGKAHNEALIACARKLLIYANTVVQRGTPWVDRPASA

SEQ ID NO: 311240 - protein, 315 aa, unidentified
MFPTIGLDVSKTTLDVCVLKGKDDREFYKFDNSDQGHQQFLDLLANLKVALVVCEPTGGYEASICAVLHRHNYAIHRVNTLSFHNFAKSLSLAKNDRIDAYKLAYYGVSMDIKANYHQSEYQQQLKDLVARREYLVSQLSSEKKNLKHKEYSNIQTSIVKHITYLEGAIKDLDKQIEDFASTETEQAKKVELACSVPGIGKTLSYKLLAFLPELGDDTFDLNELAAITGLAPYCRDSGNKSGKRFIRGGRKIPRDALYMAVLSGCHKIPLLKNLRARLLSKGKPKKVAIVACMRKLLGILHSIFKRREAFVEQIA

SEQ ID NO: 311241 - protein, 351 aa, unidentified
MESQQTALPKLYIGIDIHKRSWKVHCSTDLFSGKSFSMPPDPEQLLNYVLKHFPGFEVSTAYEAGCCGYYAHRCFVSYGWESLVVNPADIHRKGKERHTKTDRIDAQLISRELRDGRLESIAIPEREREQLRSLFRRRNDLVKDFRRVKSYIKMQLLYFGIKVPEEFDNDHWSHKFRTWLDDMVFTYPTAKATLESRMRYFRFVDQELRDVSTLLRRYCKVHYKKDYMLLRSIPGIGGIVACGILCELGDLRRFNSVKHLAGYVGLAPGVYQSGDNYRVMGMTPRAHRLIRSYFVEAAWQAIRADPVMQAYYRKHLGKDTKKIIIKVARKLLSRTLAVIKTETPYVIGVIE

SEQ ID NO: 311242 - protein, 425 aa, unidentified
MDFKQNQKINQVTEQTLVVGIDIAKRTHFACFVDDRGRLLRKSFSVSQSREGFELFYQLILNALKEHGKTEVLVGIEPTGHYWLNLAYFLEERGIPLVMANPMHVKRSKELDDNLPTKHDRKDALVIARLLKDGRFSYPRILKDVEAELRVGSTFRSKLTEELGAVKNRIIRWLDRYFPEFTQVFPSFGKMALAVLECTPFPSDLHQKEPDEILSLYREVEGLKSPQRPKATRLIEVAAHSIGVTEGREMARYEIATLVRRYHQLEQEIEDVTQRLVELAQTSVEYEWLSTVQGLGDSTIVELLAEIGSFSHYEHPRQLIKLAGLTLRENSSGQHKGQKRISKRGRRKLRALLFRVMMPMIRHNEAFRTLHEYYTNRTVNPLRKKQSIVVLCGKLLKVLHGISTKHQAFDAQRMMKDIPSLAEAM

SEQ ID NO: 311243 - protein, 411 aa, unidentified
MDVYCGIDWAEDHHDIALVNRDGRLLARRRISDDAAGLAQLLDLLTEHGDSADDPVPVAIETPRGLLVACLRATGRQVYPINPMAVARYRDRHSVAGRKSDHGDSFVLASVLRTDLAMHRPLPADTELAQAIAVLARAQQDAVWDRTQAHNRLRSHLREYFPGFLAAFADARGGITRPEARAALAAAPTPADAAALTLTKLRAILKKAGRSRGLDTEATRLRDAFRIPQMRQLPLVEQAMGRQALALLGQLDAACASAGDLEQAVTESFNLHPDAGIITSFPGLGALTGARVLAEIGDDRSRFQDAKGLKAYAGAAPITRASGKTRSVTHRRVKNNRLAAAGYSWAFSALTASPGARAHYDRRKDAGDRHAAAQRNLFGRLLGCLHHCLLTGQEYDEATAFPARTNLPAAA

SEQ ID NO: 311244 - protein, 339 aa, unidentified
MDKWEACGLEVSAQELVVAEEIGAVQRYPNTEAGHRKLIATLTRGGRRVRVVMEATGLYGLDVAVALSRAERIEVMVANPRSARDFAKAMMQRSKTDPLDARVLREYAQRMPFRPWRRPSENRLALWAIARRIQAVTEMSRAEKNRQHAARISQTTPACVRRDIERTLRSQQRALKELRRQARKCVTLEAELEREYRLLVSVPGIAESSALQILGELVLLPEDRDVRQWVAYAGLDPSEHQSGESVRKRTRLSRTGNRHLRRALYMPALTAIRWEPHLRGFYEHLVARGKRKKQALLAVARKLLHAIYGMFRTDSPYQGGLVFRLPQPRSGFPQPEKIG

SEQ ID NO: 311245 - protein, 388 aa, unidentified
MIYVGIDIAKLNHFASAISSDGEELIKSFKFTNDNDGFQLLLSKLDPLDKDSLIIGLESTAHYGDNLVRYLVAKNYKVCVLNPIKTSTMRKNNIRKTKTDKVDTYIICKTLMMQESLRFVTFYDLDLMDLKALGRFRQKTIKQRTRLKIQLTSYVDEIFPELQYFFKSGLHQKSVYALLKEAPTPEAIASMHMTHLAHLLKVNSHGRFDKEMAQQLRVLAQKSVGASDSSLSIQVTHTIQQIELLDSQLERVEAEMTEIMKFNDSVIMTIPGIGYINGGMILGEIGDIHRFSSPNKLLAYAGLDPSVYQSGNFQAKKTRMSKRGSKVLRYALVNAAHNVVKNNATFKAYYETKMAEGRTHYNALGHCAGKLVRVIWKMLTDEVEFNLD

SEQ ID NO: 311246 - protein, 438 aa, unidentified
MSNKVIFNLDELFISVGIDVGADFSWMSIALPNQQFVGKPYKILHNSIDSLTTAVSKIKEAEELYSLESRIFLESTGIYHYPLFCYLRDKGFNCSVINPIITKNSTNINIRKVHNDRFDSKKAALVGLKPDLKVSLMPSDLALNCRNLCREYYDLMDNRSAYVNKLQGELRMAFPQYLGIFSKVTINTSLTLLETYTSPSAFLKADKQEIIDIIKSTARFGLTYAQNKYNAIIQAATDANQFGYIIDSNIKRIRLYISFIRKYDEEINSILESLHELVDANEDSDFVKQIHLIETFKGAGFLSAVSIMGEIGDFSAFSKPKQLFAYFGLDPAVKQSGKFEGTKVQMSKRGSAIARRVIHTLTLQSISISRNREAKNPVLREYYLKKCDSKPKLVAMGAVSHKVYNMIFAILRDNKPFKIIAPQEHIKQYNSAKCDIAA

SEQ ID NO: 311247 - protein, 339 aa, unidentified
MTVKTVGLDLAKDVFQVHGISENGRVIFNKAIKRAKMLAFFETLPPCTVGMEACGSSHHWGRQLRKLGHDVKLMPAGYVKPYVKRGKNDAVDAEAICEAVRRPTMRFVEIKTEEQQAILSLHRTRDLAVRQRTQLANMIRSLLREFGHILPIGIEAVTAFAKRHLAGDRPDMPEIANGMLGIQCYQFIGLNERIEGYSKMIEQHALLSADARRLMRMPGIGPITASAIVATIGDAKQFRTGRDLAAWLGLTPLNKSSGGKERLGKITKQGDRYIRKLLVVGMTSRAVMAKRAPEKVDLWTAKIIADKPFRLATTAMANKAARAIWAMLTKKQEYRQPAF

SEQ ID NO: 311248 - protein, 359 aa, unidentified
MVNGLAERNVSVSEASIVMGIELSKKGWLVALRGPLEDKISLHRLSAGDAKGLLALAGRMQSAATAALGTVVTIASCYEAGYDGFWLHRVLTAANIENHVIDPASIHVDRRARRIKTDRIDAQALLRTLLAHRRGEGRVWSVVQPPTPEDEDRKRPHRERQNLLKERGRHVNRIKGLCAQQGILDYEPMRADRHERLAELETGDGRRLKPLLLAEIRREIARLEFLLAQIAELEMTRETAIKTASSDDTATVQSQQMRSLRRLTAIGPETSTVLANEVFYRRFRSRRHLAGYVGLTPSPHMSGGLSREQGISKSGNRRARTALVEAAWLWLRYQPRAHLRSGSPSVSAGSEGGFAGSWL

SEQ ID NO: 311249 - protein, 401 aa, unidentified
MKRLCGGIDVGSERHHVIIMDDKEKILFDREIEQKYSDFNEAIEEFREIEAKEKLAIEFAMEGKNGYGTPFDRLLIENGFRLYNVDNLKLRRFKDVFGAEWRNDQRDAKMIAKMLKLREHVDKGKEKAFIEVTKMPSVNEKLKVLSRHQQSLINEKIRMQNRLRKRVQEVCPDILEFGDTDSKKLLRLLITYPDFRKYKKLTMEALLKIKMIGTKQAALMIDGLRDIQCFEEMAETYKTIISSSAKRVLELKEEIEMLDKMLEELGEQSHEVKRLISMPGIGIKLSSRFVGEVGDINRFEKEDQLAVYCGVACIDDDSGKSKKTRVVYKANRICKATLIEIAGCTIRYIPESKAYYDKKRAEGKKHNHALRCLARQVIKVLFKMLKEDRDYVMKEEVKKAA

SEQ ID NO: 311250 - protein, 317 aa, unidentified
MEQRQSSMKVAGIDVGKHRLDVAVHGSEDATAAQNDAAGISELIGWLKAREVGRVGLEATGGYERGVRAALDAAGLEVVVHQPIEVRRFAQLKRRRAKNDRLDAELIAAATAQVEAVKAAQDARLVELAQRLTAYEQITDQAAELKTFLESVTLKDVAILIRAQIRNLERAKAKLACDIVGRIKAAADLLARFRLLSSLPCVGPIVAATLVIRMPELGAMRRGQAASLLGVAPFDRDSGQWKGLRFISGGRRRPRRMLYLAALAAKRCSPTLKAFADNLLARGKPTKLVIVAVMRKLIEAANLVLQRGQPWLKQPTT

SEQ ID NO: 311251 - protein, 321 aa, unidentified
MNEGTNYFGIDISKDVFDVADFNGVHHQFSNSFKGFKKFVKLLDKNSHCVMESTGYYHIQLANILLEHGIRVSVENPLAVKRFVQMHLSRIKTDKSDAKMIYKYATLNTLRLWKGHSKNQVACIQIMSLISHYTKQMTSLKNKLEGEETLGNPVKIVVRSLKRNLKQVKKEVLALEETLLNLVKEDNQSLLTSIESIVGIGRKTAIALIVLTDGFTKFSHSKELCSFAGITPIIRQSGKSIHSRSRISKMGNRKLRSMLFLCSFSAKKHNKSCKDIFDRMTAKGKPKKVALIAVCNKLLKQSFAIAKSGVPYDNEYRSKLN

SEQ ID NO: 311252 - protein, 343 aa, unidentified
MEHIAIDLGGRESQLCIRGADGKIVKELRCRTGALGGLLATMAPSRVVLETCAESFAVAEQARAHGHEVRIVPATLVRSLGVGARGKKSDVQDARTLSEVSCRIDLPSVHLPSEQSRRLKTVCGMRESLVRARTLLVNSVRGFLRTQLRRVKGRYNGQFTTRVRDRYTELLRAIPADIERQLVVIDCLSTQIHQADRDLALEAKSNALCRRLMTVPGVGPITALRFVAAIDDVTRFSDASRVASYIGLVPGEWSSSDRQQRTGITKAGSPKLRWLLVQAAWSALRSKRGQELQDWSRQVEHRRGSRIAVVALARKLSGIMFAIWRDGSEYQASRAARAVPAAS

SEQ ID NO: 311253 - protein, 374 aa, unidentified
MANIMEAFVAFDTSKLRNAVAIAEAGRAGEVRFLGEIENTEAATAKLVRKLAAKYGRLTFCYEAGPTGYGLYRQIKSLGHECLVVAPSLILKKPGERVKTNRRDAVSLVKQLRGGDLTAVWVPDPRHEAMRDLTRAREVAVEDLRCKRQQVSAFLLRQGLHYPGERAWTKAHRNWLMSQKLEYAEHRIAFEEMLLAMRQAQERIERLEQAIRVAVPDWSLAEVVTALMALRGIDFISATAFLAEIGDLSRFRTPRELMAYLGLVPSEASTGDTIKRGPITKAGNRRARRILVECSWSYQHPPRVGKEKQERVAAAPPAVREIAWKAQCRLSARYRALTRKGKLKTVAVTAVARELSAFIWAINRQIINSRAAAR

SEQ ID NO: 311254 - protein, 334 aa, unidentified
MEQVTTVGIDLAKRVFALHGVDTTGRVVLRRVLRREQLMEVMASLPPCVVGMEAGSGAHQWARRFQELGHTPKLMAAKFVSAYRRNGKNDGNDAEAICEAVSRPGMRFVPVKSLEQQALLSLHRVRQGFIAERTATINRLRGLLAEFGVVLPQRSDTVRRQACKAAEELPVLARRAIEDLLVHLRTLDERIAAYDRELEQQARQSEPAQRLMKIRGIGTLSASAIVATVGNARDFKSGRQFAAWLGLTPRQHSSGGKSRLGHITKHGDAYLRGLLVQGARSVLHTAPRHTDHMSQWVQAIESRRGYHRALVAIASKNARIAWALLSRNEVLRPA

SEQ ID NO: 311255 - protein, 315 aa, unidentified
MSESKVEVFVGVDVSKDTLDVRIEPPGESFQVGNDDEGIKALCSRVSELAPTLIVMEATGGLETRAAGELAARGLCLAVVNPRQVRDFAKASGQLAKTDRIDTHVLCGFGRAIRPAARPMKEALTQQLDDLVTRRRQLVEMRVQETLRLHGASKVQAKSVKAHIAWLDKRIKSVEIDLGTRLRSSDAWRVKDDLLLSIPGVGEITSRSMLSRCPEIGRLSRREIAKLVGIAPLNNDSGKYRGQRHIWGGRADVRSVLYMATVSAIRCNPLIKAFAASLKSTGKAPKVVIVACMRKLLTIMNAMIRTSTRWNPQPA

SEQ ID NO: 311256 - protein, 371 aa, unidentified
MNKDTLFAAVDVDDAAFHGAGVVRKTGELFEFKCKPDGGALLRKLQELFGNRYEIRLCYEASHIGFTLCRFLRKSGIYCDIVAPSLIPVKAGERVKTDRLDAAKLAAYYARDMLTPIYVPDEADEEVRDSIRSRGFLVRQRKMLKTHILSTCTRYGIKFREETGRKTNFTDVHISWLKKRVKTLQRHVCQLTLELLLSQYTALCESIENLDATIARIVEENERYRKLCGALCAFRGIDTLSAMTLVSEIGDIRRFAHPRQLTSYVGLDVAEYSSGGKQRKKGITKTGNWHIRTTLTEACQIAYRSPILSTRLKQSRANQPPEIVDVATRCMHRLHKKGTRMLYAGKHKNKIKTACAREMLGFIWEAMRLAA

SEQ ID NO: 311257 - protein, 322 aa, unidentified
MAMLSFCGIDVSKDRLDVMVLPEHQSFAVRNDASGWAELIARLRRFAIAAIGLEASGGYERGAMRALLAAGMPARRVNPLKLRQFARASGVLAKSDPLDARVIATFVAIMPTQPAQPRPPAIERLAEMLAVRRQLSAEKVAAENASALLEDAMLQRFSRRRIARLAADIDMLDHHLVEIVETDAALAHRYQLLTSMPGVGPALACTLIALLPELGNMSRKQVAALVGVAPYAFDSGKLKGRRCIWGGRAPVRQVLYMAAMSAGNWNPVLKAFRQRLKAAGKLPKVVIVAVMRKMITMLNAMVRDDVVWADHLHGRHTVPTAW

SEQ ID NO: 311258 - protein, 345 aa, unidentified
MTMDFILGVDVSKKTLSVVLVDQKDKTIWSCKNMPNDDVGFQKLLDSIIQVASKKAGAEDYTIKAGLESTGVYGERLLNFLHGNNTGGRISVYELNPLAVKSFRQALMKQNKNDAADAKTIASYIPTAIARGQISPWNMLDHERKVLQELSRRRDELKELICEEKNRLEKIENAHAPSEQVKESLMGHLGYLNSGLQQIEKDIEDHIDSDERLKSDIELLRSIPGIGTVNAVKFVCEIGDVKAFSSVKRLVSIIGIAPTEHTSGTSVHGRTRISRQGKTRVRNGLYMAALVASHANPIIKNFYDKLLKKGKCKKVALVACIRKLVHIIWGILKSRKTFDASYGQN

SEQ ID NO: 311259 - protein, 410 aa, unidentified
MDLLRREVPATSLVVAVDPGKAFNRVWLTTGERGLIGEPVTLPVLREGVDELERLIVASGVAGAPVIGLEATGALHRAWATEIERRWPGSLRLFAPSETTAARGQLGSRRFKTDDRDCAALVWLMRQGAGRPAEPDTVTAMLGAVRHRRQLVDARKVLQQRLHDQLNALCPGLSAPPGHGRKLEVDSPAGQAVLACAAAFAGRPPTKRSLLARARGRMTEQTAAFWAARWKRLLGPPADHELRAARLGRDLRRWQELQADIELADDQLAELLARTAGQILTTLPGVAVVRAAEFSAHTLPIERWPTPEHLYSATGLATATYQSSTITRRGRISRQGLAEHRDALMGIAWGLSTNSDAFRARDIELRARGFRPIQARVALARHACRLCWRLLHSQQPYDDRRYARARRRGR

SEQ ID NO: 311260 - protein, 334 aa, unidentified
MDNIKAIGIDVSKDTLDVCITKGIEKSDICKTYKIDNNARGISELGNKLKRLGIDNNIPIALESTGICHILACMLLSKKGYKVGVINPLNTKYFTSANIRKQKTDKVDAKALADMAILKPEILKTFVPDHAQVMLKKKISTLNKMLKGYQSIKASIKTYQDLERQLQVKESVAIYNLKKSAKVMKKIMDDLEQEILEEGRECTGFEKISSIKGISDKTTVKILAQIEGKKFDRKESLVAFAGIDISVRESGTSVRGKDRITKRGNPNLRNSLYQAAWGLMMHNTEFKQIYEYHRKNGKHYYTCLTILARKLLHIIYGMLKTNTTYKPELVHIPV

SEQ ID NO: 311261 - protein, 394 aa, unidentified
MILVGIDIGKNKHTFSIIDKNSGEILLSPSDFSNNLKAFLFLIRKLSSYTKSELLIGMEDTGHYHFALLKYLLDKRYTVALINPTTTDLTRKLQGGITKNDHLDSLTICDVISSNHRNKPYRVTKLNRFDLYEQKQLTRHHHNLKEELNTYKNRLQKCIDIVFPEFNSLFHSKYGIVYMNILKTFSSAKAIANADIRSIRKCFEFKGQGKRISLSAEQLKLTAKSSIGIPSVAEEIQIRHLVSQIELLEKQLSEIDKRIEEFSLKNNSPILTIPGISHFSGTSIIAELGDVCNYTKASQIIKFVGVAPYHYESSQFTAQHTAITKKGSKYLRKTLYQIILPVISNNEVFYAYYTKKLNEGKGHRCAQGHCIRKLLRVIYHLLSTRQPFNSKLLV

SEQ ID NO: 311262 - protein, 370 aa, unidentified
MLDTTTFIGLDVHARSIKAVALDVMTGEARCATFGYDAGAVAGWVRSVDPRARCVYESGVTGFDLQKRLSGLGVDCVVGAVSKMIKPSADRRRKNDRNDAEFLARMLSVGNVVEVWVPDDECEAARDLTRALEDARGDLSRSKQRLSKFLLRHGLVFDERTPTGRRKGNWTRAHWSWIESIGFAEGADEEVLAYYVDAVRRAAEEKARLEGLVEAGARKPRWRKRVDSLRCLKGVDTASAADLVFEAGEFSRFRNARSFAAWVGLTPSEHSSGESDRRGAITKAGNRHLRKTLVEAAWHYLTCSGRPKEPARGQAPDPGARRHAAKGVRRLVERREALLARGVHGNKANVATARELACWVWAVGLMAEEA

SEQ ID NO: 311263 - protein, 456 aa, unidentified
MIMKRKKKVLQVPKLESLKQINPNAAGVDVGASELYVCVPEDRDPRPVRVFQTFTSDLHEIAAWLKKCRVTSVAMESTGIYWIPLYEVLEEAGFEVKLANAREAKNMPGRKSDILDCQWIQQLHSYGLLTASFRPPKHIVALRSLVRHRDRLIVARAVHIQHMQKALHLMNLQLDNVLSDITGVTGMRILRALVAGERNLDTLASYRDPSCKSSTQVIRESLKGNYQEEHLFPLRQSLELYDYHTTMIQQCDREIEQKYRALPSRVDLQRKPLPPSKKQQKKPRKNAPTFDLRSRLYETAGVDLTAIDGCNAATIQVVLSETGVDMRPWRTCGHFTSWMCLAPHNDISGGKVLRSRAKKTKNRANTALRLAAQALTHSDSWLGAYYRRQRARLGAPKAIIATAHKIARIIYYMLKYQREFVDLGANHYEAQHRKRQINSLTKKAASLGLLLVPAKA

SEQ ID NO: 311264 - protein, 422 aa, unidentified
MLEESPDDGVIVERVAALDVGKAEVVCCVRVPSPGGGGRRAQEVRTWSTMTRSLSAMGDWLHGLGVTRVVMEATSDYWKPPFYVLEAAGFEVWLVNARDVKHLPGRPKTDKLDAVWLCKVAERQMLRPSFVPPEPIRRLRDLTRYRVDLVAELCREKNRVEKLLEDAGVKVSVVASDIFGVSGRAMMAALVAGERDPFVLAALARTAMRKKIPELRQAFEGRFSEHHAFLLSRMLAHVDAVDADIAAIDERMEELIAPFADAAARLDEIPGVGAVAARMIIAEIGVDMTRFPTAAHLASWARFSPGVKESAGRTLGNGSTGHGNRYLARVLGEAAVAASRTDTFLGERYRRIARRRGKKKAIVAVGRSLLVIIWHLLNDRTADFIDLGPDHYDQRRGTQRAVRSHIRQLQSLGYQVTLQPAA

SEQ ID NO: 311265 - protein, 413 aa, unidentified
MNSYRIAGIDVHKKMLAVVITDIGAEGELVFEQRRFGATPEQLRLMTEWIIGNHIQSVVMESTAQYWKPVWLALEGKCELHLAQAYSNRAPKGRKRDFQDAERLVRRLVAGELVLSFVPEREQRLWRTLTHAKHQLTREKIRALNQLEAFLEDARIKLSSFVSALKGVSSRRILKALSQGETDAGKLARLADPGLRASEEQLRDALSEAATLDPCYRAVLEVFLTRIESAEQHIERLEKLIAERLKQHNDAVVRLAEIPGLGPDSAQQIVAEVGPEAAAFDSPDQLASWIGVCPGREESAEVSRNDRSPKGNRAMRRILNQAANAAVKAKGSAFELLYRRLVGRLGHKKAVWAVAHRMARIVWKVLHDPVRYVEKGIRANPAAARKRASRLISQLRRMGYRVQIIAVTSEVAA

SEQ ID NO: 311266 - protein, 385 aa, unidentified
MAQTLSHPIALDYDSTLVLAIELSNISWVLAAQVPGLPRVKAKQSIEPTAEALLAAVDRYRDRARAAGKTVQRVVATYEASWSGFWLARWLARRGVETHVVQPSSVPLDRRARRAKSDGIDAELLLRTLLAWLRGEPRVCSMVPIPDEADEDERRRVREREDLVAERVSLVNRIGAVLATLGVRDYNPLRRDRRERLDAIRTALGDPLPPHARARILRMLDRLELVCAQIAELERERDAVLDEEAPGKAEEMIQQLAGLRGIGVQSATVLVREAFVREFANGKALGSYAGLTATPFSSGGTEREQGIDKAGNRRLRTVMIELAWLWQRYQPGSAQVIWFRERVGGTGKRMRKVMVVAMARRLLIALWRFATQGVVPEGAVMKPVS

SEQ ID NO: 311267 - protein, 489 aa, unidentified
MSTARKQQRGKKDPMLNAQLLKRKARGSHCQQGKGDQRRSKLTITNPDAAGIDVGAQVHYAAVPEGRDQVSVRSFGAYTAQLDELVQWFKDCGIKTVAMESTGVYWIPLYQKLEEAGFEVLLVDARQAKHVPGRKSDVQDCQWLQQLHTYGLLRAAFRPEDSICRLRTLQRHRKNLVECAAMWIQHMQKALNEMNLHLHHVLSDISGHSGLTILDAILAGERDPKKLASLADRRVKKSQAQIEAALTGDYRPELLFVLSQSLQNYRQIQQQIAQCDLSIEKQLAKMADCTNPSQDSESTQQSPDSAGCKPRKTKPKDALELSLAGHLKRILGVDLTTIPGLNVLAILTLVSEIGTNMAKWRNEKAFVSWLGLSPNNKISGQRVLSSRTRKVVNRAATTLRLAAMLLGKTSTPLGSFYRRKRAQFGAPKAITATARKLGCLIYRLIKNGQAYQEPDLHTYELKYKDQILNSLRKRANSFGFDLVELPKAA

SEQ ID NO: 311268 - protein, 341 aa, unidentified
MQITTIGLDIAKNVFQVHGIDGEEKVVVRKQLRRSLVMRFFQELAPCLVGLEACATAHYWARELVKLGHEVRLMPAKDVKAYVKRNKNDAADAAAICEAVRRPTMRFVPVKSAEQQAQLMQHRARDLLMRQRTQLINAIRAHMAELGITAPQGREGIKQLLALIADDEDTCLPIDARASLMVLAAQLQAMQTTIGSLERRIVARHRSSQDSKRLQSIPGVGIIGATAIAATVTDPMAFRSGRDFAAWVGLVPREDSTGGKRKLGPISKQGDRYLRRILVGGAVSILRRAKLNPERYPWVTRLLARRPFKVVAIALANKTARVAWALLAKGGTYRRPRLAAV

SEQ ID NO: 311269 - protein, 351 aa, unidentified
MERYIGIDAHLKSCTIAIVGPSGRRLREQVVETNGQALRQFLASVAGQKHICLEEGELSAWLHEVLSPVAAQLVVIQPERRRGSKSDARDAWELADRLRQGDLKGMVYKAPGRFAGLRQAVHAQRVVTREMVRAKNRLRAVYRARGIQPEPEIYDARYRPAWLERLPEHDQVLAHHFSEHLDAVSATAKRAQAWLLQEARRYPVVRMIATAPGIGPVRASQIVASVVTPHRFRTKRQFWSYCGLAVVTRSSSDWERGENRQWVRRQVALPRGLNRNRNPLLKEVFKGAATSIITLMPDQPLCKNYERLLEAGTKPNLARLTIARQLAAAVLAMWKKQEVYDPARHDTTPTA

SEQ ID NO: 311270 - protein, 346 aa, unidentified
MCSLPVFVGMDYHDSFVRVVVQDTDGSEMGNADRTNDWQAIAQFAERFGRPVRAAIESCCGAADLAEELVSCAGWSVALAHPGYVQRMKQNPDKTDCQDAQLLADLERIGYLPRVWLAPRYIRELRHVVRYRLQLTEQRRATKLRLRALLREQRCHAPEGLNAWTKAWQHWVRHTAELSEQGRWLAKQHLGELARLATKIRQVEKRLEHMTANDVEVQRLQQQPGIGPVTAWTIRAEIGHFDRFRTGKQLARFCGLSPRNASSGQRQADAGLIRAANPALRTVLIEAAHRLVQYDPSWQKFAQRLRARGKPGSVVAAAVGNRWMRRLYHEMKTPSGELAVAVGPAR

SEQ ID NO: 311271 - protein, 464 aa, unidentified
MKYAPVQVLPDVPAGGVAAGIDWAVADHVACVVDMAGRVTDRFSAVHDKAGIAMLIARLRRSGAGEVAIERGNGVLVEALLAAGLTVVVISPHRVKNLRARYRSGGGKDDRFDSFVLADTLRTDRARLRPLVPDTPVTLALRAAVRARKDLVAHRVRACNQLRAHLAVAFPAAIGLFAELDSPVSLRFLAGFGSQDAAAALDEQALLGWLAAGPGRGRGNTAPASVLCARLRAAPGGVTGEEGAAHAVITTALAATAGMLAAQIKILETAIGVQLAAHPDAHIFTSLPRAGMLRAARLLAEIGDCRSRYPGPQALAALAGVVPVTRASGTHTSHAFRWAVSRPLRDAVCDFADGSRHASPWAQSVYQAARDRGKDHQHAVRILGRAWIIIIWRCWQEGIPYDPAKHTALQAVLDQQAAQAATAAPAGGISPCPAADSAPSKSPPAPPQPPRSATAAPAAATWNQ

SEQ ID NO: 311272 - protein, 329 aa, unidentified
MKKDWYVGIDVSKKWLDVAIFAEDSNLKGYIHTQVDNDKHGYKELLRWLKEHDVDVSSCMYGMEHTGFYSDGLQHFLDKKGYKYTMLEPAVIKHYPIQPREKNDRLDAAKIADYLFRFNDTIKLSTLPDKTMEELRNLHRERKFYVEDRVCYMNRKQVVGKEEAKRLDKMIENLDRMVDSIEEKIRNIIQENELLMESYLYLTSITGIGFVNAVNAIVITQNFTAFKTARDYASYLGVAPHTKTSGTTVRWKPKPRKHCDLTAKADISQAAKIAVVHDIELKRFYERKCNGKNDADTIRKAMNAVKFKLVLRMFAVVKQKHTYKQLDTI

SEQ ID NO: 311273 - protein, 346 aa, unidentified
MNVTTIGIDLAKDVLQIHGVNQHGKAVVRKQLKRAQVELYLANLPACLIGMEACGSAHFWARKLTALGHTVKLMAPQFVKPYVKTNKNDASDAEAICEAVSRPSMRFVSPKSAEQQALLALHRARAGFVQARTAQGNQIRGLLAEFGFVVPKGRWRIEAAIQPIVEDAENGLPGMSRELFVRLLEHLRHLDVQAKQIEQQIKDWHQNDADSRRLETIPGIGPITASALVASIADIHAFKNARQLAAWLGLVPRQHSTGGKQVLLGISKRGDAYLRTLLIHGGRSVLLAQKRKTCAEESWSSALAKRRHPNIAAVALANKNARIVWALLARGQEYQPRYHASMSSAA

SEQ ID NO: 311274 - protein, 369 aa, unidentified
MDKDTTYVALDDSKRKIVAGILRPGNEQPELREIANDARQIHRLFERLKREGPVAACYEAGVSGYDLHRQITALGVACAVIAPALTPRRPGQRIKTDRRDAAKLVRLFRAGELTAIHVLDESEEAVRDLVRCRDDLRRDVLRWRHRVLKLLARHGRAYLAGKNWSHTHWRWIREQRFDLPPLQRAFEATVFALEQALARLAELDKELEAVAATAPYQEPVGWLRCFRGIDTLSAIILLAEVVDFQRFRRPRELMAYLGLVPSEYSSGESQRRGALTKAGNSHARRVLVEAAWHYRHRPTIGRALASRSQGQPDEIVGQAWRAQQRLHRRYRHLVGHGKRTPVAVAAVARELVGFIWAAMTRHESRRQAA

SEQ ID NO: 311275 - protein, 344 aa, unidentified
MTYYAGLDVSLRTVNICIIDEQGELVAESKLASDVQDIVAYLDDLDIEIESIALEAGTLTQYLTYGLQAAGFEVICMEARQVKGALSAMRNKTDKHDARGIAQILRSGWYSPVHVKSIESHHIRMLLSSRRAVLSKCVDLENEVRGLFKIFGIKLPPKLGHGAFDVTVRDIIEADEALCHALLPLLEARLVLYHTFRELDNRTRKMANKDAVCQRLMTVPGVGYITALTFKAGVDDPTRFKQSRTVGAHFGLTPRRSQSGEIDIDGHISKAGDADVRCALYTAANAMLTRSAQWSSLKAWGMKIAKTRGHRKAVIAVARKLAVILHRMWIDDTQFRWGTEGARS

SEQ ID NO: 311276 - protein, 357 aa, unidentified
MEEKIRYVGIDLGKRTYEMVIAGKGGKVIKNNGKTYTEGRQKLYKKLKKTDKVALEAGSLAFIMAKEIEASVGCQVYVLNPYRLSIIYKSMKKTDKEDALKLAHIIEDFQEERLPVVPLPSEKEMERRKILSGYRRAQQSRSRDINRLHALFVNQGITTVVRKDLAESVNRKEAIKELNGFEHEEAKYLVETLELHDKRIEQLEKKIKKETAEDEVIQRLQSIPGVGPMVSFAFASHVEAERFENAGQLSNYIGLVPRVYMSGDTVRYGSITKRGNSYLRALLVQAAWALVRTKKDEKLKERYKYMTIQRAIGKKKSIVSIARRLAELMYVLMRDGSRYEARPFILNNEVVRDNFCA

SEQ ID NO: 311277 - protein, 340 aa, unidentified
MLLYGGIDLHANNSVIVLLNEQDEVIYRERLPNALSTILGHLAPYHADIKGLVVESTYNWYWLVDGLIEADYRVHLANPAAIQQYSGLKYSDDHSDARWLAHLLRLRVLPEGYIYPKAERAVRDLLRKRAHLVRQHTANVLSVQNIMARNTGTRFSLKRMQALTKQELTRLLAEEAQVLAVTSSLVVLDCLRQQITTLEKTVHTRLNHTPAYEQLRTVPGIGTILAQTIALETGAISRFPTVGHYASYCRCVDSTKISNGKRKGAGNVKNGNPYLAWAYMEAAQFALRFQPAAQRFYQRKLVKSRNNTVLARKAVAHKLARACYYIMRDLVPFEGAKAFG

SEQ ID NO: 311278 - protein, 391 aa, unidentified
MIYVGIDVAKDKHDCFITNSDGEVLFKPFTITNNLDGFNELYQKIESVTEDATKVKVGLEATGHYSYNLLGYLIDKGLPTYVINPLHTNLYRKSLSLRQTKTDKVDARTIASMLMSDVNLKSYSDISYHNEELKSLTRYRFDKAKERAKLKSSVSRLVCILFPELEKLVPTLHMASVYSMLSEFPGAKHVASAHLTRLTNLLSEASKGRYSKDTAITFREAARASIGSNMPAKSLELKHTIKLIQELDSEIDEIENEIKVIMDEINSPILSIPGINYRMGAMIIAEIGDFSRFDSPDKILAYAGFSPSTYQSGQLDGAYAHMEKRGSRYLRYALYNAAKYVCHWDPTFAGYLAKKRAEGKHYNVAISHAVKKLVRVIYHLEKTKQQYIKVA

SEQ ID NO: 311279 - protein, 380 aa, unidentified
MARRKEMTVRYEDSTMGPPIYMALDLGRSRWTVGFLLPGDRDARLYQIAGGDRGALLDLIAAQRRKVGDPSLRVVSCYEAGRDGFWLGRWLAAQGVDNRILDPSSLEVPRRRRRVKTDKVDTVGLLRVLLRLERGETELTRVVWVPDPAVEDSRRCTRERERLVRERTAHRNRIQGLLATQGVAEVKLGTRGWMERVEAARSGDGRALGPVLLAETRREAERLLLVERQIKEVEAAQHRALQEDTALAAGARTLKRLKGIGEIFSSGLMHEAFWRDFRNRRQVGGSFGLVPWPWDSGDVHRDQPISKVGNRRARTLAIECAWMWVHHQPDSALTRWWRERFAEASKRQRKIGIVALARKLMVALWRYLTEGLIPEGAVLK

SEQ ID NO: 311280 - protein, 337 aa, unidentified
MKSKQVKFYIGLDVHQDMTAYAVRSWKGEIISGGECATRFEDLFKILEPYLVSSVIGLEACTSYYHIYWSFKNRGYDVRVANTLRICQLVVKNDRLDAERLSDMLRLGTYPTSYVPDKKLMELRSMINIRHNFVEEQTRFKNQISSCLAKHGLKINEITKFSKKWIEQLLLILAKFPQIKELHYGYEHYKIIEHRIDQITAECITHCKLHWNKEFEVLQTIPGIAEKLACYLIADICPIVRFKDKKKLRRYAGVIPCSQESGGKTYGSYLPKGSSRGLLRWALIQASWAAVKGKNNLSKYYNKKKKTRLKTKAIMAVASSLSDIVYHVLNTKKPYIV

SEQ ID NO: 311281 - protein, 318 aa, unidentified
MMQSNTVCAGIDVAKAWLDVALSKGAARLHVSNDVAGLAQLAAWLAARGVVRVGLEASGGYERLALTQLRAAGLEMRLFQPRQVKALADFQLRRAKTDALDAALIAACTALASEAARPAPDPAIWALAERLTLLEQIEEDLVRAKTRREAFRQPDLKARQDAEVARLKALRRAELKALAAQVRAEPARAVNLDLLCSIPGLGERTALTLLILMPELGSLSREQAASLAGLAPFDDRSGKRVGQQYIQGGRARVRRSLYAAALPAAFKWNPALGRLYNRLRDKGREHKLALVACARKMIVYANAVLERQAPWTPETSPT

SEQ ID NO: 311282 - protein, 331 aa, unidentified
MTYIGIDVSKATFVVAYSSEKNSKTRTFKNTVKGIHAFVQTLSFKEDHCIMEATGNYSSLLVYLLNEAGVTTSLENPLKIKNFARVMLSTIKTDEVDARIIALYGERMQPRPYKLPSDAILTLKQKRTVIRQLKKQLIATRNLKGSMEVLPFFDPSCKKSVTQTITFLEKQIKTLEEDLSVLAHKEYKKQMDLLTSIKGIGVTLAAALIMATGGFTYFDNAKQLTRYLGLSPNYQQSGTSVNFKGHINRNGDISLRSQLYVAAFASLRCNKECRACYDRLRSNGKPGKVAVIAVANKLVRQAFAVVTHEKPYVDGYVSTLGSAETSSSVEG

SEQ ID NO: 311283 - protein, 348 aa, unidentified
MDATTVAIDLAKDVFEVAIGNRGGQVLHRHRFTRARLQRFLEGQAAGTEVLMEACGTAHHWGRLCQRLQLVSVLLPVQYVRAYVRRNKSDRTDAAALLEARRCGEIAPVPVKTPEQQAWQGLHRIRQQWQKTRTARINGLRGLLREYGIVVGLGARRLHAHVPAIVTTEEAPVPGPLLAALQTLLEEIRELERRIKALDATLVAHLATDDVGQRLQTIPGVGPITASALLASVPHIHQFRRGRQFASWLGLTPREAASGHRVWRGRITKRGDVYLRTLLIHGARSVIRHAHAQARQARVALTARQRWVLALVSRRGVNKAATAFANHQARVIWAVWRSEQPYRSVATP

SEQ ID NO: 311284 - protein, 312 aa, unidentified
MEAKFVGIDVSKARLDVDCLPVSTARQFSNDAGGIAALVEWLLGSGVERIVVEATGGYEIAVASALAAAGLPVVVVNPKRVRDFAKAQGVLAKSDRLDARVLALFGERIAPPVRALPEAAQRDLTELLDRRHQLVTMRAQEQARLATVLPVARGDVEQHIAWLDQRIRKHETVLLKRLRANEIWDAKVKLLDSVPGIGPVNLFTLVGHLPELGTLNRQQIAALVGVAPFNDDSGKRRGQRYIRGGRAEVRCALYMATLSAKRWNPVIAQMFERLIAKGKPFKVAMTACMRKLLTILNAILKSTQPWENRLAT

SEQ ID NO: 311285 - protein, 376 aa, unidentified
MKEHISKKATKRNRAGKPGLAKIEPREPFAFYIGIDLGDKNSEFCVFNPQGEVTDRFRLPMRGSDWQAYFAVIPRSAVAIEAGGQSRWVAEVVERCGHKVYVSNTRKVPYIYEGNDKDDPGDAYKLGELVYLKPRLLHPIQHRSQEIQQDLEWIRAREALVESRTQLINTVRGMSKSFGQRLEKCSVESFTDKRADQLPEGLRGVVAPLLETIDVLNEKIGYYDQMLKHIADTRYPKYRLLERVNGVGVHTALAFMLTIGDAERFEKSRSVGSFLGMRPRRQESGEQQPQLGITKAGDPYLRKTLVNCAHHILGPQGKDSDLRRFGLRICARGGKNAKKRAVIAVARKLAVLLHRLWVSGEVYEPLRNSRAMAATA

SEQ ID NO: 311286 - protein, 338 aa, unidentified
MKLYGAIDLHSNNNVTVLIDEQDKVVYEKRLPNDLGVIAQQLAAYQSSLEGIVVESTYNWYWLVDGLMDQGHQIHLANTAAIQPYEGLKYTDDHSDARWLAHILRLGVLPQGYIYPKEERAVRDLLRKRGQMVRQRTANLLSIQNLITRNTGSSIRSNRIKTLDAEAVDALLPNEDLALAVKANLAMIQCADKQIDILERTVTERIKLRAEFSFLKTVAGIGQILALTIMLETGEIKRFLSVGDYASYCRCVGSQKLSNGKKKGSGNTKNGNKYLSWAYVEAANFAVRFNAKIKSFYQRKKSKTNGIVAIKAVAHKLCRACYYIMKDQVAFDVSKAFA

SEQ ID NO: 311287 - protein, 334 aa, unidentified
MDYFAGLDVSVKETSICIVDDAGKIVREVRVASEPEALLQVLAKNNYRFKRIGLEAGPLSQWLFSALAEAGLPVVCVETRHMRAVLKAQINKTDRNDARGIAQMMRVGLYRPVHVKTLRSQKLRMLLTHRKLLQSKAIAIENDLRATLRNFGLKVGMVGTVKFEARIKELVEDLPDLATLVEPLLVVRRVLREQLGILHRRVLAVVRDDEVCRRLMTIPGVGPVVALTYRVTVDVPARFRNSKSVGAVFGLTPAKDQSGERDRSGAISRCGDEMVRVMLYEAAQIMLVRSAKWSWLKAWAMKIARHRGMKKAIVALARRLAVIMHRMWVDGRGT

SEQ ID NO: 311288 - protein, 317 aa, unidentified
MKTVPFEQVILRGCGIDVHKDMVVATISGEGLKTETRSYKTFSSSLTELKEWLLSSGITHVAIESTGVYWKPVYKILECPDMKVWIVNARHIKYVPGHKTDKKDSAWICKLLLAGLLKPSYIPEREQRELRDLTRYRNKLIQHVSSEKNRIVRILEDCNIKLSSVVCSLDGVVANKLIDMLIDKGHVTMDDITCIYHKKLEASPELLYQACEGFIEPHHIYMLQTIRKDMEQTKAIIADLTCRIKEVLSPYENVMELLQKIPGLSRKTVEDLIAEIGVDMEAFPTEKHLASWAGVCPGNNESAGKKKVVEPPMATNS

SEQ ID NO: 311289 - protein, 445 aa, unidentified
MSDRSGLSRGDRNRNARLARLRELLPPGHAIVGIDLADDKQAAVVTDHDSRVLARRRVSARAWELGDLLDWALDRAVAAGFASVTVACEPTGHRWRVLDQLAAARGLALVCVQPLLVYRAREGEDLTWDKSDPKDAVIIARLAAGLHCYEPERADAVWARLRHLGARRSALIAGATAQVNQVRDLLECAWPAVLGAAGVPFRSASWRAALAVALDRGAGDLARVRRLGPARFEAAVRRELPRWGARRPCLRIVRAVFAALADPAGVMVHRPGALERAQLALGDWRDTRARLAEVEARMVAILDDLQLTGLVTTIAGLTPVGAAAILAETGDLARFATPRSLVKHAGLCPRDNASGGYQGKTSISGRGRPALRVAAWRAVWAALPNNPVMAARFAHLTTREHNRLARQQARTACAAALLRWIHVVITRRIAWDPAIAGRTPLRQAA

SEQ ID NO: 311290 - protein, 388 aa, unidentified
MEPASIHPTAVRTDLGAIFVSLELSRSTWLITSLSPGSGEKMSKHVVAGGNVAELLDRFEQLQHKARLRTGTLFPIVTIQEAGLDGFWIHRVLEANGIESHVVDAASIATSRRRRRAKTDKIDGEALTRTLLAFKRGEPRVCAMVKAPDPKDEDRRRICRERKVLIAERVRHVNRVKGLLFAQGVSGYQPLRKDRRRRLEELQTGDGRELPKHLKAQINRELDRLDLLLEQIAAVESERNSLLSTYEQPAVEATSPAAMLLSLKGIGAEFAAVLWTEALSRRFDNRRQIVAYAGLTPTPWMSGTIDHEQGVSKAGNPRLRTTMIQLSWLWLRNQPASALSRWFVDRVQSNGGRLKKAAIVALARKLLIALWKFVTAGVVIEGAVMKTA

SEQ ID NO: 311291 - protein, 309 aa, unidentified
MNEELVYLGVDIAKSHLDAAIGKEKHRFSNDAVGHRELIRWVKQTKAPIQMICESSGGYERRLVQAVARAGIRISLVQANRVRQFARAAGVLAKTDSIDAEVLCAYGEAMRPQTVGASELEQEHLRELESQRRHLTHLLVMEQNRGARLSDAFVRRLNRSLINQIKKQIERLDLLIKEHIEQSPRLTAKAEKLISIKGIGLRTAALLLAQMPELGQLNRREVAALVGVAPFNRDSGKLRGKRAIYGGRRFVRHGLYMAALVAARHNPILRAFYQRLRTAGKPAKVALTATMRKPLIVLNSSLKSDLNYA

SEQ ID NO: 311292 - protein, 339 aa, unidentified
MNQFTKKKHFVGIDISKDHLDLTLVDEGSIGVFQDRKVDNSFNGFDKILNWLSKQKVKLEDCLFCMEHTGTYGLLLFAWLSQKEIDYCVEPALRIKRSMGITRGKSDKVDARRIAQYASLNRAKLVPFTIPSTLLLQIKQLLTYRNQLSRIRVSLKNSLKNHNRYNAASGLQDISDDIESQIEELEIRIESIGQQIKDLIKSDETLHKNFQLATSVKGIGFVIASFILVTTNNFTSFENSRKYACYSGIAPFENSSGKYKGQSKVNHLANKKIKALLSNGAHVASKWDPDIKAYYTRKIKEGKDHNSVINAIKCKLVNRVFAVVKRQTPYVIIYQQKFA

SEQ ID NO: 311293 - protein, 318 aa, unidentified
MTQDLFIGIDVSKATLDIAVSPGEHAWSVDNTEAGIEELIARLRHLGTPKIVLMEATGGFERRPLVMLGAAGLPVTAINPRNVRDFAKSIGLLAKTDRVDAKALAFFAEKIQPPCRPLPDAQTRALQDIIVRRRQMVDMLTAERNRLAIVENPKVKRELLQHIAWLKKRIHIADYDLDQAIKDSPAWQPKSDLLKTVPGVGPVTTSTLLALLPELGTLTNKQVAALAGLAPFNRDSGTIRGRRCIWGGRASVRNVLYMATLAATRFNPTIRAFYQHLCKLGKLRKVALVAAMRKLLTILNAMVRDQTPWRSNNPEISS

SEQ ID NO: 311294 - protein, 426 aa, unidentified
MRKTYQICCGVDVHKTFLVATIVKTTNNIPHYEKKRFSTFAKDLRLLKHWLLNNNCFDLCMESTGKYWIPVWNMLEDKINVTIANPKWVSAVKGNKDDTKDSKWIADLFRMGIVPGSYIPCRAIRILREFTRYRYKLVCMRSSEKNRYQNAFTVSNCNLDAIVSDMFGKSAMDIENYLLEIDMENFDPEYCKSLLQRSLKKKADSVVESVESFNMIVEQKERIKIIQEHFNDLDARINRIDEQIEKLIVTNKWQSAISLICSIPGIDRHMAITIISEIGTDMTPFSSSKRLCCWAGLTPSNNQSAGKKKSVKITRAGIYLKPALVQAAHAAVKSTTNPYFKNKYERIYKRRGKKRAIIAIARKILTAIYHMFKNGELFNPCDIYKESIPETVQLHQKKKAAKQAIKLLVNLGLIAEDTVPLELLAS

SEQ ID NO: 311295 - protein, 400 aa, unidentified
MISVGVDVSKGKSTICVLKPYGEIVCSPFEVLHVEKELEGLDNLLQKLDGEIRIVMEATGIYHLPILSFLQEKGYFVSVVNPYAMKKYAKDNSIRGAKTDRLDSSMIANYGIEKWYKLQKHESDEETYAELKLLGRRYRYYMELHVKALQELTHILDYVMPGIKKLFNSWDEASGKDKLCDFAERFWHFDLITSMSLDEFVDEYLIWAGEKKYHRSRSKAETVYELASGGIPTLSSSTPSTKMLVQEAVTVLRAVDNSLSLILSRMQELAKSLPEYSTVRAMGGVGDVLAPKLIAEIGDVRRLHSAKALIAWAGIDPPPYESGQFVGSKRKITKRGSSTLRKVGYEVMRVLKSHKAPKDDVVYNYILKKEREGKDKKLAKIAGLNKFLRIYYARVMAVYQ

SEQ ID NO: 311296 - protein, 323 aa, unidentified
MKNFVGIDISKETFDVYFEQEGKGCHVKLQQTEEDYKVLLHLIGKDVICIMEATGNYHLKSAHYLHQAGIKVIAENPLKIKRFSQMSLQRTKTDKADAKLIYEYGRIILSSNKLHFWRPDKTEIGHLKQYDTVRHQLIKQRTALSNSEEALNALTYLNDEVTQVLSDMVTAVDKAIKQLDKGMLKLVKEHHSETFDLVTSVPGIGPKTATMMICLTDGFNKFSHDQVKQFISYIGMSRRTFESGTSVKGRAHISKVGNSRMRSMLYMCSWTAKRKNQQCITLYEHLSGKGKPEKVIKVAIAHKLIRQVFGVIKSGEPFSKEYA

SEQ ID NO: 311297 - protein, 402 aa, unidentified
MNAVGIDVSKGKSMVAIMRPFGEIVSAPFEIKHTASDIHSLVELINSVEGESRIVMEHTGRYYEVLAHQLLEANLFVSAINPKLIKDFDNDSLRKVKSDKADAVKIARYALDKWQNLKQYNVMDELRNQLKTMNRQFGFYMKHKTAMKNNLIGILDQTYPGVNTYFDSPARSDGSQKWVDFASTYWHVDCVRKMSLNAFIDHYQNWCKRKKYNFSQSKAEEIYGKAKELVPVLPKDAITKLMIKQAVDQLNSASTTVESLRTLMNETASKLPEYPVVMAMKGVGTSLGSQLMAEIGDVSRFTHKSAITAFAGVDPGVNESGTYEQKSVPTSKRGSADLRKTLFQVMDVLIKTHPQDDPVYQFLDKKRAQGKPYYVYMTAGANKFLRIYYGRVKEYLASLPES

SEQ ID NO: 311298 - protein, 387 aa, unidentified
MPINDHLVQNETAIRSDVASIFVSLELSRSRWLVTSLSPGSEKMSKHLVAGGDGAGLLDLLIRLRDKAEQRAGTPVGIVVIQEAGLDGFWIHRLLATDGIESHVVESASIAVPRRHRRAKTDAIDGAMLLRTLMAFKRGEPRVCSMVVPPRPAEEDRRRIARERRTLIKERVEHINRVKGLLASQGITGYQPMRGGCRERLEELQTGDGRPLPPRLKAELGRALDRIELVRRQIAAVEAERDALVQADDVRARSPAVLLMQLRGIGPEFATVLWMEGLFRNFTNRRQLAAYAGLAPSPWKSGCVDREQGIAKSGNPRLRTTMVELAWLWLRYQPDSALSRWFRERVGSERGRIRRIAIVALARKLLVALWRYTTLGDLPVGAALKTT

SEQ ID NO: 311299 - protein, 322 aa, unidentified
MNDTVVGIDVSKKTLDTSYAQGQRKQARIFENSSDGWKQMLSWLKAKGSQPAHVGMEATGRYSLGAALMRHDAGHTVSIINPAQIRDFARSKLGRNKTAKADAALIREYTTLFRPQPWTPPSPAMRRLCELHTVRTGLVANRTEWKTRLGSGLGDSTAIQVAKAVIDALSSQLEVIDQAIAETIEQDGDLRGRRDLLLSVIGDTLAALLLAEMPEPGVLRHSAEMIAYAGLNPSHHRSGTSIDRPTRISKIGNATLRSALYMPALSAMRFNPVVAALAARLKSAGRLKPKQIVVAAMRKLLVLCFGVLKTGTPFDPAIAMPT

SEQ ID NO: 311300 - protein, 341 aa, unidentified
MGEVSTIGLDLAKNVFQVHGADASGAVLFRKKLRRHQVLTFFAAQPSCTVAMEACGSSHYWAREIRRLGHQVRLIPPAYVKPFVKRQKNDAADAEAICEAAQRPTMRFVAPKSEQAQAAAIVFRARDLLVRQRTQIINALRGHLAEFGLIVAKGPAHVPHLVQAVEDEAEPIPELARPILRMLVATLHRLDEQIAGLDREVARRAKEDETARRLMTIPGVGPVTAVALAALAPPAETLRCGRDFAAWVGLTPLQRSTGGKQKLGATSKMGERTLRRLLIIGANSVLLQVARNGAPSGSWIARMVAHKPPMLVRVALANKMARIVWALLARGEVYRAPAAAA

SEQ ID NO: 311301 - protein, 369 aa, unidentified
MPTMTYPTTASEQTYIEVTGGVDTHKDTHTAAALDTSGRLLGHREFAATAAGYAALLAWLGTLGQLERVGVEGSGVYGAGLARFLQSAGVELVEVDRPDRKARRWQGKSDPVDAEAAARAAQAGRASGVPKTRGGKVDALRALRVARRSAVAARADAQRQIKALIVTAPDALRMTLRGLGDRELIAHCAARRPDRAAAGDPTVATMLALRALARRHQQLSVEIDELDALIGPLVTAINPTLMGLSGVGTDVAGQLLVTAGDNPQRLRSEAAFAMLCGAAPLPASSGRTHRHRLNRGGDRQANAALYRIVLCRLRWDPRTRAYAQRRTTEGMSKPEIIRCLKRYIAREIYTALLDPQPCSILGITTSAPN

SEQ ID NO: 311302 - protein, 344 aa, unidentified
MTYSNVIAIDLAKHVFQVCKASHDGTVIYNRTCSRQKLKELLVKEKTALVAMESCGGTHYWARFAREQGHEVKAIAARTVKPFRQGQKTDANDAIAISVAARQPHIHSSRLLSIAEQCQQSIVRARDLLINQKVKTSNHIRSLMLELGIAVTKGDKVLRKTIPEILEDGENDLTTGFRTTLNIMYQHFLMLLNEIEMVSKQLNNEVAQDEICQRLKALEGVGPICAIQLKIALNPEHYSKGREAAACIGLTPVQHSSGGKQKLGSISKRSNHNTLRSALFQGALAVVVNIDKRESRTYKDAWLKALIARRGKKVAAIALANKTVRTAFAMIKYNQEYQPQLLVA

SEQ ID NO: 311303 - protein, 368 aa, unidentified
MNDYTGKNIFVGMDVHKKTYSVTVICDGTIVKRDTLKAEPQLLISYLKKRFGSGNIKTAYEAGFCGFHLHRTLMAAGIESIVVHAAGIETSNSRVKTDKRDSLKIATHLSEGKLRSVYIPSVEQEDNRTVTRLRDTFSKERARVANQIKSLLFLHGLIPSDNNKKVSLKWIKGLSKYELTPGVRFTIDAFVALWLEFNTKIKEIDLEIKKQAIKDKAIDAVYQTASGIGATSARVLANELGDLQQFKNERQLFSYIGLTPSEHSSGEHTRQGHITKQGKSIVRKILVQAAWVAIRHDKELQVIYERIALKSGAKRAIVGIARRLIGRIRACFRTGEFYEAQKVERPTLKFKKPTKATTKSILKHELAA

SEQ ID NO: 311304 - protein, 393 aa, unidentified
MICVGIDVAKDKHDCFILSSEGEVLADVFTIQNNAEGFDTLLQTIRRCVCPGDKIKVGLEATGHYSYNILGFLLDKGLDTYVINPLHTNLYRKSLSLRKTKTDRVDARTIAAMLMSDVDLKSYTDTAYHNEELKSLTRYRFDKVKERAKLKQSVSRLVTILFPELEKLVPTLHMASVYALLSEFPGAKQIARAHLTHLKALLNDASKGRYGRDMATELRDAARCSVGSVMPAKSLELQHTIRLIRELNTEIEDIESAIQTIMEEMQSPITTIPGIGFRMGAMILAEIGDFSRFDSPDKILAYAGMSPSTYQSGQLSLSGTYSHMEKRGSKYLRYALYNATKYVCLWDSTFEAYLAKKRAEGKHYNVALSHAAKKLVRLIYAMEKSRQPYNSVA

SEQ ID NO: 311305 - protein, 361 aa, unidentified
MCKKYYVGLDLHANNTVIGISDENDHRILKGRFPNNLEAISEALMFYKDCIVGVVVESTFNWYWLVDGLMEQGYTLHLANPGAIKQYNGLKFTDDEHDAFFLAKLLRLGILPQGYIYPKNDRHLRDLLRKRLKLVRERTMHYLSLKSLINRNTGLNIPSARLKVIDESDLRSMLANTHLFLSAKITLDAIHYLSQEIKSLEKILLMEARLKPEFEKLLSVEGIGKILAMTIALETGDVNRFPTVGDFSSYCRCVGSLRLSDNKKKGENNRKNGNQYLAWAFVEASHFHRRFCPQAGAFFQRKVTQRNKNVAVKALAHKLARACYYIMRDRVSYDKTKVFGVPIQSDKGSGSKPIRGLASNQ

SEQ ID NO: 311306 - protein, 318 aa, unidentified
MLAEVGMTGKIVVGVDVAKNWLDFSVYGEAKVDRIDNTLEAIGRWLERFHPNLVAFEPTGGHERLLRKALSARNIMFIRVHPNDVIAFRKSRGIKAKTDRIDAQLIAVFAAEELSRRGARINFDADETVRELTARRRQLVAALKAERCRLALVQVSGVRSSLALIIAALEQSLATIEAEMRTHITANPVMAKLVTLLQTVKGIGPIVAMTMVAELPELGYLTGKQIAALVGLAPQTRRSGKTRYREPIGHGRSGVRAVLFNAARAAISHASPFKTFYDRLVEQNQRPGKVALTAVMRKILVAANAIARDGQPWRFGHT

SEQ ID NO: 311307 - protein, 372 aa, unidentified
MKEHSELFIGLDVSKLKTSVALAEDGRNGEVRFFGDIDASPAGVAALATKLAKRGRRLHFCYEAGPTGYDLYRQIVALGHDCAVVAPSLIPQRPGDRIKTNRRDALSLAKLHRAGELTPVWVPDVGHEAIRELVRAREGAMEALRRARQQLLSFLLRHGRIYTGRTPWSKAHSSWLCGQTFEHPAHQIVLAEYRHAIEEAEVRLKRLTAQVTETAASWSMAPVVKAYQAMRGVAFMIAVTFVAEIGDVRRFENPRQLMAYLGLVPSESSTGERVRRSGITKAGNSRARRVLIEGAWTYRFPARMSRLIQGRQDDLPKAVREIAWKAQVRLCGRYRKLIAAGKLKAVTVTAIAREMAAFLWAIGQVIAPVLDA

SEQ ID NO: 311308 - protein, 429 aa, unidentified
MRTESTPGARGPVFCGVDTHADSHWLCVLDWRGRKVLSRRFPADAAGYEALAGAIAAAGEPACVAMEGTSSYGAGLARHLASLGMPVREALSPAGTQRRRPGQGKCDEADAERAARAAMSGSKLGTPKSQDGWVDGVRCMLAARSGAVKARTSAINTARSLLTTAPEGLRSRFRGMAGPRLMEELPSVRAEGALGAALGALADLWAAARDAALDMERAIEASLEENCPALLAMYGCGPVSAAKLAVAAGDNPGRLRSEASFAAICGACPVPASSGKTVRHRLNRGGDRQANSALHEIARQRVMRDPETAEYAERARARGKSDREVMRCLKRYVAREAYRALMRPHEVRRPEDASELVAARRAAKVSQVRAASILGTSEKYISMLERGQRELKPIRRAYEAWVEAGLPLDWDRQAFEAERKMDSKKHLAK

SEQ ID NO: 311309 - protein, 313 aa, unidentified
MSQNNPSIIYAGLDIHKATLQLHLTGRDCELPNTPAGHRKLLALLSKHSTSHVICEASGGYERPIVAALHAAGHPVSVLNPTQARHFARALGQRAKTDPLDARLLSLCGEALRPAPTPPRSQEQRQLVELVRYRQQLMEKLLAERQQAEMIEFPSLRRQSLSLARRMESDLAKVDALLSQLRNASCELAAKAQQLTSVVGVGDQTALSLLAEMPELGTLNRRQAAALAGLAPHPRQSGQWVGKSSIGGGRPQIRRALYMAALCASRLHPTLSIFYKRLRDTGKPPKVALTAVMRKLLVLLNLTLKNSLFPLAS

SEQ ID NO: 311310 - protein, 412 aa, unidentified
MEVLYPCCCGLDVHKKSITACVLGAGGKGAVRKEKRRFGTFTPELLSLADWLRACGVTHVAMESTGVYWKPVWNILEGQFEIVLVNAQHIKAVPGRKTDQKDSEWIADLLQHGLLRGSFVPPRETRELRDLTRYRVSLTEECNRIANRIQKVLEDANIKLASVATDALGASGRAMIQAIIDGEQNPGLLADMAKGLLRNKISELQSALAGRITAHHRFMLAQLMDDLRHAEAKMERVEEEIKRHTFPFGDDVARLWTIPGIDRVTAWGLVAELGLNMDQFPSAGHAASWAGLCPGNFESAGKRLSGKTRKGSAFLRRCLANAAWAVSTKKSSYLSALFRRIAARRGNKRAILAVAHAMLVIAYCLLKRKEEYKELGVNYFDQLNAEGLRRSLVRRLERLGHQVTLQPRPVTG

SEQ ID NO: 311311 - protein, 311 aa, unidentified
MASNVFVGIDVSKNKLDVCLKPDDNYFSVSTGSEGLNTLVARMRQCDPQIIVIEATGGYENPVMTALAEQELPLILINPRQIRDFAKAMGKLAKTDRLDAETIAHFAQTIQPAPKKLPSKEQQELKEMLSRRHQLVSMLTMEENRLNVASTKIKRQISANIESLNKQLRDIDKDLDDFINNNSTLKQKADIVKSVPGVGPAVTKTLISHLPELGTLNRKQISALVGVAPLNRDSGRFRGKRKIWGGRKKIRSQLYMAALVATRHNPVIRSFYQRLIESGKESKVALTACMRKLLVILNSMVTHGTKWDPGF

SEQ ID NO: 311312 - protein, 393 aa, unidentified
MICVGIDTASDKHDVCIMNKEGEIFKRIFTIHNNKTEYKKLFNEIESAKKFWNDSKVCIGIESTGVYSETLVNYLSKIEAYEIIYINPILTNMFQHSEIIHYAKTDKIDAKGICIFLSDKRKRLYTYTPPSYTILEMRSLGREINHLNKQINKTVNRLTGMLHVVFPEFFQVFDKVKGSTCLEYLRLFPTPDMIVRKHSLNDVYKKLDGRGRKIENLNKLIHFAKETIGHSTKSDAIAISFLASQLQLSYSQKEALIDRMDILVTENAMNLAQIPGIGAITACTIMGEIGDISNFRGADSLVAYAGINPMVYQSGKYEAKGLSMSKKGSSYLRNAIILVSRLIIQYDEKFKTYYEKKRAEGKSYNVAIGHVSNKLTRVIYHILKYNEPYDETK

SEQ ID NO: 311313 - protein, 349 aa, unidentified
MDEDITVGMDVGDRRSDVCELDGRGRVARRLRVTTTEPQLTKVFSRLAPCRVVIEVGTHSPWLSRLLSRLGHEVIVANPRKVRLISQSEDQHDRVDAELLARLGRVDLKLLRPIRHRGEQAQRDRALLGVRDGLVRARVRLVNQARGQAKALGTRLPSCSPEGFAGRLRKEKLASLYPGLEVLVEQVDQLTAQIRALDQRIEALCQTRYPETGLLRQVKGVGALTALAFVLTLEDPRRFRRSRQVGAYVGLRPRRRQSGANDPELRITKAGDPYLRQLLMQSAHYILGPFGPDTDLRRFGERSSVRGGRIARKKARVAVARKLAVLLHHLWMTAEVYEPLRNTEAAEAA

SEQ ID NO: 311314 - protein, 425 aa, unidentified
MNYKQNEKINQVKESTLVVGIDIGSTTQYARAFDWRGIELGKVFPFSNSREGFESFKAWMQHLQDKYKKLDAIVGIEPTGHYWFDLGAYLEDEGILLVMVNPYAVKQTKELDDNSQSKNDRKDPKVIAKLVTEGRYSAPYTPDGVYADLRIMVANRKRLIREMTQIKNRFARWFAIYFPEYTDVFGDYEAQSSMLLLKKTCTPEAIVELGAEKINQIWRDAKLRAVGMKRATTLCETAKRSIGLKKGSSAAQYEMKLLLEDYEYKKAQLDAVMEEIEKLCRKIPESEQMLAIKGIGVITVAGFLAEVGDVRRFESPRQIQKLAGLSLRENSSGKHKGQTTISKRGRSKLRAVLFNAAIPLIAKNPEFKSLHEYYTTRANNPLKKKQSVIAISCKLIRVFYAILANGVTYDAQKMLSDIHRQPQAA

SEQ ID NO: 311315 - protein, 377 aa, unidentified
MSKLLFVGLDVHAETIAVAVAEAGGEVRSLNVIPNRLESVRKLVHKLGPVQDLRACYEAGPTGYVLYWQLTQLGVSCDVIAPSLVPTKAGDRVKTDRRDALNLARCHRAGELTAVWVPDANHEALRDLVRAREAAKKDQLKARHRLGKFLLRHGQRPEGIKAWTKEYLAWIKSKVHFDQPALEATLADYLEEVDHVAARILKLDKAIDEAVRQTPPEIRAVIEALQSLRGVAQTTAATIASELGSISRFESPQQLMGYSGLVPREHSSGNRVQRGGITKTGNGHLRRVLVEAAWAYRHRPNVSGSILRRQKNLKLDDEVKKMAWKAQQRLYKRYTALAARGKNKNQIVTAVGRELIGFIWAIGVYTERKQKQLTKAA

SEQ ID NO: 311316 - protein, 351 aa, unidentified
MMIIGVDYHPGFQQIAFLVEESGECGERRLDHSGGEAENFYRDLKARGISVRVGMETTGFSRWFERLLAELGFEAWIGDAAEIKTRRAKKQKTDRQDAQLLLKLLLDDRFPRIWVPSPENRDLRQLLWHRHRLVQMRTRIMNQLQALAINENRYWKGKLWSEKGRAELEKLPLAFWASRRRQELLELLDRMNPTIEELTAAAALEAKKRPEALRLMTHPGVGPLTALAFVLIIGTPERFGCAKQICNYVGLTPCEDSSGGRQRLGHITKQGSSLLRFLLVEAAQAAVRCNEDWRRRYRHLAMRRQRNIAKVAMGRRMGARLYWMWRNGHEYSSSLEFGSHAGKLGTGNGGQ

SEQ ID NO: 311317 - protein, 449 aa, unidentified
MHLASAVREARPVGSSRAKRQYRADAASRTGWAKEAVLSDQYRYFVGIDWATESHEVCVLDAGQQIIDRKTVEHSGSGIAQFVTYLEKLAEGDPESVAIGIEIPRGAVVETLVERRFAVYSLNPKQMDRFRDRHSVAGAKDDRRDAFVIADSLRTDMGLFHRVRLDNPLIIRVRELSRTEEDVQQEQVRIAHQLRDLLRRYFPQMVNLCPGVDELWFWELLEMAPLPAKTAKLTRARIEKTLRSHRIRRVSADDVVAQLKAPPLGLAPGAAEAASEHVLLLIPRLRLLHQQRKDIVARIEAVLDKLSEGEQGEHRDVTLLLSLPGAGRVVAATMLAEASQPLGDRDYHALRSYSGVAPITRRSGKRHIVVMRQSCNQRLRNAIYHWSRVSTQCDERSREHYAELRRKGHSHGRALRGVADRLIAVLIAMLKSGTVYDPQFRTNSAPTSA

SEQ ID NO: 311318 - protein, 397 aa, unidentified
MIAVGIDVSKSKSTVAILNGDGSIRAKPFNVRHTADELLALVNYIKGTSEVPTILMEPTSHYHYPLLKAFQEANLPVCLINPYQMKKYGDTALRKAKTDKRDSLRIAQYALEKSYSLIPYTPSDQKYEDLRFLSRQYSQRISILTVNKVQLLALLDQTMPGITSLLPLKSRDPDNCVLLRFIKRFKSFEMIRKMGKTRFLESFQLLVRKTKDRCAGTKGLRIYELALNSVTTRGDNPLMAMTQEQCVALISTSQKAADEINLQMRTIAETLPEYKVLRAMAGVGDRLGPVILAEIGDVRRFHSGKALNAYAGNDAPPYQSGQFESRNRHISKRGNPALRKACFEVMQALKLTKPQDDPVYLFLAKKEQEGKPYNVAKMAAVNKFLRIYYARVMELYK

SEQ ID NO: 311319 - protein, 366 aa, unidentified
MSSITYVGLDVHKRTIAVAMLQTGTGEVQQWDVANEPTALKRLIRKLKPHAPLRCVYEAGPTGYALQRLLQKEGIECMIAAPSLIPVRQGDRIKTDHRDARKLAQLHAAGLLTAVHPPTEDEESVRDLCRCREDAQLDLVRARHRLSKFLLRRALVFHDGNQWSQTHRTWLHGLKFSRTADQVVFEDYMLALEQHEARVAALDEQLVAVAAQEPYRAPVAQLRCFRGIDTVTALSLAAELHDVRRFPTAPSLMAYLGLVPSEHSSGDQRRRGKITKTGNRHVRRLLIETAWHYRHKPAVGVRLAKRRRGQPPQVIARADRAQQRLCTQYRRLVGRNKHHNTIVVAIARMLIGYVWETLREAQPNQA

SEQ ID NO: 311320 - protein, 412 aa, unidentified
MKDLLEISCGLDIHKEKIVACILTGPLGKPTRSEIREFSTLIPDMIALRNWIVSKNCHHVAMESTGIYWMPIYEILEDAFYGDITLLVVNARHMKNVPGKKTDMRDSEWISTLLRAGLLNGSFIPEKRIREFRDLNRYRKSVIRDITSQKNRIEKFLQSSGFRLSSFISDIFGASGRNIILHLMEHGQIDKTALDSCLKTKTRNRIDEILMSVNGTLSEHQKAFLRILMTHYDSLKEHLTEVETSLEEDMAPFTLQVEQLNSIYGISTTASCAIIAEIGIDMEPFKTAEHICSWAGLCPGNNESAGKRKSASVTKGNPYIKSMLCEIAWVIAGKRNTYLSAWYWRIKQKKGAKKAIVALARKLLVIIYTMLKQGTLFDESCFETRRKNCEQKQLSRYIRELEKHGYHVEAQS

SEQ ID NO: 311321 - protein, 411 aa, unidentified
MNNTLFVGIDISKRSNVATFMNCEGKVVGRLTFSNNGSGADRLVAKILSYYEKEDFEAIRIGMENTSVYSKSLVWFLYEHEALNEHKLSIIPLNAIMVANYKKSFLDMDKDDITDSFAIADFIRIRPGLLPFKLDDRQEALKIMTRSRYNYVQALSRMKSQFLTRLFLSFSEMEAGKPFYSIFSKTSLSLLEEEFTLDELAEKPIPELVEFLQEKGGGKFQNPEEIAKVLKKAASSSYRVPAMVRESLNRTMASDMEIMRILENEIHNCDKNIEKLMKSVPAILVSIPGIGPVLAAGIMSEIGDISRFRKQESLGKMAGFKWKRNQSGKKESEDKAAVLSGNKKLRYYLVEAANRVRIHDPVFEAYYRKKYAESKTHAHKRALILTARKLVRVIFYLLKENKLYKPDVGIS

SEQ ID NO: 311322 - protein, 341 aa, unidentified
MEPTTVVAIDLAKHIFQVHFVEPQTGAIRSKPIRRDQLLPFFANFPPARIVMEACGSAHYWARKLASLGHDVRLIAAQFVRPFVKSNKNDQADAAAIWEAAQRPGMRFVAVKTEEQQAVLALHRIRQQLVRFRVMQVNQLRGLLYEFGIVLPQGRCAGVAAAKLALAKLALQLPSMLVDSLQDQFSRLLALDEQIEQIEQRITAWRRSDEACRRISEIPGVGLLTATAAVAVIGNAQTFKSGREFAAYLGLVPRQNGSGGKVKLGGISKRGDVYLRTLLIHGARAVLSHARHLTDQLKSMLARRPANVVAVALANKMARIIWALLAYGRTYQPPVPLPMPR

SEQ ID NO: 311323 - protein, 350 aa, unidentified
MRWVGLDFHKRYITACALDNDGQVVAEHRRLPADVVPLVGWLPALGDAVTVAMEATRYWAWLHDQLSAAGIAAVAAHPYQVKLIWQARCKTDPIDARKLADLLRTNLLPAIWVPDVEVRARRKLLRGRAYLVRLRTSVKNRIHGHLTAENCRAAVTDLYGRAGRAWLQTVALSPMGRVQVDLLLELVDALDARIGRLDDRVKRLVKHDPVAQRLQTWPGIGTFGAALLLAEIGTIHRFRSSHELAAYAGLTPSTQSSGDTTRHGSVGRAGSPWLKGILIEIVQRLKLAPGPVGQQYQKLLRSNGKATVAAARKLCGYLYWCLKEDWSYDAWLRQHERLEVRPVQPLGSAA

SEQ ID NO: 311324 - protein, 426 aa, unidentified
MKLNNPPEFTALIGLDWGDKSHAIALEPAGGPTETSTLEHSAESLHQWLDQLEQRFGARQVAIAIETDQGAVVYALLERPWITIYPIHPATSTRHRTMFRPSGAADDLPDALVLLSLLQHHRQRLRPLQLDDETTRTLARLVEARRKAVDRRTLLLNQLVSTLKNYFPQALELVGEDLCTDMALDFLTKWPRLVDVQAAKPATLKSFYHRHNVRRPQLIQKRLDRVRSARLLTRDPAVIEVSVRVVQLLVAELRVLVEHITAFESAIAQDFARHPEKTFFSELPGAGPTLAPRLLAAFGTLRAQYPEVACMQRYFGVAPVTEKSGSRAWIHWRWNAPTFTRQTLVEWAGQTIVFCPWAKAFYERQRARGSAHHAIMRALAFKWLRVLWRCWQKRQPYNQEQFLRQLEKRRSPIAARARQLALEMAA

SEQ ID NO: 311325 - protein, 393 aa, unidentified
MYLVGIDIGKLKHSFCLLEKETGEILVEPVFFENNRDGFNALLSSFKHLPQKDILIGMEDTGHYNLALLKFLLDRNYQVALINPVATNLTRKMQGGISKNDKLDTLTICDVLSSNQRVKSYRISKYSSFDLYEQKQLTREHHNLKEEENQLSNRLQKCIDVVFPEFNSLFKSKYGIVYMNILKEFGSADAIAHADIRTLRKCFDTGRGKHISLTAEELKEAARNSIGFPSSSEATQIKHLVARIELIKEQIAEIDKKIEEFSIQNNSPILSIPGISHFSGTSILAELGDIHNYSKPSQIIKFAGVAPLTYESSQFTAQHTAITKKGCKYLRKTLYQIITPVIQYNPVFRKFYLLKIAQGKGHRCAQGHCVRKLMRVIYHLLSTGTQFDPALLR

SEQ ID NO: 311326 - protein, 323 aa, unidentified
MTIMTYIGIDVSKDSFVAAYPTKSGYTTKSFPNTTSGARKFISSLPKESHCVMEATGNYSMLLLYLLQQANITVSMENPQKIKHFARAMLSTTKTDEIDAKLIALYGEKMNPSPYKIPSECIILLKQKRTVLRQLKKQLTATLNLQHALSALPKQDPTSKVTVEKTISFLRKQISKMEEEITNLSNKEFNRQMTLLTSIKGISNTIASALITATGGFTYFSSAKQISRFLGLCPTYQQSGTSINVKGHINRNGDTYLRSQLYIAACASLRCNTACKETYERLRAKGKSGKGAIIAIANKLIRQAFAVVTNNRPYIDGYVSSFA

SEQ ID NO: 311327 - protein, 329 aa, unidentified
MVIAPSLPVVGLDVSKATLAVCYQVDDLVKHLEVSNNKAGFQQLVKACGAHCRFVMEATGTYNLALAYYLHEQGGEVAVLNPLVIKRFIQMHLSKGRSDRKDAQWLLRYGQQQPVKVWQPDETVLVECRQLEQVNEQLLKQKTMVSNSLEALQRQPVISKLALKRLQQMRKTLTQQVALVEAELLTLLEQRFAAEMTLLCSIPGIGRKTAGMLLLFAGGFTRFDNYRQVIALAGLSPREHTSGTSIRGKARITKMGGGLIRGKLFRCSFSAKKTNAACADLFDRLVAKGKNKKLALIAVCNKLLKQAFAIVKSGVPYQADFSSKLTHTP

SEQ ID NO: 311328 - protein, 339 aa, unidentified
MRLYAAIDLHSNNSVLVVLDAKDKVVYEKRHPNDLQTILAQLKPHKKNIQAIAVESTYNWYWLVDGLMAAGYEVKLVNTVAIKTYDGLKYSSDEHDARHLAHLLRLGILPTAYIYPKEERAVRDLLRKRSQLVRNRTMHILSIQNLVTRNSGKPITQGGIRKLDEKALDLYCEGNALRIMAIKSSLEILRCLDGQVALLERKVLEQARLKPEFKQITSIDGVGEIIGMTIMYEAGDLERFEKVGQFASYARCVESSRWSNGKKKGEGNRKNGNRYLSWAFIEAAHHAVHYNERIRKYYQRKKAKTNGVIACKAVAHKLARACYHVVRDQMAFDETRAFA

SEQ ID NO: 311329 - protein, 426 aa, unidentified
MSESKVLGQELQFAALVGIDWADQKHAWCLQAADTTQRENGEVEHTPEAIEAWVGQLCRRFDNRPIAVAVEQVKGALVFMLSKYGALHLFPVPPTMSAKMREALYPSGSQDDPRDADLLLELLLQHRDKLRRLSPDSEATRRVQNLVEERRNLGDEKTAQINRLTHQRKIYFPQMLEWFEQLDTELVCTLLERWPTLEELQKVPPERLRTFFRKQRCRYPELIERRLVGIRQAIAAIRDRAVIEAKSAVVKVNAQVIRSLVRGIADLDRKIEEAAAAHPDFFIFESLPGAGAVLAPRLLATFGSQRERYASAEEVQTYSGIAPVMKRSGKKKWVHFRWACPKFVRQSFHEWAGHSIAHSQWARSYYQQQRERGKGHHAAVRGLAFKWIRIVFRCWKDRAVYDESRYLTTLAKRNSPLTAVPGGTML

SEQ ID NO: 311330 - protein, 356 aa, unidentified
MENRITIGMDMGDRNHSICVLDADGEVKERATLVNTAVALQKYFGALSPCRIALEAGTHSGWVSRLLESMGHEVLVGNPRKLRVIWDSDEKTDKRDAEVLARIARLDPRLLHPIHHRGREAHADLAVIKARDMLVKARSMLIAHARGAVKTVGQRISTCGAEVFHKRLLEETPSELRPALEPVMKSIEELTTRIHHYDQLLKKLCEESYPETEGLRAVSGVGPVTALAFVLTLEEHARFAKSRDVGPFLGLVPKRDQSGQTDRQLHITKAGDAYVRRLLVGSAQYILGRFGPDCDLRRFGLRVAERGGKNAKRRAVVAVARKLAVLLHRLWTSGKAYDPCYSQTRKGSQTAESKTA

SEQ ID NO: 311331 - protein, 422 aa, unidentified
MSCLPALPGVCPHPTHVRRDTTILAESTLLIAGADTHLDTVHVAAISLIGTAVGDREFPATCAGYTAAIRFLASLGQVERIGVEGTASYGAGLTRALIAAGIEVVEVTRAVKSTRRLKGKSDPLDAYSAARTALAGEGLAIPKDETTSGLRALHIARRSAVKHRTAVINQLKAMLVSAPDAVREKYRGLTTLKMIEAVARCRPDTLADPWAQSVLVAAKLLAQRVQFLESQAEILQTQIDALVAEANPGLRAAYGVGPDTAAQLLITAGANPHRLHSEAAFAALCGVAPVPASSGKTHRHRLSRGGDRAANNALHRIALVRMSCHQPTKDYVQRQLIKGHTRMEILRKLKRAIAREIFKLLTRQIAVPDYGDLRPSRQAKNITVTAAANHFGIWPTVISRIERGLQRDDAFAATYRTWLNAA

SEQ ID NO: 311332 - protein, 313 aa, unidentified
MSQHNLPILHVGLDVAKLSLQLHLAGRFHSLANDAKGHAQLLKHLRGHPHAQVVCEATGGYEQAVVRALHTAGVPVSIVEAGRVRYFARAQGQRAKTDPIDAAVLSAYGATFQPAATAPASPQQQQLADLSQRRRQLIQLLVTERNHAEHYTDAFRLRQSRQLAKALEKQITQCDEAITAHIAQDPELARKAERLKAIPGVGPVVAATMLAEMPELGKLTAQTAAALAGVAPYNRDSGGQSGGRRINGGRGAVRCALYMATLSAVRYDRILKEFYLRLRATGKKPLVAMTACMRKLVILMNRLLKNNDFQLAN

SEQ ID NO: 311333 - protein, 366 aa, unidentified
MKKNSTVARRRKQNFSAKKLTMGIDLGDRFSYYCVLDEAGEVLLEQKLPTTRPAMQQGFGRMPRSRVALETGAHSPWVSRLLTQLGHEVIVAHARNVRLIGESSRKDDRLDARMLARLARLDPHLLSPVRHRSAKAQIDLTVIRARAALVGARTALVNAARGLAKSYGERLRKCGTQQVNPDLAAGFSPELRAALEPLLAEVASLNQRIAEYDRRIEQIATKEHPEVALLKQIKGVGTLIALTYVLTVDDPHRFRRSRDAGCYLGLRPGRRNSGKSEPQLHISKEGDRYLRTLLVQGAQYILGPFGQDSDLRRWGLKLAERGGKNAKKRAVVAVARKLAVLLHKLWVSGEVYEPLRNNHKMVSAVA

SEQ ID NO: 311334 - protein, 345 aa, unidentified
MSVYVGIDVHRKRSQVAVIDAKGEVLANRNVPNGAEPILKVIGGLPPGTPAAFEAAYGTSWLVELLEDYGFAPHLVHPSRCKAIASARLKNDKVDAAILAQLLRADLLPEAWIAPPAIRQLRALLRHRVALVRLRTRLRNRIHAIVADYGYDRPGGGYWSGPGRAWLASLQLPAVSRELVDDDLGLIDALQDRIDRLDWEIRQRARSDPRVKLLTQLPGVGPFTALVILAEVGDVSRFSSARKLASWAGLTPTVRGSDRVAHYGHISKEGSVWLRWVLCEAAQTAKRHPQFTATFQRIAKRRGKKIATTAVARKLLTRAWHLLTDAEHAAAPQPAEPAAPQTAAR

SEQ ID NO: 311335 - protein, 423 aa, unidentified
MAGVMIGIDPHKGSHTAFVIDGREKPLGQLRVRASCEQAEALLGWAGRWRQRTWAIEGARGLGQLLAQQLLAAGERVLDVPPKLTARVRLLESGQINKTDENDARAVAIAALRARQLPQLTVEDQTIVMRVWARRYHDLGRLRTQAVCRLHTVLCELVPGGVRKQLRTSQAIAVVDSITAESPVAQAKLELAHDLVADLQRLDAQRREVKRRVSRAVAAAPTSITEVYGVGPIVAACVLGYVRDIRRFPSRDRFASYNGTAPIEVSSGDRKIYRLSRRGNRQLNHAIHIAAVSQISHRGSEGHAYYQRKRAKGMTGKCALRALKRKISDTLYERMLHDIRPRKDPGGHSGNDAVSSAAGSHPDGPALRTSHSRATANSKTATTNQRPLTSPPAPDKRRTSRSGTGVKLQPRPRPRRGRGQEQA

SEQ ID NO: 311336 - protein, 411 aa, unidentified
MNPVVGLDIAKGESQVQMFLDKKIPYKNSVKIEHTVEGLKELHSYLLDLERQTGLKPPVVLESTGHYHAPVVQFLEAREYVVIIVNPLVSYRAKSSSLRKTKTDVIDAYHLGELYYKEDLEPQKKRGIQLLNLRHLTRQHENMTGIMVQTKLQFQAVLDQVFPEYKGVFGDLYAEISLRTLQSFPTSESVLEAGVEEIAQFIDTHCKARSFNWALERSVKLIRAAERNPFQSTLSQSLLVSLNMYIDLLQVYHQQLSTLEREIDELAAQLEEYELLQSIPGIGEKIAATIISEIGEIDRFNHPKKLVAFAGLDPSIFESGRFKSTKNHITKRGSARLRHMLYTAVRCSIRDSRKKKTTPETIARNKRLRTFYDLKREEGKPYKVAIIACANKLLHWIYAMLKTKTPFQETI

SEQ ID NO: 311337 - protein, 334 aa, unidentified
MGTVAVFVGLDYHDEAVQVCILDDQGQQLANRSCVNDAAAIVAFVQRYGQRVQAAVESCTGAANLADELVNRFGWSVDLAHPGFVARMKQNPDKTDFQDAHLLADLERVGYLPRVWLAPEPVRELRQLVRYRQQLTERRRATKLRIRAVLREQRCRAPAGINAWTQAWQRWLTRTAPLSEQGRWVVERHLRELTRLAEDISEVEQRLQQVTADDPEVARLLAQRGIGPVTAWTLRAEIGRFDRFRSGKQLARLCGLSPKNASSGQRQADAGLIRAANPQLRSVLIEAAHRLIRLEPRWRALAQDLRSAGKPGSLVVAAVANRWVRWLFHQMRAA

SEQ ID NO: 311338 - protein, 319 aa, unidentified
MEKKNYVGIDVSKGTLDVAVHGQQEHWSFANDTSGISKAVSMLKELSPEIVALEATGGYEVPLAAELGISGVPTAVVNPRQIRDFARSAGILAKTDILDARIIARFAAKMEPAPRAVPDAEVQELGAIIARRRQVVEMLTAEKNRLGSAMKPVKPRIKAHIAWLQKELEGINTSLQQKVKDSPIWREKDELLQSVPGVGPNLSITLLAEMPELGTPNRKKAAALIGVAPLNRDSGTLRGKRTTWGGRRTVRSALYMATLVATRHNPVIRDFYQRLCAEGKPKKVALTACMRKLLTILNAMLKNSTVWNPKIAQLTSPCS

SEQ ID NO: 311339 - protein, 374 aa, unidentified
MKEFSKYVGLDTHKDTIAVAVADALGGKPRYYGEIANTAGEIHKLVKRLCPDGEVLSFCYEAGPCGYEIYRQISQLGHHCSVVAPSLIPSKPGERVKTDRRDSEKLSRLDRAGELTPVWVPDQEQEAMRDLTRAREDMKGMERSIKQRLNAFLLRYARIYEHGKSRWTQAHFRWLERLKFDVAVQQIVFQEYVEAVKQAEARVVGLEREMEKALENWSLAPVVEALMALRGVKLITAMTIMAELGDITRFDSPRQLMSFLGLVPSETSSGQTRRRGGITKTGNGHARRVLIESGWCYRFPARKTAHLQRRAEKCSSEVQAIAWKAQKRLCRRYTHLLGRGKLKVQVCTAVARELVGFIWAIACEVMGKHVISAR

SEQ ID NO: 311340 - protein, 366 aa, unidentified
MPSVTSPAGLIHVGMDTSKNTIVAGILMPGEEIPVIDRIWNAEGSVRHLVSRLGDPAALRCCYEAGPCGFELHRLLASMGVACDVVAPSLIPRRAGDRVKTDKRDASRLARLHRAGELTPIRVPAEAEEAVRDLVRVRAALLADRKRAQQRITAMLMRHGRIWRHGSYWTQAHEQWISRQCFDEPALAAALAHYRAALDTRRAELDAVEAELAPWACREPLAPAVARLGCYRGIAALHGLTLAAEVVDWRRFASARAFMGFTGLVPGEYSSGERTRRGKITKAGSEPVRTALVEAAHACQHQPAIGVVLRRRQHDASPETLARSWKAQRRLHARYKAMTARGKPPGMAITAVARELAGFVWAEMTS

SEQ ID NO: 311341 - protein, 346 aa, unidentified
MSVSRPAPQYHLYGGVDIAAKTLTAAWMAPGATPGRPLTVDQTPQGFATLQDRLLATGHPAAAILVVMEATGSYWVGLATTLAQAGFVVSVVNAAQAHHFAKALLKRAKTDASDAQTLTQLAARLEPTPWTPPPAIYTELQQRLAQRDTLMTLRQQVRNQRHALQHLPVVIASVLERMEALIATFDAQIAAVEQEIEQAVTQDAAWATTATLLLSITGIGLLTAAWLLVTTLNFTVCATAEEATAYAGLAPHPYESGTRVRGRAAIGHGGNGRLRTALYLATLSAAQHNPHIKPFSARLRAAGKPKKVARCAAARKLLHLAWAVATKGVAFAPLYQTHHACSGSST

SEQ ID NO: 311342 - protein, 454 aa, unidentified
MAKKREKRECKAAVLEPDAAGIDIGAEEIYVAVPPDRDEESVRMFSSFTCDLHALADWLQKCRIRTVAMESTGVYWIPLFQILEARGLEVYLVNARYLKSVPGRKSDVSDCQWIQYLHSVGLLRASFRPAMDICAVRSLWRHRASQLQMASEHILHMQKSLSQMNLQIHHVLSDLTGASGQAILDAILAGERNPVLLAQLCNCRVKSPREKVAKALEGDYRPEHVFTLKQSLDGYRYYQKLIAELDREIQRLMQTLPSAVETGQEIPRRTKHSAFQRQGNDPGFDLREQLYRIAGVDLTDIPGVSAVTAQVILTEVGPDLHPFRNASAFASWLGLCPENRVSGGKVLSCKTRRVKSRAALALRLGANSLCRAKGYFGEFFRRMRAKLGTAQAITATAHKIARVLYHVLLTKEPYKETVFHKCDEHARRRAEMRLRKQAALLGFQIIPVPTDSAT

SEQ ID NO: 311343 - protein, 320 aa, unidentified
MSDRLAVGIDADSKNLVVACHGTKGSTRIANSASAIDKWLSGLPTRSRIGVEATNRYHERVVQAAQMAGHAVFVLNPRDIKHYAKGVACRGKTDSGDAQVIARYIAKEADNLHEHVARSPAQERLHLLLQQRDSLVRSKAKLNLSLGAGASESPIFGRIFGGLKEAIAMLDQQIQQLCRSGEQRDLYRRIMTIPGIGPTVAAFVTHHITRWPLTSSDAWIACTGLDPRPNESGARIGKRRLSKRGNASLRQILYMAAMGLTRSKGGKPLYTAIRERGHSSTASFNILARKLAKIAWGVFKSGRDFDPAMLKVGQACFQQA

SEQ ID NO: 311344 - protein, 373 aa, unidentified
MPKYSTAFGMDVHLRSTTVCALDADTGEAVTRRFPGNPWGEIAGWMDGFPGPSLAAYESGYLGFAPQRELAGLGVECVVAAVSKIPRSAADSASKNDRNDAARMAKAILAHDISPVWVPSPEVEGIRDLAGAYDGATARLATAKQRLLAFLAKRGFAYGGTTPAGNPRKYWTYDFLRWLDKVRPGDDGGVRTLAALRNEVEAAAEARADLLSEYRAAVDASPIAAEAAALQSIKGCAFALAAAFSAEVGDFTRFRSGRQVTAYFGLAPSQRSSGDSVRLGGISGAGNALVRKLAVEGSWCYAAARHQPKLMSRDTGVPLEIRMHGRKGSERLLRRREEMLARGMPAAKANAATAAELVRWLWALGMMCREGAE

SEQ ID NO: 311345 - protein, 365 aa, unidentified
MTTRQRDTSSSTDPPVRREVVLGVDTHGEVHVAAVISPLGKVLGTESFPATTAGYRQLLVWARKRGTVRRAGVEGTGTFGAGLSRYLLAQQIQVFEVNRPDRSARRLLGKSDPLDAQAAARAVLSGRARARAKSGDGPVHSARIYKLAKDSAVKARTQAINQLKSVLVIADPALRERLTSLGNAELFRTCARLGPSDGEGDEDAVTQATNMVLSMLAQRIEQLTAQINELNQRLTQLVEQHAPQLLVPVGIGPDSAVTLLITMGDNPERLNTEASFAALCGVSPVEYSSGRRSTRRLNYGGDRQANAALHRIVFTRLRHDPRTQAYYERRTQEGKTRREIIRCLKRYAAREVFNLVRTVSSVPLL

SEQ ID NO: 311346 - protein, 469 aa, unidentified
MLDDLGRRGAGEGGESQAMARKRKSKSKTVTSLPLLQPDAAGIDIGATEVYVAVPADRDPEPVRWFATFTPDLEQLADWLEKCGIRSVAMESTSVYWIPLFQILEQRGLEVCLVNARHVKNVPGRKTDVSDCQWLQYLHSVGLLRASFRPAQAICAVRSLLRHRENLVQMASQHVHHMQKALDQMNLQLHHVISDLTGLTGLAIVEAILGGERDPQVLAKLRHKRIKASEETIAKSLVGDYRSEHLFSLRQSLAAYRSYQQLLAECNSEIERSLAELDSNEPPSAAPEPVAQVAAADADLDLGQQLQRIWGVDLTQVPGLSTLTVRTLLGEIGPDFSKFPTAAAFASWLGLCPDNEITGGKILRVGTRKVNSRAAKALRLAAQSLHHSKSALGAFYRRMRTRLGAPKAITAAAHKLARIIYHLVTHRQAYDESLFARQQARYNRRVESKLRAQARTLGFQLVPVEATAQ

SEQ ID NO: 311347 - protein, 355 aa, unidentified
MIIIGVDYHPEFQQIALLDQDTGEFQEKRLTHPEEAEQFYRALVATSQKVRVGMEASGHARWFERLLEELQLELWIGDAAEIQSKRARKQKTDRQDAQHILKLMLKDDFRQIWRPSWENRDLRQLLWHRHRLVQARTRIMNQLQAVAINEGLRCKKRLWRAGGRQKLETFRLAPWASRRRQDLLELLDRLNPTIAELSQAIEQEAGKSPEARRLMTHPGVGALTALAFVLIIGDAERFECGKQVACYLGLVPLEKSSGNRRRLGHITKQGNSLLRFLLVEAAQVTVRSLPEWRSQYFRLVMRRGRKTAKVAMSRRLAIRLYWMWRQKLDYQQSKSSVRTQDSPDIAMVCSKTPSN

SEQ ID NO: 311348 - protein, 366 aa, unidentified
MQKISTMRTSGNRSFKGRQLTIGLDLGDRWSCYCVLHEVGDVILERKLPTSAEVMKQVFGKMPRSRMALETAAHSPWVSRLLTALGHEVIVAHARNVRLIGESRRKDDRLDARTLARLARIDPELLSPVQHRSAQAQMHLMVIRARAELVSARTALVNSARGLVKSYGERLPKCGTQQFGWDLALRLSVELRETLEPLLREVESLNEHIKEYDRRIEKMAKETYPEVELLKQVKGVGDLIALGYVLTLEDPHRFRKSRDVACFLGLRPGRRNSGQSEPQMHISKEGDRYLRTLLVQGAHYILGPFGEDSDLRRWGLKLAERGGKNAKKRAVVAVARKLAVLLHRLWVSGEVYEPLRNSQREMPAVA

SEQ ID NO: 311349 - protein, 391 aa, unidentified
MIYVGIDVAKDKHDCYIVSSEGEIIAEMFTIPNNMKGFDLLLDRIKSAPEELDKVKVGLEATGHYSYNILGYLLDKGLATYVINPLHTNLYRKSLSLRRTKTDRVDARTIATMMMSDVSLKPYTDTSYHNEELKSLTRYRFDKVRERAKLKQSISRLVTILFPELEKLVPTLHMASVRALLSDCPGAKQIASAHLTHLTSLLQASSKGRYGREKAIEIRDAARKSIGASMPAKSLELRHTLSLISVLDAEIGETEDEIKRIMDDIASPILTIPGISYRMGAMILAEIGDFTMFASPDKILAYAGLSPSTYQSGQLTSSYARMEKRGSRYLRYALFNATKFVCNWDATFAAYLAKKRSEGKHYNVAISHAAKKLVRVIYQLQRTGQAYVPAA

SEQ ID NO: 311350 - protein, 321 aa, unidentified
MTGIICGVDIGSSSLAARIGQDGAAATFANTPEGIAELAAFCKTHQVALIAMEATGGYEQRAFAQLCGHGLPVAVVNPRAVRQFAQSMGWLEKTDAIDAGMIAWYAETKKSQPLCLAPPTQLELRARVTRLRQLTEVRTAQLNQQRLVTNEAVQKSFGAMLTFLAGQIRELEQAIAALIQADPLWCELNQAFRTIKGVADRTVARIMAEMPEIGTLSNKTISKLAGLAPLANDSGKHQGKRAVRGGRAAVRDILFLVGSVVARYEPDFLCFQQRLRAAGKPPKVVRIAVAHKLLVRLNAKAREVRQQSAHTQLSCSASQQP

SEQ ID NO: 311351 - protein, 347 aa, unidentified
MKFYTKNHTHYCGIDLHARCLYLCILDQQGEVLLHKNIKANPESLLKLITPYRDDLVVGVECMFSWYWVADLCQREGIPFILGHALYMRAIHGGKAKNDKIDSHKIATLMRGGMFPEAYVYPREMRGTRDLMRRRMHLMRKRSELLAHVHNTHSQYNLPEIKKNLRYAFNREGIAERFDDASVSKSIELDLNLIDYYDRQLSKVEWPILQQAKACDQHSLILLRTVPGIGQILSLVILYELHTIERFPTVQNFASYCRLIKCRRESAGKSYGTAGAKIGNAYLKWAFSEAAVLFLRKNPEAQTWLEKKAQQHNKARALTILAHKLGRAVYFMLKRKTVFDQERFLNS

SEQ ID NO: 311352 - protein, 458 aa, unidentified
MYRELKPLRQALSTELKASIPPAGPGVEPELLLQTYLDRLTMYVGCDVADKTLTLIALDADGEELSHLCDAPNTPDGFERIWEWIDGLCCQHHLRIILLALETSGIYYWAWWDFLADRPNLARVLYNPRTTEHMTEVLSKRVRTDLVDAYALGEQVRLGSTPEVVLNEDSDLLTARFCSRAARDLAQRINAHKNQLRSIVRAYNPAVCQAFPGAKFHHPAIYALLQHYLFPDEGVAAGVDAITTILADNCRSAFGRDHAQQFVDLCQQTFTRPIGRVAIHQRVRYLSNDILAAQKQKKYFLKTGYDLIKGRPETKLLRGSTGAGASNTLALVSELGDIQRYPSGAHVASFLGLTTSKHISGTTLFHSKRITKQGSPNGRYAAVNMALHLSQRVPKYQTMYKRIKSRKPPRKGHFVALVAIARDFVTNVLYDMWRYQRPFFLEVDDYRAYRKTHPRSDD

SEQ ID NO: 311353 - protein, 353 aa, unidentified
MPRSTNLSVATMGIDIGKNSFHVVGLDQRGAIIVRQRWTRSQIRARLANMSPCLIGMEACVGAHHLSRRLHSLGHDARLMPGKYVKPYRKGQKNDFRDAEAIAEAVQRPTMRFVATKTADQLDLQALHRVRARLVSQRTGIINQIRAFLLERGIAVRQGLRFLRAQLPEVLGKRTDVLSDRMVHVIEDLAADWRRLDERIQGLSGEIEIVASQDPGCKRLMTVPGIGPIISSAMVAAIGSGAVFSNGRDFGAWLGLVPRQISTGDRTILGKVSKQGNRYLRVLFVQAAWVVLIKPQIWERYGLKQWITAAKRRLHPNVLAIALANKLARIAWAVLSKDCDFKCEKTDEMPRCA

SEQ ID NO: 311354 - protein, 351 aa, unidentified
MNHYAGLDVSLEETAICVVDGTGRIVKEARAASEPAALIVALNEIDLPLERIGLEACSLTAWLQDCLRAAGLPAFCIETRQANAAMKTMLNKTDRNDARALAQIMRTGWFRQVHVKSRQCRLWRSLLAARRTVLNEMRAIENVVRAILREAGLKLGTPGRPTFAGRVRELTQGNPLVVKLAEPLLAILATMLVALARLTKEVLALVRREEVCRRRMSAPGVGPITALAFRATIHRPDRLRRSRDVGTHLGLTPARYQSGETDIQDKISRCGDELARTALYEAAHTLLVRSQKWLSLRAWGMKIARHRSMARACVAVARKPAVILHRMWERRRTAPVRQRARRAPTGCNMKP

SEQ ID NO: 311355 - protein, 337 aa, unidentified
MTQITTIGLDLAKRVFQVHGVDAAGKVVLRRQLTRRQVVPFFAKLGRCLIGMEACGTAHHWGRMLQALGHDARLIPPAYAKAYVRRNKTDPADAEAICEAVGRPWMRFVPIKSEAEQAMAAVHRVRERLIGQRTMVQNMLRGQMAEFGIVVSKGAWHVKELLAELGDPSRLPEPLRQALLGLSQVLAELDRQIAALDGQILAWHKTNQRSQALATIPGFGPILSSAMTVRVPRPERFAGGRDLAAWIGLVPKQASSGDTLRLGRISKQGDVYLRRLLVSGAHSVLNSKSAKTDPWIQRLLASKPRLVVAVALANKMARIAWAVMVRQTGFRPVPAAA

SEQ ID NO: 311356 - protein, 343 aa, unidentified
MDYFAGLDLSVKETSICIVDDAGKIVREVRVASEPEALLQVLTNNNYRFKRIGLEAGPLSQWLFSALAEAGLPVICVETRHMRAVLKAQINKTDRNDARGIAQMMRVGLYRPVHVKTLRSQKLRMLLIHRKLLQSKAISIENDLRASLRNFGLKMGLVGTVRFEARIKELVENLPDLAALVEPLLIVRRVLREQLGILHRRVLAVVRDDEVCRRLMTIPGVGPVVALTYRVTVDVPARFRNSKSVGAVFGLTPAKDQSGERDRSGAISRCGDELMRVMLYEAAQIMLVRSAKWSWLKAWAMKIARHRGMKKAIVALARRLAVIMHRMWIDGTEFRWTREVAAA

SEQ ID NO: 311357 - protein, 367 aa, unidentified
MSNQTVNSLKTDTRLFIGMDLHKNTSTFCVKDNEGKLIASKKVNTDKNDVSRFLESIKKKSDNISLVLEPVSQWYYYADLIEKMGVDVKLAHPMRVKAIASARIKTDKIDASVLSDLLRGNLLPEAYFSPLEVRSWKERCRFRASMLNQRTQIKNKIHAILFKHSLRHKFSDLFGKRGRAWLESLPLSEPFRGNLDRYLLLLDDFNNMVAQAEEIIEREVKEHPQASLLVSIPGISYVSALTIMAEIGNIDRFPTCKQLQSYAGLIPSTYASGDRMIHGRITKQGSKWLRYIMIESAYHQPNCKRIPGFGHYYNDMKERKGTKTAAVATARKLLAVVWRLLKDGRPYEVIDPRCRKTGVVGQKLIAY

SEQ ID NO: 311358 - protein, 386 aa, unidentified
MSRSSNILLPVISYDHTLVLAIELSNKSWVLAAQVPGLPRTKAQRTIEPNKNALLAAIDGYRARAAAVGYTVDRVITTYEAGWSGFWLARWLVAQGVEVHVVQPSSVPVDRRLRRAKSDGIDAELLLRTLLAWLRGEPRVCSMVPIPDEADEDARRSVRERTELLSDRVGLTNRIGAVLATLGINDYNPLLQSRRRRLAELRTGLGEPIPPNALAKIDRLLARLELVLAQIAELERERDEVAAADAPDRAGKMIQQLASLRGIGVQSATVLVREAFVRHFANGKALGSYAGLTSTPYSSGGINREQGIGKAGNRRLRTVMVELAWLWQRYQPGAAQVAWFRDRVGSTGRRIRKVMVVALARKLLIALWRFVIDGVMPEGAVMKPSI

SEQ ID NO: 311359 - protein, 369 aa, unidentified
MEKDTTYVALDDSKRKIVVGILRSGDTQPELREIANDPRQIRRLFERLKREGPVAACYEAGVSGYDLHRQLIALGVAGAVIAPALTPRRPGQRIKTDRRDAAKLVRLFRAGELTAIHVLDESEEAVRDLVRCRDDIRRDVLRWRHRVLKLLARHGRACLTGKNWSRAHWRWIREQRFDLPPLQRAFEATLFALEQALARQAELDKELEAVAATASYREPVGWLRCFRGIDTLSAIILLAEVVDFQRFRRPRELMAYLGLVPSEYSSGESQRRGALTKAGNSHARRILVEAAWHYRHRPTIGRALATRTHGQPDEVVAQAWRAQQRLHRRYRHLVGHGKRTPVAVAAVARELVGFIWAAMTRHESRRAAA

SEQ ID NO: 311360 - protein, 338 aa, unidentified
MKKYSGIDLHSNNNVVVVIDEADRVVYRRRLPNDLGKVLEGLEPYREELVGVVVESTYNWYWLVDGLQAAGYKVHLANPAAMKRYDGLKHSGDDTDAVQLAHLLRLGILPSGYIYPAEERALRDLGRRRLQLVRHRTMHVLAVENVQARQTGARMSGARVKRLSAQEVQALGLPEDVTLGLQANVAVIGTLNEQIAKLERHLLERLKPQPEYALLSTAPGIGRILGSIILLETGSIERFAAVGNFCSYARCVDSAHLSNGKKKGEGNVRNGNKYLAWAFIEAANMARRWCPEARRFHERKRAKANAIVATKALAHKLARACYHMLKTGEPFDMKRCFG

SEQ ID NO: 311361 - protein, 432 aa, unidentified
MLRFVGCDVHKRSAVFTILLADGKVQATHSVIVTREALSWFAELHLTTQDRLVMEATTNTWAVADLLRPYVQEIVIGNPLRTRAIAEAKIKTDKVDSRVLAELLRADYLPAVWQPGPDTQKLRRLTHRRAALVSDRTRLKNRLHSILHHCLIPLPDCDLFSRQGKAWLQELSLPEDEAAMRDSDLRLLEATEKEIALVEEKLARQAWQDDKVRLLMSIPGIDYTVAQTCLAAIGDVSRFANPKKLTSYLGLNPSTRQSAHHCVHGPITKQGNAHARWLLVQAAQHLGIYRGPLGQTMRSIIRRKNRKVAVVACARKLAVLVWHVLTSGEPFRYAVPKTLAAKYARLRVRATGKRRKGGVVKGSPRSPQYGHGGMRTVPSLPQVLEQNNLPLVAPLVRGEKNMLAKKKLEGFYLELQTPSRVAKASAKPREET

SEQ ID NO: 311362 - protein, 343 aa, unidentified
MYYIGLDVRKKTISYCVKNVAGHVHREGKIGSTRRELDAWIRTLPQPRMIAMEATIFTGWIYDHLLPHAGKVKVAHPLMLRAIAAAKKKNDKIDASKIADCLRCDFLPECHMASTEIRDRRRVLRYRNLVVKQMVQMKNRVSGLLMETGVSYNKQRLHKVSYFGELMSRNEDISHAVRPLLNLSRGMIRSSGKLEYDLVSSLERAPFLRERLRRLRTVPGVGSITALTWALEIGDYTRFRSNKQAISYCGLCADEKSSADKVMRMPLSKQRNKHIQRVLIEAAKLAPRDSPELAMIREREIERGNPNRATLAVARKIVCYMMAVERRQQDFVPAGELMPTAAA

SEQ ID NO: 311363 - protein, 337 aa, unidentified
MDYFAGLDVSMAETHVCVVTGTGRVIHKAKVPSTPADIAAELAQLPTCRRILFETGRMAPMLFHGLSQLGLPVVCVESRQAYQALKSLATHKTDRNDARGLAHLARTGFFKPVHVKSLPAHAVRSLIIARKKLVGQRVTLENQIRGLAVVFGVQLPRALSPAFIKQALQASDGIPGLSAAMRGLIGARAAVLAAIVAIDADIRRMVRSSDACRRLMSIPGVGQLTALAFTAAVDDPFRFRRSRDIGAYLGLVPRRYQSGEIDYTGSISKCGDRRIRTLLYEAANVMLTRYKGPLKLKDWAFAIAKRSTMRKAKIALARRLAIIMHAMLRRGTEFKPA

SEQ ID NO: 311364 - protein, 312 aa, unidentified
MATIVCGVDVSSEALDARVGADGPFERFASTPEGITALVAFCRKHGVELVAMEASGGYEKRPFALLWSQGVPAAILNPRAVRRFAEGMGLLEKTDRIDAGVIAWFAQVKRIVPCEPPSAAQERLKALVGRLRQLTDLRTAQANQRRLVGDPTVQKLFEEMIALIARQTRSLEAEIARLIAGDPLWQALDQAFRMIKGVADRTVARLMADLPEIGTISNKAAAKLVGLAPIANDSGKHSGKRSVRGGRTAIRSTLFVIAEIVRRYDPDLAAFHKRLSEAGKPKRVTRTAVAHKLLVRLNAKARDVRKLLAAAA

SEQ ID NO: 311365 - protein, 328 aa, unidentified
MKYIFIGIDISKDFFDYCVIDENCKILTRGQNENSLAGLKILEKTLKSYKEQTPWVGMEHTGHYGSLLCVELTKRNIQFSLLNPLELKKSLGIVRGKNDAVDAYRIASYMLSNKHKIKPYELPVSELRKLKVLMSTRDRLVKTSVQLQNGVKSLEIEGQNLSLKRTINDMNKIIEKHQLTIAKIEKQMLEIIKSVEHLEENYQKITKVIGVGNLTAIKCIIETENFSKFDNARKFCCHCGLAPFAYSSGSSIRGKTKTSKICDKSLKGILYKVAGTAIQHDPQLKMYYQRKVAEGKHKLSVLNAVANKVVLRIFAVQKRNEPFIKLFA

SEQ ID NO: 311366 - protein, 413 aa, unidentified
MNEVYRRSCGMDVHKDTVVVCVLPPVGGQGKVVRKTYGTFRNDLIRLRVWLKQLKVSEIAMESTGVYWRPIWNVLEEQGFRLLLVNPAQVKALAGRKSDGRDARRIAEYLQDGRLDGSFVPPAEIRELRTLLRHRVSLLEQRNQVHNQIRDLFETASLKLSSVVSDLMGVTGRRIMEAMIAGEDSPEILSWKVKGKLREKEKQVKESLKGYFNEFHRLMLGSYYKQYQFLTGEVAVFEQRIAQRMEPYARQVELLVSIPGVDRMVAWHMIAELGTDLSVFCDADHCASWAGLVPGENESAGRKKSTRCRKGNKTLRRVLSQAAWAASHCTRGYLRAYFYRMKSRNGWANAVVATAHKILIIAFHMLKSDKPYKDLGDDYFDRLNPARNTRKLVARLEALGYQVHLSQAARSNA

SEQ ID NO: 311367 - protein, 421 aa, unidentified
MGKLIERCAGIDIGKRFLVCCVMTGAAHEEPRSETRRFDTTVPGLKRLRNWLNEERVTDVVMESTGSYWIPVFNLLEGHVTVVLANPEEVKNRKGHKTDRKDAGHLADLLRHNHVKSSYIPAEPVRQLRDLTRRRVQLTQDATRERNRVQKLLEQVNVKIGSVLTDVFGVSGLQMLLALLDGRAAPEEIAGLARGSAKRKTPQLIEAIEGNRMSDHVRFLIRGCLRHLACLEEEVEELDAEILRRMQLSTFQKAFTLLQTIPGVGQLSAATILAETGPDLDSFPTIEQMASWAGLCPGNRESAGIQKGPQTTHGNPYLCTALVQCAWAATRKRDSVFRSRFQRLAPRRGEKRAIIAVAHHMLIILYCMLKRGVPFLGAEHAPKQRRRERRAHHHLRCLRRLGFSVEIRLSSESTPPDTISR

SEQ ID NO: 311368 - protein, 364 aa, unidentified
MKKTSTVQALKNEIFKRRKLTIGLDLGDRWSFYCVLDEAGQILLEQTLPTTPEAMKQTFGKIPRSLLALETGTHSPWVSRLLSELGQEVIVAHAQKVQWITSRKDDRHDARTLARLARVDPELLGPVRHRSAPAQLHLTVIRARAELVRARTALVNAARGLVKSYGQRLPKCGTYQVSEKLAEGLSAELREVLVPLFQEIESLNGHIKEYDERMEKIAKQVYPEVSLLQQVKGVGTQIALTYVLTIEDPHRFAKSREVGCFLGLRPGRRNSGQSEPQKGISKEGDRYLRTMLVQGAHYILGPFGEDSDLRRWGLKLAERGGKNAKKRAVVAVARKLAVLLHRLWVGGEVYEPLRNSQKAMREVA

SEQ ID NO: 311369 - protein, 354 aa, unidentified
MAVMIGIDPHKRSHTAVALDGSEEVLGQLRVTADRRQLDRLLTFARPWPDRVWAVENANGLGHLLSRQLLSAGETVVDVPAKLSARVRALSGAGHKTDAHDARSTAVAGRTGAGVKPMAVDDPLLVLFDVVLERRWQLVSARQKTLCRIHEQLTCLIPGGAAKRLSADKTAAMLRRIRPTDPVGIRRRLIVRELIAELRALDRKIAPLDADIAWMLDEHGTTLCDIVGIGQTGAATILAITGDVTRFRSAAAYASFSGTAPIAASSGDTIRYRLNRGGNRQLNKVLHTAAKTQVRLPGPGRDYYQRRRSEGKTNAEALRALKRHITTTVYRTLQADAKARTARAKQVSEEDKRS

SEQ ID NO: 311370 - protein, 315 aa, unidentified
MTQDVFVGIDVSKKSLDVAVRPSGEAWRTDNASEAITELVERLRRLLPTMIVVEASGGLQTLLVVALAEAKLPVVVVNPRQVRDFAKALGRLAKTDSIDAAVLAHFGEAIRPEMRALPDKQARELEALLARRRQLVEMIVAERSRLTTAVAAVQPGIREHIEWLKERLGGLDEELAQSIDRSERWRDLSVLLRSVPGVGPIVAVTLLAELPELGTLDRKKIAALVGVAPHNRDSGTIEGKRVIWGGRATVRATLYMGALVAVRHNPLLRATYRRLVAAGKAKKLALVACMRKLLTILNAIARDRQKWQPEIAKSA

SEQ ID NO: 311371 - protein, 365 aa, unidentified
MGDSSTFARKIHPQDYDVFIGMDVDKRSIVLTQVDHLGREKSVSMPHRGESLLNYVGNHLRGRRIAFVYEAGPTGFGLYDTISQSGHPCLVVTPAAVPTARGQRVRTNRLDSRKLALQLRGGSLQGIHVPSEDYRMLREYVQLRKMHMTEAARCKQRIKALFLRYGMEFPAPPGGSWSQELIRRLREYRCAPALQFKLASLLTSLEFSRLQGLETQIAMRSFVQASPEIAQSVECAMSLPGIGWIIATYAVARIGDWRLLGKSPQTASFFGLTQGEDSTGEQADRGPITKAGDAVMRSMLIEGAWNAIRKDADLRTFYERVKANHPKDKAARIAIVAVARKLVCRMHCVLKERRAYQIHRITEQA

SEQ ID NO: 311372 - protein, 390 aa, unidentified
MKKHTIKYVGLDTHKNSIVIAIADEERNGEVRNYGAIPNTLDAVEKFIRKQISQNIELRCVYEAGPTGFGLYRFLHDNGIDCIVAAPSMTPKKDGNRIKNDRRDARNLARLHRAGELQEIYIPTREDEAMRDLVRSRDDAGHASRKAKQRLLSFLLRHGKVYSGKTNWSVPHFNWLAELKMNHPAQQIAYQEYITAIHETTSRIQRLDKEISTLSKEWQRAPLVKAIQSLRGVVELTAITIIAELGNLERFSKPKELMAYLGLVPSEYSTGTNTKRGGITKTGNGFVRRALVESSWTYRLPARITKHLLKRNKELPQAIQDISWKAQLRLCNRFRRLRARGKPTQLITTAIARELIAFVWAISKELQRNKSCLDMQLLHEQQMEDAFSVA

SEQ ID NO: 311373 - protein, 453 aa, unidentified
MAKKRVNKTLDAFAEINHHAAGIDVGNAQHWVAVPVGQDTVSVRMFGCFTADLHALAEWLTRCGIKTVAMESTGVYWIALYEVLERRGFQVCVVNARQAKNLPGRKTDVKDCQWLQQLHTYGLLTASFRPQAEIIVLRRYLRHRETLVQEAATCIQRIQKALTEMNLQLANVISDISGTTGLRILHAIVEGERDPQRLARLSDRRIKATPEEVAKSLLGNWRDELIFVVEENLTLYGVYQERIEHCDRRIEQHLKSMPAQIESDTRPLPKPRKGTRPHGNAPAFDLRSELYRIAGTDLTQIDGINVVTAQAVLADTGTDMSAWRTEKHFVSWLGLCPDHRISGGKVLQRGTRRVVSRAATAFRLAASSLRRSRSALGAKYRRLQIRLGAPKAITAMAHHLARLFYRMVKYGSHYIDHGMAEYEARFKEQQLKWLSKKAAELHFRLAPIPNLTV

SEQ ID NO: 311374 - protein, 325 aa, unidentified
MELLVERAAALDVGKDEVVACIRVPDPAGAGRGRGRRRQEVRTYPTFTSSLEALADWLQAEGVTQVVMEATGQYWKPIWYVLEERGFQLLLVNARHVKILPGRKTDVGDAAWLAELLECGLLRGSFVPPPAIRQLRDLTRYRKRLIQAHGAECQRVQKTLEDAGIKLDSVATDVLGVSGRAMLAALVAGERDPQVLAELAKGKLRKQLPQLRQALRGRFGEHHALLVGLALDHLEHLEGAIAALDGRIDEVIAPFAVARDRLDTITGVGKRAAEVIIAEIGVDMSVFPTAGHLASWAGRCPGNNITGASVARASPPRATAGWPTC

SEQ ID NO: 311375 - protein, 339 aa, unidentified
MEEVTTVGIDLAKNVFSLHGVDEAGKTVLRRRVRRERLVETVAALSPCLIGMEACSGAHEWGRRFQQHGHTVKLMAPKFVAPYRKSDKNDGNDAEAVCEAVSRPSMRFVPVKSTEQQALLAVHRVRQGFVVERTALINRLRGLMSEFGVVLALGSVTVRRQAAQAAEQLPELARGAIGDLLEQLRVLDERIAKYDKQIEAQAGLSEPARRLMQIRGVGPTTALAIVATVGDAREFKNGRQFAAWIGLVPAQHSTGGKSRLGHISKRGDAYLRNLLVQGARSVLQVAGAHQDRISRWALELQQRRGYYRALVAIANKNARIAWALLAKRESVRRAQPNTL

SEQ ID NO: 311376 - protein, 387 aa, unidentified
MPQQNDLSRCLVTLEQDDTLIAVIELSQASWLVAGIVPAIERQPVKKIEADEVALLRLLERWRDEATKAGRRIMRVCVAFEAGRDGFWLARWLRARGIEAYVIHPSSVAVSREHRRAKTDRLDTELLKRAFLGWLRGERGHCSMAAIPTVEEEDAKRPNREHESLVSERTRIVNRMKSTLARLGVRGFKSTLRKASERLGTLRTPEGMQLPPNTLAELGRDMARLRFVMDQIKEIEAARLEQLARQPDEGAHAMIRLLARIVGVGIETADMLVREVLSRNLRDRRAVARYAGLTGSPDESGRRRREKGLAKAGNARVRHGMVQLAWRFLLFQKESALARWYRERTADARGGTRKTMIVALARKLLIALWRLVTTGEPPEGVLLRPAA

SEQ ID NO: 311377 - protein, 330 aa, unidentified
MQFVGIDVSKKHLHLSWLRDPEQGLARSKAVDNTPTGHAQALTWAMQHSGAAPAELCFVLEATGVYHEAVALHLHQAEAQVVVANPLHIKRFAESHGFKTKNDRHDGQILARFGHERRPKPWQPAPEPVRQLRALLARLEALEEDRQRETNRLEKARVQGVPAPVLDSLQAMLGTLKEQIETLSRQIDQHIDSDPGLKGQREDLESIPGVGEKLSAHFLALFAAKRFVDAKQAAAFLGLVPVECQSGTSVRARPRLAKNGDPRWRARLFLPAMVAARFNPDVSALSQRLLKAGKTKMSALGAAMRKLVQIAFGVFKHGLAYQSQCTPAPV

SEQ ID NO: 311378 - protein, 346 aa, unidentified
MKINRVGVDLAKNVFQLHGADHKGKTVWKRRLSRRKWLAVLCDTVEPGTEIGMEACAGAHHWARQLMQRGYPVKIIPPQFVKPFIKSNKNDANDAAAICEAMGRPDMYPVKVKTVEQQDLQAMHRIRDEIKSHRIAKANQIRGLVTEYGLVAPLQLPALRRAIPDWLEDAGNGLTFLFRQLLQGLWRDLYTLDQRMAELDKQIAVVAQEDPMARRLQQLRGVGPLIATALVATIGDGKQYRKGRDMAAALGLTPRQHSSGGKDKLLGISKRGDAYLRCLLVHGARSAIRTAKEKDDRLSCWINNLQARRHSNVVAVALANKMARMAWAMMTKGVDYDPELSAASVN

SEQ ID NO: 311379 - protein, 400 aa, unidentified
MMQITIGVDPHKLSATIEVVDQHEEVLGSGRFTTNKTGYAAMLAYVAGWPRRTWAVEGSNGAGRPLAQRLLADGERVVDVPAKLAARARVLDTGHGRKTDAHDAHSVAVAAVRAKELRVLAEDPELESLRMLIDRRDELTRQRVQTVNRLQRLLAELTPGTAKKDITALQAKAILATVRPRDLAGKTRRRIAADELADLVAVEKKLKVVTRELKTMIAATGSMLTDLPGVGDIVAARVLAEVGDVTRFADRNRFASWTGTAPLEASSGEQIRHRLSRAGNRRMNHMLHIAATTQIRLDTPGRAYYRRKLAEGKTRMEAMRCLKRRISDAVYRQLLTDAQAASPGAGPGGHCGATKKSSAVDLPPHIDTSDQPLPGPAPTTLQLDPRPRKSTNAEPLRTAG

SEQ ID NO: 311380 - protein, 317 aa, unidentified
MDAIFVGIDVSKDRLDVAVRPSGEHFVVARDTQGLRELVARLTALAPTAIGLEATGGYETVVAASLAAASLPVVVVNPAQVRAFAQALGKRAKTDPIDAAVIAHFVEATRPPLRPLPGADTQRLADLVARRGQIIEMMVAERQRQKRLMAKRIQKSIARLLAALQKELSALDADIDDAVRGSPAWRDKEDLLASVPGVGKIIARTLIAELPELGTLDRRRIAALAGLAPWTRQSGQWKGKSLIGGGRARVRAVLFMGAMVAARHNPVLKAFRDKLVAAGKPKLVALVATARKLLTILNAMLRDRKPWQEAEHEAASN

SEQ ID NO: 311381 - protein, 343 aa, unidentified
MTKASQSTISTIGIDIGKNSFHVIGFDERGAIALRQKLSRSQVMVRFANFPRCLIGMEACVGAHHLSRRLQSLGHDVRIMPALYVKPYLKGQKNDFRDAEAIAEAVQRPTMRFVPTKTMEQLDLQALHRLRTRLVRQRTAVINQIRAFLLERGFAVRQGLNPLRQALPGILAKSGDELSPRMIHMIEGLCDDWRHFDGRIDDLTDEIEALVKGDDNCQRLMTIPGVGPLIASATVAAVGDGSAFRRGRDFGAWLGLVPRQMSTGDRTILGGISKRGNKHLRTLFIQGAWVILMRSKNWANYSFGNWLEAASKRLHRCVLVVALANKLARIAWSVLNHRQAYQA

SEQ ID NO: 311382 - protein, 397 aa, unidentified
MIAVGIDVSKGKSTVAILDGDGSIRAHPYEMNHSKAELDALIQYIIATDDHPIILMEPTGHYHYPVLKAFLDAGLSPSLVNPYLLKKYGDTELRKAKTDKKDALRIARYALEKWYSLTPYSPLDQKYEDLRFLSSQYRQRISMVTKSKMQLTDLLDESMPGITRILALKSRNPEKCMLLQFIKRFHSFDYINSIGKTRFMNSYTTLARKTGERNAAAKGLAIYELSKASITTRSKSEYMDIALDQCVDILSDSQRAADEIMLQMQNIAETIPEYKVLRSMNGVGDRLGPVILAEIGDIRRFHSGKALNAYAGNDAPPYQSGQFESRNRHISKRGNPALRKACFEVMQALKLTKPQDDPVYLFMMKKEQEGKPYNVAKMAAVNKFLRIYYARAMELYK

SEQ ID NO: 311383 - protein, 405 aa, unidentified
MEIIIERGCGLDVHKGTVVACIMGAGIKKEIRTYTTMTNDLLRLKEWLQEAGITHVAMESTGVYWKPVFNILENSFEVILVNARHVKNVPGRKTDVQDSEWLCKLLRSGLVRGSFIPPRDIRELRDLTRYKRKLIQAIVAEKQRVEKVLEDANIKLSSIASDSFGASGKRIIEELIKGELEVEEMAELSKGRLRQKRGDLKEALVGEVREHHKFMIKTSLKHIRAMEKILSEIERRIQEKIDRHYKEEYALLQTIPGVKGEASTLIAEMGVDMERFPSEEHLSSWAGMSPGNNESGGKKKPGSTTYGNKCLKTMLTEFGWVASKTKDTYLRSKYHSLVGRRGKKKALVALGHKILIMCYHILKYRCAYKELGVDYLDKRRKDKIARSYIKRLHHLGYEVTLKEAA

SEQ ID NO: 311384 - protein, 357 aa, unidentified
MLTISCLQGEVILGVDTHRDTHAAVLVDPLGRVLAADVFATTRRGVRALIAWAQRRGVLRRAGVEGTGSFGAGLTRALRVEGIEVIEVTRATRISGRHRGKNDTRDAEAAARSVLSGQATAEPKARDGIVESIRVLRNTRAGAVKARTQAILHIKNLIVTAPDELRESLSDLANPQLVARCVRMRPGARHDSTTATRYALRSLARRHQALDAEIAALDARLAELTPRVARRLLKQPGIGPELAARLLLIAGENPTRLRNDAALAALCGASPIEASSGKTIRHRLNRGGDRQGNSTLWLIANNRMIHHPPTRAYVTRRTAEGKSTKEIRRCLMRHIARGLFPLLIADLHDAQAHSALT

SEQ ID NO: 311385 - protein, 403 aa, unidentified
MNSVGIDISKGRSTIAVMRPFGEVVISPFEVRHTDSELSELARQLKSLNGETRVVMEATGNYHAPVAKLLHDAGLYVSVVNAKLVHGYGNNDLRRVKTDKKDAVKLANYGLDRWLTLPRYVPEEDTRLLLKNCYRQYRQYSKVQTVLKNNLISLLDTVFPNVNRLFSSPIRGDGSEKWVDFVAEFWHCRCVSEKSEKVFTNKYQRWCRKHGYNFSEEKAHTIHAEASGYIGVMPKSETTKLLVEQAVAQLRATSAALTALKHEMLALAAQLPEYPVVMGMFGVGPTLGPQLIAEIGDVRRFYSKKALVAYAGLDAPPNDSGDVTGKHKSMSKIGASSLRRTLFLVMSVYLQNAPLDEPVYQFMDKKRAEGKPYRVYMMASANKFLRIYYATVKAYLESLEHTA

SEQ ID NO: 311386 - protein, 276 aa, unidentified
MQEVAVVGLDLAKNVFQVHGVAADGGVVFRRQLRRGQVLGFFADLTGCLVGIEACASAHHWARELAALGHEVRLMPPAYVKAYVKRGKTDAADAEAIAEAVTRPTMRFVAVKTTAQQAVLMLHKTRDLLVRQRTMLINALRGHLGEFGVVTPQGSAGVQAALRSIILERDRLPELAQAALRGLAGQLEALGGEIEALERRILNWHRTDETSRRLATIPGIGPITASAMAASAPDPGLFRSGRQFAAWLGLTPRAHSSGGKERQSGIRAESERFESK

SEQ ID NO: 311387 - protein, 380 aa, unidentified
MKQVRLGIDVACRADHQASLADESGELLWSGHRFRTRPRELEVLWAKIPTGFAVIVVMEPTRNAWVALAAWLRARGAKVVLVPAEQSADLRDYYNKHTKTDRLDSRVLARLPMLHPEGLRSIDGLGPAETLRRVVRHRSSLVSQRSQSAQRLDSLIELLGPAWADVLGCGEYNKSSLAVLERCADPRVMKKFGRKRLATLLIRHSRGHFREERADELLALADETIELWAGGGLDFAELAEDIAAEVRIIRRIEAEVEAVEERIEALYDEADPKGIIISAPAVGVTLAAGILGRTGDFNRFSSLAGVRAFTGLVPKVSQSGNSNHYGPPTKSGDPGLRLTVFLAADLARKVDPALAAKYHRLMVAEGKHHTSALCSIAPMF

SEQ ID NO: 311388 - protein, 339 aa, unidentified
MMELKRISIDTSKAVFTLHGVDAQERPVLRRTLRRAQLEAWFAKQASTEVVLEACGGSHHWGRVLGAMGHHVRLIPPQYVKPFVKRGKNDRNDAEAISEAASRPGMRYVPVKTAEQQARAMVLSVRELLVKQQTQLVNALRGHAAEFGVIAAKGIDKLATLVALIAADAAVPAEVQEAIGVLSGQVEQIAAQLRALDRKLLTLHKATPMSRLLGEIPGVGPIGALSLVLTVDPGQFKSGRHFAAWLGLVPKERSTGGKQRLGSISREGNERLRQLLVLGATAVVRYAKPGSKSASKWLLELLERRPRKVAAVALANKMARIAWAMMTSGEGYRRQPIAA

SEQ ID NO: 311389 - protein, 319 aa, unidentified
MDDIIIGFDVSKKFFDFAFLKNDKKWFNQQLDYDKDGLNQLIKTIPSNSICVMEATGPYYIKLANFLYSKGFKVSVVNPLVIRRYSQMLLKRTKTDKADAQLIAMYGRDQIPDFWKPNSENIQRIRQINSVLESLIKERTSWINRIEAAKQDDNFDESSLKIMKQMVCLINRRIQKLEAELDKIIDTDFKQENDILRSIPGIGRKTSIMLLAITGGFTKFENYKQFSSYVGLCPRIFQSGTSVRGKARICKIGISRVRQLLYLCALTARKFNKACKELYNRLIEKGKPKKLALIAVANKLIRQAFGCVKNMTFYNAELC

SEQ ID NO: 311390 - protein, 357 aa, unidentified
MLFLHLRYFEQYLRPGSPAACIHKVDSASIMEENATLTYLGIDVSKAKLDCSLRLGEKFRSKVVVNSPPGFVQLVEWLKKQSAGQVHVCMEATSVYGEAAALALSQAGYVVSVVNPALIKAYAQSNGLRSKTDAVDARVLANFCHERRPRAWTPPSANELALRALVQRHQALVEMQTQEKNRLGVARDAVSDSLQQHLAWLDEELKRIEEAIAKLMDDDPDLRNRRDLLDTIPGLGERTIAILLAYIGQMLRFETARQFVAFSGLSPRLHESGSSVRGKPRLSKVGHAALRRALYMPAMVTLYKTTWGKAFRERLAASGKAPKLIIGAMMRKLAQVAYGVLKSGKPFDPELHGVCVG

SEQ ID NO: 311391 - protein, 342 aa, unidentified
MDIVGGLDVHRKQMTFDYIEIETGEVKSGQITPATREHLRHWLSGFPANKRVAFALEATTGWRFVVEELQRAGIEAHLAEPADTKALRGRKKRAKTDRLDARHLRELLLIGRLPESWIPPEHIQELRTLVRLRKSLVEDRTAWQQRIHAQLFHNGYPQERNLLARDRRARLEYLELPPSARKMVDHALSMIEHINAELAPIEEEIRSYARRQAGCQALMGHYGIGELTSVAMLSELGDSRRFSSSRKAVRYAGLDVTVSESDDKRAPGKISRQGAPVLRWAAFEAAQVARRKGSPDHDYYVEARERLGSNRACLAIARKLIRRAHHTLRELGEEALGKPLAG

SEQ ID NO: 311392 - protein, 414 aa, unidentified
MDVVYTHCAGLDVHKKTVVAAIIVPDAKGGQHKATRTFGTMTPDLLELSDWLLAQGVTQVAMESTGEYWKPIFNILETTFAVMLVNAHHLSRVPGRKTDVSDAQWIAECLRLGLLRPSFIPPIPQRDFRELTRYRTSFVRERVNLINRLQKLLESMNIKLASVASDVMGVSARAMLDALIAGQASPAEMAELAQGRMRDKLPQLTKALEGRVKPHHRFVLTELLCQIDSLDETLARFDEQIETYGHPFEEAVVWLDTIPGVARQTAEVMVAEIGNDMSRFPSAAHLSAWAGVAPGNNESAGKRYSGKTRPGNKALRVALVQAAHAAARTKNTYLSAQYHRLAGRRGKKKAILAVAHSILVIAYHLIQRKEAYRELGGNYFDQKDPDATAKRLIKRLETLGFQVTAQQSPEPVAA

SEQ ID NO: 311393 - protein, 410 aa, unidentified
MEVLYPRCCGLDVHKETVVACLRLVIDGKVVKEVRTFSTTTAGLMALSEWLAENNCTQIAMEATGVYWKPVWHILSDGEFELVLANAAHVKNVPGRKTDVKDADWVSDLLAHGLIRASFVPDSPTQEMRTLMRTRKQLVREKSSHILRIQKTLEDANIKLDSVISDVLGASGRAMIEALIAGEQSPSKLARLANHRVKASQGTLREALRGHVKEHHRFLLRLHLNQIDALDAATAEIDAQVEAGIAPFRTAVEQVASIPGVKNLGARTIISEIGIDMNRFATDANLISWACICPRSDESAGKRRSTRIRKGSPWLKTTLVQCAWAAARTKGSYLQAQFHRIRARRGAKKAIMAVAASILTAIYHMLKDGTMYRDLGPNHFDSRNKERQKNRLVKRLADLGYAVELAPLAS

SEQ ID NO: 311394 - protein, 319 aa, unidentified
MEKDPLYCAIDVSKERLDVAGAVLGLPEQLDNSHAGYRRLIRAAKKYPGVVQFVFEASGPYHLGLALALWEAKLALSVLNPARVRYFAKAQGKAKTDPLDKEVIGAFAQAFRPPPTRAPEPVRGQLMELLQRREGLIQSRAAEQNRLGQSHHGLIERQIRRLLSQLTEHIEQIERQMDKLVSSCAELQAQVERLCQVKGVGQLTALTLLITLPELGSLGRNHISRLVGLAPLNDDSGQQSNKRFIQGGRKRPRAALYMASLSASRHNPVLHDFYQRLLKAGKPKKVALTAVMRKLLICLNALVHRQLAQQTSSRLALSP

SEQ ID NO: 311395 - protein, 402 aa, unidentified
MNAVGIDVSKGKSMVAIMRPFGEIVSAPFEIKHTASDIHSLVELINSVEGESRIVMEHTGRYYEVLAHQLSEANLFVSAINPKLIKDFDNDSLRKVKSDKADSVKIARYALDKWQNLKQYNVMDELRNQLKTMNRQFGFYMKHKTAMKNNLIGILDQTYPGVNTYFDSPARSDGSQKWVDFASTYWHVDCVRKMSLNAFIDHYQNWCKRKKYNFSQSKAEEIYGKAKELVPVLPKDDITKLIIKQAVNQLNSASTTVESLRTLMNETASKLPEYPIVMAMKGVGASLGPQLMAEIGDVSRFTHKGAITAFAGVDPGVNESGSYEQKSVPTSKRGSSDLRKTLFQVMDVLIKTHPQDDPVYQFLDKKRAQKKPYYVYMTAGANKFLRIYYGRVKEYLASLPES

SEQ ID NO: 311396 - protein, 359 aa, unidentified
MGLACILKVPTSPTSHTIHSATQARQSENIMTTDYSAHVALDWGDKTHAFALQTAQGTSESGTIDASPEALHGWLEQLHARTGGGLVALALESGKNGLLHALLGYPWLHLYPVHPAASARFRTAFVPSGAKDDVPDAQILLTLLLRHRDQLRRLEPEDPATRRLAALVEARRHLVDQCTRFAQELMSALKLYFPSGTGTYGRRSHRSARPGFPGSLAGPGQRTSGPAGHAPRLLVAFGANRSRYPEASNMQKLAGIAPVREKSGRQLWVHWRWNAPKFLRQTFVEWAASTVVHSAWAKAYYHQQRRAGKRRQAVLRALAFKWIRIVWRCWQTRTPYDEARYIDALSRRQSPLAIELAQT

SEQ ID NO: 311397 - protein, 455 aa, unidentified
MYLPDWKWIPIRKELSLMSNKVIFNLDELFISVGIDVGADFSWMSIALPNQQFVGKPYKILHNSIDYLTTAVSKIKEAEELYSLESRIFLESTGIYHYPLFCYLRDKGFNCSVINPIITKNSTNINIRKVHNDRFDSKKAALVGLKPDLKVSLMPSDLALNCRNLCREYYDLMDNRSAYVNKLQGELRMAFPQYLGIFSKVTINTSLTLLETYTSPSAFLEADKQEIIDIIKSTARFGLTYAQNKYNAIIQAATDANQFGYIIESNIKRIRLYISFIRKYDEEINDILESLHKLVDSNEDTKFVKQVHLIETFKGAGFLSAATIMGEIGDFSAFSKPKQLFAYFGLDPAVKQSGKFEGTKVQMSKRGSSIARRVIHTLSLQSISISRNGKAKNPVLREYYLQKCDSKPKLVAMGAVSHKVCNMIFAILRDNKPFEIITPQEHIKQYNAAKCDIAA

SEQ ID NO: 311398 - protein, 409 aa, unidentified
MMKQNIIFGIDVSSKSSTVCVVIDRIKQGETFKITNDSFGYQDLLDRLNQYLITPLVVFEATGVYSLSLQAFLEDYHIKYLKLNPLKAKKLMDNNLRHNKTDKVDAYRLALIQFNAPQKLRAPQPKEYHELQNASRYYEELTQALIINKNQLHCNLQSTFPQIESILSTSSGRVYWTIVSLFPHAQYVLNHNENQVFQSLLAISGIGRQRAHYLTTRLYALARQAYPYDNESSITIRAIQRNIANLLSLSAERDNVINYMEKLAMQANARSLNIYESIPGIAKTTAVRLVAELGDLRRFDTSAQIDAFVGIDPGRYQSGEKDSHLGITKHGNHLARKILYRTIIQMETVKATQPCHITDYYDKKKRSSNSRGYKKIAIASVHKLIRTMFALIKHDQLYDYNVATHNQRL

SEQ ID NO: 311399 - protein, 368 aa, unidentified
MNEITKEASKQTEKQSSQERQKKGNLKLGLDVHYRQVTVAMQEENGPIKVVGKMSHQAFSNWITKKQQERWQLKSCYEAGASGYWLHRALEQQGVNNLVVVPKAMGQGGQKQKTDRRDSVQLCDNLDRYLGGNTKALSVVAAPSAQEEQRRGLIRFHRQLMQDKARYEARGKGLLCAQGIEVKGPWWKAKGWQELLQHAAGLQEWIKEQLGVWRNKILSTQKEEKLLRERIEAMAPQPLPKGVGAYSAAVLQYELRGFERFKNRRQVASYTGLCPGIHLSDGRGKEGSINRCGNATVRWTLVEMVWRMLRWQPHYEPIKELVAAIMKSRRLKRRLVVKAARRLAVDLWRLATGRTTAQKLGLIMQSDC

SEQ ID NO: 311400 - protein, 313 aa, unidentified
MAKSERFIGIDVSKATLDVHVLPEGQDFVFANDIDGIKAICRKLCKLRPHLIVLEATGGLQIPVASALGIEKHPVAVINPRQARDFARATGRLAKTDKIDAQVLALFGQQIRPEAKPLKDEQAQELSALMSRRKQLVGMLVMEKNRVSLAIGSIRDDIVKNIEWLEERLDDINTRLGQAVRMSPVWREQDDLLRSVPGVGEVLSATLLADLPELGKLGRREIASLVGVAPINCDSGKHRGKRRVWGGRGNIRSVLYMAIMTAIRFNPVISKFYKRLIDAGKPHKVAATASMRKLLTILNTMVRTGQPWAYSPN

SEQ ID NO: 311401 - protein, 371 aa, unidentified
MKTKNITPSVVPISTPAPVVPGGFTLGLDLGDRSHHVCVLDATGQIVREAALVNTRPALARLLAEFPHATVALEAGTHSPWISRFLTDCGATVLIANPRKLHAISRSERKCDRRDAQMLARLARVDPALLHPIQHGSAQAQHDLLGLKLRDALVRTRVNLINTVRFTLKSLGYPVRNPSSRSFHNTVLADVPAVCLPVVQPLLTVLAQVTAEIKGMERELIQRSRKDYPVTQRLQQIAGVGPITALCFVLKIGDPARFSRGRDVGAYLGLCPRRDQSGGTDKQLRISKCGDALMRRLLVSAAHYVLGPFGPPCALREHGQRLAGTGSAREKKRAVVAVARKLAVLLLSLWKHGTDYEPRVTVAPALVVMVA

SEQ ID NO: 311402 - protein, 421 aa, unidentified
MENTAARKRKQVPEGYLIIGIDPHKKRHAAVAITQDFTIRDKFKFDNTREGLETMLRRTRTEMVKTDCRGVMFAIETGGHYWRNIAYFLDEQGIPFRFINQYTLKRRREGKDINHKKNDYRDSEVAAQLLCTGEFTESTIPQGVYAELRTAHNAYRRLVKERTRITNLVKGLLDGLFPEFTHVFKDPCGLTALSVLSACAIPGVIAGMTEDEFVAAIEATHQGRLMRKKLRELHDVARASIGIAAGARSVSSEISFLVEKYELIRGHICIIERTLVSLVDEAEEGKYLLSIRGLNYIAVAGLLAELGCFKLYRSAKQMIKMAGSNPTESESAGKRGSHTPMSKQGRSVLRYCAWTSVIPMLRFNSDFRAWAKQRRERPAHANPLNGREVVGAALNRLFRLAFAMVKNQTYYLSPQLVQVTG

SEQ ID NO: 311403 - protein, 352 aa, unidentified
MLSFNYKPTLFSLSCKTFRTLLDATLIRYESQSDREQQLAYTTVENNPKGFRSLVSWSKKNAGRGVKTDTMLFCCETTGGYDRALCDWLYGNDLDIWRESALQIKRSMGLRKGKDDKADSEMIAYYALRFRSKATLYKPLDGNMRSLRDLFLYRQSLVAERRAKMVSAKEKQHISSKSKVDDFIYRDAQKAINILTKSIQECECRMLEIIKEDEQMYRNYLHLISCKGVGLVTSIMLIIYTDNFKGWNAKKMASYCGIAPFYESSGSSVFHKANTSGYSNRRLKGILTQAARSAITHNPTLRQYYLRMKAQGKSYGVILNNVNNKLLHILFSLVLHDCDFELDHETKRALRA

SEQ ID NO: 311404 - protein, 342 aa, unidentified
MASVTSAPGPIHLGMDTSKKTIVVAVLMPGEEIPVLDRIWNEEGSVRHLIGRLGGAGALRACYEAGPCGFELHRLLSSVGVACDVVAPSLIPRRAGERVKTDRRDASRLARLHRAGELTAIRVPTEAEEAVRDLVRARAALMADRRRAQQRITAMLLRHGRVWRGTSWTEAHERWIAGQRFGEPALAAALAHYRAALDTRRAELDAVEAELAAWAGKPPLGEAVARLGCYRGIAALNGLTLAAEVADWRRFPAARAFMGFTGLVPAEYSSGERTRRGSITKAGSAPVRTALIEAAWAYRFRPAIGVTLRRRQHGAAPDSYPGEERDATPAQPATRRVYRAFS

SEQ ID NO: 311405 - protein, 461 aa, unidentified
MVERRDEESRWERVRPIEGLPVVRAQVGGIDLGSQRHWVCGPGLEGNGREVADFGATTPELLRMVRWLKARKVESVAMESTGVYWIAPHEVLEADGLEVLLVDTRQLARVPGRDKKTDPVDCEWIQRLHSCGLLMGSFRPKEDVCMLRTLVRDKGNLVAEAGDWLRRMQKSLDQMNVRVHRAVSDIDGVTGMAILRAIAEGERDAEKLAKLRNPRCRKSEQEIAEQLSGHWREDHLFSLRQGLKMYDAIQQRIAEYDQEILRKLAAMQPEELREQPAPKISNAGKAKAIKRRGEEPMREALYRMSGVDMTGIDAIGVETVQVVLSEYGPDLSRFPTEKQFVSHITLAPHRPTSGGKPVRKKRRNTASTRVAGALRMAALSLRNSATALGAYYRKIARRIGGDVAVFATARKLATLIYRLLRWGQPYVDEGAEAYEQRYQTIRLTVLKDKAQQLGYQLVQNA

SEQ ID NO: 311406 - protein, 497 aa, unidentified
MVMRVLPFVGRSARRFAFEKSYSDLICAIFSRSGAPNRNQTDGVAAQRVDNYEYMASASSAGGHESLLALSVWINAMHRKRVHKHAFCVRKRHAVLTQIPRRLGRIKFKVHWLVTVCMLCIRVKASLLERLTNVRDFPDVARHWSAKIEVCVHVQSQPRRGSLVSNVTTVGIDLAKNVFSLHGVDARGVVVLRKTVSRARLASFVAQLPASVIGMEACSGAHEWARRFAQHGHTVKLMAPKFVVPYRKSGKNDGNDAAAICEAVSRPSMRFVPVKSVEQQTMLTLHRVRLGFVEERTATINRIRGLLAEFGVVLPQRAMEVRRGAAASLEQLPAAAARALSDLLAHVRVLDERVNEYECELEQHARRDERAQRIQSLSGVGPISASAIVASVADTHEFKNGRQFAAWLGLTPKQYSTGGKTRLGHITAHGDPYLRTLLIMGARSMLQTALRRTDRLARWALGVRARRGYHRACIAVAAKHARIIWAMLAKNEVLQLS

SEQ ID NO: 311407 - protein, 414 aa, unidentified
MLPAAQSLSSRSSGVVLEDLVAVPIDVGKHAAMAKVVDFTGAVLAKPFTFRLDREGVADLVTQVRAVLPVTVALVRVGLEAAGHYHLPLCGGVLPAEWELRILNPGHVAKQRQVNGERGVKTDQIDLTAIADLVLAGRRLPAPAFADPIQELVGWAAHRRRRSLVRRQTIQQLTTHVDRCFPGLGTAVWSVALSMSGRLILTELPDPERVAKLGPQRLRAFAARRGVRMTTPLAERIVEAARQSLPVPGADVARRLLGLDLALLTHLEQEIADADEAIEKLLPTTPFGVLSSVPGWGTARVANYGAAVGDPERWPSPHQLYRASGLTPRLYQSSGTRNLGHITREGSVELRVALVDLGLGLWHTDPGAKAYADAMRARGKPGGVIVTAMANRANRIAFAMVRDQREWEPSRWAA

SEQ ID NO: 311408 - protein, 353 aa, unidentified
MGIVVALDVHRKQITYKTLDRETGEVERGRIAPAARADVRAWLARFAGFEAEFALEGTTGWRFVVEEVERAGHRAHLADPAETAAKRGRKRRAKTDSADCDLQLRLLCAGELSESWIPPAHLLELRTRVRMRKTLIDQRTAWQQRLQAQLFHQGVPAGLRPRTRAGREALARVELSPAGRELVSLALRMIDAIDRELAPLDRDLHAFARRQPGCRALIARLYGVGPVSATAILAELGDARRFARSDDAVRHCGLDVTVYQSDEKRAPGHLSHEGPELLRWALFEAALSAARAGSPDHADYLQVAERIDHNRACLSVARKLCRRAYHILRELGDEALAPVEGDPHAEEAIAAAA

SEQ ID NO: 311409 - protein, 359 aa, unidentified
MASIALERTDVIVGVDTHKDQHVAVAVDGHGGHLGELFVVATNEGYAELLSWAASLGRIHGFGVEGCGSYGLGLARFLRRHGHPPVEVARPPRRGERRASGKSDAIDAQHAARMVLAGVGLATPKLADGQIESLRLLKIARDTAVKAKATAMIALKATLITAAAELRSELEPLSDFKLITACVALESKEAIGHPDAAMRHVLGSLARRWLGLHEEIKAHTRQLKRITTAAAPQLLDAYGVGFDVAAEMLVTAGDNTERVRSEAAFAKLCGVCPIPAGSGKTNGRHRLNRGGNRQANAALYRTVIVRMRWHEPTIAYVERRTREGLSKREIIRCLKRYLAREIYGLLPRSSEELGTLRAA

SEQ ID NO: 311410 - protein, 349 aa, unidentified
MKGSAVTCTTFGVDIGKSLFHVCGCDRNGKPVLRKKLNRKTVIEFFVNAPEAVVGMEACPGSQWLARKLIAQGHDARIMAAQFVKPYLKNQKNDANDAEAIAEAVQRPTMRFVGVKHLDQVDTQALHRVRDRLVRQQTQIISQTRALCLEYGITIPTGVPAFWRDMPRILEDADNDLTPRMRRLVATLWDDVQHVQKRLKVMSDEIKSIAAHDETARRLMSIPGIGALSATAIVSAVSNPADFKRGRDLAAWIGLVPRQHSTGGQPKLLGISKRGNPYLRKLLIHGARAVKLHLNREKDRLGPWLNNAEQRMHPNKVTVALANKIARVAWVILTTPGATYDKGAINSIA

SEQ ID NO: 311411 - protein, 347 aa, unidentified
MNFYTQQHKHYCGIDLHAKAMYVCLLDQSGTKLVHKNLPTTPEAFLRLIAPYREDLVVGVECMFTWYWLAALCQQEGIAFVLGPALYMKAIHGGKAKNDKIDAQKIAVLLRGGMFPLAYVYPAEMRATRDLLRRRCHLVHKRAELLVHIQNTNSQYNLPEIGKKLAYKANREGVAEHFPDPSVRKTSEVDVSLIDHYDKLLGEVELYITRTAKLHDVQTFTRLQSVPGIGQILALVILYEIQNIQRFPRVQDFVSYCRLVKCAKESNGKRLGTSGKKMGNVHLRWAFAEAAILFLRQHQLGKEYFMKLERKHGKAKALTVLAHKLARAVSYMLTREQAFDLQRFVTA

SEQ ID NO: 311412 - protein, 342 aa, unidentified
MQITTIGLDIAKNVFQVHGIDAKEKVVVRKQLRRDKVMGFFKALSPCLIGMEACATAHYWARELTKLGHEVRLMPPKDVKAYLKRNKNDAADAAAICEAARRPTMRFVRVKSEEQQGQLMQHRTRDLLMRQRTQLINALRGHLAEFGIVAAKGDAGLKELLAIVADDRDERLPSDARASVIVLAAQLEAAQTMLRSLDKRIMKQHRANEASRRLESIPGIGIIGASAIAATVSDPMVFRSGRDFAAWIGLVPRQDSTGGKQKLGPISKQGDRYLRRIIIIGAHAVLRRAKENPHKYPWLTQLLARRPFKVVAVALANKMARTAWALLAHGDTYRAPELVAAA

SEQ ID NO: 311413 - protein, 341 aa, unidentified
MKLIRVGVDLAKNVFQVHGVGDHEKAVWRRKLTRASWLKVLLETAEPGCEIGMEWCGGAHHWARQLQAHGFKVRMIAPQFVKPYVKSNKNDANDAEAICEAMSRPHMRFVAVKTVEQQDIQAVHRVRAELTKQRTAKANQIRGLVAEYGLVAPKELEHLRRALPCWLEDMENGLSERFRRLLNGLWGDLQALDERMAELDREIAVIAQNDPVAKRLQQLRGVGPIIATALVAAVGNGEQFANGRQMSAAFGLTPRQHSSGGKERLLGISKRGDVYLRVLLIHGARSVLRTSKDKADRLSQWVTRLAARRHPNVAVVALANKTARMAWAMLKNGTDYQPGTS

SEQ ID NO: 311414 - protein, 371 aa, unidentified
MKEVITSYVGLDIHKDTVAIAVAEAGRGVPRFVGTINSFPAELCKALRRQHCTPGNSLLVYEAGPCGYGWARYLRKQGWKCEVIAPSRITRQAAEKRLKTDRRDAMLLARESRAGNLTPIAVPDARDEAMRDLCRTREDVVAARLKARQQLKAMLLRHGRVYQGKSSWTQAHERHLSTIHFEHPAQQIAFDEYRQSIKEAHERIDRLAQALREQCEDWRMQPVVRALMCLRGIDFLAAVTLVAVLGDLTRFANPRSLMAYLGLVPSQFSSGGNRHQGSITRAGNKQARRILVESAWTYRFNPRLSRPIEVRQCGQPKVIRDIAWKAQTRLAYRFKKLNAGRKMPQNKCCVAVARELAGFIWDIARHVKLPA

SEQ ID NO: 311415 - protein, 371 aa, unidentified
MFQPIRCVGLDVSKETIAVAVAEPDGSVVEYGDIPNDPSSVRRLVEKLSRDAVVKTAYEAGPTGYPLHRQLTALGVENKVVAPSLIPRRPGDRVKTDQRDAVQLARLLRSGDLTPVWVPDEAHEALRDLVRARDDARTEGLRAKHHLSKFLLRQGVSAPARVGRAWSAKHQAWLNTLTFRDRAAQVTFDDYLACVRASTERIRRLDAALLECGAAGPHVELLRALQAVRGIGFLTAVTIVAEAGDLRRFRSAPAFMAYVGLVPSEHSSGGSRRRGHITKTGNRLLRHVLGEAAHHARLQPGVSEALKQRQQGVPREVVEISWRCQQRLHHKYRHLGGRIGRQRAISAVARALAGFVWAIGQAVQPIAAVAA

SEQ ID NO: 311416 - protein, 343 aa, unidentified
MQVSTIGLDLAKNVFQAHGVSAEGKVVLTKQLRRGQVLSAFAKLPPCLVGMEACAGAHYWARELRKLGHDVRLMPARDVKAYVKRDKTDAADAAAICEAVSRPSMRFVALKTPEQQGRLMQHRVRDLLLRQRTQTINALRAHMAELGLVAATGRQGLGLLLAILADAKDERLPQDARASLKLLASQITALQAQIDSLDKRLHAQHRQCPASRRLETIPGIGVIGATALAATITDPKAFKSGRDLAAFIGLVPRNNSSGGKQRLGPISKQGDRYLRRILVVGAHSILKQARTRPDKHPWLARLMARKPGKLAAVALANKTARIAWAVLARGETYRAPTAPAAAG

SEQ ID NO: 311417 - protein, 318 aa, unidentified
MKKESPERFIGIDISKNTLDIADSLTQKSWQSSNDESGIQSLVEQLTSLKPALIVLEATGGLEIPLASALAEDRLPVAVVNPRQARDFAKATGQLAKTDTIDAQVLAHFAAAVRPEVREIKNQETRELADLVARRRQLVDMLATEKKRLRQVSKTIGKSIKAHIKWLQECISETDKDISKILKKSATWRDNDQIIQSVPGAGPILSVNLLANVPELGKLNQKQIAALIGLAPINRDSGTFRGRRSIWGGRSNVRSILYMAAVSAMNHNPVIREFYQRLTEKGKPFKVAITACMRKLLTIINTMVKTKTLWQQNLVTNN

SEQ ID NO: 311418 - protein, 360 aa, unidentified
MVLERTSVGLDVHARSVVAAAIDGVTGELVQARLTPSHEHIRSWLAGLPGPVAVAYEAGPTGFGLYRALGAAGIRCEVVAPSKLQRPSGDRVKTDAKDAVHLARLLRLGEFTAVSVPSVEQETARDLVRAREDARGDLMRARHRLSKLLLRQGIVYSAGRAWTGAHDGWLRQQRFESRALQLTFESDYEAVLTVQARRDRLDQAISAMATDSEFTPLVRRLGCLRGVGTLTGFALAVEVGDWHRFTGRTIGSFVGLVPCEYSSGSSRVQGSITKTGNTHVRRLLVEAAWHHRARYTIGKTMRDRWELAPPAARARGDAGNRRLNARWDTFRARRKRHVVANVAIARELAGWCWSLAVLEQ

SEQ ID NO: 311419 - protein, 429 aa, unidentified
MNYTQNEKIEQVTDSTMVVGVDIGSQIHYARAFDNRGRELTKRIFSFHNDLEGFNSFNLWAETLKTENKKTAVLIGCEPTGHYWFAFAKYVNDHQKRLVMVNPFSVKKIKELDDNSPKKTDSKDPKTIAKLVVDGRYSIPYMPEGIYAEIRDRVYSRDRIRKQHNISANRIQRWLAIHFPEYLGLYTRFDAISGLAVLEKAPLPKDVIALGVNGIRKIWHDKKMRGRGVTEDRAKTLVEAAHNSVGLDGGIGTKSELYMLLEEHRLWTSQLEAVNKVLEEMILKVPHVEKLLAIKGVGSITIAGFIAEVGDIRRFDSPKQIQKYAGLELVENSSGKHKGRTRISKRGRRKLRKILYQVMVPLLARNKEFRGIYDYYVTRVKNPLKRRQAMVAVSCKLIRVFYAVLTKGVEYDRFKMMSDIHRKSDIIAA

SEQ ID NO: 311420 - protein, 355 aa, unidentified
MHKPKKQHKPINDLSRSLTPLDVNQTLICVIELSKENWLVAGIVPGVERQPLKKLAPDENGLLKLLERWRAEAEKAGHKIDRIAVAFEAGRDGFWLARWLRARGIEAHVIHAASVAVPREHRRAKTDRLDTEHLKRAFLGWLRGERNHCKMCAIPTAAEEDAKRPHRERETLVGEQTTIINRIKATLARLGIRSFNPKLKMAPERLEHLRTPEGEPIPHNTLAELRRDFERKQLVAEQIRQIEKARLEQLEQAPTAKPNLMVLVLMRVIGIGIETADMLVQEILSRNLRDRRAVARYGGLTGSPDESGKTRREKGLARSGNARVRRGMIQLAWRFLDFQEDSALAKWFRAHRERS

SEQ ID NO: 311421 - protein, 352 aa, unidentified
MAKNDFDELMSVGVDIGKDVFHLVGFDRDGQRVLRKKIKRMALIATFEELPHCIVGMEACLSAHFVSRTLRKMGFEPRIIPAIYVKPFNKGQKNDYNDAEAIAEAALRPNLKTVSEKTQEQLDLQALHRVRSRLVSRRTATMNQIRAFLIEQGITVRKSVAALRSSLDAILENRSSEISLRMRKLILGLQQDWIWTDKRIEMTTAEIKAVSESEASCQRLMTIPGIGPIISTAVVAAVGTGEAYDRGRDFAAWLGLVPRQHSTGGLTILGRITKRGSRYLRMLFVQAAQVIMMRPKNWPKFSFGAWLESASTRMQHNKLGVALANKLARIAWSVLNSGRDFDWKEKELATAI

SEQ ID NO: 311422 - protein, 423 aa, unidentified
MPYRIAGIDVHKKKLAVVVTDVEIDDEYQFERRWYGANPEQLKLMAQWMIEQQVEEVVMESTARYWTPVWAALEQHWRPVSRKREGAARMSGTLHLAQALSNRGRRGRKKDFRDAERLVKRLISEELVLSFVPDPEQRLWRSITRTKYQLTRNKVRLQNQLEALLEEAHIKLSSLVSDLLGASGRRMLKALAEGETDPLAVAALADQRLRATSAELRDALGACADLNPVYRRLVRMALEQLHLIEQQIGQLDQEIAGLLRQHQDAVERLAEVPGLGVDSAQQIIAEVGATAATFPSAKNLVSWMGACPGDDESAGVNHSKRSPKGNRQMRRILNQAANAAVKRKGSIFEILYRRLVPRLGHHKTIGAITHRLCQLVWILLHKGVRYEERGPAVCEKSKRVRTQRMIRTLRNLGYRVEPLANLA

SEQ ID NO: 311423 - protein, 343 aa, unidentified
MHIASIGIDLGKTNFHLVALGEHSKVAVRKKFSRKQLLAYTANLQASLIGLEACSGAHFIGTALRNQGHEVRLIPAQFVKPFLKSNKNDFLDAEAIAEAVARQNMRFVPIKTDDQLDLQAMHRVRDRLVHRRTAVINQIRGFLLERGLSFAKGPANLRNRMPAILEDAEQNITPRMRMLLDQIWQEWKRLENDIAIISEEIERISNEDEACQRLRQIPGIGPLVSTATVAAIGNGAAFNKGREFAAWLGLVPRQHSTGGHAKLYGISKRGNIYLRRMFIHGARAVLLRVKNKTGSFGPWVHQLELRAPRNKVIVAIANKLARIAWAVLSKQMDYRPTPVVATA

SEQ ID NO: 311424 - protein, 355 aa, unidentified
MNDEKYIGLDVHQATIVVAVMDSTGKLVMESILETKASTILQFFAGLRGTLSVTFEEGTWAAWLYDLLQPRVDKLVVCNPRKNALLKDGNKSDRIDARKLAELLRGNQLKPVYHGETGVRMLRELSRSYLTIVKDLSRVMNRLKAVYRSWAIPCAGRDVYYTRHRAEWLGKIREAGVRRRAERLYEQLDMLQHLRQQARRELLTESRKHAITAKLRQIPYLGPIRSALAVALIQTPHRFRSKRQLWAYSGLALETRISAEYRFVEGQVRRSKKLLSIRGLNKDHNHDLKGLFKGAATMASVRPGPFQDFYQAALAKGIKPTMARLTLARKIAAITLTLWKKGENFDAEKLKSQAA

SEQ ID NO: 311425 - protein, 344 aa, unidentified
MEHYAGLDVSIKETSVCVIDGTGCVVREVKVPTEPEAILAVLSDEDFNIKRIGLEAGPLSQWLYGELAEAGLPMICVETRHMRAALSAQVNKSDRNDARGIAHMMRVGLYRLVHVKTPASQKRRMLLTSRQLLQAKARDIENDLRGTLRNFGLKVGIVGAIKFEARIRELVANHPDLATIVDSLLVARRVLREQLSVLHRHLLAVVRDDEVCRRLMTMPGVGPVVALTFRATVDVPARFTNSKTVGAIFGLTPRRHQSGEIDRMGGISKCGDAMMRTVLFEAAQAMLTRTIKWSWLKAWGMKIARHRGMKRAVVAVARRMAVVMHRMWMDGTDFQWKREEVAAA

SEQ ID NO: 311426 - protein, 342 aa, unidentified
MINMFCIALDLHKENTYGVVLDDKSGQVVWEGNFASTFRAAKETLEPYFVHGTKIAIESTSCFYPMYDGLKSIKGINISVVNTARLEKPAIKTDRRDAHRIAHLLRRNELPTAFIPNKKLRLQRELCSLRMRLVHSCTQCKNRISSILHKEGKRPLGVKDAFSDKGLAQLEKLRILRKEEMNEELDLLRILKKKLSRIEKQISEVIEQDARLRKQVGLIDSITGFAQTLAFVCATELGPIGRFNSEEAVVSYAGMHPCIDSSGGRTKHGKIMRVGRKLFRWALIEAAHVCGRTDTILGNYYRKKAKQKKSNHAAAVATANKLARLIYQILITQKDYDPGLGQ

SEQ ID NO: 311427 - protein, 345 aa, unidentified
MKKCNVLGIDLAKNVIQVCLIDEHGSIIYNKAVSPSKLKTLLANLSYSIVTMEGCGSCHYWGQLAEQFQHDVRIISPKKIKAFLQGHKTDANDALAIAVAATQPGMVFSRIKTKEQQSLQMLEKSRKFLDKELTALGNHIRAYLYEFGITTPKGRKSLRHNVAQTLDEQDERLPRCLKGTLRQLWSRYTETIEQLKHTEKAKAALVNQLEPCRRLLDLEGVGPVCAAMLYTSLGDGSDFKNGRQASVYTGLTPKQHSSGGKITIRGINKQGGNKALRAALYQGAFSVINRLPPEPKTVKQQWLLDLVKRVGIKRACIALANKTVRTAWALLATGKAYQPVPLHPA

SEQ ID NO: 311428 - protein, 390 aa, unidentified
MIYVGIDVAKDKHDCCILGPDTEELFQVFTIRNNSDGYGELFHKIESVSKDKSQIKIGLEATGHYSYNILGSLLDHGYHTFVINPLHTNLYRKGQSLRKTKTDKVDARSIAEMLVTDKTLKPYTGTSYHSEELKSLTRYRFELVKERAKLKTSVSRLVNILFPELESLVPTLHMNSVYRLLQELPGAYFIASSNLTHLKALLADASKGHYGREKAIEIRETAKSSIGSLMPAKSMELRQTIRRIDTLTSDIKEVEQSIQKIMDECGSPITTIPGIKYRMGAMILAEIGDFARFSNADQVLAYAGLSPSTYQSGQLISSYARMEKRGSKYLRYALFNAAIYASLWDERFRLYLSKKRAEGKHYYVAISHVVKKLVRTIFRMEITHTSYQPL

SEQ ID NO: 311429 - protein, 352 aa, unidentified
MFAPHSTPVLGIDVAKAELVAALVEPRTEKTRWTCTVPNTPAGIQQLLRQTTPEMPWVVEPTGRYSELVVATGLAAARPVLMAQPKKALRFLQSENDRVKSDRVDARGLGLYGLNRPLRPFRVKSDPVAQLEQLQAARKGLALSIQRLTLQAQSLPLAAAGLQAAIADLERQQQAFDTQIAALLAQPEQRPLATRLQAEPGIGPVTSAALVACFSARDFGHPDALVAHAGFAIAVRESGQWRGKRKLTKQGDAELRRLLYLAARSNLRSKDSPFRAQYERERAKGLPSTAALCAVARKLLRLSWSLWKHETDYDPARVYQQPPASSGRAVPGPETTAGSTVAAPRVSPEITE

SEQ ID NO: 311430 - protein, 341 aa, unidentified
MEEISTVGLDIAKSVFQVHAISDAGEIVVRRQLKRRQVLQFFAGLKPCLIGMEACATAHHWARELLKLGHEVRLMPPRYVKPYVKRNKNDAADAEAICEAVTRPTMRFVPVKTVDQQSVLMLHRTRQLFIRQRTTLINSIRAHLAEFGIVAGIGRNGVEALLAVIAKAEEQGVPAEARSCLMALAEQLELVKRQILEMDRRVLAWHRANSLSRSLEGIPGVGPLISTALVASVPDPKVFRSGRDLSAWIGLVPKQNSSGGKEKLGGISKAGNRYLRQLLVVGALAVIRRAKQLGYTHHPWLVKLMERRSAKVAAVALANKMARIAWAMMARSEPYRAPLPI

SEQ ID NO: 311431 - protein, 417 aa, unidentified
MEIVHRSCAGIDIGKRSVTVCVITSGARGEPQKEIRTFGTLTRDLLALADWLDEGGVEAVAMEATGSYWKPLWNLLEERFELLLANAAHLKAVPGRKTDVRDAEWIAELFRHGLLRASFIPPRPERELRELVRYRTSLIRERASEINRIAKVLEGANVKLGSVSTNIGGVSGRAILGAMVGGMADPEALADLARGRLRAKHDALVAALTGAVGSHQRFLLGIQLRHLADLDTLIDGLDAEIKARLGAADELIERLATIPGVGRRTAEVILAEIGTDMTRFHSARQLASWAGMCPGNHESAGTRRGGATRRGSPWLRGALVSCARSAARTTTYLGAQYHRLAARRGSRRALVAVGHTILGIVYYVLSRGQPFRDLGASYFDRHDAERISRRLTRRLETLGYTVTLAPPAALTVPATGS

SEQ ID NO: 311432 - protein, 346 aa, unidentified
MILIGCDYHPSWQQICWLDTVTGETGEKKLEHGSGEAERFYRQLPAAALIGMESTGNCQWFVEMATTQGHDVWIGDAAKIRASEVRAQKHDRRDAALILKLLMEGRFPRIWTPSGQEKDLRQLLIHRYKLVRIRAQVKTELQHLAMNQGVTRKRKLWSKAGEKVLRELPLKPWASRRREDLFKVRGMLDEQIAPLDQAAAEAAEKNEKARLLMTQPGVGPITSLAFVLTMGDVSRFQRGKQVASYLGLIPREYSSGGKQRLGSISKQGNRFMRMLLVEAAQGAVRCDPGFRNEYLHRCHKKAKGVAKVAAARKLAVRLYWMLRTNTGYPEVVRVESSSRVPLVSAS

SEQ ID NO: 311433 - protein, 391 aa, unidentified
MIFVGIDVAKDTHYAAVSDDSGAVLVKTFAFQNNAEGFCLLLKKLSEFDRSKLLIGLESTGIYSENLICFLYESGFRLAVINPIQTATLRKTAIRKTKTDKVDTMLIIKSLMVNSYRLYSQRDADSLKLRTLCRFRQNLKKSKARLKIQLAGYVNLVFPEFGKFFKSGIHIAASYALLKKYSSPKEIAALRTSTLCILLSKASHGRFGKDTAEALKSLALSSVGVKNPYISIQIAQTIAQIELLEQQIKDLNSAIEEAMESINSVLMTVPGIGAVNAACILGEIGDIKRFSKPCKLLAYAGLDPTVRQSGQFTAKSTRMSKRGSALLRYALINSAWQLTLNDTTFKAYYDLKRSQGLNHYGALGHVAHKLTRVIFKLLTSDTPFNPAKLVA

SEQ ID NO: 311434 - protein, 430 aa, unidentified
MKSNTQNAKIEAITEKTLVLGIDVGSKTHYARAFDYRGIEYSKKPFKFSNTEAGFATFKEWILDLKERHEKDKVVPGMEPTGHYWFNLGKFLQDNEMKPVLVNPHHVKKSKELDDNNPTKNDRKDPKVIAGLVREGRYMIPYLPDGVYADLRTASNIRFQLQAELTRIQNRISRWFNIYFPEYKTVYGKPDAKSGMLILKAAPLPEDILTLGIDGVNQIWRDAKLRAVGKARAKTLIEAAEHSVGSKEGAVAARMEIRMLLEDYESQNMRLQEVMVLIEELVKEIPMAEKLLEIKGVGIRTVSGFLAEVGDISRFNNPKELQKLAGLALVENSSGKHKGETTISRRGRKRLRYLLFEVAMSLVAKNPEFRELHNYYTTRRLNPLKKMQSLMAIAAKLIRVFYAMLTKGVDYDPKKMISDIKRPTVYLQAA

SEQ ID NO: 311435 - protein, 354 aa, unidentified
MKRTTKYVALDVHQATTVASVREEGGRVIARTILPTEATPIVEYVRGMRGAIHVAFEEGTQAQWLHELLAPLVERVVVCDRRGQARPGNKGDQVDADGLSELLRCGGLRAVYHGRAGRSDLKELTRAYRALVEDCTRVMLRLKALFRARAIPTRGTAVYLERSRGQWLAQLPERGARFRAETLYAELEVLRTLRPKAKAAMMAEARRDPAWPVLRAIPFLGPVRVALLLATMQTPWRFRTKRNLWAYAGLAVVTRSSADYTLVAGQPVRRRRAPLTRGLNQNHNRVLKDVFKGAATAATAKPGPLQDFYAGMVARGMREELARVTLTRKLAALTLRLWKTGERYDPTQLTRQAR

SEQ ID NO: 311436 - protein, 347 aa, unidentified
MLHAGLDLSRKKLDVCVLSDQGEHLDQLAVPPDVDSLRRLARRVVEVHRQPVCAVIESMTGARIVHDTLEQQGWSVEIADAQKVKGLAPLACKTDKIDSKVLAVLSHRDLVPAIWLPDPSVREERELARFRLHLVKHKSALKCRIHSTLINFGKPCPVTDLFGVEGRRLLKRLQVPEPWRGNITASIELIDDLERQIAEINHRLKKGHAEHPYVPLLLTVPGIGWVLAFTIAAEIGEIERFPSPEKLAGYTGLCPRVNQSGEKDRRGPLTKHGPTYLRWALLEATMHALRHPAYAERYQRTKRRLGKQRGAKVAQVDIARRLAHAIWHMLSRKEKFAPRGAAFRLAA

SEQ ID NO: 311437 - protein, 344 aa, unidentified
MSNLDTCGIEVSAKELVVRLRRQEDLEPLRNFTNTPEGHMMILRYLRRAGRVVRVCMESTGLYGLDLALALSGQEGIEVMVANPRAVRHFAHALMKRSKNDQIDAGVLEQFAMHMPFKPWQRPSVAMLALHALARRLRELVEMQTAEKNRQHAAGLSKAIPAVVRRDLARSLRAQERAIERLTRQARKLIGQDPQLAERFELLDSVPGIGETSAVQLLGELGVLAPDLEARQWVAYAGLDPRQYTSGTSVHKKPRISKAGNKHLRHALFMPALVAVQHDPHLRAFYQHLLAQGKFKMQALVAVMRKLLHALHAMFKTHQPCDGSKLFRLNPAPAQEVTHVLVAC

SEQ ID NO: 311438 - protein, 285 aa, unidentified
MPVMIGVDPHKTSHTAAALDEHSHLLDRQRVPATLEGYETLRGWAARWPDRRWAVEGAHGLGRALAQRLVSDGEQVLDVPAKLAARVRVLSVGHGRKSDPDDAISIAAAAHHAPSLRQVGVEDQAVVLHLLTKRRQDLVAARTQTVNRLHRLLMDLVPGGARRNLTARRAAALLAAVRPTGAPAVTRWQLAGELVADVRQLEQQIAAVEARIKTAVAKSKTSLVQLFGVGPVLAASFLGEVGDISRFPIKHHFAAHTGTAPLEASSGQVVRHRLSRAGDRKRCAV

SEQ ID NO: 311439 - protein, 342 aa, unidentified
MKRFIGVDLHKNSFTVCYMQKNGEHSLKTFKVSPKDVEAFKSALTQHDEVALESTGNAGYFAREIEKSASKVRIINPIQFKIISESVKKTDEHDAVTIARYLSKGLIPGGRIRSKKEAKWEGLMATRAKFVKLRTTLKNKIHNILNASGIVTTKEMFNADKSLDKVLSMKNLDDADRFELTIIIDQVKSLNKSIDEINKELTNRGKKLPGHKNLTSITGIGDLSATILLNTIGDVDDFDDDRKLAAYFGIVPRVAVSNETSQYGKITKRGNKIARTALVQCTLIAIRYNHYLRRFYFRLKAKKGSGKAIIATARKLLTIVYRTLKNDWVFEDFNRFKLAVSV

SEQ ID NO: 311440 - protein, 307 aa, unidentified
MSGIGIDVCKKHLDVAVFQGPARQFNNTAAGHCKLVRWLNTLPVKQVVLEATGGYELAALDALHQAALPVARANAQRARSLANTLGRAKTDRLDAAMLAYMAEKIDLHPYVPLEPWQRRLGEHVRARQQVIELLKMAKQQLLPVADKPLRKMLQGNIKQLVRSVARLDVLIAEQLKTLLIEHPHLATLKTLKGVGPVLLAVLMCRLPELGTLGGKQIARLVGVAPLSNDSGSVRGKRGIKGGRADIRQTLYMAAMSAARHEPRLRDFYRSLRARGKEGKVALVAVMRKMLVILNARVRDERAAMRPA

SEQ ID NO: 311441 - protein, 365 aa, unidentified
MLIHVPPEVRVLAMDVHKNTISTGLLEPGSTSPVLDKISADDESVRRLIARFDDPAQVWACYEAGPTGYELARTLRRAGMRCAVIAPSLIPTRQGDRVKTDKRDARRLAVLFRASQLTSVRVPTVAEEAVRDLCRARADMVIDRTRARHRLGKFVLRHGRVWRGGDNWTLKHEAWIRAQRFDERALNETFAHYQATLTAREAAVDAVEADLVPWRDREPFADAVHRLAAYRGITELGGLTLASEVCDWRRFPTAGLFMGFTGLVPSESSSGDRTSRGGITHAGNTHLRTQLVEAAWAYKSRPQVGAVLNKRQDGLDPAVVARAWAAQLRLCGKFRRLDARKTNRKVVVTAIARELAGFVWAEMTA

SEQ ID NO: 311442 - protein, 416 aa, unidentified
MSVALPQALFFTGIDWASAEHAVCVLDAAGKITARFTIKHSAEGIASLVRRLARYGDPAGLPVAIERPSGRLVDLLLEAGHPVVPVSPNAIKTWREGEVLSGAKSDAGDAAVIAGYLRLRYHRLAPAAPYCDETRALRAAVRTREDLVQMRVAATNQLSALLEAHWPGARAVFADVESPISLEFLTRYPTPAAARHLGHKRMAAFLVKHGYSGRRPAAQLLARLHGAPAGTAGRALTEALQDAVLAVVAVLRALNGAVKDLDRSVAAHLGEHPDGPVFTSLPRSGQINAAQMLAEWGDCRQAYDGPDSVAALAGVTPVTRQSGKHRGVEFRWACNKRFRRAVTTFADNSRHASPWAAQIYAEARAAGKDHPHATRILARAWIRVIWPCWVNRVPYDPARHRAAAALAGQTPNQSAA

SEQ ID NO: 311443 - protein, 347 aa, unidentified
MQILALDLGKFKSVSCCFDTEQLTTEYWTLSTDRSYLTKVLQNYQPQLVVIEACSIAAWVHDLCRELGFEILVCNPNQEAWRWKNVKRKTDRDDALKLAKLAALGQLVPVHIPQLATREHRWLVKYRKTVVGRLNRVQNILRALYAQHGLSLPVGARCWTIASLEAMQQQSKPVAECSIDELWRGQLAQELTAYHALQADLKALEAKLTDLAARDERIQLLAAIPGVGRVTAEIIATHLDRPERFANARQVSSYAGLVPRRYQSGLMDRQGGITRRGSRLLRSALVECAWAMLRYNAWARETWLRLVRGQKNRRKKAIVALARKLLVRCWAMLRDRRAWQAPTESAA

SEQ ID NO: 311444 - protein, 284 aa, unidentified
MSENTNYFGIDISKDVFDVMGSDGKHYQFKNDLSGFKKFLRLTNKSSHCVMESTGVYHLRLSYYLYEKGVAVSVENPLSIKRFIQMRLTKIKTDKRDAQMIYEYAVSSSVELRLWKGQSDTQIACSQIISLTNLYTKQMTALKNKLQTEESMGSPCARVIRSLKRSLKYLKNEIDKLEDSLLELVKQDSQDLLTRVESIPGIGRRSGMLLIVLTGGFERFNKAPELCSFAGLTPMIRQSGSSIRSRPRISKMGNRRLRKTLFMCSLSARKHNKACREIFNRIVA

SEQ ID NO: 311445 - protein, 370 aa, unidentified
MKEYSEAFVGFDTAKNKHAVAIADGGRDGEVRYFGEIDSSPTTVAKVLGKLSARYPRLHICYEAGPTGYGLYRQVKALGHHCMVVAPSLIPRKPGDRVKTNRRDAVTLARLFRAGELTSVWVPDPVHEAVRDLVRARGAAAADLRKKRQQLLSLLLRHGRIFAGRAHWSLAHRRWLAGQRFEHPAQQIVFQDAVDAIEDAAARLRRLDQQLLTIVPSWSMAPVIAAYQAMRGVSFIVAATFVAEIGDVRRFDNPRQLMSFLGLVPSERSTGETVRRAGLTLAGNRRARRVLVEGAWTYRYPARVSETLRARLQGLPKTVRDIAWKAQVRLCARYRRLVAAGKKTPVVVAAIAREMAAFLWAISRQVEPLT

SEQ ID NO: 311446 - protein, 458 aa, unidentified
MGRSKSTDRVRRAMAMVHPNAAAIDVGATTHVAAVKADRTPEPVRSFGTFTKDLHRLVDWFAECGVDTVVMESTSVYWIPIFELLDSRGFAVFLVNARDAKHVRGRKTDVSDAEWLQRLHSYGLLRASFRPKGRIVELRAYLRQRERLLEYGASHIQHMQKALTEMNVQLHHVVADITGATGLRIIRAILAGERDPAVLAHLRDSRCHATVETIEKALTGTYRAEHLFALEQALALYDTYQEKASSCDTRIEAVLKELSIRRGREAGPLPSPRQRMRRQPNGMDFDVRAALYALLGKDLTQINGLGPYLALRLIAECGDDLSAWPSAKHFTSWLCLAPSNKISGGKVLSSRTRPSASRAAALLRLAATTVGRTDTALGAFYRRLSARIGKAKAVTATARKIAVLFYNAVRHGMEYVDPGASFYETRYRARVIDNLHRRAKAFGFALQPLEPTAAIPVS

SEQ ID NO: 311447 - protein, 347 aa, unidentified
MLIIGCDYHPGFQQIAFLDTETGEADERRLTHREEAEQFYRTLKTRKVRIGMEASGHARWFERLLIELQFELWIGDAAEIRTKRVRKQKTDRQDAQLLLKLLMEDRFPRIWVPDAANRDLRQLLWHRHRLVQMRTRVMNQLHVVALNEGLRRKKALWRPAGRKELESIVLAPWARRRRQDLLDLLDQLTPKIQELTRALEEEVEKRPAARRLMTHPGVGPLTALAYELVMGTPERFHCGKQIASYVGLVPSEESSGDRRRLGHISKQGNVLLRFLLVEAAQVTVRSQPEWRSKFFHLAMRRGRKIAKVAMARKLAVHLYWMWRQGLDYGQLHKLGSHAGEPGHPDGV

SEQ ID NO: 311448 - protein, 412 aa, unidentified
MEVLHPHCAGLDIHKDTVVACVRHMAGGTVKREVRTFKTTTTDLMALSEWLSAEGCTDVAMEATGIYWKPVWHILADGDFKLILANAAHVKNVPGRKTDVNDATWLADLMAHGLIRGSFVPDEPTQEMRNFLRTRKQFVRERTSHVQRIQKTLEDANIKLDSVITDIMGLSGRRMIEALIAGETDPFALAALAHRRIKASQAELEAALRGRVSDHHRFMLRLLLQHIDAIDAAIGQIDQEVDAHVEPFRTAIQILSSIPGISDLSAEVIVSEIGIDMNRFPTEGHLISWAGLCPRNDESAGKRRSTRMRKGAPWLKTTLIQCAWAAARTKGSYLQAQFQRVRARRGAKKAIGAVAASVLTAAYHMLKNGTLYEDLGSDHFDRRAKGKQILRLVSRIQNLGFAVQITPIGAAE

SEQ ID NO: 311449 - protein, 321 aa, unidentified
MQHPGVFVGVDVAKATLSWSMHGSPGQFDLSNDERSITAWLQTLPEDAAIAVESTGKFHLNVVRLAHLSGRRAYVLNARDVFFFAKALGVRAKTDRTDARLIASYLAQHRAELKPWAPPTPLQERVQALLRCRAAVSTKRSSLRQALKEVDGLEGAVSELEHTFDALLAEIDGQITAQLASDEGLSQKRELLCSITGVGPQASALLTGLLSRIAFANVNALIAYTGLDPRPNDSGSKVGRRRLTKRGHPELRRQLYLCAFAAAHSKALGPLYRSIKAKGFKPTEALVILGRKILRIIWAVWNSGKPFEPSLALPKEACQQT

SEQ ID NO: 311450 - protein, 385 aa, unidentified
MKLVGIDVGKNSHHFCVMDKETGEFNVTPSSFSNNKEGFDFLINSLKPYSKKSILLGMEDTGHYHVALLKFLLSNGYTVALINPKTTDLTRKMEGGITKNDKLDTITICDVLDTPERKKQYRITKVDRFDLYEQRQLTRHHHNLKEELNIYCNRLQKSIDLVFPEFNTLFGSKYGVVYMNLLKTFGSAEAIASTDIRTIRKCFEIKGRGGRISLTAEKLKECAKNSIGISSEVETIQIKHLVSQIMLIKEQIAEIDKKIEELSITNNSPILSIPGISHFSGTSILAELGDIGNYSKPSRIIKFAGVAPYHYESSQYNAQHTAITKKGSKYLRKTLYQVILPVINNNPVFKKYYRLKISQGKGHRCAQGHCIRTVSYTHLTLPTKA

SEQ ID NO: 311451 - protein, 315 aa, unidentified
MLYDGIKGRIKTRNIQNNRHSVENIIRWLRLQHCGPEDVHVVMEATCVYHERLATELHDAGFRVSLANPHRSREFARGMGIMTKTDKVDAYMLACYAFLKKPHRWEPPAPEIRYLGALLRRRDVLLGDALREENRLEKYLSTDTPADIISSCRRMAQLLREEVSNIERQIKAHIKACPALRRDYTLLTSIKSVGPQLGMHMQVVLRSHNFASAEQAAAFLGVVPIEKRSGTSVRSRPRMSKIGPPQLRAKLYMSALCGKIYNKRMRNIYDEMCLRGKPKMVAIGALMRKLVHWCYGVLKTGTVFNDESLKQVLST

SEQ ID NO: 311452 - protein, 354 aa, unidentified
MNTTQNSTKSKIVKVIGVDLAKDHCDVIGYDENGKICLRLDGCSYAKLREILANLPQAVVLMEACKGSMFHARSIADLGHEVRLVKGADVKALRNVNHKNDLRDAAYIANLYFVPGIKYVYIKSQQQQSLQFLQNEYKSLQELRIQVGNQIHAGLEEFGCPVRKSSKFIKTRMVAHLEKHAELIPEDVMASFKRRREIWLNLLQQEEEAKRRLEQVAATDANAERIMTVPCVGPQTAVGLLVHVGVDFGRFKNSRQFAASLGLVPKQNSTGGNNTLNHITKCGPKSLRSNLVQCAQLVLMYAEKWKGNFGDWVRKIRDSGKKHGVIVCAIAAKLARIIYRLMKDKVDYTPILSC

SEQ ID NO: 311453 - protein, 391 aa, unidentified
MEVLYQSCAGIDVHQANIVVCILHGPLTSTRPKREMATFDTTTKGLRACHDFLSQFHVEAVGMESTGVYWRLVWHALCDDFELILAQPAHMKAIPGQKTDKKDAHWIAKLTRIGLLPRSFVPDETIQELRELTRQRKHYVESRNRETNRIHKFLQSGGIKLTTYIEDIMGLSGRNLLQLLVDGTPITPRIVHQSVYTSLKKKVPQLLEALDDYFSDHHRFMLKQSLEIYDFYQKQIELLEERMNVYLSQYEKHVEILDSIPGIDVITASVIISEVGVDMSQFPTFGHLASWAGLCPGNNESAGKKRSTKIRHGNSYLKKCLCQAAFAVKRQKGSPLAERYYQIQSRRGSQKATIALAHQLLKIAYILLKEQMTYPEFLAQKKKTTRDELVA

SEQ ID NO: 311454 - protein, 392 aa, unidentified
MLYLAIDQHKAQLTINLRNEHGDVVQKGQVSTKHASIDDFFGTLVKKARPHRGFMAIVEVCGFNDWLLEKLKKYGCKEIVVVQPDKSSKTKTDKRDANALGELLWNNRKRLQGDQRPNGIRRIFPAEPVDAEVRQLTNFRQFLITQRTKVINKIKGIFNKHNMLQDAPTEGIRTKKFRKWVTEVKVPDLDRMEIDIHLEHWQMYDKQIVEVEAQLVRRSETNPNMLKLKSIPGISAMGAIILLSRIGDIKRFKTPRSLANYFGLTPGCHNTAGKQRIGGITKAGSPAARQVLNFSILHVVRKDKAMREWYKKIKNRKGTKTARVAGMRKLATIIWHMLRWDKEYQFRYDPPTTVKKRNGKKPSKKVLEGMNNKNQRLKKGKTPSARKAKPKA

SEQ ID NO: 311455 - protein, 341 aa, unidentified
MEEVSTIGLDLAKHVFQAHGASASGAVVFRKRLRREQVLAFLAGQPRCLVAMEACASAHHWGRAIGELGHEVRLIPPAYVKPFVKRQKNDMADAEAICEAAQRPTMRFVAVKSEAKQAAAVVFRARDLLVGQRTQIINALRGHLGEYGLIAPQGPSHVERLIAQIEDPASGIPEAARSCLVRLVEILRRLQDEIAELNHEIAARAKADGVARRLMTVPGIGPLIATAIEALAPPPESFRSGRDFAAWVGLTPVQRSTGGKERLGRTSRMGERTLRRLLIIAASGVVRWAKRKGVPAGSWLGRMLARKPPMLVIVALANKTARVAWALLAKGGIYRAPAVAA

SEQ ID NO: 311456 - protein, 483 aa, unidentified
MSRDEFRPGNPLMAGTEASAERCALVRQCILRCRPVRGLFYKDCAGPCVLAQQQRSGDVEHERVDYAAWIGLDWGSYKHALCLKPADSSSVERCTLEQKPEALHQWFMNLRARFGERKVAVAIEQTRGAVINFLLGFDFVHVFRIHPKSLKNYRDALHPSGAKDDPTDAELLLQFVTLHQDKLKPWVPGEPEIRMLLRLVEFRRKIVGKRVRLTNELTQVLKEYFPGALDWAGELDKVMACDFLLKWPTLEKLQKSKPEAIRRFYQEHGSRRSKVIEDRLRQIRSALPLTRDEPVIETSVLMVKSLAPQLHSVFDAIAQFDERIKQVFQKHPDAQIFSSFPGAGPSLAPRLLAAMGSDRSRFNSSAEVAEYSGIAPVTERSGKANWVHRRFACSRFVRQSFHEFAGQSILQCGWARAYYDQKRTDGKRHHAALRALAYRWIRIIYRCWKDRVPYNEQTYMESLRRKRPSWLAPLVAVSESLKT

SEQ ID NO: 311457 - protein, 347 aa, unidentified
MRYYTNQHKHYCGIDLHTNKMYVCILEQTGEPVFHRNMKTKPELFLKAIEPFRDDIVVSAECMFAWYWLADLCEDEGIPFILGHALYMKAIHGGKSKNDKIDSRKIAGLLRGGLIPQAYVYPRKMRATRDLMRRRNHLMRKRAELFAHTQNTASQYNFQEPLGRIAKPKNRQDIIDKFDIPCVQMSIKTNLEMIETYDRVLGTLERDIVKSANLHDPVSYALLKTIPGVGRIIALNLLYEIENIGRFPRVQDFVSYCRLVKCAKESNGKKMGTSGKKIGNAHLRWAFSEAAQLFLKGNEPAQKYHQRIVNKHGKGKALSILAHKLGRALYYMLKNKVAFNMNRFLTN

SEQ ID NO: 311458 - protein, 341 aa, unidentified
MQNVTLIGIDLGKHGFHVHGQDRHGKALLRRKFDRKHLIAFLANFQPCTIVMEACAGAHWMARQLSALGHEAKLISPQFVKPFVKGNKNDFIDAEAICEAASRPSMRFVTPKTEAQQCLSALHRTRESLMRDRVKAINQIHGFLLEFGIGLPKGPAIIKRLPSVLAEHALPARLVSLIERVRAHIKYLDEQLDELEKELGRQLHEDDLGQRLMAIPGVGPITASALSAEMGDGKQYSCGRDFAASLGLVPQQHSTGGRANLLGISKRGDKNIRRLLVQCARSYMQHLDRHTDRMAQWARAMLGRRHSNVVACALANKLARTAWAMAAHHTEYKMQEAATSL

SEQ ID NO: 311459 - protein, 382 aa, unidentified
MAGTEPHAWGTGLMDDITYVGLDVHKATVCVAVAESGRGGEIRQVGVFENRPEILCKMAARLGKGGRRLSFCYEAGPCGYGLHRLLTGCGHSCIVVAPSLIPIKSGDRVKTDRRDAMMLAKLHRAGELTAIWIPDAAHEAIRDLVRARATAGQVLSKARQHLQGFLLRHDRIYRGVRAWTLAYRRWLTTVRFEHPAQQIVLQDYIHAVEDAEARRDRLTRQIEEMLPSWSMAPVVTALQAMRGVALVVAVTVVAEVGDFRRFANARQLMAYLGLVPSEHSSGSTIRRGGITKAGNALARRVLIEGAWTYRMTARVSRKLHDRLEPLSAAIRDIAWKAQVRLCARYRRLAAAGKPKVVVTTAIAREMVGFIWAIARIAQPALA

SEQ ID NO: 311460 - protein, 356 aa, unidentified
MQRYEKYTDKGNQEKPPLYVGVDLHRLSWHVTVRSEDGEMFCGGIPGKWEALRKLFDRYQDYQISVVYEAGYFGFWLHDRIVAYGAECVVTPPSLVPQEYGNHVKTDRRDSRKLAYFLAKGLLKRVWVPSEEERYHRQVIRRRRQLVGDRVRVQNRIKAELRFYGIELPEVIGKWTLAYVENLRRLRFNNRWMQESFQRLIEEYDFISQQVVRQTTVVRELAATELYQERVEILRSVPGIGLIAAMEYLLELQDVERFRRSEQLAAYVGLTPSQYSSADKVRMGRITCIGKNTLRGTLVEVAWRVIAKDPAMRQKYEAIKARAGSKRAIVAIARTMLLRTRRMLIDRTQYVTGLAA

SEQ ID NO: 311461 - protein, 355 aa, unidentified
MTGGVSRPERTSNNMSNANAYIGVDLHKKICFITVMDEAGKIKRQTEIKNEKNKIFKFFKRYSSASVAVESTMNWMPFYENLESMGCNVVLSNPLATKAIAAARIKNDKVDSRVLADLLRTNFLPTAYIHPREIRDLKELVRQRMNYVNMRTQIKNQIHSVLFKSGVSHNFTDLYGKAGMEFLKTLELRDVYRQQLNWHLTALSNISIQIKEMSDIIEETAQADCDCRLVMTIPVIGYFNALLIKSEIGDISRFTNANKLCSYAGLIPSTYASADKVRHGRITKRGSKWLRKALVDSVTSGCRHEGRLAYVYRKLKKSKGTGKARVATARKLCHIIFAMLSDKQPFREFTPVKQR

SEQ ID NO: 311462 - protein, 412 aa, unidentified
METIVERPAALDVHKAQVTACVRVPGPDGERVQEIAEFQTTVRGLLALRDWLAERRVTQVAMEATGVYWKPVWYVLEDDFELLLVNARHVKQVPGRKTDVSDAEWLCRLLEAGLLRASFVPPKPIRRLRNLTRYRKTQIQERQREVNRLHKALEDAGIKLDCVASDILGKSGRDMLDALVAGTTDPVVLANLARRQMRKKIPLLQEALQGRFDEHHRLWIGSILRHIDFLDEQIEQLSVAIEEQIRPFWPAVELICTMTGFQRRGAECVIAEIGVDMSIFATHRHLASWSGQCSGNDESAGKRRSGKTRNGSKWLDYALEEAALAATRVKDGYLAAQYRRLKPRRGHKKALGAVKHTMICAIWHMLTTGETYRDLGADYFTNRDPERQTKRLIAQLERLGHRVTLTEGAAAA

SEQ ID NO: 311463 - protein, 437 aa, unidentified
MPPITARLLDPTFEAIPDPFYGYDKRQEPLPDRLYLPCGIDPGKKECGVAFLHPLPAHDEVLAHKTIRNCHLEDAQWLLASGNKLADPFGATPAYVFESTNNLWRPLWRFVQSQGGVTATVAGRQTAHSRSTKTRKAQNDFIDAKNIAKVFKDGYSHASRSPKEPIASLREYERLHLFVTEFAVAIQNRMNNIRFDIFPEFDGLFCKDKTLATTLALMRSELVHPQKLLAASPEALFDLVHQASHGKLGDERVQAILRAAENTFALPYAVEGFSFGLKLLADIYAYLEEVILPALKERIVDCLARVPFQHYLDEIPYFGPIVIGTLLGELGDPAWFPTVDSVVAWFGLDPAVSESCHQPSGPSHLTKRGTKYGRRMMWLVARNWAQYRPEGRDFFKRQVYAYHRSYDAGIVMLAAKLLRAAYAMLRDGSHFDLDKLF

SEQ ID NO: 311464 - protein, 370 aa, unidentified
MKYTQNEKILQVTEDTLIAGVDIAKESHYARAFDYRGVEYGKYLRFENNREGMTEFLKWAKDLIERHKKNKLIVGMEPTGQYWLCFAQYLKDNNIKVVLVNPFHVKRSKELDDNSPTKSDRKDPKTIVMLVKDGRYVEPTITEGVYAELRVAMDIKDRLNKQIGMTKNQITRWMDIYFPEFNTVFSDWEGKAALITLREIPTPEKIAEKSTREILSIWKKEVQRGVGEKRAIKLIETAKESVGKKQGIKMAEYEIKTLTKQIQKLGGLNLVGNSSGKYKGETTISKRGRKRLRRVLFNAVMALVAKNEEFRELHKYYTTRAQNPLKKKQSLIVLCNKLIRVFYVILKKGVIYDPIKMMKDIKRPALQEAA

SEQ ID NO: 311465 - protein, 427 aa, unidentified
MAYRIAAIEVHKKMLAVVVAEVEGAGEYQFERRKFGASPEQLQVLAQWLVEQEVEEVVMESTAQYWKPVWGTLELYWKPARQQREGATKMSGKLHLCQAKSNRGPRGRKNDFADGERMIKRLVAQELVLSFVPDPEQRLWRTVTRRKQQLTRARVRFKNQLESLLEQAHIKLSSFVSDLLGLSARRMLHAIAEGETSPAALAALGDCRLRATPAQLRDALGACTQLNGVYRRLLKMALEELKLLEEQMEQLDREASHLMQDHQDAVQRVAEVPGFGVESATQMIAEVGAEASAFESQKDLASWVGVCPGDEETAGKSKSTRSPKGNSTMRRLLNQSAQSAVKVKGSIFEITFHKLLPRLGYKQAIWAIAHRLCRLLWMILHKGIRYQERGPAVSAKSLRTRTARMIKALQKLGYRVEGGPLPAGSPA

SEQ ID NO: 311466 - protein, 330 aa, unidentified
MKNYLDVIGIDVSKLTIDAHIYNRAVHRVFSNTPKGYKALLSWVQGYLEEQSFFFCFENTGHYSTNLSVYLSENNIDYVEESPLAIKRSVGIVRGKADRLDSAMIARYAWLHKDELSLSSPREQSIQELGRLLSFREQLVRDRTGKMSSLKEMQALLSSPSTDSCCKIIKKTIHYLTKQIEALEGRINELVKCDETLDKNYKLLTTLKGVGLILSCQMLYHTSNFKRFDSWRQFSSYCGVAPFEHSSGTSIRRKNRIHHIGDRKMKTLLTLASVSAIQCDKELKQYYKKKLAEGKPKMVALNNVRNKILSRAFAVVKRGTPYVELQKFVA

SEQ ID NO: 311467 - protein, 353 aa, unidentified
MFVGMDLHKKSTEFIELDEKGNKIREDRFLNTTEELDSFIESLDEDTKVVMEASGVWNFVYERLEDAGVDVKLAHPKQVKAIANAKVKTDKIDARVLAHLLRLDYIPEAHVPPRDIRDLRTLVRHRVSLVRLRTQVKNKIHALLAQEGIRHPFTDLFGKGGRIFLRSVELKKHRQRALENYLSVLDNLGQLITGTDESMEEIGDDRFEVELLKTIPGVGTYTALVMLAEIGDVKRFNSPKQLFSYAGVVPRVYSSGETVRHGHIIKDSNGLLRWVAVQTAHRAVRSENKYRRFYLKLKSRKGSKVAIVATARKILESVYWVLIRKEPADIHGRHSKPWFVHGLEATDKMMRAA

SEQ ID NO: 311468 - protein, 542 aa, unidentified
MKRQNYQFQIADFPIHNSPFSDTVFKLNHSDSSEIGAVNKFAAAEAKTVNKSSDIAKTLRPVKTVAGRMPHHSARSLCCHPARVYRRKPAELRGPVQKSERTSPHEGFCISVTGDRTFGGRQKPPMKNWNEITHYLGFDWAKDHHQVVIVDRQARIVAEFQFEHSLEGWNTWRQRVRDYPALAVAIETNQGAAVEQLLQSGVTIYPVNPRSAKAYRQRKVPTSNKTDQLDAWSLAEALRMEGQNWRQLQPLDPLIQELRLLCRDELHLIAQRTSLINQLQQALMEYYPSALEAFDDWTVPATWKFLERFPTPDALSGAGLKKWNAFLHCHKLYRQNTHERRMAVFSKAGQWQVSEAIQRAKSFLVLSLVKCLIILEKQLQQYRKRIEELFASHPDHHLFGSLPGAGPKMAPRLLSEVGDDRTLFPDADSLRCYAGTAPVSYQSGQIHKVYLRRQCNKPLRCAIHLWADLSRRWCQWAQIYYQQLRKRGQSHAQAVRCLGHRWLKIIWKMWQTKTTYDEALHTRSQHQHGSWVLQLMDHKTGE

SEQ ID NO: 311469 - protein, 504 aa, unidentified
MDETVWVGIDVGRHEHHAAAVDEVGTVLWSRRLPNDQPAIEALVDRVADMKLVVWAIDMTAPESALLRGVLAARRQHIRYVPGRVVHSMTGAFAGEGKTDARDAVVIAQTVRLRGDLATITVPDDVAIELDLLTGHRNELVAERTRGINRLRGLLTRIFPALERCFDYSTLTGLAFLTRFATPAAIAVASDEEIYDHLRGHGVRRPTIPKMITKARVAVAAQTVTLPGEATTALLLQQAAASLMALTRQIAELDKQITEVFRRHRHARILESVPGIGTRSGAEVVAITGGDLTSFGSAAKLAAYAGLAPVPHDSGNRRGTLRRPQRYHRGLRKVFYMAALNSSQRDGPSREFYQRKRREKRSHVHALIALAVLTREVGYAAGWWLSSECCVTAVVIVVMQPDRELCAAFGVAGVEPVVGPFVGQGAVKPFDLAVGLRPIRPGSTVDDRWPERTGEYMRLVAGTVVGQHFPHLDPALGKPLLGAQPELSGGLFAFIGQDLRVRQP

SEQ ID NO: 311470 - protein, 356 aa, unidentified
MQTQVTKKIDFKGKDLYIGLDVHKKSWSVTILVEGMEHRTFTQPPDPLALYTYLQKMFPGGTYYSAYEAGFCGYGIHRALNDLGIKNIVINAADIPTSQKDQIHKLDPVDSRKIARALEKGLLRAIHIFDRDREELRSLNRTRFYLMRDLRRSKNRIKSFLQYYGIPIPPEYDNNQWTLKYIAWLKQIQMKTSSGQDAFSNLISSYEYHREQILALSRQIRIRMREYDNELYNLLKTVSGIGPLTSSALITELGDINRFPHINHLSSFVGLVPRVKQSGETSYNAGMTFRCNEYLRTLLIESSWQAIRLDPALMQYYHQHVINNKGQKVIIKVARKLLNRIRYVMKNRQPYVTGVA

SEQ ID NO: 311471 - protein, 391 aa, unidentified
MPNTLIVGIDISSQSNSIFFIDDAGNHLIKKPFSLPNHQEGANELIKRVIDCLSQYNLSYVKFGMEATSHYGWHLHLYLASSSELLPYKPTFYVLNPSVVKGFKKIYTFLPKTDNIDAIVIAECVRFSKLNPTPLPDFKYAALQRLTRMRYHLVHNLTREKNRALNLIYLKFSTYSQECPFSDIFGKASVAIIENFTPDDIASMPLEDLIKFVSDNGNNRLSDVNKIAEILKTAAKRSYRLHPLLAESNSLALSMTLENIRFMQEQLKKLDKEISKLLKAFSQTLTTIPGIGDVLAAGIIAEIGDIKRFKNEAALAKYSGLVWTQYQSGNFNAQDVSLAKCGNQYSQNTILLKLLTVGCSTQYATKLSTTRSSQRLPNISINVPSSSPQDV

SEQ ID NO: 311472 - protein, 317 aa, unidentified
MGEGSVATTREAMQDFFAALPTARVILEVGTHSPWVSRGIAAGGHEVIVANPRRVRLISAAVRKNDRIDAVTLARLGRADPALLSPIRHRGETAQADLGQLRARDALVRTRTLLINHVQGTVKAMGYRVPSSTARTFALRARTALPPVLAPALASVVDTIAHLTEQIAAADKSIALLARERYPETARLRQIAGVGPITALCFVLTLEDPTRFADSRSVGAYLGLCPRESQSGDRSPQLRITKAGDSMLRRLLVTSAHYVMGPFGPDTDLRRWGLAIAARGGPNAKKRAVVAVARKLATLLHHFWVTDVVDQPLRQAA

SEQ ID NO: 311473 - protein, 370 aa, unidentified
MKSIIYVGMDVHKASFTLSCFSVTTQETFATVKISPDANAIKKYLDGVSLSRSEECEFVCGYEAGCLGYTLYHQLTAMNIRCVIMAPTTILRNSKRVKTDRIDAENLARCLAYGGYKSVYIPTAQDEAVRDYLRMRDDHKIMLKKIKQQINAFCLKHNKIYPGNKSKWTQAHVKWLNALEFDGYLQDAFNEYMITYRELTDKVERLESQIEQLAELEEYRDKVKKLICIKGIKTHTALSLIVETGDFSRFQSAERYASYIGLVPGEHSSSEDQNRLGITKAGNRHMRMLLTEAAQCYSRGVPAKKSKDLKSRQKGASPEVIAYADKASIRLRRKYIRMELVNKKKANVAKTAVARELACFIWGMMTNNIA

SEQ ID NO: 311474 - protein, 407 aa, unidentified
MNAVGIDVSKGKSTVAVLRPFGEIVVSPFDVSHSPKELSKLVTLLKTLNGDTKVVMEYTGNYYLPIALFLRNNGFFVSVVNPILVKDYSTKSLTVRKVKTDKKDALKIASFALDRWNELSPFSAQSEARLLLKSYNRQYNQYNKLKIILKNNLIALLDQTFPGANTLFSTPTRKSDGHEKWVDFVLKFSHSECISKKSFSFFLKSYLSWCKKFGYKFSKSKAQAVYDFACNCSPSLSFSDSSVLLVSNAIIQLNSINETLASLASEMNKIAATLPEYDSVMSMFGVGSVLGSQLIAEIGDVSRFPNKKALVGFAGLDASPFQSGNFNPQSRSISKRGTAALRKTLFQVMSVVLQRAPTNNVIFQFMDKKRSEGKHFYVYMTAAANKFLRIYYARVTEHLNLFTTTTA

SEQ ID NO: 311475 - protein, 309 aa, unidentified
MEHFVGIDVAKDRLDVHLRPSGETFAVARDGEGLAQLVDRLQTLAPQLVVMEATGGYETIVASAVVAARLPLAVVNPRQIRDFARATGKLAKTDRIDAAAIAHFAEAVRPPVRPIADAQARALGELVTRRRQVIEMMVAERNRRRRVTQSRVLRAIDRHLELLQTELSELEHDIDGAIRKSPAWQADADLLASVPGVGKATLRTLIAELPELGRLDRRKIAALVGVAPINRDSGTMRGRRTIAGGRPTVRSALFMAALVASRANPIIASYYVKLRAAGKTGKQALTACMRKLIVILNAILRDRKPWQPA

SEQ ID NO: 311476 - protein, 392 aa, unidentified
MIFVGIDIAKDKHDCFISNSDGEVLFNAFTITNSLEGFNDLYQKISSLTRDFSNIKVGLEATGHYSYNLLRYLIDKGLTVYVINPLHTNLYRKSLSLRQTKTDKVDARTIASMLMSDVNLKSYSDTSYHNEELKSLTRYRFDKIKQRAKLKSSITRLINILFPELEKLVPTLHMASVYALLSEFPGASYVASAHLTRLTHLLVKASKGHYDKNTALRLRETARNSIGSVMPAKSLELKHTVKLIQELTFEIDEIEAAIKQIMDEEIQSPILTIPGISYRMGAMIIAEIGDFSRFDSPDKILAYAGMSPSTYQSGKMDNCHSHMEKRGSRYLRYALYNATKYVCHWDKSFGAYLEKKRSEGKHYNVALSHAAKKLVRTIFAMEKSGQAYRATI

SEQ ID NO: 311477 - protein, 316 aa, unidentified
MTSTRFVGIDISKATFDVAFSADLRAVYSNDPAGFTQFRQTLADDDHVVMEATGTYFLKLATFLSAQDITVSVINPAVISYFARMRLVRTKTDRVDADIIREYGCLEALPAWTPTEDVFIELNQLDSHLNGLQGDRNRVIGRLEALQQCAKINAYTLEDLQQQLTDLEVRIKQTEKELVVLTQAHFPELLTLLTSIKGIGQKTAIMFIVLTRGFTRFSSPKHFASFLGLSSFIRQSGTSVRGSGGISKMGNPRMRQLLYMAALTARTRNSACKTFAERLAGNGKPPKVVRIAVANKLIRQAFAVCLKGESYSECYA

SEQ ID NO: 311478 - protein, 342 aa, unidentified
MKISKEVIRMGVDLGKNTFHLFGVDESDTAVVKKKLNRKKLLKYFANLPPCLVGMEACGGSHYWARELTELGHEVKLMSPQFVKPYIKGNKNDYNDAEGICEAVGRPNMRFVTVKAIEQQDIQGLHRIRQSVVKQRTALANQIRGLLGEYGIVVPKGIGKVRSRIPEILEDGENGLTDRFRGWLAELLAAFRTLDERIKKYDQEIQREHAANEVCQRLSAIAGVGPQSATAVVATYGDCKQFSDGRQFSASIGLVPRQHTTGDKPILLGISKRGDKYIRTLLIHGARSVINRVEGKDDRRSRWLQSLVARGGKNKAAVALANKNARIIWALLTRGECYRPAV

SEQ ID NO: 311479 - protein, 306 aa, unidentified
MTEYIGLDVSMKETAVSIRRDGARIWRGKCASDPNVIAELIRKRAPTAKRVVFETGPLSVWFFHALRAEGVPAICIDARHAKAALDMAANKTDANDADGLAHLAEVGFFREVRVKGFDSMLARTLVAARARLVKMTTELSNQIWGIMKTFGLVVPAGKGSTFENNVRSLLTNHNDLAGIVLPMLDAWTGLRTRAAELGRQLLADARQSRACRLLMSIPGVGATTAISFATAIEDPGNFRKSRDVGAWIGLTTRRYQSGEVDYDGRISRRGDRHLRRLELYNQPGIAKQILRPLVITWGNRGSELRI

SEQ ID NO: 311480 - protein, 339 aa, unidentified
MELYIGIDLHSNNAYVGICDREDRRVYQRRLPNVADVILAELEPYKEKVTGVVVESTYNWYWLVDSLADHGYRVHLANPAAIQQYKGLKYAGDRHDAFWLAHLLRLGILPEGYIYPQEQRPVRDLLRKRGHLVRLRTSLINSLQGIISRNCGSRLSASKIKQFRENHVATTLADKEDVLLSGGISKETIDHLTGQIRKIEAIILERVKLQPPFVALQNIPGIGKVLGLTIMLETGDPHRFAKAGAFASYCRKVPTSRISNDKKKGGGNAKNGNKYLAWAFSEAAEMARRYDDRARAFYNRKAARTNFMVAHTALAHKLCRAAWQVMSKEVPYDPDKLFA

SEQ ID NO: 311481 - protein, 408 aa, unidentified
MEVVYRCCCGIDVHKKIIVACLNQGGEQSLREFGTTTSEIKSLATWLTESGCEMIAMESTGVFWKPLYNLFELMDLDAIVVNAAHMKALPGRKTDVKDAEWIADLLRHGLLKASYIPSREQRELREITRYRKSLTEERCRETNRLQKILEGANIKLDSVVKDINGKSARKLLEKIIEDDVPTSEEEISKMIHGRMRSKLGQLVTAIEGITTPLQRKLLAQVIDHIDDLNRRIADLDKLVQDYMDEYEAAITALCDIPGIARRSAEVILAEIGLDMSRFPSAAHLCSWAGVCPGNCQSAGRRKHGKTTKGNKPLKTILTQCAKSARSVKGSYFSAQYQRIAARRGKNRATLAVAHSMLIAIYHMLKNSAPFRDLGSDYYDSFNRDRKIHSYLKRLKALGWEPDVLPGSA

SEQ ID NO: 311482 - protein, 448 aa, unidentified
MSKPQVIDDEEYERVFEKVAAVDVAKKDGMVCLRQAHPSGAGGRQSTVWTVPATMNAVAGLGEQLAEAGVQKVTLESTSDYWRIWYYVLEAAGLDVQLVSASAVQQLSGRPKTDKLDAMWLARLTEKGLLRPSFVPPAEIRALRQYTRARTHLTQDRTRCFQRLEKLLEDALIKVSSVASKLTTASAQDMIRAMIAGERDPQILAGLARGRMKAKHDALAEALTGMFAGHHADIAQILLDQIAFLGTQITTVTTRIEDAIDAIPAAWGAGPDGAAATIAATGPDAAALPAIMRLEEIPGLSAELACSIIAETGLDMSRFPTASHLVSWAGLCPRTLQSGPRTRHGKGQGNTYLRGYLGQAAMGAAGTATFLGERHARIARRRGKARAQVAIARSILVIIWHLLADRGTRFADLGPGYYETKIDNNRKARNHIRQLEALGYQVTITQAA

SEQ ID NO: 311483 - protein, 352 aa, unidentified
MAVLSEVVDHVIGVDPDRDRVTAAVVSVITQGELAWETFPATRRGYGQALRWAKTLTVDERRAWAIESTGSYGAGLAATLAEMGEFVIEFDHPSTRASKDGAKSDSLDAVRAARETLGRKSWATPRSRGLREGLRTLIVARDSAKLARVAAINVLKALIVTAPVDLREDLRGRSLGQLVDRCIRLRPDTAADPEHGATKLSLRSTATRVRQLTEECRELEQAMLPIVREICPALLDEPGIGTLVAAQILVSWSHAGRCRDEAAFARLGGVAPLEATSGQNQTRHRLSRGGDRQLNRALHTVILARAKVHPETREYLARRIAQGKTKREAMRCLKRYYARHLFRLLESTPMPS

SEQ ID NO: 311484 - protein, 354 aa, unidentified
MKYYTSTTQFNCGIDLHARQMYVCLMDRDGKKLVHTNIKNNDFDYFLKLVAPYRHDLTVCAECMFGWYWLADACQAAGLHFVLAHALYLKAIHGGKNKNDRIDSEKIAHLLRSNLIPPGYVYPAAKRPLRALLRQRLLYVWNRSELLSRIQSHQLAHNRPTTRQNSGNREAWTEQLLVSEPDPVRQFALQNDLALIGHYDTQLAALEKELLKLTKQTATRDFTLLQTTPGIGDYLGLTILHEIGDIARFPTVKDFLSYCRLVKGTVASAGKIKGLRGAKLGNPYLRWAFGEAAVIAKRDHAVLGPLAQRLEARLNNKFKANTVLAIKLARAVYFMLKTKTVFDPERLVAALSKN

SEQ ID NO: 311485 - protein, 430 aa, unidentified
MKSNTQNTKIEAITETTLVLGIDVGSETHYARAFDYRGIEYSKKPFKFSNDEAGFVTFKAWIPDIKEKHGKDKVVPGMEPTGHYWFNLGKFLQDNEMKPVLVNPHHVKKSKELDDNNPTKNDRKDPKVIAGLVREGRYMIPYLPEGVYADLRTASNMRFQLQAELTRIQNRISRWFNIYFPEYKTVYGQPDAKSGMLILKVAPLPEDILMLGIDGVNQIWRDAKVRAVGKARAKTLIEAAEHSVGSKEGEISARMEIRMLLEDYESRNTRLQEVVALIEEPVKKIPMAEKLLEIKGVGIKTVSGFLAEVGDISRFNNPKELQKLAGLALVENSSGKHKGETTISRRGRKRLRYLLFEVAMSLVSKNPEFRELHSYYTTRKLNPLKKMQSLMAVAAKLLRVFFAMLTKGVDYDPKKLVGDIKRPAVYLQVA

SEQ ID NO: 311486 - protein, 342 aa, unidentified
MAEVTIIGVDLAKNVFQVHGAATDGSVLFRKKLSRPQFARFMAEQPSCCVAMEACASAHHWARQMTQQGHEVRLIAPHYVKPFIKRQKNDAADAEAIVEAAQRPTMRFVEPKSADQQARAVAFRTREQLVKQRTEAVNALRSHLYEFGHVAPEGIGYVPRLERVVADPDAGIPDLAREICRMLLEQINHLTDRINALKTRIATISNEVEMPRRLQTLPGVGPITALAVETFAPPMEKFRRGRDFAAWLGLVPRQHSTGGKQKLGKTSKMGQRDIRRLLVIGATAVIRWASRRRAPKGSWLARMLKRKPIPVVAVALANKMARGIWAMLSRDEDYRGPVVIGA

SEQ ID NO: 311487 - protein, 338 aa, unidentified
MKITTIGLDIAKSVFHAVGVDKAGKLIKKKMLRRKDLLPFVAKIEPCLIVMEACGGASYWAREFEQFGHVVKLIAPQYVVPFRQGNKNDYNDALAIAEAAQRPNMRFVKPKSVEQQDVQLLHRIRERLTKQSTALINQVRGMLAEYGIVITKSKSAFKAQLPDILVDEANMLTIKGKAIFYQLYDEVIDIEKRLKSCDTQVLNETHNNVICQRLQTIPGVGPVTATAIYAAVGDGKDFSNGRHFSAWCGLVPKQHSSGGKDNLLGISKRGNAYLRTLFIHGARAVLRHSGSKSDKLSCWAIQLAERRGFNRACVAVANKLARMSWVIAAREEEFRLAM

SEQ ID NO: 311488 - protein, 414 aa, unidentified
MNCYCGIDWAEGHHDVAIVGDDGKLVAKRRIGDDPGGFTELTGMLAEAGDTPEDPIPIAIETPRGLLVAVLRASGRPVFAINPMAVARYRERSSVARAKSDHADAMTLANILRVDAHVHRTLPADSELALGIAVLARAQQNAVWRRSKAINELRSALREYYPAFLNTFAGKSATNLANAHARAVLAIAPTPADAAKLTKARVSAALRRAGRKRGIDGLAANIVERLRVPQLRQPGIVEKAMGRQALALLAMLDAACAGADELEQVASEEFRKHPDHAIITSFPGLADLTGARVLAEIGDDRARFADQRALKAYAGSAPVTRASGKVTSITYRRIKNDRLAAVGWVWATYAAINPGPARGHYRRRRDHGDRHSAALRHLFNKMLGQLYYCLQTSQTFDPIKAFGQPYLAPEPAAA

SEQ ID NO: 311489 - protein, 342 aa, unidentified
MNVSYVGVDLGSSNFHQVVINHSGTATLKREFTTSEANLIKAFADLHGEIHVHLEAGELAPWASEIIRPLVTRVVCSHPQTNAWIAKDRDKCDRIDAYKLASLLRLNEFKEVHYPREPLRRDFKTLVQHYDELTQQQARWKTKLKARLRMQGIIVRGEEVFSARGRKAVLEQVKSPVVRTAIKQLYAVLDQSIASQTEAQMLMLRAAQALPEIKIMRTAPGVGPIGACRFSAYIHTPQRFSSTRKLWKYCRLSVSHRSSNGKPLRRPRLDRMGCGRLKDVSRKTFEAALRRRDNNGFKRAYQRALETTHDATHARLTVQRKIVSTLRAMWINQTPYCDELMR

SEQ ID NO: 311490 - protein, 397 aa, unidentified
MYIVGIDIAKRKHEAAVIDGEGTVIIKPFSFTNNCSGYNRLLAMLAKAKLPLDEVSFAMEATGHYWLALFTRLQKEGFRVQVINPVQTNSIRSFYIRQAKTDPRDALLIAEVIRFGHFSESTLHPENIYELRELCRGRHAIVSMQADVKRKVVALLDQVFPEYETAFTNLFGDTSMAILQTCPTPKELSEMPFEELCHLIEVSSHKRFRMAKAQELQALARNSFGFAMAGDVFSTMIRLYAKHLDFLKQQVREMDRKIAEIMETLDTPITTITGIGPTLGAYILSEIGDINRFSSAAKLAAYAGIDPTMRQSGEYNGVRNRMSKRGSPYLRHAIWLAASSAVLHDPALKLYFQKKRDEGKPYMASVGHACRKMVSIIYAVMRDNKAYTPYIPNEISA

SEQ ID NO: 311491 - protein, 337 aa, unidentified
MEHFAGLDVSMEETHVCVIDREGKVILEVRTPTVPKAIAAALAKGPAVERVLFETGRMAPTLFHGLTALGLPVVCVESRQAYQALRSLAAHKTDRNDARGLAHLARTGFFKPVHVKSLPSHAVRALIIARKKLVGQRVTLENQIRGLAVAFGVRLPRGLSPGFAENGMAVGRGIPGLDGAIRGLLAARDAILKAIVAIDADMKTLERSSAACRRLMTIPGVGRLTALAFAAAIDDPGRFRRSRDVGAYLGLVPRRYQSGEIDYTGSISKCGDGRLRTLLYEAANVMLTRYRGSLALKTWALDIARRSTMRKARVALARRLAVIMFAILKHGTEFEPA

SEQ ID NO: 311492 - protein, 349 aa, unidentified
MSYIGIDLHRRFSQVHVITAPAQHETTHRLPNDELAVRQFFSALEDGCKVAIEATGNWYWLVDVLQDMGCDVALSNPLQTKAIATARIKNDKVDARILAHLLRADLLPTCWIPDPKQRSIRDMLRIRLRLIVFRTQCKNLVRAVLAKYNITLAAQQIWQGSGREELLQTVLPASYPEVIQQALVLIEQLTAQIQYWEERIHEQVTVTPAAQRLLTVPGIGELSALTILYESGPITRFPSAKHYVSYAGLVPQVKASADKCWHGRLFKQANMYLKRTYVEVAQVSVRTRATDARLKCFYHRTMKRKGKAIARIALARKIAGLVYHMLKHNINYTTCMARNKMAEQASVTP

SEQ ID NO: 311493 - protein, 400 aa, unidentified
MDRNRIVAGLDVHKDSVFLCIMRYDEAIIFEKTYGTLTTQLRQMRDDMLCHGVTECAMESTAVYWVPVWNELCDYMTLRLANPHFIKQLPGRKSDTRDAQWIAECQLKKLIKESFVPNPVVQDMRKLNRRIFNLNEDLTYNKNKLDAAMQRCGFRLSNYVSNTGGKSYQSVVRAISQGETNAEKLVLLVHGRTVNKHGRDTIAGSVTGNFSPTDIAVIRQYLAMIDLINNQIDECQKALAAMCEEHFPEQYRRLQTIPGVKERAATAIIAETGADMSMFAKATNLVGWCGLKPRNDESNRRIKSNRITHGNRYLRQILIEIAWVASRTRNCFFSNFSYVQVTVKKKRKMKIQVAIARKILVAVWHMLSNKEDFIDIYLKRLEEQRLIQLQIEQLESSMAL

SEQ ID NO: 311494 - protein, 354 aa, unidentified
MTEILKSKIAAIGIDIGKNWFHVVGLDGRGAIALRQKWSRGQVEARLANMPACLIGMEACVGAHHLSRRLRLLGHDARLMPAKYVRPYSKGQKNDFRDAEAIAEAVQRPTMKFVATKTTDQLDLQALHRVRERLVSQRTGVINQIRAFLLERGVAVRQGRHFLRAELPGILATGCAVLSGRMVHLIADLAGDWRRLDERIEGLSGEIAALARQDAGCERLMSVPGIGPIISSAMVAAIGAGDTFTKGRDFAAWLGLVPKQFSTGGRTVLGKISKRGNRYLRTLFVQAAWVVLIRSKNWERYGLKPWIEAAKRRLHRNVLAIALANKLARIAWSVLAHGRSFAAGKLVEAASLPA

SEQ ID NO: 311495 - protein, 407 aa, unidentified
MARYYLGVDWGDEEHGVCAREETGAIVWERMVPHTSTGLSVWGRQLDDWRAVGIELWAAIEKPDGRVVDCLLDHGVVVYPVNPKAVDRARDRFRMSASKSDTFDGRVLAEFLRTDHAHFSPLRPSSVAAQEVKLLTRDHTRIVRQQTRTLHQLTSTLKEYYPRVLDLFGDLTTQLALDFLQTYPTPATLTKLRLSSWQRFARQHRLGPARTVALWAQLKAPQVPVPEHVVRAKARLVAVLIAQVLVTHRAVTEYQAEIERFFGSLPAAEWMQTLPGGRSGTMIPRLWAELGDAPGRWASWSHLQAQAGTVPLTRQSGKSCVVRFRVACNKHLRQAIWQLAFQSLRHSEWSKSYYQQCRVRGHRHNQALRALGAKWLKIIFRMWQHQVPYDESYHLANMTRQYLRATA

SEQ ID NO: 311496 - protein, 321 aa, unidentified
MNKNTEYFGIDISKDVFDVYGLELGHHQFANNEKGFKQFIKKLSKDSLVVMEATGYYHYCLAQYLYEKGYVVSVVNPLSVKRFIQMKLSKVKTDKSDARSICEYALNNDVPLYTAKDKNQAECLQLLRLMDTYVKHRTAMKNKLDGEQVLGIPSKAVYRSLSRTVKQLNKELALLEARLIALVKEEQQEQLRLLKTIPGIGEKAAILLVVFTDGFSKFENSKQLCCYAGITPTIRQSGSSVRGRSRISKIGNRKLRNQLFLSSFTACQYNKACRELYERIVAQGKSKKLAMLAVCNKLLKQAFAIAKSGMPYNENFVSKLV

SEQ ID NO: 311497 - protein, 399 aa, unidentified
MLNRMLPSYRFPCRVRVVTSVARSRADTTASPRPIVSRFFTTVTEQGPGWFCVASPEQPTEPLLVNTARSHSQERDHHMTTDKHDSLLVGIDVSKRALDVARSDVHDVCTFTNDQVGIAQLVKMCKPLSPAMIVVEATGGLEQPVIDALLDGNLAVARVNPAQVRHLAKALGVYAKTDAIDARVLVKFAHHAQPRLMEKRSKIHEELEALVTCRRQLLKTRTEQTNRLGTTRTKPACGAIKAVLKTLDQQIVKLDAQIRKMIDHDNDLSHSDHILRSAPGVGPILSATLLCELTELGHIDRRQVGSLVGVAPFNRDSGRWSASRSIRGGRTSVRNTLYMATLAAIRCNPVIRSFAQRLKAAGKCNKIVITAAMRKLLTILNAMLRDQIEWSQLKLVQST

SEQ ID NO: 311498 - protein, 421 aa, unidentified
MTGGKETTRIGSLDIHKRSVVCHVLDVFFDENENRFVAESRALKKTSRSLVGLSDLAEFLKEFNVKQVVMESSGPYGLKVYYFLESEGFDVYMVPAQDNKPRRGKKTDVEDAKRLARNFVANSIRAYKLPSDPKIRALRIYVRSRKKLVDKLVAVKNMIIKTFDEACIDIKSVFSNFGKGFLAFLEAYLKGESLDAIIRKWPRFGKKREKLEEILRTRLDEASLITLSSYLRLMKVLMKEISRLDAHIESLLAEFSKEVGLLLTIPGVGLKSAAVIISEIGDIKRFASPKKLASYAGLVPTVYQSGGKTVYGKLRRECNRRLRWILYEVAINAIKVSPWLRSFYERLILRGKARKQALIAVARKIAVGVWHILMRDVPWKERLQRSICLPKKRRVSRVAVREALRILREAGYIVIKARGAL

SEQ ID NO: 311499 - protein, 344 aa, unidentified
MKFIQFIGIDVSKKTLDASIFVAGEVINKFPHIQVRNDKQGFKDLFRWAKEQGVKTKDTLFGLEFTGYYSDALEQFLTKKQISYAMLPTTVVKHYQRGTHDKNDKIDSAKIADYLFRFNGTECIRLRVLPSKALQKLKELKSERKFLVQNRVGCECRLQVAKSKSEEKHMQKLIDLYKEEIEQVEKEMLDVVAQDPDIYTTYRLLNSIPGIGFVNAVNTIANTQNFTAFETARQYAKYVGVAPSEHSSGTSVRWRRRPSPHADLQAKADLSMAALHAIELSAEIRQLYERKLGNRTKDKDMQKKALNAVKFKLIREMFSVVKQAKNFELRGLDNAQTEAHSTEE

SEQ ID NO: 311500 - protein, 343 aa, unidentified
MKDTTIAVDIAKDVFEIAVSHEPGVVNEKHRVSRKKFLSFFANRPAATVVMEACGSSHHWGREINKLGHRVVLLPPHVVRPYVQRNKSDQTDAKGMLEAYRNKDIKPVPVKSIEQQSVTALHRVRSSWVASRTASLNMSRGLLRELGIFIPVGARKVVPTVLELVEDADSRLPDAIRNTLHEVCMEIRDYEKRILGVEKQLEALSKQIPTVSLLRTIPGVGLLTSTALVAFIGDIQRFRSSRQFASFLGLTPRLRGSGFAVHLGSISKQGDRYLRSLLTHGARSVLIRAGAMEKPDRLRAWALKVYSRRGHNKATVAIANKLARTVWAVWKHNTEFQSYPKAS

SEQ ID NO: 311501 - protein, 345 aa, unidentified
MKVIRVGVDLAKNVFQVHGVDGEEQPVWQRSLRRGSWVRELVKRVAPGAVIGMEACAGAHHWARVLQAHGYRVRLMAPQFVKPYVKSNKTDRNDAAGICEAMSRPSMRFVEVKSVEQQDIQAAHRVRSELVGQRTSKANQIRGLVGEYGLVAPRQLGSLRGVMPEWLEDAENGLTERFRRLLAGLAQDLHRLDERIGELDTEIEAIAASDPVAQRLLELRGVGPVTATALVVALGTGEAFRRGRDFAVSVGLTPKQRSSGGKERLLGISKRGDAYLRQLLVHGARAVVRTAPNKTDPLSRWLQKLLARRHKNVVVVALANKTARMAWALLRHDVGYEARLAAASL

SEQ ID NO: 311502 - protein, 412 aa, unidentified
MNIVYERCAGLDVHKRSVTACASTPDARGQRHKERENFSTMTPDVLRLRQWLTDRGVTHVALESTGVYWQPIYQLLEGHFELLLVNAQHIKAVPGRKTDTKDAEWLADLLQHGLLRPSFVPPVAQRQVRELTRYRTSLIEERSRAINRLQKILEGANIKLASVASDLMGVSARAMLAALLQGDADPSTLAQLARGRMRSKRDLLAQALQGRFTTHHRFLIGEQLAHIDGLDETIAHLSGEIAERLQPFEEQLTRLETIPGIKRRLAEVLLAEIGADMSRFPSARHLASWAGMCPGNNESAGKRLSGRTRKGSPWLRTALVEAAHAATHAKECYLSAQYHRLVIRRGGKKATIAVGHTLLVIVYHVLADEKDYEELGGTYFDEWDRQAVQKRLVRRLEKLGDEVTLTSPSAAS

SEQ ID NO: 311503 - protein, 426 aa, unidentified
MRAIGLDVHLEFCEVAIAEEGKVRSAGRIATKPEELELFAQSLGKEDRVALEVTGNAWEIKRIIEPHVAEVVVVSPADTGIRQARAKTDRLDARTLAKLLAAGELDSVWMPDQGTRVMRRRLQRRGQLVRARSRAKNEIHAVLMRQLVGRSPFSDVFGKKGREWLRALELVTEERETVDAALRQIEFLDSEIEAVERLIATEALESPQIRRLMTVPGVNVICAATFLAAIGDIRRFESPRKLVGYLGLDPRVSQSGSAPATHGRISKRGSVRARHALVEASWSTIRQPGPIHAFYERIRSRRGHQVAVVAAARKLAVLFWCLLTREEDYAYAQPSLTAKKLRLLEIRAGAPTLKGTNTGTWATRQKMRDAERTLATQAEAAYRRTVADWQRTQAKRKGAGATPGRASSGPSSGQAARQETAPEPAL

SEQ ID NO: 311504 - protein, 339 aa, unidentified
MASIGIDLGKTNFHLVALNERGKVVVQKKFSRKQLLTDTANLPSSLIGMEACSGAHFLGAALRQQGHDARLMPAQFVKPFVKSHKNDFLDAEAIAEAVTRENMRFVPIKTDEQLDLQALHRVRDRLVQRRTAVINQIGGFLLERGIPFGKGPAQLRNHLAAILQDAATNLTPRLRALVQRLWVEWRQLEADLATATEEIEHIANEDAACQRLRAIPGVGPLVAAATVAAVGHGRAFRKGREFAAWLGRVPRQPSTGGKTHLLGISKRGNTYLRHMFIHGARAVVFRIRYDMGGLGLWVQRLLQRAAPSKVIVAVANKLARIAWAVLYRGEVYRPAPVAA

SEQ ID NO: 311505 - protein, 372 aa, unidentified
MNYNTVYVGMDVHKESFSLCAYTIEAEKASHYQRTEADYKKVLNYLEFLRTIYGDDANFICGYEAGCFGYILYHQLTANNVKCIILAPTTMLEQRSKKRIKTDRRDAEIIAKCLAQHNYSPVHIPTAKDEETKEFLRMRDDHKLALKKVKQQILAFCLRHNYRYDGKSHWTAAHLKWLKALTPEALYKEILDEYLLTYQTLSDKIERLDKRIEELATQDEYKEAVKKLCCFIGVKTHTALSVLVEVGDFKRFASAQHFASYLGLVPGEDSSGDDQNRLGITKAGNRHVRLLLTEASQCYARGQVGFKSKELKSRQSGNTPAVIAYADKANERLRRRYYKMVLNKYKKHNVAKTAIARELACFMWGMMTDNIA

SEQ ID NO: 311506 - protein, 412 aa, unidentified
MEGETVIAGVDTHKDVHVLCLLDGLGRKIRSGSFGADPEGCDRLAEAIGDPGSCLVVGVEGTASYGAGLTRRPVELGYNVVEVLRPKRDKARPGEGKSDPLDAERAARKAASGRGCSVPKSQDGWVEAVRQLYVARRLAVATSTSCVACAKSMLTTSPGALRERFRGRERPKDLMPLLARGRKAGDALEESVLASLRSVAAVWKEARSQVESLDERIRALLEANAPALLGIEGCGTTTAAALVVAAGDNPGRLKGEAAFSMLCGVSPIPASSGKTERHRLNRGGNRQANWALYEIAIKRMAYDERTRRYVARRTSEGKSRREAIRCLKRYIAREVYRVLMDPNPDGAAPEGPELARMRKAMRVTQKQAAAGLGMSAASLGHLEHGRRRSTKLERRYYELLCELKGALPQTAY

SEQ ID NO: 311507 - protein, 413 aa, unidentified
MEVLYPHCAGLDVHKDTVVACVRHMVNGTVSREVRTFKTTTKELLALSEWLATEGCTHIAMEATGVYWKPVWHILSDGDFALVLANAAHVKNVPGRKTDVNDATWLADLLAHGLIRGSFVPDQQTQEMRDLLRTRKQLVREASRHIQRLQKTLEDANIKLDSVISDVMGLSGRRMIEALIAGQSDPEELAQLAHRRIKASPEELREALRGRLTRHHRFLLSLHLQQIDAIDAAIGAIDQEVDAQIEPFRTTVHLLTTIPGVDELSACVILAEIGRDMSRFPTAGHLISWAGLCPRNDESAGKRRSTRMRKGAAWLKTTLVQCAAAAARKKASYLQALFHRLRARRGAKKADQIEQGHRFALQGMDNVLVIDDVAVFAAWLRAPPAQAHQRRRAEKAFQPIVVKPHPQAMADQP

SEQ ID NO: 311508 - protein, 451 aa, unidentified
MSRTMKSRSRRDISPTHLNAAAIDIGATMHVAAVGPDQASEPVRSFGTFTGDLHRLADWFTTCGVRTVAMESTGVYWIPVFEILDQRGFEVIVVNARDAKHVPGRKTDISDAQWLQRLHEYGLLRASFRLKGEVAVMRAYLRQRERLLDYAASHIQHMQKALTQMNLQLHHVVADITGVTGMAIIRAIVAGERDPMVLASYRDPRCHASAETIRHALVGNDREEHIFALTQALELYDVYQAKVALCDVRIEAVLKRLRQVSSTPVGKPPPVRTTQKQSNDPAFDVRAALYGLLGCDVTQIHGLGPYLTLKLVGECGTNLSAWPSAKHFTSWLCLSPSNKISGGKVLSSRTRRSGSRAAALLRLAAVAVGRTQTALGAFYRRLSARVGKAKAVTATARKIAVLFYNALRHGMEYSDPGASHYEDNYRRRILTNLERRAKSLGYVLQPTPMPA

SEQ ID NO: 311509 - protein, 367 aa, unidentified
MKKVSTTAAKQRKNFPERKLTIGLDLGDRSSWYCVLDEAGSVLLEQRLSTTPKAMGEGFGAMPRCRIALETGMHSPWVSRLLGELGHEVIVAHARNVRLIGESRKKDDRLDARMLARLARIDPQLLAPVRHRSARAQADLTVIRARAGLVRARTALINTARGLAKSYGERLRGCSPRNVNPEKAQGLSPELQTALEPLLAAVESVSERIRECNERIEQLAQQSYPQVALLKQVKGVGTLIALTYLLTLEDPHRFRKSRDVGCYLGLQPGRRNSGQSEPQLHISKEGDPYLRTLLVQGAHHILGPFGADSDLRRWGLKLAERGGKNGKKRAVIAMARKLAVLLHRLWVSGEVYEPLRNSSRVPVPAAA

SEQ ID NO: 311510 - protein, 333 aa, unidentified
MIFEFTGIDVGKDKLDLSWLRDTATGRKKSRVFNNTAKDHDAIIAWLLKNTGESADNIVVTLEPTGIYHERLMHTLYDAGFKIFLANPGKAKQYAASRNIIHKTDKSDAMVLARYGASQDQPLKLWQPDAPEIRMLKAMMRRLDALEKDLQREQNRQEAAEFSMVSGRVIQSLRDMIAALNAEIEKLKDDIDDHIDRFPELKENRRLLESIKGIGPVMSRELVYLFAAKLFKNAKQAAAYAGLIPRLRESGTLKGKTTLSKIGPARLRAKLYMAAVSASTHNPDIKAQRERLLSAGKTKMQALGAAMRKLIQICFGVVKHQCEYEPQSGSVTV

SEQ ID NO: 311511 - protein, 450 aa, unidentified
MAQGSGLTRGDRNRNRKLEALREAVARDRAVLAVDLGEDKQVAVVMDHECRVLARKVVKAKAHQLAGLLDWGADRAVKAGFAGLTVACEPAGHRWKALMGLADGAGHGFCCVQSLAVHRAREGDDYTLGKTDHRDAYLIGKLAVRLECYLPERADEAWARLRHLGARRFALVADVTSCMQQAGDLLGCAWPAPLGAAARPLESVTWLAGMAVITGRCCGQPRRLRKLGYDRFLAAVRRELPRWGGKYVRHSIVRGLWDALADAGGVAAQRPGALERVHLLLGDWRELRTRLAGTEERMVAVLGKLGLAELVASIDGVSALSGAVILAEAGDLQRFTSGRAVVKHAGLNPSERTSATINGQTRISRRGRPGLRAAAWRAVWGALRHNPVLQAKHAHLTGRHANRLADGQARTACAAALLRWLWAVVITGQAWDARIAAGQIPARPVTTAAA

SEQ ID NO: 311512 - protein, 406 aa, unidentified
MNQNTCITIDVSQNKSHIQGFIGPNKPLSKARTMRNTKQGFQFILILKNLIESKTNETPLIVFEFTGIYHKPLEKFLISQNIKYHIVAPLKAAKARNSEIREQKTDARDCLSLSKLFYSNNLGIFYSENETYSNLRKLNRYYDTCMKHLIKIKVNFRETLAVVYPNYKKLFSSIYSDDSLTFLKEFPHPSLYTSKLEDRIIEILKNKWDHLESWTSSKVKILTPLINEVVSGCNVTEPDIIMLLSYISQIEYYLNQIEITVSQMNELAKKVPLYNLVHSLPGIQDILTCKFIAEVGDISRFSNYKQIVAYAGIDPMIRQSGDKDGLHLKMSKKGNKRLRTILHLMVSSLIKANREPNAIKDKYQKKTHQLNPLKPKVASMACANQLVRIIFYMHKTSSTYTYHECK

SEQ ID NO: 311513 - protein, 409 aa, unidentified
MQPILKSCCGIDVHKNMIKASIAKGPLDSPPKFYTRTFSTMTRDLLKLKDWLTENDVEVVAMESTGVYWKPIFNILENDFQMILANPQYLKKVPGKKSDVKDCEWIASLLRCGLIPASFIPQRPIRELRELNRTRRKLVGMMSSEKNRIQKVLEDANIKLASVVSKIDGVSSMTMIQALLDKDRLSKEEITDMARGKLKSKVDQLVEALNGKVTDHHRFLLKLHLNNIAFLADQVQEIDEQIQKLMIPFQKEESLIQTIPGISKISAKAIISEIGVDMSQFPSEAHLASWAGICPGNNESAGVKKSGKIRKGNRYLKAILIEVAWAASRTKGSAFSAIYNNIAKRRGKKRALVAVGHQILIAVYRTLKTGELFVDQGAEAIYRRNLESRQQSAIRLLERSGYSVAKASV

SEQ ID NO: 311514 - protein, 475 aa, unidentified
MNIKGTKKKNQVLSVNIFEQQEIIAKADAIKAGLKASTWHELETKGKFDKNDKLSFVSDDMLILGCDIGSETHYVRAIDTRGRELSKSAFGFSNTAEGFASMLDWSTKLAAANDKKQIVLGLEPTGHYWFCLTTWLVANGISVVQVNPYAVKQTKEVEDNSQLKDDKKDPKLIANLVKDGNFGMPYLPEKLYADIRRLSMFRDQLNEDRIRNLNRLHREMKIYFPEYKDAFGKIDRAFSLELLKEASFPDELVALGTEGMKQIWHEAKLRGRGYVNAPSILEYARKSVGIKDGADVSRQAVKWFVSRIIELDGQLSEIENQLNQRCMEIPHAKNILAVSGIGENILSGILAEMGDISRFDNVKEIQKLSGLGLVACSSGKHTGETKISHRGRKRLRYWLFQAAKSAVAHSEEFKELHVYYTTRNQNPLKKMQSLIVIACKILRVIFTILTKGTVYDPKKLLGDIVRPDQAKPQAA

SEQ ID NO: 311515 - protein, 461 aa, unidentified
MRAKKPTGPQKGSVQKKVDWKALEIVHPDAAGIDVGGSEHWVAVSPDRDPEPVRRFGCFTADLREMGQWLVQKGVRSVALQSTGVYWMPVFEVLEQHGLEVYLVNAQHTKNVPGRKSDVQECQWLLKLHAFGLLNNSFQPTDEIRIARTLWRQRGNLVAEASSVIQRMQKVLTEMNVQLSNVLSDLSGVSGMKIIGAILHGERDPWTLAALVEPGVKATPEDIAKSLEGNWREELLFVLRQHVELYRIYQEKISDCDLQLRKHLESLSSKRDLKTQPIGPKPKGKKGSRNAPQFDLRTELYRITGIDWTQINGIDVLTAQTVIAEAGADLSAFPSEKQFASWLGLCPTNEQSGGKILNRRTRKVVNRATVAFRNAALTLLRSQSYLGAQYRRLRTRLGAPKAITAMARKLACLSYRLIKHGQPYVDKGTEYYEGRYREQQIRSLTKRAQKLGLQLVIPTTA

SEQ ID NO: 311516 - protein, 355 aa, unidentified
MKRKTTTARKGRVKKDLYGAVDLHGDNGLYCLINQRDERVFQQRLPNDLKTVVQALEPFRERLVKGLAVESTFNWYWLVDGLQDQGYEMQLVNTTKVQTYSGLKQSNDQTDAFWLAHLQRLGVLPTGYIYPRAQRGARDLRRRRMLLVQQRTAHVLSFKSLVERETGDHIPAHRVKALEEGEVEQWVSGEAAVLMGQTNVRVIECLDQEIQGLEKAAQAQLQLLPDYKCLQQIPGVGEILNLVIMLETGPIERFAGAGNYVSYCRGVRAEKRSNERKKGENNRKCGNKYLAWAWMEAANFALRYSPESKRWYQRKVKRCGGKTVVALKAVAAKRAKAAYYMLKNKETFKIEQVFG

SEQ ID NO: 311517 - protein, 367 aa, unidentified
MMRWMAPLRHLSAKLLCDRISSEWEPSMGEVTTIGLDLAKQVFQVHGVDAKGATVLRKQLRRAQVLAFFSRLPPCLVGLEACATAHYWARELRALSHEVRLMPAQYVKAYIRRNKNDAADAEAICEAVQRPRMRFVPVKTAEQQASQLLHRGREQLVRQRTMLVNALRAHLAEFGLVAAQGLRNVGELIAIVRKQDDTRVPDMARQVLQVLANQIEQIEAAIAALEKQLLAWHKTNAVSQRLASIPGIGPIIATAIATTVADPNVFRSGREFAAWLGFVPRQNSTGGKPRLGGITKRGNRYLRRLLINGASANLLRSKATKADPWVIRLRQRRPPLVVAVALANKTARIAWAVMLREREYQPRAVAA

SEQ ID NO: 311518 - protein, 421 aa, unidentified
MKKIQAKTERIVNGRTLIVTVDLGKTTNVGYCRCPDGTDNKPFNFFNDGHGFNKFWSCVSEMMRIHNMEDVVVGFESTGPYGEPLVHYLQKRGVRLVQVNPMHTKRLKELHGNSPNKTDEKDPKVIADIIELGHALSLVIPEGVAAELRRLTQARERGIARRTALLNQLHDLVFILFPDFLQIMGSMKGKSAQYLLTYHTIPQEIIGLGLETLTLVLRRISRGTLGAERASALYEAAQGSVGIKEGEDSIVFEMRNILAIVEASDRFTEDVETKMSHYLGQIPYSRSILSLKGVGKITAAGLIGEVGDFRKFKTISEITKLAGLDLFEISSGKHKGKRRISKRGRPLMRKLLFFAAVNVVRKGGILHEQYQQCLQRGMVKMKALTAMARKLLRIIYALVRDHSDYVHGYTKTQKLSLPEAA

SEQ ID NO: 311519 - protein, 350 aa, unidentified
MQYVGIDWAYRRAAWCAKQADGTVFGEGFVPADEDGLARLVIELGPEVRACLEMMSGAVWVRDQLAGAGWQVEVADARKVKNVAPLACKTDKVDARVLAELCRRELVPALWIPSLEERELRERLKRRLHLVRLRTSAKNRVFGLLTQWGLRIPADRLRRPDAMELLETRGVPEVWRRSVAEALAVIELLDERIAALDRELGPLARADRRVSLLSTIPGIGPVLGLTIAAEIGDVARFASPRKLIGYSGLAPRVKQSGERSRSGELSKAGSRTLRFAAVEAAQGAWRETNPWHRLYSDVKARTGKANPAKSAVARKVLIACWHVLSRDEPFKPRHPQTDPVPASSLCFLAA

SEQ ID NO: 311520 - protein, 383 aa, unidentified
MSRHRTKADPLEPERHRCARVEVSSNHSRDRGSTMNVTTYGLDLAKRVFQVHWVEPDTGELKCKALKRAEVAAFFARQAPGVVAMESCGSAHHWGRVLSGLGHQVRLIAAQFVRPFVKTNKTDAADAQAIWEAAQRPGMRFVALKSEEQQAVLSLHRMRAQLVKIRTMQAYQVRSLLYEFGIVAPKGFRALAAKAGPVLADTTSSAVPELLRSELLRQLEGLRALSARIEELERRIGSWQRREAECERLAEIPGVGRLTATAVVATVAEARSFRSGREFAAFLGLVPRQSGTGGRVKLLGISKRGDPYLRTLLIHGARSVVLAQSRAGRMIDPWLRDVLSRRPKNVAIVALANKMARTIWALMAHGRRFDRNWTRAAMAAART

SEQ ID NO: 311521 - protein, 387 aa, unidentified
MRVPDGGGGREPHLAEFATTVRGLLALRDWLAAHRVSQVVMEATGVYWKPVWHILEDDFELMLVNARHVKQVPGRKTDMSDAAWLCQLAEAGLLKANFVPPKPIRDLRQLTRYRKTQIAERQREAQRLHKALEDTNIKLDCVASDLLGVSGRAMLDALGSGTTDPEILAELAKGRLRQKLPALREALEGRFDDLHALLIGAILAHLDFLDEQIDRLSDAIEERIAPFAGAVELLCTIPGVQRRTAEVIIAEIGPDMTVFPTARHLASWAGQCPGNDRSAGKQRSGRTRKGSRWLNAALKDAAMAAIRTKNTYLRALYDRHRSRIGHGKAIGAVKHSILVAVWHMLSTGQLYDDLGGDYFRRRDPTRTTKRLVAQLERLGHTVTLEAA

SEQ ID NO: 311522 - protein, 324 aa, unidentified
MQGKEASEQETKVQSNVGIDISKCWLDAHVLPGDDRLRVANNCAGIRRLKRWLSHYRIALVAIEATGKWHRHLHRSLVASAIPVAIVDPYRVRMFARAQGILAKTDQLDARVLALFAAMMAPPVRPVAPQAMAELAELVVARASAVEAQTALKNQFAAAESTFLKRQLDRRISRADKDIAALDREILKRIKADASLARRYAVLTSIPSFGFAVAATLIACLAEIGSTTAKQIGMLAGLAPVADQSGDREGIRVIWGGRPAVRRVLYLAALSASRFNADMKAFYKRLIDNGKPSKVALIAVARKLVVLANTLVSEDRTWQPNAPI

SEQ ID NO: 311523 - protein, 436 aa, unidentified
MEEVEDEPLFAERAAGIDIGKKEIMVTIRVPGDTRPGRRQQETREFRAVRKDLLALADWLRCWGVTKIGMEATGDYWKPVYFLLEREGFDCVLYHASQVKALPGRPKTDKLDSAWLARITERGQLASSFVPPEDIRRLRTHTRYRRHLIQARTAEMARCEKLLEDAHLKLSSVISDIHGVSGRDMLTAIIAGERSATALAQKARGRMRGRIRQLEEALDCSFFTQEHAFVLQMMFANIDHLTAQVRELSAKTGVLCEQYARQIAQLDAIPGFGIITAQDIIAETGTDMTVFPAAGHLCSWARQAPQVSQSAGKRKGKNATGRGNPYIGGALGEAAIGAGRTQTFLGAKYRRLCKHMPKKKAQGAISRTQLVICHVLLSDPEAVYTDLGTDFYERKADIRGRARNHVRGLERLGYKVTIESLSPDPDTGELPVTKAS

SEQ ID NO: 311524 - protein, 347 aa, unidentified
MHVTTIGFDLAKSVFQVHGVDAAGRAVVAKALRRGQVLAFFGKLRPCLIGMEACATAHHWAREVAKLGHTVRLIPPAYVRPYVRRGKNDAADAAAICEAVTRPSMRFVPVKTAEQQAALMTHRSRDLLMRQRTQLINALRGHLAELGLVSPKGREGVASLIGVVRAEVANALPHAALSPLIDQLEVTEQQIATLDKAIHAQHRASQASQHLETIPGIGVIGATAIAATITDPAAFKSGRDLAAWIGLVPRQNSSGGKERLGGISKQGDRYLRKLLVIGAAAVLKRARQQPDRHPWLVALLSRRPAKVAIVALANKIARIAWSVLVRGETYRAPAFVGNAAKGLAMGT

SEQ ID NO: 311525 - protein, 401 aa, unidentified
MNSVGIDVSKGKSTVAALRPMGEVALPPTEYLHTELELEKLAYTILALGEDTRVVMEATGRYHEPVATALHEYGIYVCVLNPILIHQSGGGSVRKVKSDKKDAIKIAKYGLDNWVDLREYTPVDALRQQLKLFSRQYNLYMKNSVALSNNLISLTDKVFPGVNELFSSPEKADGHRKWVDFVETFWHCDCISLVSEKAFIERYRKWCKRKGYHFSADKAVDLYASSCGNTVTLPKNDTTKRLITTAAKQLTSFNCHLAAFRNEMISIAKQLPEFDTVLNMFGVGEISAVNLIAEIGDVRRFPNRNSLVGFAGVDPCVDQSGKHFSKSNPTTKRGSAILRKTLFQVISTYVKRSPVDEPVYQFICKKRAEGKPYYVCTTAAANKFLRIYYARVKECLNDNLF

SEQ ID NO: 311526 - protein, 388 aa, unidentified
MGSAQLAFITAAGARPAVYVAVELSKKGWLIALRGPGDDRISLHRLAAGDAAGLLALVERFRRAAVETTGTEVAVLACQEAGYDGFWLHRVLVAAGVASHVVDPASIHVDRRARRAKTDRIDAQALLRTLMAHHRGEGRVWSVVRAPTPEEEDARRPHRERQSLIKERGRHVNRIKGLCAQQGILGYEPMRADRHERLAELRTGDGRPLPPCLLAEIRRELARLELLLEQVAELEAAREAALRAVPTEPTETARVERTLALRRLLAVGPETSVVLGNEVFFRRFGNRRQLAAYVGLAPSPHMSGGLSREQGIAKCGNPRARTALVELAWLWLRHQPRSALSEWFVRRVGEQRGRLRRIMVVALARKLLIALWRYLETGLVPQGAALRA

SEQ ID NO: 311527 - protein, 407 aa, unidentified
MDITPIYPRVIGLDVHQAKISACAIAEQADGTVTVEHREFGAFKRDRRALAEWARAFGPMVVVMESTGVYWKSPYAALERAGIVAWVVNARHVKAVPGRKTAIADAQWLAIRARAGLRRGSFIPPAELRNLRLVSRQRQKLGGMLAAEKNRLHKVLTDAGIRLNVLVSDLHGQAGRAMVKAIIADQPMADVVKPAGRLKASREELFEALQTDDLTATHRFVLAEIMAHIEELETRMSRFETALLEGLVSWQPLLVLRQTLPGIDQIGAAMLWVEIGTDMAVFGSAERLASWVGICPGNHESAGKRKSGKIRKGNAWVRRLLCALAQAAARSRCALKDKFTALTIRKGHKKSIVALAHKMLRIIYAMLSRHTPYQDRAVDYEAITVQRNAPRWIKMLVKHGFITPATA

SEQ ID NO: 311528 - protein, 484 aa, unidentified
MAKRKTSTFERLTTERMNRQQRRALGMRLASKDPGLTIVHCNAGGIDVGNQSHYAAVPPDRDPNPVQEFGCWTADLVRMAEWLRACRVETVAVQATGVYWIALYDILTQQGIRVVLVNAQHTKNVPGRKSDVQECQWLMKLHTYGLVRDSFRLDEKMEGVRTLWRLRARHVQEGGRAVQHMQKALTKMNVQVANVLSDISGVSGQAIIAAILQGERDPYKLADLRDARVQASREEVARSLEGTWREDVLFELQQAVDSYQFAHQQMRECDRKLEGYLKNLPTRMPPLVGRSEDGAAVQTKEGKKRKQTKPKGNAPAMDLKGELQRICGVDLTSIDGIDVMTAQTVVAEIGTDMRAFATEERFASWLGLTPSRDITGGKVIRQGGRKVNNRVAGALRMAASTLLNSKSYLGGRYRYLRKQLASKASAAKAMAHYLALLIHRLLTKGQAWVDRGAAKFEQKRMEREVATLKSKALANGFKLVPIGD

SEQ ID NO: 311529 - protein, 375 aa, unidentified
METIYIGVDFHARQQTICYLTTETGEFVTHELKHEDKDEVRTFYGQFVGRVIVGLEASGYSPWFEQLLEELGHEVWLGDATEIRRRARWRQKNDRRDAELILDLLVHDEFPRLHRPSLESREILRMLRYRHKLVKMRTIIKNSLQALALQSGLSRRPKLFTKAGQQELRAAPMSPVMKQQQEQWLELLVVLNQRIVETTLWLKQQSLNDARIRLLRTHPGIGLLTSLGLVHTLDPISRFRNQRKVTAYAGLEPMERSSAERKRFLGISKAGSRLLRFLVIEAAHTAVKKDDDLKRFYRRLEERRGRPKAKVAVARKLLVRSFIMLRDEIDYAEFQRRAVAARLARQSSRPSVPDSLIGQPAYSESQERVLSAAKK

SEQ ID NO: 311530 - protein, 404 aa, unidentified
MFYAGIDWADQKHDGLVLDETGQKLGSIRVSHTPEGLDKLDAWLSSMLNGQGKDQMACIIETNHGLLISFLLERGWPVYPVNPRTVDRKRSASGAKTDAIDAYLLAKTGRADFADLHRLTPDSEKIAELKALTRDQDSLIQMQTRLVNQLTACLKAYYPVALDLFAKLQQHSTLMFLHTYPTVEAAQTASVEQIRQVLKSAGHTTAEKVAPRIFARLHQPSLRADAVTTRTKSRLTMALIVQLLPLVEQIADYDKEIEQLFLSHEDNEVFSSLPRAGKRLAPRLLAEIGDDPGRYASAASLQALGGTSPVLFQSGNYSKPHRRLGCIKPLRNALHQFAWQSTLQEGWALVYYERKRAEGKSHSVAVRALSNIWARIIFAMLTSHTSYDRTTFETARYLHTSKAA

SEQ ID NO: 311531 - protein, 340 aa, unidentified
MTEVSMIGIDLAKHSFQLHGATADGSVAFRRKVGREKVLEVVGSYPRCVVAMEACASAHYWGREIGALGHEVQLIAPAFVKPFVKRQKNDAADAEAICEAAQRPTMRFVAVKSEDQQARGMLFRTRDLLVGQRTQTINALRGHLAEFGVVAAQGPAKVIRLAEVLEDPGSGLLEEVRELGRLLVRQIAGFDERIAELEKTLHRAVLEDADARRLMTIPGVGPITTMAVQAFAPPMESFRRGRDFSAWLGLVPRQHTTGGKPRLGRISKMGQRDLRRLLIIGAMSVVRHAGKRSERANPWLAGMLARKPKKLVAMALANKMARIVWALMMTKETYRSPATA

SEQ ID NO: 311532 - protein, 351 aa, unidentified
MPRKSSVCTVTAIGIDMGKTTLHMVGLDSYGAIVLREKVSRGRIASRFANLPPCLIGIEAGMATHYVARELAALGHEVKQVPPAYAKPFRQGHKNDFRDALAVAEAVQRPTTRFVPPKSNEQLDLQALHRVRSRLVSQRTAVINQIRGFLLERGIIVRQGLRFLRQLLPDILAKRTDVLSPRMVRIVSDLAGDWRQLDERIETVTDEIETLAKSDDSCRRVMTVPGIGPIISSAMVAAIGTGAAFARGRDYSAWLGLVPKQMSTGDRTILGRLSKRGNSYLRMLFIQAARVILVRPANWPKHGFGAWLVRAIQRLHPNVLAAALANKLARIAWTVLAQERSYEARVTKAEA

SEQ ID NO: 311533 - protein, 409 aa, unidentified
MKHVIAFDVSKGKSTIVIYNEDRQCEFEGELHHTRFDFEQLHQRIEKITALDGQPPEIVFEATGVYSKPVEEFLRDHGYTYYRMNPLEASLQMASMRRHKTDSSDAHELAKTHFKVERETTYVQDTYYEQMRAITRYYDEVDKEIILLRSRMHAILHGTFPELEQLITPSSALFLNFVQLYPHPALLLAHSKTIIKNRLKSNTRKKLSLERAEKKAIVLLEAAENSYPSIKPTDIRCIQVRDYARRIADLMETKDKLVKQMVTMSEDKKEYKVLLSIPGIGDTTACRLIGELGDIRRFQNAKQINAYAGIDIMRYQSGNTQYRDRINKRGNKKLRKILYFMVCTMLMAKGKGEENHFVDYYYKLKTQPQKKHHEVAIVACMNKFLKVAFHLITHGILYDYESALPALKS

SEQ ID NO: 311534 - protein, 345 aa, unidentified
MEQISRIGMDTSKHIFQLHGVNTAEEPVLRKKLRRKEMFAFLEKLAPTVIAIEACGASHHCARLLRSFGHSVKLIAPQLVKPYIKRGKNDAADAEALCEAMSRPMMRFVPVKTAEQQAALMLVGIRDRLIRNRTQLSNAIRGYAGEFGLTAARGKAHLAPLLQRIHADESLPALARELFAAQAEEYAQLQAQIDKVDARLMAWHRADECSRRLTKIPGVGPIGAVLLTMKTPEPRLFQSGRQFAAWIGLTPKDHSTAGKLRLGGITRAGDEGLRSVLVVGATTVIQHAQRGGRPSPWLTELLKRKSPKLAAVALANKTARIAWKLMVTGENYAAKAAPATLAGAA

SEQ ID NO: 311535 - protein, 607 aa, unidentified
MSTIASLDRIGVGIDTARYGHRVSFLRPDRKPAAKPLTVMENRAGYQTLQDRLNQLHEQHPTAHFHVRIDAAGQYAVNLELFLRGLKLPMTISVGEPKRNKDYQKAHFPKRTTDDTESQAMARFAVIELPNATPAPSTPMILLREVAGRLQSKVKQTTQAINRLHNLLARVFPELATLTQDMSAGWVLKLLDKYPTAERIAQAQIASLEKIPYLSVEQAHAVHQAAKQSVASLRGELAEALVRDHVNQLRLCQKAEQHLHQLLLEAFADLPASPHLQVLTITGIGEATAAALVAKIVDINRFATPNHLVSYFGVFPEESSSGVDKRGRPLPPGTLIMSPKGNDLVRFYLWNAARNAIQHNPAIRALYRRLRAKGKRGDVAFGHCMRKLLHLVYAVWKTDRPFDKEHFPWEGSSDTQPSATTPPSANAGTTPSANEKAVGHKRDLPAEEVVTTADSTLEPASPAVKPASQSAAPRPKVDFACVREHVTMEQVLQHLGYFASLRGRGQQRRGPCPVHSQPTAPERTFSVHLGKNAFQCFHAECAVKGNVLDLWAAIHRLPLYEAALDLAETFQVPRNREEEPVKGTSSPRTATAKTSAPAAATATDGAK

SEQ ID NO: 311536 - protein, 361 aa, unidentified
MHLTANISIPQKNFIAIDLHSDNAVICVRRNALNKAGELVGKNIWCGRVSIRDGLDNFIKVLVPHCQDFDHVALVESTYNWYCLADAFEERGWLLRVADPSTVSQANLKSSDDRTDAQYLAERLRVGSLKHYLPLNYSSRALRDLCRCRMAMVQDCASLKIKLINLYRNQLSKNVRVADLLERCQPHMQPNYRFNSDILEEFKDPNIRLRVAFEISRIAMLEEMIEECNAEIQKQCKDQELVKLCKTIPVCGPVLSAVICTEIGTMQRFKSAGDFVSYCRLCSTSKLSNGKSKGLGNAKNGNAYLSWAFTEVAQYASRNPVIREILQRLLRKYGGLRVKAKLRNPPCLVHAYVPNCQTVQA

SEQ ID NO: 311537 - protein, 378 aa, unidentified
MRKVRFVGLDVHAETIAVAVAETDGEVRSMGTIPNRPEAVRTLVKKLAPVGELKACYEAGPCGYVLYWQLTAMGVACEVIAPTLVPVKAGDRVKTDRRDAEKLARSLRSGDLTAVWVPDAAHEALRDLVRARLAAKRDQLRHRHRLGKFLLRHGRRRPDGMRAWTATHLDWVRHAVHFAQPAQEATLLDYLHEVARAAERITRLERAIDEAVVGAPATMRAVITALQALRGIAQVSAVTIAAELGTLTRFPKATQLMGYSGTVSREHSSGARIRRGAITKTGNAHLRRIVVEAAWAYRHRPATGATLRKRQAGVSAEVTAIAWKAQQRLHSRYRKLLAKGKAKQQVVTAVARELLGFIWAIGVEVERHAGTSRTPQAA

SEQ ID NO: 311538 - protein, 337 aa, unidentified
MKKIMLVGIDTAKQVFHLVGMDENNGLSYRRKVSRKRFLSTMAQLPVCQVVMEACGASHHWGRRIRAQGHEVRLIAPQHVTAYRVGNKNDYRDAEALIAAALSPSMKFVGIKTVGQQAEQAEHRVRSRLLSQRNAAANGLRGLLGEYGMAFAKGHKALREGARAFAGSDQARELGLVGLVNDVLDEIAALDERMAAYKRRIEQRVRLDPVSRQLQRELNGIGPLSCSALRVKVADARVFGNGRNFAAYLGFAPRHRGTGGKVTLGKLSRRHDRYLRQLLIHGARAVVSRVGDKQDEQSRWLRGLIERRGFNIACVALAHKNARQAWAILARQPQTAG

SEQ ID NO: 311539 - protein, 400 aa, unidentified
MKRACGLDVHKDTIFCATFNGKKHGPVTEYSTLTSSIRTMGEELSSAGVDAIAMESTGMYWIPVWNILEDMGFHLILVNPFLIKQMPGRKSDVKDAQWIATLLHKGLLRSSLVPSKEIRELRTYSRRYIKLQQRQTSVLQDMERTLEMCSIRITSFVSNISGKSVLRVIEQIVQGETAPDVLVESIHNRIVNAHTKQMIKESLTGFITEHHRFMLELSLQEYELLVSQGNNCLLKMEVLCNAEYKNEMKLLVTIPGISQITAMIVLAETGADMKAFENSSKFSGWTGLRPRNDESAGKYKSTATTKGNRFLRSVLVQIAWAASRSKGCYFKEKFNQLAMRKSRKKALIAIARKVGVLIWNVLYFNQVYNPEKLIIYDPGKLQAKLSYHQKEYDRLQKLIQ

SEQ ID NO: 311540 - protein, 350 aa, unidentified
MFVGVDVHKHSLCVCYYRSAKQYRYQSYPFTEHGFQAFLDSLTRRDEVAIESVTQAYYLIDQLGPRVKRAVVVNTFAFDLIRRSRAKSDEKDAFHLAQQLSYGHLPEVHLPERTIRDLRVYQNARVALVEERTRLKNRIHAAFLMHGVVTARKHLSSRKGREMMRRESSRYGGYPELELVALHLDRIDQVEEQMGAIERKMFELGSHLPDLPVLLQVGGISPLLAITILAEVGDFRRFPRSSKVASYAGLVPSTRSSAGRAKSGRCGYGRKRLRTAMVQAVRSLTVHEPENPLAQHYQILKARRGAGRATIAVARKLLEILWIMVTTEVHYRQLVPRLYETKLRRFKTAA

SEQ ID NO: 311541 - protein, 343 aa, unidentified
MAHCNLVAIDLAKNTFQAAQFKGNKLMSNKSVNRQTLLELLVQAKPSVVAMEACASAQHFARTAQSFGHDVILLDPLFVKAFRQGQKTDANDAIAIAVASRVPNVRSCKILTIEEQALQSLSKVRALADKQKIQLSNQIRGLLLEFGIVINQSEAAFKAAIPDILEDAENTLPLELKHALALSYSLYKQQCDNKVELQKQIERIAKQNDGCQRLMALEGVGPITAIELLSFLGNTTQFNDGRSAAACAGVTPLQHSTGGKAKIGRIPKRRGGALRRNLFLGARSVVSKLKNREATTEKERWIKNLLIRKGVKCAAIALANKTMRTAYALLKNGTSYEARLLTA

SEQ ID NO: 311542 - protein, 374 aa, unidentified
MTRLVINSLPMKTKTPPSVVSPAPAVPSGFTLGLDLGDRSHHVCVLDAAGQILREAALPNTRPALAQLLAEFPGSTVAMEAGTHSPWISRYLTGLGATVLVANPRKLHAISRNERKCDRRDAQMLARLARVDPALLHPIQHGSAQAQHDLLGLKLRDALVRTRVNLINAVRFTLKSLGHPVRNPSSAAFHKNVLADIPSDCLPVVQPLLTVLEQITGHIKAMEGDLVQRSKKDYPATQRLQQITGVGPLTALGFVLKIGDPQRFSRGRDVGAYLGLCPRRDQSGGTDKQLRISKCGDGLLRRLLVSAAHYILGPFGPACALREHGQRLTGTGSAREKKRAVVAVARKLAVLLLSLWKHGTDYEPRATALVAPPA

SEQ ID NO: 311543 - protein, 341 aa, unidentified
MTNYIGLDAHSKTCTAVVVDSSGKIKVKASFPTSEKHLLDFIKGVKRPRHLAFEEMNMAQWLFVLLKDQVDDLAIAHPADLPKHRGPKNDDVDAMRRADELRRDTITRVFHETGKEWDLRMLVHSYLELTTDLVRSKNRYKSFLRAHGLFVTGSSVYTDRETLNSITKDPDRFVAVNMFEQLTDQQDAKNCYEEKFAKFAGLWPVVGNLCTIPGIGTIRASIIAAIVCAPHRFANKHKFWAYSMLVRYTDESDGRIYGSRKAHGRRELKSVFMGAATAVLQSNSGLRRYYDRLRSKGVADKHAKKAVARRIAAIALMIMKTGAKYDDLHEEGRRKLDTVKS

SEQ ID NO: 311544 - protein, 340 aa, unidentified
MKKEAKFYLGMDVSKLWIDIAVMSVVNHEKQQVITERFDNDAAGMKALDKWLKKHQVTFDENSLLVIENTGVYHRLVWQYCSTHGLPLYIGNATHIKYSFGIARGKNDKIDSQRLCAYAFKNADELKATPVLNPVFLRLKDMMTARSRLLAQKNSIKVYLGEMKSSNSKETQQIIEQAHKAALEGIKQSIKIVEKQIEQMIQQDAAIKKNYDLLLSVPGIGHLTAVYVICCTNNFICKITGKQLASYGGVAPFSNTSGTSIKGRDKVHKMANKDLKKLLHMGAISAITHYPEFRDYYERKVKEGKHEQSVINAVRSKIALRAVSVINNQQLYVDKYKKAA

SEQ ID NO: 311545 - protein, 392 aa, unidentified
MICVGIDVAKDKHDCFILNSEGEVLADVFTITNNAEGFDTLLQTIRGCTRPEDKIKVGLEATGHYSYNILGFLLNKGLATYVINPLHTNLYRKSLSLRKTKTDRIDARTIATMLMSDVDLKSYTDISYHNEELKSLTRYRFDKVHERAKLKSSIARLVCILFPELEKLVPTLHMASVYALLSEFPGAKQVASAHLTRLTNLLHEASKGRYGREKAIQIRDAARKSIGSAMPAKSLELKHTIHLIGELDAEIEEIEAEIDSIMEKLHSPITSIPGIGSRMGAMILAEVGDFSNFDSADKILAYAGLSPSTYQSGQLTSSYAHMEKRGSRYLRYAIFNAAKFVCNWDPIFAAYLAKKRGEGKHYNVAISHAAKKLVRLIYAMEQTRQPYRRAAV

SEQ ID NO: 311546 - protein, 314 aa, unidentified
MTAQDIFVGIDISKSRLDVAITPGNQTFTCPNSEDGILKLVRRLEKFNPQIVLLEATGGYEFLLVAALRAAGLPACFINPKYVRNFARSAGITAKTDRLDAQVLALFAERLRPQPRTLPDERQQELKQLLTRRRQLLEMIQMEKNRLDPTPSPRVKQSLQQTIQSLEAQLAALHQEIDDFFQQQPLWRDLEKTLTSALGIGHLSALMLIAYLPELGRLNRKEIAALAGLAPFNRDSGQMRGQRHIEGGRSRLRQALYMATLVATRYNPVIQAFYQRLLEKGKAKKVAIVACMRKLLTILNAMVKKQQPWCPQHL

SEQ ID NO: 311547 - protein, 457 aa, unidentified
MTTRIIGTDLAVKAAHKAIVLDQTSNRFVSTLLKFHTDPADMDRVLSAARADAPHDVRLMAVLEATGMAWYSVGLYLDRHGVEVYRVNGQQVADLRRVYKRHAKSDRIDARVLARLPLLCPERLHRCPFPSGPQMALQRACREVARLTRQVAAGKNRLLATDQFAWLGLSDILPPYEEAAFWVRENWYDPWRVLDAGEETIAHAWRALSSEQGADTSWVSWLVRRAERVVALYGDPHAVPYALLQAHMQREQERIRTTQAQVHQLRLETVRPLYRQLHPQRYLESLQGVGQDSAAIFIAFIGDILRFPSLRDFRGWSGMIPFSRQSGDAQAKGLHITKAGPDLVKATAFLDAQVARLWDPQIAAVYYTQMVELGKHHLQAICACATHLLDRIYAILRDNRPYQLRDVDGTPIDKHEARRICQERYQVPDQVRRRNNRRVRQARKERRIERRFNRRKK

SEQ ID NO: 311548 - protein, 655 aa, unidentified
MSDVLRDLSRVQAVRPTCHWWRCPRLLAWFRVLMMVSLVKHPASAGLLSRIGDYLLLQHEGLGSDKNITDSAWPGRHQRRPGSIGTMTRSPPQPLFHRRRGFGGCAASHVEGTGPAHALRAILVGNPWVVVTVPALVPRARLLGWSRESATTSLVTGLVLIPFGRLHVFPSLPPPRLSCVCSLLLEAAMTPHKDYCLDPPPPVPTPMLPESSVLSDALQVCHPHAAGIDIGEAEHWVAVPPGCDPQPVRRFGTFTVDLDAVADWLIDCGVTTVAMESTGVYWIPLFELLEARGVQVLLIDPRQAKRVPGRPKTDRLDCKWLQRLHTYGLLAGAFRPEAHVCVLRSYLRHRQMLLTYAAHHIQHMHKALEQMNLKLTQVVSEITGVTGMAILKAILAGERDPQHLAKLRNPHCHHDEDDIAKALQGTWRAEHLFALRQAIELYDFYHQQMTQCDQQIKAHLATFDDKSAGRPLPPKARRHKKTNEPRFDARTPLYHLAGVDLTTIEGIEEGTALVILSEIGTDMHRWPSVKHFCSWLGLCPQHKISGGKVLSRRVRPGAHRVTVALRLAARTLHHSQSALGAFFRRMKARLGAPKAITATAHKLARLVYSLLQHGSAYVQQGLDAYEAQYRERKVTTIAKQAKALGYTLVPLAAQG

SEQ ID NO: 311549 - protein, 341 aa, unidentified
MDTISLIGIDPGKHCFHLHAQSASGHMVLRKKLTRNQMFTLLARVPSCTVVMEACAGAHWVARRLQELGHHPKLISPQFVKPFVQGNKNDFADAQAICEAASRPSMRFVSPRNEVQQTISALHRVREALVRDRTGTVNQIHAFLLEFGVSLPKGMGVIRRLPAVLASHDLPPRLVALLERLQAHFKYLDEQVAQLESELIRQLREDERSQRLLEIPGIGPITASVLATELGDAHQFACARQFAASIGLVPRQYSTGGKPTLLGISKRGDKNLRRLLVQCARALMLHIERHADRLGAWVRDLLARRHSNVVACALANKLARIAWAILARGTHYQSAQAVAAA

SEQ ID NO: 311550 - protein, 412 aa, unidentified
MLKIVYPICCGMDVHKSFVVACIANTNSQGVTTYKSHRFSTFTKGLRELSEWLLRNGCRDVCMESAGKYWIPVYNILESTCQIVLAHPKYVKAIRGKKTDKKDAKWIADIFKHDLVSGSFIPPADIRQLRDLVRYYFKLTSYTTGEKNRAQNCLTVSNLKLDDVFSDVFGKAASAITDRILASDEPFDVRPFLTKNIKASPEEIQLAVDGVMCSEQAEKLRIIRAHMNSLVLAKANLESTILGVAEKFVPQIDLISTVPGIQAFSAIAVIGEIGADMSVFLTSKHLCSWAGLTPQNNESAGKKKTTRISRAGAYIKPLLVQCANAALRSNNHPEVKNRYLALKKRRGHKKAIIAIARMLLTAIYNILKENQPYNPELYRKADSPPANREVSVEQAIFILQRQGFLISAPVTS

SEQ ID NO: 311551 - protein, 335 aa, unidentified
MRYIGLDVHYSSSTYCILDENGREVQCQTIRGHWPALLDRLRTVEGRWTICFEATCGYGYLYRELSRMATRVVVAHPGQLRLIFRAKRKNDRIDARKLAKLLYLDEVPEAYVPGQDVQSWRELIEHRRRMVDRQTTCKNAIRSLLRSHGKIASKGLWTRKGLAWLQAEPMPTPAAALKRDLLLDELTEAKRRVRTVTQALHALGCCHPAVILLRTIPGVGIRTAETVAAYMDNPRRFAHRSQVGAYFGLVPCQDASAGVNRLGHITRQGPGTARKYLVEAAWQGVYRSPTIRAYFERVLHGRPERRKIALVATAHYLLRCMHAMLVSGKPWHEAA

SEQ ID NO: 311552 - protein, 412 aa, unidentified
MRIMYRCCAGLDVHKETVQCCVRRVEPDGSLQETVRQFGTMTDDLLEMVEALKAQGVTHVAMESTGVFWKPIYNLLEEHFSIVLVNPAHCKQVPGRKTDVKDCQWLAELLQYGLLRGSFIPPRWQRDLRDLTRERTQLINEQTRVANRMHKILEDANIKLGSVATDILGASGRDMLRALIGGEQDPEVLAEMARSRLRDKIPQLRRALRGRVREHHRFQLELQWDHLEQLDQLVARLNEKITQLYQPYEQQLALVDEVPGMDRRMAETVMAEVGMDMRQFPSDSHLCSWAAVCSGNHESAGKRRSGRTRKGNRWLRQALAVAAPAAGHSKNSYLGARFRRLAARRGKKRATIAVAHTILRIIYHMLREGIHFHDLGPAYFDRLNPERIKHYLVSRLERLGFKVMLEPQQATA

SEQ ID NO: 311553 - protein, 409 aa, unidentified
MKRYYIGVDWGDRLHQVYVGDEEGRKVRDIKVPESVEGLAEMGRWLDEQRAEGVELWAAIEKPAGRIVDFLLDHGVEVYPVNPKAVDRVRDRYRMSGSKSDAFDAYVLAEFLRTDQAHLKALQPSSEKAQELKMLCRDQRRVGRHKARLLNQLTITLKEYYARPLDAFGDLDTELALDFLTRYPTPAHLSALKRKEFNRFATQEHHLSKQRCEELWEKLSPAQLKVPEHVVRAKAQLVEVLIDQLRAAIKAVKSYNHKVESFFASSLAAPIAKTLPGGNSGTLVAAIWAELGDGAGRWESFRHLQAEAGVVPVTKASGKSRVVHFRFACNKHLRYLLYWFSFVSLNHSEWAKIYYRQQRAQGHNHPQALRALGAKWLKLIFVMWRDHKAYDEKLHLANIALQKMRQAAA

SEQ ID NO: 311554 - protein, 347 aa, unidentified
MIAIGADVHKQQCTLAVQRPDGKLSMLPSMDNTRENWLNLLTQLPPEAQIALEVSTSGHFVMSVLEEAGWRDRAHWVHTAGIDSLRKQKTDRLDAKRLARKLSVREQDPLPEAWFPPRPIRELRLRARQRCWVAVLRTRVKNRVRSLLQMSGLRGTNPFTASGRTWLKQQKLSEATRESVEQLLRFHDFLTTEREKSETSLRGMEKDFPEIARLQTLPGLGHILSAVIWSEIGDLKRFDSPRALVNYTGLAPSLYESGERSVRGGITRQGPVWLRWALITAVNAATHGHNAFARRYRRLRRHKLPNVAKTAVARSIARCAYGVLKHGVDYQEQRWGRKAGIEMEQEA

SEQ ID NO: 311555 - protein, 400 aa, unidentified
MPQLWAGIDAGKTHHHCVVIDDGGARLFSQRVANDETDLLDLMGNVAVLSGGGEAVWAVDLNHGGAALLIALLAAHDQQLLYIPGRTVHHASRTYRGDGKTDAKDAAVIADQARMRRDLQPVRTGDDISVDLRILTARRTDKACDRTRAINRLRAQLLEYFPALEHAFDYSRSKAGLVLLTRYQTPDALRRLGQKRLHTWLKNQGTRSSADVAERAITAAKSQYTTVAVQRIGALMVAELAQEVLDIQNQLDALDTLIAERFREHHQAEIMLSMPGFGPLLGAEFFGAIGGDLAVFDSVDRLAGVAGLAPAPKDSGRIRGNHHRPRRYDRRLLRACYMAAMSSLRSSTASRTYYDRKRAEGKTHVQSVLSLARRRLNVLWAMLRDGTAYKPPGDLVASPA

SEQ ID NO: 311556 - protein, 355 aa, unidentified
MHCDGVLWAGVDIGIYTSAICVVDDLGRIVYEGVSDSTPEKTLELLAPYREQIKLVGAEAGVGTHLVRSLMAAGLPVAPFECRHAGKLLTIYRNKTDRNDAAGLAQIARLAENVVPTVHVKTIELQRIRNWLKLRGQANRQRMGVEDAIKSLFRVYGVRVGSIGSSKALLAAVERALDQLASDDREDVKEDITPLVSVALGLRASSRRLETRIRKFCEGNDVCRRFTEIPGVGPICATSFFTTIEIPSRFANTYAVGAYLGLTPRVRTSGRLIGRPRISKMGDTGTRNNLILAARAILRPATKAETALRTWGLQVAKRNSYRKAEIATARKLAITMLAMWKQNSNYAPYPQITMS

SEQ ID NO: 311557 - protein, 362 aa, unidentified
MEKYIFAGIDLGDKNSVARIAVDREKSERLGFVNTRGGRARLFKELNRQADEGGGAKILLAYEASSCGFVLRDEAQARGMICWVLAPTKMEKSVEQKRNKNDDRDADDVLEKLRGHVLAGNRLPTVWVPDVETRDDRQVLRTRLALSEKQTQVKAQIQMLLKRYGLEKPADLGSTRSKQYRQWLEGLCVCASLGWGTRQSLASLLRQLNGIEEEMKNLDKLVGQLGSDPRHKPIVEALMKEKGVGLLTALVYRTEIGQASRFRRGRHVGKFVGLTPTSHESGQQQDRKGHISRQGPPRLRKVLCQASWAHVLHDPDARQVYQRLVAKNPKKKKIALVAVMRRLAVRLWHRMREAELELKTQP

SEQ ID NO: 311558 - protein, 428 aa, unidentified
MKYNTQNAKIASITEKTLIVGIDVGSETHFARAFDWRNYEYTKKPLEFSNTEAGFMMFKAWVEDIAEKQGKTAVIPGMEPTGHYWFALGKFLQDSGMKPVHVNPHHVKKSKELDDNNPNKNDRKDPKTIAALVNEGRFSYPYIPTGIYAEIRSLSNLRFQTQEELTRIKNRIARWFAIYFPEYKDVYGDLMAVSGRMILKEAPLPEDIRIVGVNGVNQIWRNAKLRGTGMKRAKILVSAAEHSVGSKEAPEAARIELKNLLNDMDVYVSRMEELLQTIEEKLKTIPYVDKLMEIKGIGLITVSGFIAEVGDIGRFDNPKQLQKLAGYAIVANDSGKHNGESRISYRGRKRLRYVLYEAAISLVGKNAEFKEIHEYYRTRKENPLKKMQSVVAVACKIIRVFYTILTKGVDYDPMKLMSDIRRPQLQAA

SEQ ID NO: 311559 - protein, 426 aa, unidentified
MKFKQRQIKNQRVERITTNHLIIGVDIAKERHVARAVNFRGIELGRHVSFENRNEGFVKLLGWMQDLLAKHNLTSFIIGLEPTGHYWFNLAEWLTQNGYEVVLVNPLTTYRNKENRDNSQSKNDFKDALVIADVVSRGYYSVYHLHGDVYQRIRMVMNNRDYWVKQLTSLKNRIIRLLDIHFPEFCRVFEDWTTVRSLASLKIFPMPADVKQLTPMEIVSLWREKGGMKRAGGRTGMEIAARLIAAARNSVGSNVGYLEARNDLKRLLEDYERLNERLREFEQELEELLEPLPEVPLLRSLKGLSTLMISALLAGCGDLSKYAHGQQILSQAGLNLVNQSSGKHQGKVTISKRGRRQLRKYLYIAVLTLVNNHPSFQQWHLHNVQVLKMKKYRSIFKLIGKLARILIGMVKGQKEFKSEMEQAQAA

SEQ ID NO: 311560 - protein, 383 aa, unidentified
MRAVCGLDVHKDSVFLCIVCETGEIIEKVFGVLTFQLEDMRRLMQSYGVVEVTMESTSVYWIPVWRVLEPHFRLKLVNPYFIRQLPGRKSDVKDAQWIAECTLKDLVRGSFVPPEIIQQLRQYDRRIFDLDAEIIRKLSKLDAVMHRCNIRLSNYVSNTDTKSYKDVVADLCDGVTDPEALITRIHSRIINKHGRETILAALTGVVSQAETDAMRQLKEELDLARRHKQECHQKMVDICKEHFPKQFERLMTIPGIKERAATSLIAEIGVDMTKFQTAAHLASWSGLRPRNDESNRKVKSRRITHGNAFLRKTLIECAWGATRTKGCFFNRFSYHQIQVRRKNKMKVLVAVARKLLIAVWHVLRDETDYRDFDPDCNQPAANG

SEQ ID NO: 311561 - protein, 347 aa, unidentified
MSEDYGGRQVVGLDLHRRRSVLVRMSGDGRRLGVARITNSPAALRQQIARAGENPGVVREAAYGWYWAADTLAAAGAEVHLAHPRGVKAFTDRRVKDDFRDAADLADLLRMGRLPEAWIASAEVREVRELTRYRQKLIGLRTSCKDQVHGVLAKLGVPLTCTGIFGMWGARWLDELRLPQPYAGKVTSLRQLIGELTTEITMLGEVIADLLAGHRGWRAIQELPGIGPVLAAVIVAEIGDVTRFKTAGQLACWAGLTPRHRESDIKVVRGHVTTQGSRPLRWAVTEAIQRSPTASRPGQVKAAIIARRGKQARNIAKVAAARQLLTLIFYRLRDGHIRCLAAPVPAA

SEQ ID NO: 311562 - protein, 356 aa, unidentified
MTSMAHPDAPQLTIGVDTHLEVHVAHANDQLGRPVATIQIPTTPAGYQQLLVWAHELGEPIVWGVEGTGCYGAGLTRFLAANDQVVVEVNRTDRQARRLKGKSDPLDAQAAARAVQAGQARVVPKAGDGQVEMIRCLRVARATAMRARTQTINTLKGLLVTAPAELRQQLRGRTATRLVQTAAALEPGPITSPLAAATFALGSLARRHQALSAEIDALSSQLDRLIQTAAPELVARFGVGHDSAGALLVAAGDNPDRLRSEAAFSMLCGASPIPASSGKTIRHRLNRGGDRQANAALHRIVVVRLRYHQPTRDYMTTRLAQGKTKKEIIRCLKRYVAREVFAVLHQLHHDNITPAA

SEQ ID NO: 311563 - protein, 341 aa, unidentified
MSTATLVGIDLGKHSFHLHGQDKAGREVFRKKTTRQQMMRLLGNLPSCTVVMEACAGSHFLARQLMAFGHEVKLISPQFVRPFVKGNKNDFIDAEAICEAASRPTMRFVTPKTEAQQTLSVLHRMRESLVRDRTKTANQAHGFLLEFGISFPKGLSLVRRLPCTLGEHELPPRLATLLKRLHEHFCYLDEQIRALDKEMDNQLAADDLGSRLLSIPCVGPITASLLCAEMGDGKQYGGSRDFAASVGLVPRQYSTGGRANLLGISKRGDKNLRRLLVQCARVYLQRLAFQQGALADWVRSLRERRHSNVVVCALANKFARIAWAIAANHSEFEAGPSALAA

SEQ ID NO: 311564 - protein, 360 aa, unidentified
MKIVGCDFHPSWQQVAIFDPETGEIAELKLLNRDGEAERFYREVEAPALIGMEACGNSQWFIELAERLGHVVWVGDAAQIRASYVRKQKTDRRDAGHILRLLIENRFPRLWTPNAEQRDLRQLLIHRHKLVEIRTRVKNGLQHLALNCGFPKQSSRLCGVRGRAYLEKLPLAGWTARRREDLLKLLAELDKHLGELDDAVQRAADEHPQARLLMTQPGVGPITSLAFVLTIGDVSRFKHSNQVSSYLGLIPREHSSGGKQRLGSISKQGNRFMRQLLVESVQTVNRLDEGFRKQYAARCHHKAKGVAKVAAARKLAVRLYWMLKQNVGYPEIACIESSPRVALRGESHLATVNGRSRIQQ

SEQ ID NO: 311565 - protein, 310 aa, unidentified
MDTLFVGIDVSKDRLDVHVCPSGQAFAVSRDGKGLEELIDRLRALAPQLIAIEATGGFETIAAAALAGAALPLAIVNPAQVRHFAQAVGKRAKTDPIDAAVIARFAEAVKPEIRPLPDAQARLLGELVARRRQIVEMTVAERQREQRTAIARVRKSILRHIKMLERELADLDNDVGTLVRGSPAWRDKEDLLVTFPGVGNTLARTLLAEIPELGSLTRREIACLAGVAPFTRQSGRWKGKSMIAGGRAPVRTALYMAALSAISCNPPLKRFYQRLLSVGKPKMLALIAVARKILVTLNAMIRDRKQWQLA

SEQ ID NO: 311566 - protein, 415 aa, unidentified
MADQRQWYAGVDWASESHHVFVTDGDGRKIGERVFKHSGEALAEMAAWLMAASGAADPSQILVAIEVPHGPVVETLLERGFKVHAINPKQMDRFRDRFTMAGAKDDSRDAEVMSSALRTDARCFRLLAVADPMVCELREWSRIAEELGVERNRLTNRMREQLWRYFPAFLEFDSDLRAGWLLDLWQAVPTPDKAAGVRETTIAKLLKRHRIRRFDAAHVLSVLRKPPVQVAAGTIEAASAHITTLIARIRLVNRQIEQAHQRLDSLIARLSPPEEAAPGQNKQHDAEILASLPGVGRIVLATLLAEAHDALQRRDYAALRSLTGAAPVTKRSGKSCTVIRRHACHARLAGAMYHWARVATQHDPTSRAKYAALRSRGHSHGRALRSVADRLLNVACAMLRAGTTFNPDLAVQKTS

SEQ ID NO: 311567 - protein, 358 aa, unidentified
MGKSSENLTCVTRAGLDLAKNVFQVHCVDAEGNVVAARKLRRGAVIEFFARLPVCVVAMEACSTSHHWGRQIAALGHEVKLIPPAHVKPYVRRNKTDAADAAAICEAALRPGQRFVPLRSVANQAAVMRHRVREQLVEQRTALLNALRGHLSEIGVIAPQGAQHVYSLMTLIENGFDDNGEIVVPESVRAALAPLVKQIEAIDKHLVAIDAELAAAAKADEKARRLMTIPGIGPVIATAIVATVGDISSFASGREFAAFLGLTPRQHSSGGKERSGRISKMGDRYLRKLLVVGATSALCHSAGHNDALRSWAKAMLKRKAGLKYAFKLTAVALANKLARIVFAIQRSGEGYDDRPIAA

SEQ ID NO: 311568 - protein, 343 aa, unidentified
MYYIGLDVHKRTISYCVKDAAGCVHMEGKIGSTRRELDAWIRTLPQPRTIAMEATIFTGWIYDHLLPHAEKVKVAHPLMLRAIAAAKRKNDRIDASKIADCLRCDFLPECHMASTEIRDRRRTLRYRELLVKQMVQMKNRVSGLLMEKGVTHTKRRLHKVGYFAELMSENKEIDASIRPLLKLSREHIVRAQKLDYALVSSLERDPLLAERLKRLRTVPGVGSITALTWALEIGDVSRFRSIKQAISYCGLCGAEKSSADKVMRTPISKQRNKHIQHVLVEAAKLAPRLNHDLALIYEKEMQKGNRNRATLAVARKIVAYLLAVERRKQDFVSADQLGGTAAA

SEQ ID NO: 311569 - protein, 357 aa, unidentified
MKKGYQKDKTLARGKDVYIGIDVHKENWHVAARVDGEEVFHGSMASEYHSLRKLLDRFKGCWIKVAYEAGPFGFWLYDKLMVDGIETIVVPPSLIPMESGNRVKTDKRDSRKLAKLLESNMLKKVYVLTEEDRADRELTRTRRQLLEHRGDVMRQIKSKLLFYGIKSPFSHKRESWSKRYVKWLRELTFEHEVLKVPFESLIDLYEYLTSQVMKISKQVVALSRSDKYRHKIKLLRSVPGIGILIGMELLVELADMERFKTAEEIASYMGLTPSEYSSGQHVRQGRITRCGNKRARTCLVESSWHLIVKDPLMRFKYLKLKTRKGAKKAIIAIARNLIMRIRRILLHDEPYVVGMAA

SEQ ID NO: 311570 - protein, 424 aa, unidentified
MSYRIAGIDVHKKMLAVVVSDVEVDGECQFERVRYSSSPEHLRFLAQWLIAQRVEEVVMESTAQYWKPVWGALERYWKPICRERADAGPKSGTLHLAQAQSNRGRRGRKKDFPDAERLVKRLVADELVLSFVPDTEQRLWRTVTRRKYQLTRNHVRLQNQLEGLLEECHIKLSSLVSDLLGASARRMLKALAEGETNPVALAAMADRNLRATQAQLCDALGACAELTPIYRRLLKMFLEELQFIDQQISKLDQELASLLSQQHDAVVHLAEIPGLGVDSAQQIIAEVGAGAATFPSAKQLSSWVGAYPGEEESAEVSKSHRSPKGNRHVRRILNQAANAAAKSKGTIFEIAYRRLVSRLGHNQTIGAIAHRLCRLIWIILHRGVSYEERGPSVNAKTRRHRTNRMIRELRNLGYRVEPLSTLYE

SEQ ID NO: 311571 - protein, 385 aa, unidentified
MKEQGFVPREFDIFGGLDVDKKSIAITFMSHQGILQSFSMPHRAEHLLSYVSKHFEGKKVAFAYEAGPTGWGLYDRLTDEGHVCVVAAPSMIPKVPGQRVKTNRLDSRKLSEHLRGGQLKSVHVPSESYRQLRQLVQLRDTFVKDVTAMKLRIKAMLLFEGLEFPPAPAGSQWSLIVRGKLKKLPCSSAVRFKLDQLMESLESSEKRVLQTIREIRRFYQQDPELSQAMAHLKSIPGIGEIVASHLLARIGDPQQVGNVRQLAGFIGLAPTEHSTGERVARGHITRSGDGRLRSKLIQAAWSAIRQDPELREFYRSVYQRHPRDRAARKAIVAVARKLTTRIYAVLKQQRPYVVRERVHSTPLTQEETSPQGTTRRWIEPGETFS

SEQ ID NO: 311572 - protein, 334 aa, unidentified
MDIVGIDISKAKFDAALLLGERIKHAVFSNTEAGFQQLLAWLAKHRPDPTVPVHACMEATGNWGLELADFLHAQCVRVSVVNPARIKAYGESELARNKTDKLDAGLIARFCRAHSPPAWVPAAAHLRELRELVRRCNALRAARVQELNRQKAGFASPAVARSIAAHIGWLDEQIEAVMDEARHLIAADPVLSKNLALVRSITGFGEVSATILLAELPNIADFTPKALAAFVGLSPSDHSSGTSVRKPGKISRIGTERLRSTLYMCALRPNEPTSRLPPSSPACPLRASRQKSSWLLSPASCWSMPTPLFVLRKHSNLLRMPVFLLDPQHGISAA

SEQ ID NO: 311573 - protein, 351 aa, unidentified
MIIGCDFHPRFQQIACVDTETGEGVERRLHHPAEAESFYRSVAGRGVRIGMEATGSFGWFRRLLNELGHELLLGDATAIRASNPRKQKTDKRDARHLLTLLLEERFPAVWQPTEENAGLRQLLLHRSSLVRMRTRVENQLDSLGKNEGMVASRRWTGKRRREVEGLALQGWYGERRRDLLLFLDQLEERIGPLDQAVRAAAEADAQARLLMTHPGVGPVVSLAFVLTIGDWQRFQRGKQVASYLGLIPCEDSSADKRRLGHISKQGNPMLRWLLVQAATTAQRYDGPWHRQYVRLSMQKHHGVAKLAIAHKLAVRLYWMLRSGQDYRQVMERGSHAGQSACPNGCGTTPRT

SEQ ID NO: 311574 - protein, 411 aa, unidentified
MRRVIGMDIHRTFAEVVFWEDGKLRPAGRISMTRAGLEGFGRSLSKEDEVVIEATGNAMAVVRVLSPYVARVIIANPLQVKAIAHAHVKTDKIDAGVLASLRAAGFLPEIWLPDAETERLRRLVARRNQVVRHRTQIKNEVHAILHAHLIPPCPHADLFGGLGQIWLSRQVIPDDETAAIGRHLRELDRLGEDLSVLDREIAQAAVDNPAVKRLLTITGVNLIVAAGLVAAIGDVRRFSDPQKLVSYIGLNPRVRQSGLGLAQHGRISKRGRAHARAMLVEAAWAAAKAPGPLRAFFLRIRARRGHQIAAVAVARKLAVLCWHLLTKETDYQWARPALVANKLRSMELQAGQPARKGNKRGVAYAYNIKELRDREIELARHAEQAYERFVSQWQRRGNGKQRTGAAKEERH

SEQ ID NO: 311575 - protein, 423 aa, unidentified
MAYRIAGIDVHKKMLAVVVADVEVHSEYEFERRRYGSNPEHLRSLAEWLMEQQVEEVVMESTAQYWAPVWGALERYWKPTCQEREGAGPMSGTLHLAQAQSNRGRRGRKKDFPDAERLIKRLVANELILSFVPDAEQRLWRTITRRKYQLTRDKVRLQNQLEALLEEIHIKLSSLVSDLLGVSARRMLKALSEGETSPEALAAMADKQLRATQAQLCDALGACAELKPIYRRLLKMCLEQLQMIEQQISQLDQEMANLLSPHQDAVKRLAEVPGLGVDSAQQIIAEVGAQAATFPSAKQLASWVGACPGDEESAGVSKGHRSPKGNRQMRRILNQADNAAARSKGTIFEIVYRRLVSRLGHNQTIGAIAHRLCQLIWIILHRNVRYEERAPSVNARSRQRRTNKMIRELRNLGYRIEPVPIPA

SEQ ID NO: 311576 - protein, 402 aa, unidentified
MNAVGIDVSKGKSMVAIMRPFGEIVSAPFEIKHTASDIHSLVELINSVEGESRIVMEHTGRYYEVLAHQLSKANLFVSAINPKLIKDFDNDSLRKVKSDKADAVKIARYALDKWQNLKQYNVMDELRNQLKTMNRQFGFYMKHKTAMKNNLIGILDQTYPGVNTYFDSPARSDGSQKWVDFASTYWHVDCVRKMSINAFIDHYENWCKRKKYNFSKSKAEEIYGKAKELVPVLPKDDITKLIIKQAVDQLNSASITVESLRTLMNETASKLPEYPVVMAMKGVGTSLGPQLMAEIGDVSRFTHKGAITAFAGVDPGVNESGSYEQKSVPTSKRGSSDLRKTLFQVMDVLIKTHPQDDPVYQFLDKKRAQKKPYYVYMTAGANKFLRIYYGRVKEYLASLPES

SEQ ID NO: 311577 - protein, 341 aa, unidentified
MIIIGCDFHPRFQQIAMLNDETGEYQEPHLEHGNGEAAQFYRRLQGQAVGVGMEASGHSRWFERLLAELGLELWVGDPAQIRAQKVRKQKTDKEDARLILKLLLEGRFPRLPWRPAPAERDVRQLVLHRHRLVQMRTRVKNQLQALAMNECLCGKSKLWSRAGRAQFEAVPLLPWTARRRQELFQLHDQLVSTTQPLDQAVAEQAAARPEVRLLMTHPGVGEVTALAYVLTLGEPKRFACGKQVASYLGLVPREDSSGGKQRLGHISKQGNALLRGLLCEAAHVAARHEPELRRVWRRMAMKKNRPIATVAVARKLAVRLWWMWIRGLDYGQMFGSGSHAG

SEQ ID NO: 311578 - protein, 470 aa, unidentified
MQVEHERCAGIDLHKKTAVTTIMITQPNGTVEEHTRTFSTMTSDLLALDDWLRAHRVEIVAMEATGIYWRPVFNILEEGRKIILVNAQHMKAVPGRKTDVKDSQWIADLLRHGLFSASFIPPAPIRQLRDLTRYRKMLVQERAQEINRLQKVLETANIKLAAVATDVLGKSGRDMLNCVIRGERDAEALAELARGRLRAKLPDLRLALEGRVEPHHQFLLQQILAHTDFLEQSIEQVQHEIDKRLIPYQEAVTLIQSLPFQLQAGAATVIAEIGVDMSRFPSEAHLASWAGVCPGNCESAGKRKSGKTTDGNPYLRGVLCEMAWIVSRMKDNYLSAFYHRIARRRGKKRAIIAVAHKILVIIYHMLKKNKPYEDLGGDYFDQLDAARIERRAVQRLEQLGYDVTLTPLELPDKTKKSPPDKATKKPPDKATKELPDKTTKKPADKTEKSPPDKATKKPAKKKEVASLQNV

SEQ ID NO: 311579 - protein, 426 aa, unidentified
MNCTQNYKIDQVTEQTLVVGIDIAKRTHYACFVDDRGRVLRKSFPIFQSKEGFQQLYKAIQGAMQAFGKSEVIVAVEPTGHYWLNLAYFLEEHGIPLVMVNPAHVCRSKELDDNLPTKHDAKDALVIARLAKDGRFLVPRLLHEIEADLRVGSTLKEKLRKEQTAVKNAIIRWTDRYFPEFWTVFRDLGKTALSVLEWTPFPADMAGRTAEELIEVYRQSEGLKCPQKAKIQALINAAKDSIGVTEGTTMARFEIAALVRRYRQLEAEIAALDAELKALVQTTMEYQWLKTVDGLGDATIIDLLAEIGSFAHYRDPRQLVKLAGLTLKENSSGQRKGQKHISKRGRKRLRSVLFRAMIPLIRHNEAFRELHEYYTTRSVNPLTGKQSIVALCRKLLNVLFAICTKKQAFDAERMKQDVLSQVQRAA

SEQ ID NO: 311580 - protein, 338 aa, unidentified
MERQYVAIDLHRRRSVIVRENPAGEELGVVRIDNDPTALAAAIAEAGESPEVAIEATYGWYWAVDALEAQGAQVRLVNPSGLEWENRRVKNDYRDCKDLITRMRINKLPQAWIAPPLTRELRELVRYRAKLVAIRTSFKAQIKAVLAKLGINPPVDELYGPTGTAFLDELDLDNAFGWRIESLRELIAAVDEQIDWLDVEISSWLNDDKGYWAIRQIPGIGPVMASIFVAEIGDVTRFSSPEVLCSWAGLTPKHRESDTKVHRGKITKQGSKLVRWAAIEAVAQIRGNPKLKADYERIAERRGTKVARVAAARKLLTLVYYGLRDGEIRCLAQLADAG

SEQ ID NO: 311581 - protein, 316 aa, unidentified
MANLTKSKSSVNVGVDVGKNFLDVYIHEKQIYFQEENNYKGIQNILKRLTHYQVERLVVEATGRYEFALAEAAYLKEIPVCIMKPLSIRRYAGAVEQLAKTDKIDAAIIAEFAAVIKPKPTPQKSKNLIAIKDLLARRRQVMEMRTQELNRVKIMGKALDASCKRIIKVLDKEIDRLEKSLNNYVDEQSEWSEKRELLISTPGVGNTLVYTLLADLPEIGTLNNKEIGALVGVAPMNRDSGSLRGKRKIKGGRASVRTILYMATLSATQCNPIIKHFYKKLVEQGKHKKVAIVACMRKFITILNAMVRDKKEWCHD

SEQ ID NO: 311582 - protein, 384 aa, unidentified
MQKPNDLNQSRIVLKQDSTLIAVIEMSLSSWLVAGIVPGVERQPLKKLAVDESALLKLLNRWREEAEKAGRRIERITVAFEAGRDGFWLARWLRARGIEPHVIHASSVAVSREHRRAKTDRLDTELLKRAFLGWLRGERDHCKMVAIPTTKDEDAKRPNRERQSLVGEQTRIVNRMKAALIRLGIRGFNPKLKKAAGRLEDLRTPEGEPIPPNTLAELHRDMERRRLVSDQIRQIEKARLERMEQAPGDGPHAMVRLIARVIGVGIETADMLVHEVLSRKLRDRRAVARYAGLTGAPDESGSKRREKGLAKAGNARVRGGMIQLAWRFLLFQKDSALAQWYRTRTEGGRNRKTIIVALARKLLIALWRLVTTGEVPAGVVLRAA

SEQ ID NO: 311583 - protein, 334 aa, unidentified
MKSDTVHIGVDVSKGKLDIYVPAKKEGSRPMTKEVDNDIKGFRELRDLARKAKATVCVEPTGGYELELIAFMHKFDVPIAYTDALRVRQFARAEGSLSKNDTIDAALISRFADKIGVRVLEAQEVEAVELKRKAKFRQTMLDSRTAMINRLETEIDPEMKALLKEQIRLAGRIIDKAEKLCLDTVKKNERMDSLRERFTTIGGVGDLTAISILSSLPEIGTLSDGKLNRLVGIAPEEKQSGTKEWQRRIWGGRKDVRNALYMAAVASIKWNAILGSYYHKKRAEGHPHKWAIVPTMRKLLSLLNRIARDPGFTPMPEPESTKQNANVGRRKKAA

SEQ ID NO: 311584 - protein, 343 aa, unidentified
MEYYAGIDVSLESSSICVVDASGRIVREAKVASEPAALTAWCKGLGLNIARIGLEAGPLSQWLFAGMKQAGLALELLETRHVRNAFKLMPVKTDRKDARGIAQLIRMGWFRPVHCKSVAAQETRSLLGARKLLQSKLHDIELGLRGTLRGFGLKLGKTTPKTFESRVRILVADHPTLLAVADALLRARAMLAEQFIKLDKQLHSVARGDNRARLLTTVPGVGSIVALTFSSAIDDPERFKSSKTVGALFGLTPKKYQSGETDVTGRISKIGDAGVRTALYEAANVLLTRTRKASSLKKWAMGVAKRAGMRKAKVALARKLAVVMHRMLLDGTPFAAQKTAATA

SEQ ID NO: 311585 - protein, 355 aa, unidentified
MTASYNYHIGVDYHKSYSHLVVQDSSGKTLRSGRVKNDRQSLGGFLERYRENSHAVIEATRNWMVMYDWLDDICDDVVLAHPLKVKAIADAKIKTDKIDATVLAHLLRADLVPEAWAPSEKSRDLRVALRERMFYVRLRTMTKNRIVTVFDRYPEQTAQLKKLGDLFGKTGRVQLAQVNVSEIDRIQIDRGLDFIGDIDVRIKQSEETIRAMTKANANVKLLKTIPGIGEFFARLIDAEIDDISRFRNPKKLAAYAGLVPSTYSSGGKTFHGKIIKQGNKWLRWAFVEAVTPAIASDAQLRARYEHLKIRGVNKARVAIARKLLTIVFQILRDQRAYERRGESTMEGTSTISRLS

SEQ ID NO: 311586 - protein, 378 aa, unidentified
MDHIGIDVHKRESQICMLAEGGELIEQRIRTEPERFAAVFGKRPRARILIEASTDSEWVARCLEGLGHEVIVADPNFAPMYATRTRKVKTDRRDARTLADANVLGAYRPAHRLSDAQRHVRGRLGVREALVRTRTRYISLIRALLRQQGYRVPSGSAEGFVHRVGAMALPGQLRSLIAPLLAVMLPLNRQLAYSDQVIEHLAVHDPRIQHLRTVPSIGPVTAAAFLATLDDAQRFHHAHEVEAYLGLVPCEFSSGDSQRRGSITKAGPGRPRWLLIQAAVSILRRRPPAAEALWTWALRIAARRGKRVAVVALARRLAGILYALLRDGSVFQPHRAVGVPGRRWGPGTAAPRVRDDPSPASRAAEQRSKDVHVDRFKI

SEQ ID NO: 311587 - protein, 366 aa, unidentified
MQKTSTMRRTANKIFKGRQLTIGMDLGDRWSFYCVLDESGKVILEEKLATTPETMKQTFARIPRSRIAMETGTHSPWISRLLTQLGHQVIVAHAQKVDLITKSTRKDDRHDAKTLARLARIDPELLGPVRHRSAKAQIHLAVIRARAELVRVRTALINGARGLTKSYGERLPKCGTQQISREFGTGLSTELREVLEPLFREIESLNERIKEYDRRIEKMAKEIYPQTELLKQVKGVGELIALTYVLTIDDPHRFRKSREAGCFVGLQPGRRNSGDSEPQLHISKQGDEYLRTLLVQGAHYILGPFGEDSDLRRWGRKLAERGGKNAKKRAVVAVARKLAVLLHRLWVSGEVYEPLRNTQKVIRAAA

SEQ ID NO: 311588 - protein, 409 aa, unidentified
MTNQSKRFVGLDVHKHYVMVGAVDQDKQTVLTPRKVSLVEFENWAKKYLRPTDETVLEATSNAWYVHDLLKPIVERVVVGHPPHIKLITAAMVKTDKRDTMTLAKLLSVDLIPQVWVPPTHVRELRALISHRRRQVSHQTQIKNRLQSALHRHHIIPPEGKLFKAANRAWWFELELGSSEKLRIRQDLLMLDHLAAMLKETATEIQRLSLSDPWLEQLPYLIQLPGIGLSTALVILSAIGDISRFPSAKKLVGYSGLGARVHSSGLSHRTGGITKQGRRELRAVSVESAWVAIRYDPHWRRQFDRLAGRIGRHKAIVAIARKLLVVIWNVWFHKRVDRQADPERVARYFLAWGRQAKVYSQLELKASAFARQQLDILGIGQELSRISYGAVYRLPPSTLPLVEEAATPA

SEQ ID NO: 311589 - protein, 338 aa, unidentified
MGYFVGIDLHGDNNYIGILDEEDRKVFKRRNRNDINEIKRVLEPYKKEIKGIVVESTFNWYWIVDGLMEAGYQVHLANTSAMQQYEGLKYIDDTRDSFWLAKMLRLKILPEGYIYPKETRSVRDLLRKRMMLVQQRTAHILSMQTMVNRNKGVPISGDTIKKLSNEEVMGMFSDVHLTMSAQCDHEVIEVLNKQIYKIEKAVLKEVKLKKPYKKLLKVPGIGEILAMTIMLETGNIERFSDVGMYSSYCRCVSAKKLSNGKSKGKGNRKNGNKYLAWAYVEAAHFHVRFCEKGRKWHQRKASKSHVVLATKALSNKLARACYYIIKEQVNYDEKKMFG

SEQ ID NO: 311590 - protein, 336 aa, unidentified
MKMIVIGIDVSKEKLDFCVKSAEKVIKELVVENTTKEIRSSLKSIEKEFQLSLSDLLLCAEYTGQYTYPLCCACAELEIDLWLENPAQIKLSSGVQRGKNDKIDARKIAGYALRYQDKVRLFSLPQKNIESLKQLISERDMYMSDKGKYQGQLTDQKRFMSKDDYRKKSKRLDRQINELNISITEIEQEIEQLIDGDEILKRQHELLTSIDGIGKKVAVKMIVETNAFRDFDNGRQFCCHAGVAPFRYDSGSSVRSRNKVSNKADKSIKSLLHLAALVVATRLKEGELREYYLRKVAEGKNKMSVLNAVRAKLVLRMFAVIKNNNFYEKNYAFSLA

SEQ ID NO: 311591 - protein, 344 aa, unidentified
MEQISRIGMDTSKHVFQLHGVNAAEAPVLRKKLRRKEMVTFFEKLAPTVIAIEACGASHHLARRLQSFGHTVKLIAPQLVKPYVKRGKNDAADAEALCEAMSRPTMRFVPVKTAEQQAALMLVGVRDRLIRNRTQLSNAIRGHAAEFGLTAAKGMAHLVPLLDRIEADENLPALARELFAMQAEEYARLQAQIDEVDAKLTAWHRADECSRRLAKIPSIGPIGAVLLRMKTPDPTQFQSGRQFAAWIGLTPKDHSTAGKVRLGVITRAGDEGLRSVLVVGATAVIKQVLRGGKTSAWLVELLKRKSPKLAAVALANKTARIAWKMMLTGEPYTAKSAAALAGAR

SEQ ID NO: 311592 - protein, 408 aa, unidentified
MDRLIERCCGLDVHKTSIAACVRIPGPEGERVQHVRTFGTTTVQLLALRDWLEAHGVTHVAMESTGVYWKPVYYLLEDRFECLLVNAAHLKHVPGRKTDVQDCVWIAQVLEHGLLRGSFVPPPLIRDLRDLTRYRASLGEERSRQANRLHKFLQDAGLKLSSVASDILGVSGRAMLEALVHGTTDPAVLADLARGKLRRKLPALREALAGHFRAHHGFLVGQLLAHLDFLDESLETLNGRIDEMLAPFAETLDRLDRIPGFSRHTAEDVVAEIGLDMAVFPSDGHLASWAGLCPGQNESAGKRRSGRTRKGNRWLRRTLVHAAHAASRTKDCAFAARYRRLARRSEKKAIVAVAHALLVTVYHMLTRGTPYQELGANYYTRQNLDRLRRRAIQTLESQGYRVTLERVA

SEQ ID NO: 311593 - protein, 401 aa, unidentified
MVSDFRKGRYNLMKIYVGIDIAKLNHFAAAISSDGEIIIEPFKFTNDADGFQLLVSKLESFDKNSLIIGLESTAHYGDNLVRYLVTELYQVCVLNPIKTCQMRKNNVRKTKTDKVDTYVIAKTLMMQDNLRFVSFFDLDMMDLKALGRFRQKTIKQRTRLKIQLTTYVDQVFPEIQYFFKSGLHQHAVYALLKEAPSPKEIASMHMTHLANLLKVNSHGHFTKEQAKELRVLAQKSVGANDSAISIQITQTIQQIELLDSQLEKIEAEMTDIMKFNDSVIMTIPGIGYINGGMILGEIGDIHRFSNPNKLLAFAGLDPSVYQSGNFQAKTTRMSKRGSRVLRYALVNAAWNVVRNNATFKAYYDAKRAEGRSHYNALGHCAGKLVRVIWKMLTGEVEFNLE

SEQ ID NO: 311594 - protein, 353 aa, unidentified
MAQSTEGREVILGVDTHLDAHVGVVIDGVGKVLGTLISPAEPHGYQQLLQWSRSFGACARAGVEGTGTYGAGLARVLRDAGIEVLEVNRADRSKRRLRGKSDPTDAENAARAVLSGEATAIPKLQSGVVEAMRAITVARRSAVKAKTQAINQLRALLVTAPDPVRAKLMKSKPEHCVQACIRMRALGTTPLLEALTRTLRILAKRWTVLAAELRELDAMLEALARRAAHRMLERFGVGPYTAATLMVVAGDNPERLRNDAALAALCGASPLPASSGKTQRHRLNRGGSREANNALWTIAMVRMRSDARTRAYVARRTAEGLSSKEIQRCLKRYIVRELYPLILADLRDAVASS

SEQ ID NO: 311595 - protein, 350 aa, unidentified
MNVIHYIGFDVHKKSISYCVKAGEGTILEEGKIVARRASLREWARKRTVPWKGAMEATLFSAWIYDTLKPFAVELAMGHPAMMKAIGASKKKNDQLDARTIADLVRCNLLPECWVAPIEIRELRRLLRYRNLVVGQAVQMKNKISGLLMETGVEYNKRRLHGKEYFSELMNTLEEVPGSVKDLLEQSRGTLEMFQTTQQQLLVRLQKDAHLSQRVKLLRSIRGVGEVTALTWALEIGDAQRFRSIGKAESYCGLTSALVESAGKQQRGPISKQCNRHLQRVLIEAAKLAPRWNPPLAAVYEHAIQGGHRNQATLEVARKLVAYLLAVDKSGKAFQIRTPATEEEKEVVAA

SEQ ID NO: 311596 - protein, 367 aa, unidentified
MGDTITWVGLDAHKATIQVAMLLPSRAEPVQWQVANEPTAVRRMARKIRRAAPEKIRSCYEAGVCGYTLQRQLEAAGMACEVIAPALVPVKRGDRIKTDKRDARKLATLLRAGLLTAVRPPTPAEEAARDLCRAREDVVEDLQRARHRLGKFLLRRGLVWRASKAWSRAHRQWLRDLVFEGEADRAVVADYLLAVEQVEARLETMDMAVGALAAEAPYREPVGWLRCFRGIDTVTAMTLVAELHDIRRFTSARALMAYIGLVPSEDSSGERHRRGAITKAGNAHVRRVILEAAWHYRHPPRIGRTLRARRQGQPGRVIAVADKALQRLHRRFSRLSARGKTPQKIVVAVGRELVGFVWSALTAGAPA

SEQ ID NO: 311597 - protein, 485 aa, unidentified
MKDKSVFTRQNQILINLFRDAQHPEKVLCVPIDYAKQTHMALFCDGSERQLKKPFPVKNNPEGIAFLLDAVEKICRKHHIRREHVFFGGEDCGTFADNFIYALRKEGFTVMGVNAADAAKQRENLQASTDKLDLLGIAKMLLGKRGSIAGGQIGKERALRSLTRHRDSQVRMRTATSNRIHKIVDQLFPGFLDEKHSGIPPFSEASLYTMQDRFSPVQIAKRQDKALLRQLKTHGLQHAETALGKLKAYSRQVLGHPPELVGMLQTSLAGEVNLYRCLGINIEQINREIAQQLAQVPGAMLTTIRGTGITLAAGVAAETGPPETQPSIRRLCSYSGIVPRVKQTGGPEKGAKTGKVSRRCNHLLKNHVVQCGNHLGQHGPADLKEDHRRRGANGQHADFGMARRYLRMGMRLMRNGEAYVPPELRTGATLEELQAYYLELWPKLLDKWVKAGAVHTAFHEDNPLGQWRKRIEAIYEIELLLPKKK

SEQ ID NO: 311598 - protein, 316 aa, unidentified
MSHYQNFIGIDIGKVEFVVALHGNKKVKTYDNTPLGFKAFLKDFKQELPNSLVVLETTGGYETKLLLTLCDKKYNLHRAHTRKVKNFIRSFGNAAKTDALDAKALALYGFERQECLEIFTPVSENLSSLYELVHRRKDLKQMLVAEKNRAKAPKISVLIKNSCENMITLLNEQILLITQQIEALINSDPDFLARAEVLKTIPGIGNITAQDLLALMPELGSLTRRQAASLAGVAPRANDSGKFKGYRHTASGRESIKPILFLSAMAARNSHSPLKAFYDTLIARGKKKMVALTALMRKIIVIANARLKPLAMKKIQ

SEQ ID NO: 311599 - protein, 315 aa, unidentified
METTTPTTEVTYVGLDIAKDRLDYTVDGIRCDHVPNTPSGHEKLLGVLAKLRGVRVICEATGGYERAVVAALLLAKHEVCVTNPGRVRAFAHAEGLLAKTDRLDALLLRRFGEKVQPRLHAPMDQAAITLRELLDYRRQVSEQLVAVRNRLELAGPVLRARLDGQVTFLEKELTATDQLIQDHIDHDDTLSRKAARLRELKGTGPVLAATMLAYLPELGEIESPQLSALVGVAPFARDSGRSHQARHVRGGRGLVRRVLYMAAVAATRHNHVLRAYYTRLVAAGKPKMVALVAVMRKMLHVLNRLLADPNFVLVQ

SEQ ID NO: 311600 - protein, 387 aa, unidentified
MTTDHPAAKVQTTARPNNSKLFVSLELSRSAWLVTASAPGSDKFSKYAMAGGDGRALVDLLDRLRRTAERRVEVSVEVVAIQEAGLDGFWIHRLLANNGVESHVVDAASIAVDRRHRRVKTDAIDGETLLRTLMAWARGERRVCSMVRPPSPAEEDRRRLTRERGTLLKERIQHTNRIKGLLSGQGITDYDPLGKNRHTRLDALKTGDGRALADRLKMEIRREIDRLDLVNAQIATVERERDALVKTTVDVDAQNAAAVLSRLKGIGAEFSSLIWLEALFRSFANRRQIAAYAGLAPSPWQSGSTDRDQGISKSGNRRLRHTMIELAWFWLRHQPDSALSVWFRARLGQARGRLRRIAIVALARKLLVALWRYATQGVVPEGAVFKA

SEQ ID NO: 311601 - protein, 408 aa, unidentified
MEVLYPRCAGLDVHKATVVACVRLAHGPESEHHVQTFGTTTGGLLRLLDFLQQHGCTHVAMEASGVYWKPIWHVLEDSFALTLGNAAHIKNVPGRKTDVNDAMWLADLMAHGLIRASFVPPTPIQELRALTRTRKQLVREQVSHVQRVQKVLEDANIKMSSVMTDVLGKSGRAILEAIIGGESDPEKLADLAVGKLRRKRDALVESLHGRVTAHHRFLLGLHLAQIAALDAGISAIEGEVSAQLEPFRPAVELLKTMPGISDTVAHVILAEIGIDMTRFADASHLRSWAGLCPRNDESAGKRRSTRLRKGAPWLKTTLVQAAWAAVAAKDSYLRGQFLRLKARRGPKKAILAVAASMITACYYMLRDGVVYHDLGIDYFGLADKQKTTTRLVRRLQGLGYDVELKPAA

SEQ ID NO: 311602 - protein, 296 aa, unidentified
MGVDTHKDVHVAVAISALGARLGTKTIPVGAKGYRDLAAWALSFGAVRAFGIEGTGSYGAGLSRFLCEQGHAVLEVNRPNRQLRRQRGKSDPLDAEAAARAVLAGQADTLPKSGTGTVEMIRHLKTARDTAVKGRTQAMLTLKSLIVGVPAILREQLERVGGKMKLLRHLAALRPGPITSTTASAKASLRAIARRWLALDGEIKEHDVHLKALTTSRAPELIKAHGMAAGTAAEMLLLVGDNPERIRSEAAFAKLCGACPIPASSGKITRHRLNRGGNRQANAALYRVVIVRMRGH

SEQ ID NO: 311603 - protein, 386 aa, unidentified
MIYIGIDVAKDKHDCHIFDSDGVIHHDSFVFDNSRAGFSKLLELIKSFDDAKRVGLEATGHYSENLLSFLTSNGLEVEVFNPLTVNRLRTAGTLRKTKTDKNDARYIARLLVGSSKSYSPQSYHTMQLKSLTRARFRLVKEIQPLKNRYRRLAHLVFPELEKMFSKLDSPSILGLLTAFPSAKQIAECDIRKLTSTLVDLSHGKIGRIKAEKLKALAKDSIGCSNSGDAFELSLVTKRIAFLEQQKEVLEAEISTLMQTLDSPITTIPGIGTTLGAVVLAEIGDINAFADSSKLLAFAGCEPSTYQSGKYTATNTPMVKRGSRYLRNALYLIANAAFLHNPTFRDYINKKRAEGKHFYVAMSHGMKKLVRIIFAVLTKNTPYAISN

SEQ ID NO: 311604 - protein, 372 aa, unidentified
MDTNSITWVGMDAHKDSIEVAALRPGRPEPVEWQEATTTEAIVRLGRRLLRDAPGPVQCCYEAGPTGYALQRQLRAAGVGCTVIAPSLTPVKPGVRIKTDRRDARKLAELFRAGLLTEVHPPSESDEALRDLCRCRDDVRVDLLRARHRLGKFLLRRHCIYRQTKHHWGSRHVAWLEALRFDDPVSQATFDSYFLAVQQLEERQRQLDLRLAEFGGQVPYREPVGWLRCFKGIDTVTAVCLVAELHDFRRFHSPRQLMAYVGLVPSEHSSGERERRGAITKSGNRHVRRLLVEAAWHHRHRPALSAPLRSRREGQPARVLAIADRAQERLCARYRRMSEAGKVHPKTIVAMARELTGYLWAVLHPAAAAPRN

SEQ ID NO: 311605 - protein, 338 aa, unidentified
MTVVTVGIDLAKNVFAVHGVNAAGKAVLVKPLVRRAKLPELIATLPACLIGIEACTGAHYWAREFQKMGHTVRIMAPQLVSPYRMGGRHGKNDAADAAAICEAITRPNMRFVPIKSVEQQGQLFVHRAHQGYVSERTALINRIRGLLSELGIVLPQAFKVFLSGVAQVLEDLPGYCNQVIGDLLNELYHIEEKIKNSEKLIQQLARDNSAAQLLMQFRGIGPMTATAIVASIGNGHDFKNGRQFSAWLGLTPRQQSSGGKARLGRITKAGDSYLRTLLVLGARSVLLGAAKNDDPVSRWALQLKERRGYGRALVAIAAKNARMCWAMLHLRDEFRFPA

SEQ ID NO: 311606 - protein, 344 aa, unidentified
MSEVSIIGLDIAKHVFQAHGVDSSGHAVLRKKISRARLLPFFAAQPHCRVVLEACGGAHHWARELIKLGHDVQLIAPAYVKPFVKRQKNDAADAEAICEAAQRPSMRFVAVKSEAQQAAAMVFRGRDLLVRQRTQISNALRSHMAEYGWIAPKGLAHLDKLAALIADPSAVSDGVRAVCVVLLDSLAVLDRQIALLDREIARRAREDEVARRLMTIPGVGPITATAIAALAPPPGTFAKGRDFAAWVGLTPRQHSTGGKQKLGAISKMGERTLRRLLIIGSSAVVLQASKRGAPRGSWLEQMLARKPRMLVTVALANKTARIVWAVLAKNEDYRAPAAAASLRV

SEQ ID NO: 311607 - protein, 347 aa, unidentified
MNHYAGLDVSLEETAICVVDSTGQIVKEARAASEPETLIAALREIDLPLERVGLEACSLTAWLHDELHSAGLPAVCIETRHANAAMKTMPNKTDRNDARALAQIMRTGWYRQVHVKSRQCRLWRSLLVARRTVLNEMRSIDNVVRAVLREGGLKLGTPSRAAFAERVRDLMAEDASVKPLVDPLLTILVTMLDQFARLTKQVLDIVRREKVCRRLMSVPGVGPITALAFRATIDRPDRFRRSRDVGAHLGLTPARYQSGETDVSGRISRCGDELARTALYEAAHTLLVRSRKWSSLRAWGMKVAKTRGMARARVAVARKLAVILHRMWSDETEFRFGRNPAAALAAA

SEQ ID NO: 311608 - protein, 343 aa, unidentified
MDYFAGLDVSVKDTSVCIVDDAGKIVREVKVASEPDALLQVLRNPAYCFKRIGLEAGPLSQWLFSALGEANLPVICGETRHMRAVLKAQINKTDRNDARGIAQMMRVGLYRPVHVKTLRSQKLRMLLTHRKLLQSKAIAIENDLRGTLRNFGLKVGIVGRTKFEARIEELVEHVPDLAVLVEPLLVVRRVLREQIAILHRRLLTIVRDDEVCRRLMTIPGVGSVVALTYRATVDVPARFRRSKSVGAVFGLTCSRDQSGERDRPGAISRCGDEMMRSMLYEAAQSMLVRSTRWSWLKAWAMQIAKRRGMKRAIVALARRLAVVMHRLWVDGTEFRWTREAAAV

SEQ ID NO: 311609 - protein, 340 aa, unidentified
MTEIKRIAIDTSKSVFTLHGVDDAGRPVVRRNLRRRELLAFFEKLPPVEVVLEACGGSHHWGRTLSALGHRVRLIPPQYVKPFVKRSKNDRNDAEAISVAASQPSIGSVPIKSVEQQAAAMLLSVRELLVRQRTQLVNALRGHAAELGMVAPLGEKGLAELRTEIAAADERAVPAAAKQALMLLGQETHRIETRLAAIEVKLMQQHRANPVSRRLSGIPGVGPIGALNFALRIDPAQFRSARHLAAWLGLVPRECSTAGRQRLGGISRAGDERLRQLLVLGATAVIRHAKPGRPATSPWLLSLLGRKPRKLAAVALANKMARIIWAMMTSGQAYRSQPAA

SEQ ID NO: 311610 - protein, 338 aa, unidentified
MTQFTFFVGVDIASASFMACVGTAPWKLTVKPEKFENIEDGFASFLNWLKNNNLPPEKTVVCMEATGVYSEGLAYFLFASGYTLAVEPPLNIQRKFPANASKTDELDCQYIAEYACRYVDKLAFWKPRADILEKVKVLLTTRQHFSVQLTGHKNALIAVNRKKVASELAKQVHQDMIEQIHKHIKVIDREIRRLIDEDPNFKQTFLLLMSVPGIGLQLAAHLLIHMQETLDPRVLAAFIGICPIKHESGTSIYSPPTSRHYGPPVLRKLLYLGACSVRTHKKQFQQYFFRKVAEGKHKKVVLNNIENKILKIACAVVRSQKPYIPNYVSVNPLVLKKA

SEQ ID NO: 311611 - protein, 383 aa, unidentified
MKAVCGLDVHKDSIFLCILHSDGELFEQVFGVLTFQLEEMRKLLQKHHVFEVCMESTSIYWIPIWRVLSPHFTLRLVNPYFIKQLPGHKSDVKDAQWIAECTMKELVRGSFVPPEIIQQLRQYDRRIFDLNAEIVRKVSKVDGVLQRCNIRLSNYVSNIECKSYRDVVRRLSEGVTNPNELMKLVHGRIVNRHGVETILASLTGVVSQAEIDVLRQLHEEIDIAESHRNECQQRMLEICEKHFPEELERLQKIPGIKERAATSLIAEIGTDMSKFKTANHLASWSGLRPRNDESNKKIKSRKITHGNVYLRNTIIQCAWAASRQKDCFFSRFSYHQTIVRRKNKMKVIVAVARKLLIAVWHVLHDKTDYVDFKPDREESANNG

SEQ ID NO: 311612 - protein, 369 aa, unidentified
MADYREAFVGIDVAKLRNAIAIADAGREGEVRFFGEVDASDESMRRVIRRVTAKFDRVYFCYEAGPTGYGLYRLIRSLGHECMVVAPSLIPRKPGDRVKTNRRDALALARLLRAGELTAIWVPDEGHEAMRDLVRARAAAVETLRVHRQHVSAFMLKHGRIYPRKKGWSMRYLRWLQEQPFDHPAHQIALQEMVEAVRVSKERVERLEGVIEEFVPTWSLAPIVRALQTLRGVDLIVAVTFATEVGDVHRFESPRQLMGYLGLVPGERSTGETVRRGGITKAGNGRVRHMLVESAWTYRHPPRVGAKKLYRLEQAPPKVREIAWKAQTRLTARYRMLSGRGKRTTVVCTAIARELVGFMWAVAREAQAT

SEQ ID NO: 311613 - protein, 417 aa, unidentified
MLKIVYRNCAGIDVHKKIIVVTIAKTNEQDITEYQTKSFLTFTEDLIKCRNWLLSNNTKDVCMESTGKYWIPVFNILEKDCNCVITHPKYVRTILGKKTDKKDSVWIADIFKHGLVGPSFMPPEDIRQLRDLMRYRNKLVYNRTGEKNRFQNSLTVSNVQIANVLTDVFGKTSQSILKLMLEQPNLTLEDIKPLLRKNLKSSPEDILKSINGTFDECQSSKMAICLKHYDSINECIEALEEQILKIAIKFKTEINLLLTVPGIKELSAIFIIAEIGTNMNVFVDDKHLISWAGLSPRCNESARKKKSVKITKAGVYIKPLLVQCALCAIKDKTCPYIKARYESLKRRRGHKKAIIAIARLLLTSIYHILNTGEVFDYERFDKLLNRNFKSQQKAKNTPEEMISYLTSLGYEVTMQNT

SEQ ID NO: 311614 - protein, 347 aa, unidentified
MGYFAGLDVSLEETTICVVDDAGMIVREARAASEPEVLVAFFEACGMKMERVGLEACSLTAWLHGGLTEAGIPAICIEARQAKAAMGAMPNKTDRNDARGIAQIMRTGWYRAVHVKSPPCRAWRALLTARRMVLNKRRDVENGIRALLREVGLKVGTPSRKDFPARVRELAADDPVLLSLAESLLSVIAVMTREAERLTKQVIDEVRVEPTCRRLMTVPGVGPLTALAFRATIDQPCRFRKSRDVGAHLGLTPRRYQSGETDVQGHISRCGDELARTALYEAAHSLLIRSTKWSALRAWGMNIAKRRGMARARVAVARKLAVILHRMWVDGSEFRWGKQTAAPAVAA

SEQ ID NO: 311615 - protein, 345 aa, unidentified
MPIVGGLDIHRKQITFDYFDTVTGEVRRGQVAPADREHLRGWLARFHGRDDVAFAVEGCTGWRYVAEELAAAGVAAHLAEPADTAFARGRKRHAKTDKTDCRHLRTLLAEGRLPECWIPPGHILECRALLETYHDLRAEHTAWVQRVHAVLFHQGAPALGEGTLRTEQGLAALRAVSAAHLSPAGQLQVGTALEVIAALEARLHLLRHQLLHAARHLAGAKVLAARLYGAGPVTALALTCWLAGAGRFSSSRNAVRFAGLDVTVWSSDRKGPPGRLSRQGPPVLRWAVYEAGKTHARASAPDHGYYAAVKDRQNGKRAALSEARKILRQACHILTELGDDALAAA

SEQ ID NO: 311616 - protein, 350 aa, unidentified
MVVVGADVHKRTHTFVATDEVGRKVGEKVVAATSSGHAEAVMWARERFADTVVWAIEDCRHLSARLERDLLTAGQQVVRVPPKLMAQTRASARTRGKSDPIDALAVARAFLREPDLPIASHDEVSRELKLLVDRREVLVAQRTATINRLRWRIHELDPERAPKPASLDLAKHRGVLAAWLDTISGLVAELARDELADITRLTETINALTKRIGDRVRRVAPALLALPGCGELTAAKLVGEAAGVSRFKSEAAFARHAGVAPIPVWSGNTAGRVRLTRSGNRQLNAALHRIAVTQIRLDGLGGAYYRKRLDTGASNPEALRSLKRRLARVVFHHLHTDHQTCNQPCQPAAA

SEQ ID NO: 311617 - protein, 338 aa, unidentified
MAIITIGIDLAKNAFAVHGVDESGKPVLVRPEVARAKLLELIANLPPCLIGMEACSGAHHWAREFARFGHAVRMMAPKFVIPYRMSGKRGKNDAADAAAICEAVTRPNMRFVPLKSIEQQSRLFVHRARQGYVEQRTALINRIRGLLSELGIVLPLKAATVRREAHQHLEDLPGWCNTVVGDALSELTRLDERIAQYDNHLAHIAKEDEQSRQLMQLSGIGPTTASAIVATVGKGRDFTCGRQFCAWLGLVPGEYSSGGKQRLGRITKAGDPYLRTLLIMGGRAVLSAAKTKTDPVSRWAISVQERRGYWKAVVAIAAKNARMCWAMLQRGDGFKLPA

SEQ ID NO: 311618 - protein, 343 aa, unidentified
MQAITTIGLDIAKSVFQVHGIDADGRVVIRRQLKRRYVLTFFEKLAPCLIGIEACASSHHWARQLQSLGHTVRLMPPSYVKPYVKRQKNDATDAEAICEAVTRANMRFVATKTPEQQSGLVLHRTRHLFIRQQTAVINAIRAHLAEFGITAPVGRKGVEELLNVIANPNDKRVPEIARACLLAFRAQLRRLKEQILEFDRMIRAWHRSSERSQQLDDCPGVGPALATALIATVADPKSFRSGRNFSAWIGLVPKQHSSGGKNRLGSISKQGDRYLRGLFVAGALAVIRYAKIRGTKHRPWLAALLARRPTKVAAIALANKIARMTWAMMTRGERYKEPVALAA

SEQ ID NO: 311619 - protein, 372 aa, unidentified
MTKIRFVGLDVHAETIAVAVAERDGEVRSFGIIPNRLKPIRKLLGKLGDMKSLKCCYEAGPTGYVLYWQLTKLDMTCEVIAPTLVAVKAGDRVKTDRRDAEKLARRYRAGESTPVWVPDAEHEALRDLVRAREAAKKDQLRARHRLGKFLLRHGKRPVDAGKAWTKKYVEWIKTHAKFPQAALEATLQDYLDEVDHVAARIAELEQAIDEAVRQASPATRAVIEALQSLRGVAQTTAAPIVCELGNLSRFENPRQLMGYSELVSREHSSGGKIQRGAITKTGNAHLRRVLIEAAWAYQHRPNVTGFPLRRQKSLAIPEEVKQMAWKAQHRLHKRYKALSARGKNKNQIVTALGRELLGFVWAGVVPKSETRV

SEQ ID NO: 311620 - protein, 361 aa, unidentified
MSTQNSNKISFKGKHFFVGFDVHKTRWVVTIRHSGMHLKTFSMDPSPEGLKKYLEKNYPDGIYHLVYEVGFCGFWIYRRFKHLGVDCLVINPADVPTAHKEKERKSDPVDSNKLARELENGTLEGIYVPTEDEQHLRTLCRLYTTSVQSTTRVKNRIKGLLHFNGIEYPFHSSYWSTKFISYLQSLPLDDGPARKTLSFHMDELRLHRMHTLFILKELRKYLRMNHGGTIIKLLMSVSGVGFKSAVIFYTEIMDMKRFSNFNKLRTYIGLVPSTHDSGETQSSSGLTVRKNKFLRRIIIESAWVAIRKDPALLAYYNKQRSRMKSQRAIIRVAVKLLSRIRYVWLNERAYVTGIVEDTTVS

SEQ ID NO: 311621 - protein, 400 aa, unidentified
MSRRTGRVWAGVDAGKGHHWAAVVDETGATLWSKKIDNDESAILAALGEILGLTDEVRWAVDICGTSSALLLALLAAHGQQAVYVPGRTVNRMSGAYRGEAKTDARDAYVIAETARHRNDFAAIDVPAQLAADLALLTAHRSDLVADRVRMINRLRDVLTGVFPALERAFDYSSQKGALVLLTGYQTPAALRRRGRARLTAWLANRSVRNADAVAATALQAAQAQQTALPGEDVAAQIVADLAAQILALDDRLKRIDKQIRETFRSHPQAEIIESVPGMGPILGAEFVVAAGDLSAYADAGHLASAAGLVPVPRDSGRRTGNLHRPKRYSRRLRRVFYMSAQTSIIREGPNRDFYLKKRGEGCKHVQAVIALARRRASVLWALLRDGRLFTSAPPVTQAA

SEQ ID NO: 311622 - protein, 330 aa, unidentified
MTNVSELTTEALFVGIDVSKDTLEVALSENAKTQTFGNDSAGVAVLLGQLKPVAHRIAVVLLEATGGLEQVAAAALCAHGFAVIVVNPRQAHAFAKALGHLSKTDSIDAKALAQFARTLHNSDKRERLLYRLPTPAQELLLAMVTRRAQLIGMRVAESNRLASAHVSQRKSIERHIKILDKQIGQIDDDAQRHLRSHFQDKLALLKGLKGVGVGTQTMLMAALPELGSLKQREISKLVGVAPLNCDSGKFKGKRITWGGRSNVRAALYMAALTASRHDPVIKAFYERLTLAGKPKKVALVACMHKLLTIMNAVIKSAQPWQASYPQPNNV

SEQ ID NO: 311623 - protein, 315 aa, unidentified
MKVSVEKSVVTYVGIDVAKAELVVATSQLNAVFTRDPVGLDRLVTWLRELGPGAHVVLEASGGYEREVVGWLQAHDFAVSVVNAGWVRNFARSQGRLAKTDRIDARVLVDFAAANAPRLTAPVSPAQQKLTGLVRARQQLVTVRTLLQNQLEHTRERLARRSQEELVELTDTRIRRLEKAITALIAATPPLQAKVQKLSAVRGIGATTAALLLAELPELGTLSKAEAAALAGLAPRNHDSGTFRGQRHIAGGRPAVRTGLWMPTLVATQHNPILKAFYQRLRAKGKPAKVALTATARKLLIHLNSLLKTSPLPSC

SEQ ID NO: 311624 - protein, 341 aa, unidentified
MEQSSTVKVDFFVGIDMSKAKFDVAIINNQGQKVSHKKFNNNNLGFDDFFIWLNGTVNSDSLFFCMEYTGVYSRKLWMYIQDYGFPLWMESGFQIKRKSGIFKTKNDKVDAYRIANYALTNAFNLKITPDYDENLFILHDLLSNRNRLIDCIKRLEVPLKELEKYGNQSSYDYIKDANLTAIKALKISLKALDKKIDELIEKNTKWQNNIELASSVPGVGKLATLWLLVYSKNFSNEFNARQFASLSGIAPFEISSGTSIKGGFHVNCYSHKQLKGILHIVAMSAIKYNPHMKAYFHKKKKEGKKGFVPINNIKNKIIQQVWSIIRSGKVFDLNYQHPKAA

SEQ ID NO: 311625 - protein, 353 aa, unidentified
MKTYYVGMDVHRATIVIAVLNGAGKVVMESVIETGAERVRAFLKQLRGKVYVTFEEGTQANWLHDVVRPLVTEVVVCEPRHNKLLQSGNKNDRVDARKLAELLRNRALKVVYHGDNGVRTLKELVRTYDCLVSDTTRVMNRLKAIFRGRAIACVGHEIYRQDRRQQWLAKLSEPGAKQRASFLYEQLAALKPLRHKAKLAMVKEVRRQPAYPWLMSVPKLGAVSVAQLIAVVGTPHRFRSKHQFWTYVGLAVVTSSSADHEIVEGRLRRSRKPLATRGLNRNHNHVLKRVFKNAATSACHSGPFKAGYDARVQRGMAPSLARLTIARQLAATTLAIWKRGEKFEPERKKEQTA

SEQ ID NO: 311626 - protein, 609 aa, unidentified
MCAVSVLDRIGVGIDTARYGHRVSFLRPDRQPAAKPLTVMENRAGYQALEERLKQLRERHPQAHFQVRIDAAGQYAVNLEQFLRSLDLPMTLSIGEPKRNKDYQKAHFPKRTTDDTESQAMARFAVVELPAATPSPSTPMVLLREVVSRLQAQVKQTTRAINRLHNLLARAFPELATLTDDLAAGWVLRLLDKYPTAERIAQAHRATLEKIPYLSHEQAEALHQAARCSVASLSGAVAEALVRELVSEVRHSQNAEKTLRQLLSSAFAALPRSSHLQVITISGIGEATAAVLVAKIVDIDRFESPAKLVNYFGAFPEENSSGVDKQGHPLPTGTLHMSRKGNDLVRGYLWNATRSAICHNPAIRALYHRLKAKGKRGDVAIGHCMRKLLHLVFAVWKTDRPFDPEHFPWEASADTPLSATTPCDPGTCATPSASDRAVGHKRDLPAKRVVTTAVEPTRPPVKPSTQVDTVARPKVDFVFLRHHVTMEQVLRYLELMSQLRGRGEQRRGPCPVHSHPGDAKRTFAVHLGKNVFQCFHAECAVKGNVLDLWAAIHRLPLYEAALHLAETFQLPRNREEEPVARTRHPRAVAAMRSLGTPPPVQMNQGDTGS

SEQ ID NO: 311627 - protein, 365 aa, unidentified
MRKSSTVAVERIQIFKQGQLTIGLDLGDRTSHYCVLNEAGEVVVESTLATTPKGIEEVFSSIPRSRIALETGTHSPWISRQLTRVGHEVIVAHARNVRLIGESTRKDDRIDARTLARLARIDPGLLGPVRHRSAKAQIHLTVIRARAALVSSRTALVNAVRGLTKSYGQRLRKCGTEQMNRESAGGLSEELRDVLDPLLREIESLNERIAEYDRRIEHIAKEVYPQVAVLKQIKGVGPLIALTFVLTLDDPNRFRRSRDVGCFVGLRPGRKNSGMSEPQLQISKEGDRYLRTLLVQGAHYILGPFGQDSDLRRWGLKLAERGGKNAKKRAVIAVARKLAVLLHKLWVSGEVYEPLRNNQRVAAVA

SEQ ID NO: 311628 - protein, 462 aa, unidentified
MTLLARLGEQLPERNYLGIDVGYKEHVAVVITLQSFAQDGDRWKRTPCLHFPSTRSGLEKLQEYLDSFSADAGTFFGICEPTGGFYGATMFQYLLDQGYPMWLIENATTRHMREKIMGHIPKTDDIEARVMARIAYLHEAVGEEFTLRPLVLAEAEDADLLALCRDSWRLKTMISRARNQLSQLMAVVYPELKTFFTGSVSSIAPVRLIAAYPTPAELAAASAEEVRALLWQARAYHHAHRVGDLQALARNSSGLLPDPQRAWRLAWVTDFLLANFKADAALDKQIEMLVTQRKEYPWIVNVPYAGPATLGLILAATGDINRFRNYRQYVAYTGYFAGLEKSQTIDRTRMSKRGNRDLKRALFQIAAPLVWFDRSENPYKALFKRKEAEGQPWHRAMPYVCAALARHIYHCLKFQDPYDAERALGAPVSSHPCEDTSVDLRAGLEDRLEVMDAHRSCSLTAS

SEQ ID NO: 311629 - protein, 412 aa, unidentified
MLYCGIDSSDQSLEYHLRDSQGKVLCCGQVVPNVEGLAELFARLDAHDRPEQIGVALECAHGAWVQLLLDQGYSVFPVNPKTVGAFREALSAAGEKCDSIDAGCLALFLATCHHKLHPLHPDAPDIVVLRFQCQDRLRFVEERTAKLNELQALIKIYYPAFLGLFGDLSSRIALDFLDEFPTQDRMRAMTSRRLENWLKRHHYSCLRRLEDMKAILSKPVLPVPAHLQSAKAPRIQFLAQALIALEATITGYDREITRMFEAMPEADWIGSLPGAGTVLAPALLACVGRDPNRFAEPAQAQALIGTAPVSHSSGKSYAPHFRRGCWKFARRTFQLFAYTSLQCCTWAQELYSRQIASGHGHHAALRVIAHKWIKIILAMKRSGQPYNEAIFTNSQSRHLLKAPGGNLVPAFS

SEQ ID NO: 311630 - protein, 350 aa, unidentified
MPKAPLQHVATLGIDIGKNTFHLIGLDARGAIVLHQKLSRGQVEQRLANMPTCLIGMEACVGAHHLSRQLLALGHDVKLIPAQFVKPFRKSHKNDFRDAEAIAEAVQRPTMRFVSTKSVEQLDLQALHRVRARLVSQRTAVLNQIRTFLLERGIAVRQGLRSLRQALPDILSQRTDVLTPRMVRLIEGLVQDWHHLDERIDTVTGEIEDLVAADEACQRLMSVPGVGPIIASAMVAAIGNGAAFSRGRDFGAWLGLVPKQTSTGDRTILGRLSKRGNTDLRSLLVQAARVLLLWPAKWRQHSFGSWLTAASTRLHHNVLAAALANKLARIAWSVLSQNRVYEPRTAAAVG

SEQ ID NO: 311631 - protein, 347 aa, unidentified
MFQVHAVDRAGRVALAKSMTPDRFFAWCAVQLSAGCLVAMEACGGAHHVARRLRLSGFDARLIAGHFVTPYRMAGKSGKNDANDAAAICEAAGRPQMRFVAVKTAEQQGLLSVHRLREGYKAERTALINRIRGVLAEFGLVFPQSPEALRRVLADVIEDADNELTGIARMVLQRAHLHWIDLELQMTWCEERIESHARSDARARQAAALQGIGPIGASALVASVGDFGQFTSAKQFGSWLGLTPSQNSTGGKASLGRITKRGDEYLRTLLIQGAKSAVMTAAKRDDRLSQWLVRLKERAGWQKAVVALANKNARILWAVLTRGQQFNPDHVPEAPLPRCDLSQRPAT

SEQ ID NO: 311632 - protein, 354 aa, unidentified
MKRTTKYVALDVHQATTVASVREESGRVIARSILPTEEGTILEFLKGMRGAIHVAFEEGTQAQWLYDLLVPVVDRVLVCDRRGKSRQGNKGDQVDADELSELLRRGALRAVYHGSPHRSTLRELTRTYQNVVEDATRVMLRLKALFRARGIKAPGKGVYHPKNREEWLAKLAGDGVRLRARTLYAQLDVLRELRPRVKAAMVAEARRDPAWAVLGSIPFLGPVRVALLLAIMRTPWRFRTKRNLWAYCGLAVVTHSTAEYALVDGRPVRRRRAPMTRGLNRNYNRELKDVFKGAATAATGRPGPLLDYYEAMIARGMREELARVTLTRKLTALTLRLWKKGEPYDPTKLTQQAR

SEQ ID NO: 311633 - protein, 403 aa, unidentified
MNTTNNMSIRQQLERAGGIDIHKNKVTVCTYICNTKEEVKDYGTYSCDLEQIRDDLLGNQIKEVIIESTGIYWIALCSVLTLGGIHVTVVNPKFIKNMPKEKTDKKDAKWLCKLLVNGLVRNSFVASEEQRAFRDLCRMRTRYRNHIGQATNRIVKNLERRNIKLRSVVSNMQTVSAMAIVKAIAAGETDVEKMVSLCKTKLKKKKEEMRKALQGIITPHDCMMLQQLLDDKTHYQKQIDAIDIKIKEHTNKVSKQLITNLQAIRGIGPQSTEIILAEIGSNVDAFSNEDKLAAWVGLAPGNKESAGKAYYSGRRDGNVYLRTALIQVAWAAVRCKNSYWRALYGHLSRRMHSSKAIVVIARKLLRIIYKVIKGTKTYTEYGGDYFIKHLHERLQAKHQTHNA

SEQ ID NO: 311634 - protein, 421 aa, unidentified
MAQRNRSVNLKPGRSRASLTITHPNAAGIDIGSAAHFVAVPPDRDDEAVREFPSFTVDLNAIADWLAACRVDTVAMESTGVYWIPLFELLESRGFTVLLVNARHVKNVSGRKSDVLDCQWLQQLMTYGLLRGAFRPAEQVCVLRSLWRQRATLLKSQGRYVQHMQKALTQMNIQLANVIADVVGETGQKILRAIVAGERDGQVLGAMKNVRVRASVDEIAKSLQGNWRAEHLFALKQALDAFDFIGTQLAECDTQIEQQLHTLQAHEGEPAKGKKRGRARNSPRFDLRSQLFKMCGVDLTRIDGIDVTTALAVISETGADMSRFPTVAHFASWLGLCPGTKITGGKVMSSATKRCANRAAQALRLAAAALRTSQSALGAYFRRMCSRMDKPKAVTAAAHKLARLIYTMLTKGQEYTDQGQA

SEQ ID NO: 311635 - protein, 451 aa, unidentified
MDNKQISLEVVNPNAAGIDIGSRSHWVAVGQNAQDVKEFGVYSQDQLAMCDWLRSQGVTSIAMESTGTYWQNLFSTLIGQGFDVILVNGRQTKNIKGKKTDIKDCQWIQKLHSLGLLSASFLPDSDTDTIRTYSRHRNNLLNQAANCSKRMQKYLRLMNMRLDVVVRDIVGLTGQSIIKAFIAGEHSGQQLAKLRHFNCRKSEEEIAKALQYNGRKDYLFALSQEWDSYQHIQLQIKNTDAQINQLLKDIIDKDNNKKQHTVEKKPFKRKNKNGINNTDMNLISYQYFEGVDLMEIEGFNEALVMCLISEVGLEGIKKFQSAKQFTSWLRLSPNNKISGGKVLSHHLPKGSSRLKIAFRNTANAIGNLKEGGLVDFFKRINYKKGRAAAVSALARKLAVIVWNMITKTTKYNPPSQYLFLDEKRKRGIVKNIRKKITKFALSMEEIGFVIT

SEQ ID NO: 311636 - protein, 349 aa, unidentified
MWIIGCDYHPRFQQISMVDTEGGECGQRRLAHKAEAERFYRGLAGEAVRVGMEASGHARWFERLLAELGHELWIGNPAAIRAAAPRKQKTDARDAEHLLQLLVSGQFEKLRIWVPTAAERDVRQLVMHRHRLIGMRTRVKNQLRAIALNEGMERKPGLWSQAGQEQFQALELPAWTGRRRQDNLELLAELERRTDPLDQAVEQEAVRRPEAARLMTHPGVGKVTALAFVLTLGDPARFACGKQVASYLGLIPAEDSSGGKQRLGHLTKQGNALLRGLLVEAAHVAARHEPDLGRCYRRLAMRKNRAIAAVAVARKLAIRLWWMWRRECNYGQLRASGSHAGETRVPPLG

SEQ ID NO: 311637 - protein, 340 aa, unidentified
MDKVSTVGLDLAKHVFQLHGADAAGHVVFRKQLRRGEVLRFFGALEPCTVAMEACGSAHYWGREIARLGHDVRLIAPAYVKPFVKRQKNDAADAEAICEAAQRPSMRFVAVKSAERQASALVFRTRDLLVRQRTQAINALRSHLAEFGVIAPKGPSHIAALAARLGEPGEKLPIEARIMLEVLADTISTLEGRIAQLDTEIARRAREDETARRLMTIPGVGPITATAMAALAPPADTFRRGRDFAAWLGLTPLQRSTGGKQRLGRISKMGERSLRRLLIIGASAVVSQAARRGAQPGTWLARMLASKPRMLIVVALANKMARTVWALMAKGEDYRAPAAA

SEQ ID NO: 311638 - protein, 320 aa, unidentified
MNPNADKIQFALGCDVAKDTITFFDSQTRETFTISNTTGALKTALKSYAGCLDMLAVCEATGGYEDLLLDTLKDLSIPAHRADAAKVKAFIRSCGTRAKTDPIDARHIAEYGLARSANLSLWQAEAPDNAKIKLLVRRRDDLVNMRVQEENRLKAPRNKPIAKEIASHVAEIKRRIATLDKQIEAIVQNNQRMKERQVILLGVPGIGKVIAPVLLALMPELGHIDRKKAASLAGCAPHPRDSGTYRGRRFATGGRRQLRPLLFIAAMAASISRTHLAQTYKRLLAAGKSKLTALGALMRHIIVIANARLKEYENNQSRLT

SEQ ID NO: 311639 - protein, 428 aa, unidentified
MNIESGCWYAAVDWASDKHDVAVTDQVGKLLGRLEVEHSGEGLARMVDWLVASTGSVPGDIHVAIEVPHGPIVDTLIEHGFNVYSINPKQVDRFRDRYTVAGAKDDSRDCDAMASALRTDRHCFRLLSLRNPMLIELREWLRMYEEHGIDLRRYVSRLREQLLRYFPAFLALDGELDAAWKLDLLERAPTPRSAATLSRLRVTKILQRNRTRGKDVGEILSVLQQQAVITNPGTTKAAAAHVAALLASIRLTKQLVKDAKVHIESITDRLLDPDTDHGEAAPGTCVSSAEQTSIARDAAILLSFPGIGRLNLATLLTEASDSLTARDYKALRCLGGVAPVTKQSGKSRYVVQRWACNKRLANALLLWARVAVRHDPASRDKYQALRARGKSWPRALRAVADRLLYLACAALKSGTLYNPDLAGKKSAC

SEQ ID NO: 311640 - protein, 330 aa, unidentified
MDNHYFFVGIDVSKDELVIAVGDNQVISFKNTACGVSRLVDRINSVCGDLEPWFVMESSGAYSTRPATQLVGNHDVQVSIVNPGRVKAHGKASGIRSKTDAEDAKLIHSYAIKHQDKLHPWQPTPDSFRKLKDLVDQAEFFHNQINRIRNRMHAQDFMECDRTIAKANNSVIRQIERQISKLEIQMDELVAGDEMLDTQIQLMRTIPGIAQNSARKILAMTRGMITERTPAALTAFAGLAPAQRQSGSSLNGHSYIDKQGCASLRKILYMCSLSGAEFNPALKPFYQRLITRKNNQLTKKQARVAVMRKLLLIIRAILVSGKPFNPDLHC

SEQ ID NO: 311641 - protein, 448 aa, unidentified
MVVRDPALGFPSIKSKGGDTVKNRMKFDHLSTLCVGLDIGSRINFITALNFDSDRLINMRPVPNASNGVEAMESMILAVLEANPQFRYLLIAMESTSFYGVHVANYLSTTDKLKPYGVKVFCLNPKTIANYRKSFTGLGKNDGIDSFIVADYVRAGRINIEPWRGAQYLALQRLTRQRRHINEAIAREKNYVLNNVFLKFSEFALLSGEESPVSDKFSATAEAILTEYKTTEDIANAPLKELIDFISASGHGRFSDPDQVASLLQKAARNSYRLDKALYEPITTSIACSFNCIRAFEKEQKALDKAIAATVAGLNPTEYQILKSIPGIGPVYAAGILAEIGSVRCFNSNNALAKYSGIIWRDNQSGEFDSEDTPMMKAGNRYLRYYLIQAAGSVVRYCPEYTDYYNKKFAEVPKHQHKRALALTARKLIRLIFGLLDKNQLYSPAKSR

SEQ ID NO: 311642 - protein, 366 aa, unidentified
MSDSIQFIGLDVHSKSIALAFATGRDPAVFVCELTNDVGRLLKALDRLGPRDGLRCAYEAGPTGYGLCRALTRAGIRCEVIAPSKMPRAAGDKVKTDRRDAMRLAHLLRCGDLTTVRVPDEASEAMRDMLRSREDAKRAQLRARHQLSKFLLRHDRRWPKSNWTKQHIEWVEQQVFEHPAQARVLQECLHAVNESSARIQRYDALLQELAPTTEQADLIEALQAFRGIRLLTASSIAFELGDLRRFSSAKKLMSYLGLTPSEDSSGDRVRRGGITKAGNGGLRRLLVESSWAYRHAPREAYLLKKRAERVSPNIRKIAWDAQVRLNARYKKMMGRGKGAQKTLVAMARELAGFIWAVGQERILIAD

SEQ ID NO: 311643 - protein, 388 aa, unidentified
MVDESGKVLGKGRVPDGLEGVRRIHELVGIHAARAEQVVVGIETDRGLLVGALLAAGYQVYAINPLSASRYRERHVTSRAKSDPGDAKMLANLVRTDRHNHREVAGDSELAEAVKVLARSHQDLVWSRLRFVNRLRNTLREFYPAALEAFGTDLDSPDALAVLERAPTPWQGRQLSLAKIAGALRKGGRERNIEVRAGQIQAALRSEQLQAAPKVASAYGFVVKSSVAILANMNRELAQLESELSKSFKGHPDAEIYLSLPGLGTVLSARVMAEFGDDPNRFDHPKSRKAYAGTAPITKASGTRQVVLARVARNRRLADACYLWAFSSLTRSIGARRYYDLLRGRGQTHHQALRALANRWVGILHGCLRYRSTYSETIAWPTPLQVAA

SEQ ID NO: 311644 - protein, 420 aa, unidentified
MKPWPDITHYAGFDWAKDHHSVVIVDAQGGIVADFEFIHSLEGWKSFVEKTSAFANLAVAIETSQGAAVDQLLQRGCTVYPVHPVAAQRYRERKAPSGTKTDHLDAWGLADALRVDGHGWRVLQPTDPMTEQLRLLCRDEVALIQQRTALVNQLQQALAEYYPAALEAFDDWTNAFAWEFVIAFPTPQALVKAGKRRWENFLHKHKLWRPETTEKRLQIFSQADQFKASDPIVAAKSQLAVSLCKLLRTLGLQLDLYRQQIKALFRKHPDHDLFGSLPGAKDFLAPRLLAAIGVNPDRYGGHEVLQCIAGTAPVSYQSGKLNKVRVRWACDKFLRHTVHLWADCFWKASAWGRAYYQQKRDEGMSHACALRCLGQRLLKILFRMLKDKKPYDAELHARNQQKHGSWVLKLVNKPTAQPGE

SEQ ID NO: 311645 - protein, 408 aa, unidentified
MSIVFGIDVSSRDSSVCVLQSGVTREYKITNDTIGFKTLLIDLKEYAEHPQIILEATGVYSRRITRFLDEYDYDYVLLNPLKAKKEINQGLRRNKTDRNDAYHLALAQDRNQHQPNRKEPEVYHQLQSLSRAYEELTHDIISSKNRLHKYLQLTFPELETIFNNSRGVNYWYLVELFPHCQDVRNLEVSTIAKQIKDFKGYGINRAQKLAIKLKHLADLAYPAVDQDDPERDEVVYYANRLLRLTADRERRSEEMIKLAKTLPNRDLEILMSIPGIAAITAVRILAELGDIRRFSNPNKINAFVGIDPGRYQSGEKDSSLRISKHGNAVARKILYRAIGQIDLAAKTSPCHIADYYERKKQFSQTKGFKKIAIASIHKLLRTIYILIITDQMYDYNVANNNQKDFCRN

SEQ ID NO: 311646 - protein, 413 aa, unidentified
MDLLVERCAGLDVAKQEVVACVRTPDPGAGGQRRQAIRTFATFSADLEALADWLQAEGVTQVVMEATGQYWKPIWYVLEERGFALLLVNARHVKILPGRKTDVADAAWLAELLEHGLLRGSFVPPPAIRQLRDLTRYRKKLIQAHTAETQRVHKTLEDAGIKLDSVAADVLGVSGRAMLAALVAGERDPVVLAALAKGKLRKKLPQLRQALTGRFGDHHALLVGLSLGHLEHLERAIARLDDHVDEVIAPFAKARDRLDTITGVGKRAAETIIAEIGADMGVFPTAGHLASWAGRCPGNNLTGGKRRSGTPTKGNRWLGEVLVECAWAAAHTRETYLAAQFWRLARRIGRKKAAGAVGHSILVIAWHLLSNDCDYYDLGGDWFARRSDHDRHKTHLVKQLQALGYSVTLQPAA

SEQ ID NO: 311647 - protein, 355 aa, unidentified
MVTDQAVAVYGGIDTHANTHHVAVVDHTGRRLGDIEVPATSAGYQSAVRFLNGWPGVVTVGVECTGSYGAGVTRVLRAAGLDVIEVNQPNRFQRRLKGKTDTFDAYSAAEAVLSGRASAPPKGGDGLVESLRVLRTSRSSALLARTATMNQIKAMLVSSPDELRARYQGLSNVKLIAALAASRPPKVPLSPIETCAYSLRLLARRWRMLTEQIQDLSSHMERLLKDHAPALMAVFGVGCDTAAQLLITAGDNPDRLRSEAAFASLTGTCPIPASSGKTNRHRLNRAGDRQANSALYHVVIVRLRHDEVTRSYVQRRTGEGKTKMEIIRCLKRYLVRQLYPLICQTLQADQTARTA

SEQ ID NO: 311648 - protein, 469 aa, unidentified
MNLVGTMLAVCVLVYGEGQEAEVRYKEFATHQKALTTLRNWLSSQKVTHVAMESTGVYWKPVWYALEKHFQLLLANPFQVKALPGKQTDKRDSHWLAELLAHGLIAGSFVPPEQTRAWRDLTRYRVKLSEEMNRIQNRIHKVLEDASIKLDTVVSHILGGTGRSIMEGIIEGKEDARQWAERAQGSWRGKRAQLELALHGRVSEHHRFMLKELLEDLRFVEEKILRLDKTLSGSVDWELVTRLCTIPGVDVITAWTLLAEWGSDMRVFPNSKKAASWAGLCPGNKESGGKRLSGRTRKGNRWLRRGLCQAAWGASRKKDCFLNAFFQRHKAKHGAQKAVIATAHRLLLIAYCILRDGTTYQERGGDFYDQLNAARTRQRLIERLRRLGVPVTISSPVPAVPSTATSQALEPAPPAQALASSPGNQPPASVPAIQRKRGRPCQCAARQIACIHRLPLAPTPVATPPVATL

SEQ ID NO: 311649 - protein, 394 aa, unidentified
MFIVGIDIAKRSHMVRVIDSEGRTVYKPFSIRNSCSGCNALLERLRKLTNRKSEFLFAMESTAHYWLALYTRLRKEGYQVVVLNPIQTDAMREMLMEENKTDEIDTLVIAETIRFGRYRASSVPQEKLLALRELCRNRFYLIDMGSDLKRKITALLDQVFPEFESQFSTIFGKTALAVLRQYPTPEKLSRAQTGKLTEVLQTASNGRFGEWKARQLKELARDSFGIPDCEGTYSALLLLYLDQFQSLQDAAAVLEKRIAELFSQFDSTLTSITGIGPVLGAVILSEIRDIACFVSADKLAAYAGLNPKVKQSGDKKSSAVHMSKRGSPYLRRAIWMAGAIAVQYDPMFKAYYEKKSAEGLHYMNIIGHVSKKMTSVIFAVMRDNKLYEPVLPAA

SEQ ID NO: 311650 - protein, 349 aa, unidentified
MVVIGIDPHKRTHTAVAADEVGRQLGQLTIDATDAGMLKLWAWAARFGPPESRRWAVEDGRALAGRLVRGLIGAGAVVVWVPTKLMARARASARTRGKSDPIDALAVARAALREPDLPTARLDQTALDLRLLTDRREVLVATRTRAISQLRWHLHDLAPGLDAAMRVLTGHRRQQFLITTVTALPGSVRRDIALDVLADLVRLTDQINQLEQHIRELVTPIAPHLLAIVGINVLGAAKLLGEVADITRFRNSAAFAMHTGTAPIPLWSANKPRYRLNRGGNRQLNTCLHRIALMQLIHHPDARAFRDRWATAHPHATKKAAIRALKRHLADVIYRALHNDHQHQHAQTT

SEQ ID NO: 311651 - protein, 387 aa, unidentified
MQASTVDTPTVEHCGTIFVAIELSQKTWLVTLHSPDKDKMSRHKLEGGDHAGLLALIGRVRERAAQTLGAVPAVVSCYEAGYDGFWLHRLLMSAGITNHVFDPASIAVDQRARRVKTDRIDGERMLRTLMAYLRGEPQVVRIVRVPAAEQEDARRASRERGRLVKEQTAHTTRIKALLRLLGMAVGNPRRRDWLNWLAAQRDWQGQAVPRRMLSEIRHEHARLMLVRERLDEFMQASAAVDSASAATQMAERSELLLRLKCLGPAFATTLASEVFYKDFRNRREVASYFGLTPSPWQSGGIDRDQGISKAGNPRARCAAIELSWLWLRHQPESALTRWFRSRTHNNASKRNKRIAIVALARKLMVALWRYLTTGLIPEGAVLKAAKA

SEQ ID NO: 311652 - protein, 338 aa, unidentified
MALYAGIDLHSNNSMVVIQDEQDNVVGRKRLPNDLKTVGEWLKPYRDDLAGVVVESTFNWYWLVDGLTDAGYPVRLANTVAIRPYEGQKHRDDTSDARLLAKLLRLGELPEGYIYPRTQRAVRDLLRKRSQLVRQATMNLLSIQNLFSRNLGEGISANRVKQLESEDVEALFKDPNVAMAVKSNLAVLNCLRCRIIELEGVVSGQVRLCKGYKKLLTVPGIGDILASTIMLETGDIGRFREVGNYVSYARLVGSSYMTNGKRKGSGNTKNGNAYLCWAFIEAANFAIRFNPMIRSYYQRKQARTKRIVALKAVAHKLARACYHVIKEDVAFDVVRAFR

SEQ ID NO: 311653 - protein, 411 aa, unidentified
MHNRQNYLYVGVDLHKEHHTAVIINCWQEKLGEIQFENKPSTFSEFLLEVETYVSNGLSVVFGLEDVGGYGRALAKYLVDHEQVVKEVNPALSFLERKSQVMIQKNDSWDAECVARILVNKFNQLPDAKPNDLFWSIQQLVSGRNALVKAQSALKNQLHIQLNHHYPSYKKFFSELDGKTALAFWQQYPSPSCLEGTNIKRLTAFLLDVSNNTCSVKKASEILKLVKEDGHTMKEYQETRDFLVRSIVRDIEFKKTEMKYIERELKQLVKLLDYQLETMPGIELVTASALIAEIGDVRRFPNSNKLARFAGIAPVYFGSGGKGKTHKSKQGNRALHAVFYNLAVQQVQVAKGSKMPRNPVFHAYYQKKLKEGKTKGQALVCIMRRLVNIVYGMMKYKIAYELPVVEEKEVV

SEQ ID NO: 311654 - protein, 351 aa, unidentified
MARYIGLDAHSASCTIAVVGLNGKRLGCHVVETNAKVLVELIKTIPKPRYLCFEEGTHSAWLYEILSRDVDQTVVTAIRQSRGPKDDKRDAFDLADKLRTNSIETRVYKEVGPYGRQRELARVYAVQVRDSVRVQNRLKALYRSRAIKTRGDRIYDPEQRKEWIGKLPANSQPVAEILVQQYDAMEKLRADAEKQMLAESGKQPITKKLITVPGLGKIRVAQLVPIIISPHRFRTKRQLWKYVGLGIVMRSSSDWVQGKDSSWTKDKVQQTRGLNRDHNATLKGIFKGAATTVIQRADPDCPLYQHYTSMLQNKTAPNLARLTIARQIAAITLALWKKEESYSAAKVKKTT

SEQ ID NO: 311655 - protein, 347 aa, unidentified
MKKIKLVAVDLAKRCYQVGAIDQHGKLIYNRKYSPAKFALAMQQLEPTTIAMEACAAAHYWGRKLQALGHEVRLVPPQHAEAFRRVHKSDAHDVLSIAEAAQRPNIHFVPVKPIAQQDLQSLGRIRERLIAERTAIINQARGLAREYGVNCRKSREALMNELPLALADADNELSAIARAALRELLQEITQRSARLKQLMQRMRELADSDPAYEQLQSIPGIGPITAPALLAKMGHGQQFHSGRHCSAWVGLVPRQHSTGGRTQLGSITKNGDRNLRTLLIHGARTVVRWIDRRQDALGQWVRQLLARRGKNKTVVALANKLMRIAWAVLTKAEPFDLNKAFRPQPAR

SEQ ID NO: 311656 - protein, 340 aa, unidentified
MNASSNFFIGIDVSKPFFDASLMAVIDHQKQSIETARFDNTADGLKAFAKWLKSFKVSMDQNTLVVIENTGIYHRLIWSFCNKKGLSLHIGNAAHIKWSFGIARGKNDKIDSIRICKYACKEADTLKASAVLNPVLMQLKDFMTSRTRLLSQINSNKQYIKELKNINDPTVQKVIEQAHRTAIEGIAQSIKDIEALINKIIAENIELKHNYDLLITVPGIGHLTAVYLISCTTNFSAKITGKQLACYAGVVPFEHSSGISIKGRNRVHHMANKELKKLFHLSALTVIQYYPEFRTYYNRKKEEGKHPMSILNAIRNKIALRVVAVVNHQKPYVNNQLIAA

SEQ ID NO: 311657 - protein, 374 aa, unidentified
MSSNVCHQIIYLAIELSSSSWVIAYRVPRNDKAKLHRLEAGDGAGLLAFIAGLRHRLDPPDDASTLVVSCFEAGRDGFWLHRLLTAHGVINHVVEPTSILVSRGARRAKTDRLDAVGLLRVLAAKFAGDPGACRTVVVPSVEEEDAKRPHREREFLVQERVRIENRIAALLATQGVRERPSLRSWDADMRALRTGDGRPLPTHLVAELNRLRRRLSLTLEMIRELDAVREQALEAQHDSASRTVKALCTIRGIGVNFASVLTREVFYRTFDNRRQIASYLGLAPTPFQSGGMDRDRRINRAGNSRARKTLVQLAWLWLRYQPESSHAAWFRDRVGSLQGRIRRITIVALARKLLIAIWRFVTLGLAPEGAIIAA

SEQ ID NO: 311658 - protein, 313 aa, unidentified
MSEAIIIGLDIAKHVFHAHGADERGRAIFSKRIGRGKLLDFFAAQPNCTVALEACGGAHHWARQLTQLGHEVRLIPPAYVKPFVKRQKNDAIDAEAICEAAQRPSMRFVAVKSEQQQAAGLVFRTRDLLVRQRTQLINAIRGHLTEYGWIAPKGPSHLATLADLLEEEEMASSLPEAARAMFRLMLDLLAGLDGKIADLDKEIARRAREDEVSRRLMTVPGIGPISATAIAALAPPAETFAKGRDFAAWLGLTPLQDRQAVSGSLGRHPKWANARSGAYSSSAAAPSCFRRANAAPQRVRGSNRCWLANRACW

SEQ ID NO: 311659 - protein, 371 aa, unidentified
MGQSSKILSVGLDVHKDSIAVAYAPEDRGAEVVSLGSIGTRQCDIDKLIRKLQSKGATLVFGYEAGPCGYWLYRYLTRKGFTCQVVAPSLIPRKAGDRVKTDRRDAVTLARLMRSGDLTSIYVPGIEDEAIRDLSRGREDAMRDLKAAKYRLKAFLLRQDIRYEGRANWNAAHLRWLSEVVCPTPAQQIVFQEYVRAVTEQDERLRRLETELHEEVRSWRLYPVVEAIQALRGVELTGAVILIAEVGDLTRFDNPRQLMSYLGLTPSEYSSGARRRQGGITKAGNTHARRALVEGAWAYRYPAKISRHLQLRLEKLPAEVQAIGWKAQVRLCKRYRQLTARGKHANQVVVAIAREMAAFAWAIARTVPLVH

SEQ ID NO: 311660 - protein, 319 aa, unidentified
MENLSHGRVIGIDVSRDWLDVHCLPDGHVSRVPNTPAGHAVVADLARERDAVVCFESTGGQEWQLWALLESEGLAARQVPPAQVKAFAQCRGTRAKTDRIDAELIARFFAFRPEAGRSLPAAKLRLLRALTSKRAQLVEMRKRLLAQIRAHQKLGTAAMFEDVDTELKQRIDSLIQELEDRITRAIASDDRLSETADVLRSIPGIGPVASTMLIAEMPELGTITGEQAAALTGLAPVAHDSGTLRGKRAIAGGRRALRHVMFQAALVAAHHNAVLKAFADRLRKAGKPHKVVITAVARKLVTIANALCKSRQKWTPATA

SEQ ID NO: 311661 - protein, 339 aa, unidentified
MAILYVGIDLAKNVFAIHGVDEHGKAVLVRPSVQRARLHQLVAALPPCTIGMEACSGAHHWARLFAQHGHTVRLMAPKFVAPYRMSGKRGKNDAADAQAICEAVQRPNMRFVPVKSQDEQARLCIHRVRQGFVEQRTATINRLRGLLSEFGIVLAQKAATVRREAAAHLEDLPGWANIAVGDCLSEVHRLDERLAEYERHVSRMAGEDARSARLMLLQGVGCTTASALVSTVGDARDFKNGRQLAAWLGLVPGQYSSGGKTRLGRITKAGDGYLRTLLVLGAKSVLAAARNKQDRLSRWAMALEVRRGYWKAVIAIAAKNARMAWAVLAKGEDFRLIEA

SEQ ID NO: 311662 - protein, 347 aa, unidentified
MGQYIGIDLHKAKSFVTRLNGRGRVLEQVELPHATGALQQYLERVPPDARIAVEATGNWMWLYELIEDRQPDLVLAHPLKTKAIASARIKTDKIDATTLAQLLRADLVPAAYIPPRAVRDTREILRYRASLVRLRTQVKNKIAAILSKTGLQTPTKTACGVKSRRFLATAVVRPCYRLGLDGYLRLLEALTAEIHTVTQRVEAQAQADPQAQLLRTMPGIGAYSALLIVSEIGDVHRFPDSRHLCSYAGLVPSVHASGGKTRLGRLTKQGSCWLRWILVELSLHAINGAPQFRSLYHRVAKKHGAKVGRVAVARAMLKTIYAMLTKQEAFRPIVKGTTGQRHGVMAG

SEQ ID NO: 311663 - protein, 338 aa, unidentified
MAIVTVGIDLAKNVFAVHGVDETGKPALVRPEVPRAKLLELIAHLPPCLIGMEACSGAHHWAREFAKFGHTVRLMAPKFVAPYRMSGKRGKNDAADAAAICEAVTRPTMRFVPVKCIEQQSRLFVHRARQGYVEQRTALINRIRGLLSELGIVLPLKAATVRRQAHKHLEDLPGWCNTVVGDALSELTRLDERIKQYDHYIEQAAKEDLRSRQLMQLAGIGPTTASAIVATVGKGHDFSCGRQFCAWLGLVPGQYSSGGKQRLGRITKAGDPYLRTLLIMGGKAVLAAAKNKTDPVSRWAMSVQQRRGYWKAVVAVAAKNARMCWAMLQGGDAFKLPV

SEQ ID NO: 311664 - protein, 448 aa, unidentified
MSSHKGNAGLPVIHDRAAGIDVGSRFHVVAVGADRCTESIQTFQAFTNDLHRMADWLVATGIKTVAMESTGVYWVPVYEVLEGRGIEVILANAREARAVPGRKSDVNDAQWLQRLHACGLLRASFRPGRDIAALRVYLRLRERHLDYAAAHIQHMQKALTFMNLQLHHVVADVTGVTGMKIIRAIVKGQRDPQVLAQMRDVRCKASMETVRAALVGNYQPEHIFALSQALALYDFYQARVDECDAQIEVVLASLTTDKASPSAPLPKARHRTVQPNAVSFDVRPVLYQLAGVDVTQIHGIGPYLALRMIAECGTDLSRWRSAKHFTSWLTLSPGCKISGGKVLSARTRKTTNRVAAHLRLAAVTVGRTNTALSAFYRRLAARIGKAKAVTATARKIAVLFYNAMRFGIDYQDPGATHYEQKYRERVIKQLHRRAMEFGFTLQAAASVS

SEQ ID NO: 311665 - protein, 360 aa, unidentified
MKIQRTSVGLDVHARSVVACALDGDTGEVFQRRLTPDHGEIVAWLGDLPGPVAVTYEAGPTGFGLARALTTAGIACEVAAPSKLIRPAGDRVKTDARDAAHLARLLHLGQITAVTVPTATQEAARDLVRAREDCRGDLMTARHRVSKLLLRQGIVYSGGNAWTTRHEAWLRTQRFDNPALQLSYDAGFDAMLSCLARRNRLDDAITTLAADSEFTPIVRRLGCLRGVATLTAFGLAVEIGDWHRLTGRSIGAYVGLVPCEYSSGESRTQGGVTKTGNGHVRRLLVEAAWHHRNRYQPGFELRRRWDLASPAARARGQAANRRLHTRWSGFDARKKRPVVANVAIARELAGWCWSLAVMPD

SEQ ID NO: 311666 - protein, 299 aa, unidentified
MIVIGVDVHKHSLTAVAVDELGRTVAERSGPVGGEVLVWAQTLEVERLWAVEDCRHVTRGLERTLLEAGERLVRVPPRLTAPQRRRGRVRGKSDQIDALAVARAALQEPTLEGPRAGEAELRELKLLVEHRDDLVAERRRCQQRLRWHLHELDPTLMVPLGALDRAVWLDRLGRQLARREQSTQVRIARDLVGRCRTLTRSIGELDRELHARTKTLAPQLLELAGCGALSAAKLLCEIGPIDRFRSDAQLARHAGVAPLDASSGKHQRHRLDRGGNRQLNCALHRIAVTQGRVHPPARA

SEQ ID NO: 311667 - protein, 338 aa, unidentified
MNIVFLGIDLAKNVFQLCGLNQAGKPVYTKRTDRKELLQTLANIPACLIGIEASTGAFYWQREFEKLGHKVKVISPQYVKPFVRGQKNDGNDAQAIAVALMQPTMQFVPPKSPEQQDIQALHRARQRIVNHRTATVCQIRGLLLDRGIPIGSAVSRARRAIPLILEDAENGLSSRMRRTIAELYDLFNDLERRIHFFDKEIETVFRQSEACQRIAKVKGIGPKTATAVVAAIGKGTEFKNGRHFAAWLGLVPRQHSSGDRQVLMNMTKKGDKHLRTLFIHGARAVVRVATNNNDGHMNQWVNQLKERRGFNKTTVAVANKNARIIWSMLRNETEYQVV

SEQ ID NO: 311668 - protein, 417 aa, unidentified
MLLIGDDWAEDHHDVELEDEGGRRLARARLPEGIDGITRLHALVAEHAPAARADLPPEQVAGQVIVGIETDRGPWVAALRAAGYQVFAINPLSVARYRERHSTSGAKSDAGDAHVLAEIVRIDRDHHRPVAGDSELADAVKLLARAHQTAIWERTRHVLRLRSVLREFFPAAAEAFDDLAAADALALLGRAPDPARAARLTRSQVTAALRAARRHHVEDRASAVLAILRAPGLRQPVITGGAYAAVVAGQVRVIAAVNEQIAGLEQVMAEHFGRHPAAEIYLSQPGLGVVLAARALGEFGDDSHRYADARARKNYSGQSPVTRASGKKTVVLARYATNRRLGAALHLQAFAALGASPGARAYYDAMRGRNIGHHAALRQLASRLVGVLHGCLKTGTLYDEDTAWQHCRTAAPDTAAA
